(19) United States
(12) Patent Application Publication
(10) Pub. No.: US 2026/0185061 A1
(43) Pub. Date: Jul. 2, 2026

(54) SERINE RECOMBINASES FOR GENE EDITING

(71) Applicant: Metagenomi, Inc., Emeryville, CA (US)

(72) Inventors: Brian C. THOMAS, Emeryville, CA (US); Christopher BROWN, Emeryville, CA (US); Cindy CASTELLE, Emeryville, CA (US); Gregory J. COST, Emeryville, CA (US); Daniela S.A. GOLTSMAN, Emeryville, CA (US); Khak Khak KHAYI, Emeryville, CA (US); Sarah LAPERRIERE, Emeryville, CA (US); Jason LIU, Emeryville, CA (US); Soungsothira TOCH, Emeryville, CA (US)

(21) Appl. No.: 19/126,597

(22) PCT Filed: Nov. 6, 2023
(86) PCT No.: PCT/US2023/078853

§ 371 Date: May 1, 2025

Related U.S. Application Data
(60) Provisional application No. 63/382,690, filed on Nov. 7, 2022.
(60) Provisional application No. 63/510,567, filed on Jun. 27, 2023.

(51) Int. Cl. C12N 9/22; C12N 15/85; C12N 15/90

(52) U.S. Cl. CPC C12N 9/22; C12N 15/85; C12N 15/907

(57) ABSTRACT

The disclosure relates to gene editing systems comprising serine recombinases and methods of using such serine recombinases for integration of nucleic acid sequences. More specifically, the disclosure relates to sequence-defined serine recombinases having attachment sites such as a bacterial genomic recombination sequence (attB). Methods are also provided for recombinant pro-duction of said recombinases.

### CROSS-REFERENCE

[0001] This application claims the benefit of and priority to U.S. Provisional Patent Application No. 63/382,690, filed Nov. 7, 2022, and U.S. Provisional Patent Application No. 63/510,567 filed Jun. 27, 2023, each of which is incorporated by reference in its entirety herein.

### BRIEF SUMMARY

[0002] The disclosure is based, in part, upon the development of serine recombinases for use in gene editing systems to integrate nucleic acid sequences.

[0003] Described herein are gene editing systems comprising: a) a serine recombinase comprising at least about 80% sequence identity to any one of SEQ ID NOs: 21-7060, 7105-7142 and 7211-7214 or a nucleic acid encoding the serine recombinase; and b) a nucleic acid comprising a donor polynucleotide and a first attachment site sequence. In some embodiments, the first attachment site sequence is 5′ of the donor polynucleotide. In some embodiments, the nucleic acid encoding the serine recombinase further comprises a second attachment site sequence. In some embodiments, the second attachment site sequence is 5′ of the serine recombinase. In some embodiments, the first attachment site sequence and the second attachment site sequence are capable of recombination. In some embodiments, the first attachment site sequence is a bacterial genomic recombination sequence (attB). In some embodiments, the first attachment site sequence is a phage genomic recombination sequence (attP). In some embodiments, the second attachment site sequence is a bacterial genomic recombination sequence (attB). In some embodiments, the second attachment site sequence is a phage genomic recombination sequence (attP). In some embodiments, the attB sequence comprises about 20 to about 500 nucleotides. In some embodiments, the attP sequence comprises about 20 to about 500 nucleotides. In some embodiments, the attB sequence comprises at least about 80% sequence identity to any one of SEQ ID NOs: 1, 2, 5, 6, 9, 10, 13, 14, 7151, 7155, 7159, 7163, 7167, 7171, 7175, 7179, 7188-7200, 7206-7210, 7215, 7220, 7225, 7226, 7233, 7238, 7243, 7248, 7253, 7258, 7263, 7264, 7271, 7277, 7282, 7287, 7292, 7297, 7302, 7307, 7312, 7317, 7322, 7327, 7332, 7337, 7342, 7347, 7352, 7357, 7362, 7367, 7372, 7377, 7382, 7387, 7392, 7397, and 7402. In some embodiments, the attB sequence comprises at least about 80% sequence identity to any one of SEQ ID NOs: 1, 5, 9, and 13. In some embodiments, the attP sequence comprises at least about 80% sequence identity to any one of SEQ ID NOs: 1, 2, 5, 6, 9, 10, 13, 14, 7152, 7156, 7160, 7164, 7168, 7172, 7176, 7180, 7183-7187, 7201-7205, 7217, 7222, 7228, 7229, 7235, 7240, 7245, 7250, 7255, 7260, 7266, 7267, 7273, 7279, 7284, 7289, 7294, 7299, 7304, 7309, 7314, 7319, 7324, 7329, 7334, 7339, 7344, 7349, 7354, 7359, 7364, 7369, 7374, 7379, 7384, 7389, 7394, 7399, and 7404. In some embodiments, the attP sequence comprises at least about 80% sequence identity to any one of SEQ ID NOs: 2, 6, 10, and 14. In some embodiments, the nucleic acid comprising the donor polynucleotide and the first attachment sequence is delivered by a plasmid, a nanoplasmid, a phagemid, a phage derivative, a virus, a bacmid, a bacterial artificial chromosome (BAC), a minicircle, a doggybone, a yeast artificial chromosome (YAC), or a cosmid. In some embodiments, the nucleic acid encoding the serine recombinase is delivered by a plasmid, a nanoplasmid, a phagemid, a phage derivative, a virus, a bacmid, a bacterial artificial chromosome (BAC), a minicircle, a doggybone, a yeast artificial chromosome (YAC), or a cosmid. In some embodiments, the virus is an alphavirus, a parvovirus, an adenovirus, an AAV, a baculovirus, a Dengue virus, a lentivirus, a herpesvirus, a poxvirus, an anellovirus, a bocavirus, a vaccinia virus, or a retrovirus. In some embodiments, the AAV is AAV1, AAV2, AAV3, AAV4, AAV5, AAV6, AAV7, AAV8, AAV9, AAV10, AAV11, AAV12, AAV13, AAV14, AAV15, AAV16, AAV-rh8, AAV-rh10, AAV-rh20, AAV-rh39, AAV-rh74, AAV-rhM4-1, AAV-hu37, AAV-Anc80, AAV-Anc80L65, AAV-7m8, AAV-PHP-B, AAV-PHP-EB, AAV-2.5, AAV-21YF, AAV-3B, AAV-LK03, AAV-HSC1, AAV-HSC2, AAV-HSC3, AAV-HSC4, AAV-HSC5, AAV-HSC6, AAV-HSC7, AAV-HSC8, AAV-HSC9, AAV-HSC10, AAV-HSC11, AAV-HSC12, AAV-HSC13, AAV-HSC14, AAV-HSC15, AAV-TT, AAV-DJ/8, AAV-Myo, AAV-NP40, AAV-NP59, AAV-NP22, AAV-NP66, or AAV-HSC16, or a derivative thereof. In some embodiments, the herpesvirus is HSV-1, HSV-2, VZV, EBV, CMV, HHV-6, HHV-7, or HHV-8. In some embodiments, the donor polynucleotide comprises a size of at least about 1 kilobase (kb), 2 kb, 3 kb, 4 kb, 5 kb, 6 kb, 7 kb, 8 kb, 9 kb, 10 kb, 20 kb, 30 kb, 40 kb, 50 kb, 60 kb, 70 kb, 80 kb, 90 kb, 100 kb, 110 kb, 120 kb, or more than 120 kb. In some embodiments, the donor polynucleotide encodes a therapeutic, a reporter, or a marker. In some embodiments, the reporter comprises a fluorescent protein. In some embodiments, the fluorescent protein is GFP, EBFP, EBFP2, Azurite, mKalamal, ECFP, Cerulean, CyPet, YFP, Citrine, Venus, YPet, RFP, CFP, or a derivative thereof. In some embodiments, the reporter is acetohydroxyacid synthase (AHAS), alkaline phosphatase (AP), beta galactosidase (LacZ), beta glucuronidase (GUS), chloramphenicol acetyltransferase (CAT), horseradish peroxidase (HRP), luciferase (Luc), nopaline synthase (NOS), octopine synthase (OCS), luciferase, or a derivative thereof. In some embodiments, the marker is an antibiotic resistance marker. In some embodiments, the antibiotic resistance marker is kanamycin, spectinomycin, streptomycin, ampicillin, carbenicillin, bleomycin, erythromycin, polymyxin B, tetracycline, chloramphenicol, neomycin, zeocin, or a derivative thereof. In some embodiments, the marker is a cell surface marker.

[0004] Described herein are eukaryotic genomes comprising a donor polynucleotide sequence; and an attL sequence 5′ to the donor polynucleotide sequence, wherein the attL sequence comprises a sequence selected from the group consisting of: SEQ ID NOs: 17-18, 7145, 7147, 7150, GCATCCCC, TATTCGAT, GGGCAACC, GGGCACCC, CAAGTTC, ACCGCC, CATATGT, 7219, 7224, 7231, 7232, 7237, 7242, ATGGTGGGC, 7252, GCCATTTC, TCAGCTCCA, 7269, 7270, 7275, 7276, 7281, GGGTC, TTCATGAG, ATGGTGGGC, 7301, 7306, 7311, 7316, GGGATCCC, 7326, GCCGA, 7336, 7341, 7346, 7351, 7356, 7361, 7366, 7371, 7376, 7381, 7386, 7391, AGGCGG, 7401, and GGATGC. In some embodiments, the eukaryotic genome further comprises an attR sequence 3′ to the donor polynucleotide sequence.

[0005] Described herein are eukaryotic genomes comprising a donor polynucleotide sequence; and an attL sequence 3′ to the donor polynucleotide sequence, wherein the attL sequence comprises a sequence selected from the group consisting of: SEQ ID NOs: 17-18, 7145, 7147, 7150, GCATCCCC, TATTCGAT, GGGCAACC, GGGCACCC, CAAGTTC, ACCGCC, CATATGT, 7219, 7224, 7231, 7232, 7237, 7242, ATGGTGGGC, 7252, GCCATTTC, TCAGCTCCA, 7269, 7270, 7275, 7276, 7281, GGGTC, TTCATGAG, ATGGTGGGC, 7301, 7306, 7311, 7316, GGGATCCC, 7326, GCCGA, 7336, 7341, 7346, 7351, 7356, 7361, 7366, 7371, 7376, 7381, 7386, 7391, AGGCGG, 7401, and GGATGC. In some embodiments, the eukaryotic genome further comprises an attR sequence 3′ to the donor polynucleotide sequence.

[0006] Described herein are eukaryotic genomes comprising: a donor polynucleotide sequence; an attL sequence 5′ or 3′ to the donor polynucleotide sequence, wherein the attL sequence comprises a sequence selected from the group consisting of: SEQ ID NOs: 17-18, 7145, 7147, 7150, GCATCCCC, TATTCGAT, GGGCAACC, GGGCACCC, CAAGTTC, ACCGCC, CATATGT, 7219, 7224, 7231, 7232, 7237, 7242, ATGGTGGGC, 7252, GCCATTTC, TCAGCTCCA, 7269, 7270, 7275, 7276, 7281, GGGTC, TTCATGAG, ATGGTGGGC, 7301, 7306, 7311, 7316, GGGATCCC, 7326, GCCGA, 7336, 7341, 7346, 7351, 7356, 7361, 7366, 7371, 7376, 7381, 7386, 7391, AGGCGG, 7401, and GGATGC; and an attR sequence 5′ or 3′ to the donor polynucleotide sequence, wherein the attR sequence comprises a sequence selected from the group consisting of: SEQ ID NOs: 17-18, 7145, 7147, 7150, GCATCCCC, TATTCGAT, GGGCAACC, GGGCACCC, CAAGTTC, ACCGCC, CATATGT, 7219, 7224, 7231, 7232, 7237, 7242, ATGGTGGGC, 7252, GCCATTTC, TCAGCTCCA, 7269, 7270, 7275, 7276, 7281, GGGTC, TTCATGAG, ATGGTGGGC, 7301, 7306, 7311, 7316, GGGATCCC, 7326, GCCGA, 7336, 7341, 7346, 7351, 7356, 7361, 7366, 7371, 7376, 7381, 7386, 7391, AGGCGG, 7401, and GGATGC. In some embodiments, the attL sequence and the attR sequence are the same. In some embodiments, the attL sequence is a recombined sequence of a first attachment site sequence and a second attachment site sequence. In some embodiments, the attR sequence is a recombined sequence of a first attachment site sequence and a second attachment site sequence. In some embodiments, the first attachment site sequence is a bacterial genomic recombination sequence (attB). In some embodiments, the first attachment site sequence is a phage genomic recombination sequence (attP). In some embodiments, the second attachment site sequence is a bacterial genomic recombination sequence (attB). In some embodiments, the second attachment site sequence is a phage genomic recombination sequence (attP). In some embodiments, the attB sequence comprises about 20 to about 500 nucleotides. In some embodiments, the attP sequence comprises about 20 to about 500 nucleotides. In some embodiments, the attB sequence comprises at least about 80% sequence identity to any one of SEQ ID NOs: 1, 2, 5, 6, 9, 10, 13, 14, 7151, 7155, 7159, 7163, 7167, 7171, 7175, 7179, 7188-7200, 7206-7210, 7215, 7220, 7225, 7226, 7233, 7238, 7243, 7248, 7253, 7258, 7263, 7264, 7271, 7277, 7282, 7287, 7292, 7297, 7302, 7307, 7312, 7317, 7322, 7327, 7332, 7337, 7342, 7347, 7352, 7357, 7362, 7367, 7372, 7377, 7382, 7387, 7392, 7397, and 7402. In some embodiments, the attB sequence comprises at least about 80% sequence identity to any one of SEQ ID Nos: 1, 5, 9, and 13. In some embodiments, the attP sequence comprises at least about 80% sequence identity to any one of SEQ ID NOs: 1, 2, 5, 6, 9, 10, 13, 14, 7152, 7156, 7160, 7164, 7168, 7172, 7176, 7180, 7183-7187, 7201-7205, 7217, 7222, 7228, 7229, 7235, 7240, 7245, 7250, 7255, 7260, 7266, 7267, 7273, 7279, 7284, 7289, 7294, 7299, 7304, 7309, 7314, 7319, 7324, 7329, 7334, 7339, 7344, 7349, 7354, 7359, 7364, 7369, 7374, 7379, 7384, 7389, 7394, 7399, and 7404. In some embodiments, the attP sequence comprises at least about 80% sequence identity to any one of SEQ ID NOs: 2, 6, 10, and 14. In some embodiments, the attL sequence comprises at least about 80% sequence identity to any one of SEQ ID NOs: 3, 4, 7, 8, 11, 12, 15, 16, 7153, 7157, 7161, 7165, 7169, 7173, 7177, and 7181. In some embodiments, the attR sequence comprises at least about 80% sequence identity to any one of SEQ ID NOs: 3, 4, 7, 8, 11, 12, 15, 16, 7154, 7158, 7162, 7166, 7170, 7174, 7178, and 7182.

[0007] Described herein are mammalian cells comprising the eukaryotic genomes described herein. In some embodiments, the mammalian cell is a human cell. In some embodiments, the mammalian cell further comprises a serine recombinase. In some embodiments, the serine recombinase comprises at least about 80% sequence identity to any one of SEQ ID NOs: 21-7060, 7105-7142, and 7211-7214. In some embodiments, the serine recombinase comprises at least about 80% sequence identity to SEQ ID NO: 21. In some embodiments, the serine recombinase comprises at least about 80% sequence identity to SEQ ID NO: 22. In some embodiments, the serine recombinase comprises at least about 80% sequence identity to SEQ ID NO: 23. In some embodiments, the serine recombinase comprises at least about 80% sequence identity to SEQ ID NO: 24. In some embodiments, the serine recombinase comprises an integration efficiency of at least about 5%. In some embodiments, the serine recombinase comprises an integration efficiency of at least about 25%. In some embodiments, the serine recombinase comprises an integration efficiency of at least about 50%. In some embodiments, the serine recombinase is capable of targeting genes comprising a catalase domain or synthase domain. In some embodiments, the catalase is manganese catalase. In some embodiments, the synthase is Queuosine synthase. In some embodiments, the serine recombinase is capable of targeting genes comprising a DUF4244 Pfam domain.

[0008] Described herein are eukaryotic cells comprising a serine recombinase comprising at least about 80% sequence identity to any one of SEQ ID NOs: 21-7060 and 7105-7142.

[0009] Described herein are eukaryotic cells comprising a serine recombinase comprising at least about 80% sequence identity to SEQ ID NO: 21.

[0010] Described herein are eukaryotic cells comprising a serine recombinase comprising at least about 80% sequence identity to SEQ ID NO: 22.

[0011] Described herein are eukaryotic cells comprising a serine recombinase comprising at least about 80% sequence identity to SEQ ID NO: 23.

[0012] Described herein are eukaryotic cells comprising a serine recombinase comprising at least about 80% sequence identity to SEQ ID NO: 24.

[0013] Described herein are eukaryotic cells comprising a serine recombinase comprising at least about 80% sequence identity to SEQ ID NO: 1848.

[0014] Described herein are eukaryotic cells comprising a serine recombinase comprising at least about 80% sequence identity to SEQ ID NO: 7111.

[0015] Described herein are eukaryotic cells comprising a serine recombinase comprising at least about 80% sequence identity to SEQ ID NO: 7115.

[0016] Described herein are eukaryotic cells comprising a serine recombinase comprising at least about 80% sequence identity to SEQ ID NO: 7131.

[0017] Described herein are eukaryotic cells comprising a serine recombinase comprising at least about 80% sequence identity to SEQ ID NO: 7136.

[0018] Described herein are eukaryotic cells comprising a serine recombinase comprising at least about 80% sequence identity to SEQ ID NO: 7139.

[0019] Described herein are eukaryotic cells comprising a serine recombinase comprising at least about 80% sequence identity to SEQ ID NO: 7140.

[0020] In some embodiments, the eukaryotic cell is a mammalian cell. In some embodiments, the eukaryotic cell is a human cell.

[0021] Described herein are vectors comprising: a) a nucleic acid encoding a serine recombinase comprising at least about 80% sequence identity to any one of SEQ ID NOs: 21-7060 and 7105-7142; and b) one or more regulatory elements. In some embodiments, the one or more regulatory elements comprises a promoter, an enhancer, an intron, a microRNA, a linker, a splicing element, or a polyA signal. In some embodiments, the promoter is selected from a constitutive promoter, an inducible promoter, a mini promoter, or a derivative thereof. In some embodiments, the promoter is selected from the group consisting of: CMV, CBA, EF1a, CAG, PGK, TRE, U6, UAS, T7, Sp6, lac, araBad, trp, Ptac, p5, p19, p40, Synapsin, CaMKII, GRK1, polH, EM7, OpIE1, and a derivative thereof.

[0022] Described herein are vectors comprising a nucleic acid encoding a serine recombinase comprising at least about 80% sequence identity to any one of SEQ ID NOs: 21-7060 and 7105-7142, wherein the vector is selected from the group consisting of: a plasmid, a nanoplasmid, a phagemid, a phage derivative, a bacmid, a bacterial artificial chromosome (BAC), a minicircle, a doggybone, a yeast artificial chromosome (YAC), and a cosmid.

[0023] Described herein are methods for gene editing, comprising: a) providing or identifying a first attachment site sequence in a host genome; b) providing a nucleic acid comprising a donor polynucleotide and a second attachment site sequence to a host cell; and c) contacting the host cell with a serine recombinase comprising at least about 80% sequence identity to any one of SEQ ID NOs: 21-7060 and 7105-7142 or a nucleic acid encoding the serine recombinase, wherein the first attachment site sequence and the second attachment site sequence are capable of recombination. In some embodiments, the first attachment site sequence is endogenous in the host genome. In some embodiments, the first attachment site sequence is provided using viral delivery. In some embodiments, the first attachment site sequence is provided using a transposase. In some embodiments, the first attachment site sequence is provided using a nuclease. In some embodiments, the nuclease is a double-strand nuclease. In some embodiments, the nuclease is a Type II CRISPR endonuclease. In some embodiments, the nuclease is a Type V CRISPR endonuclease. In some embodiments, the nuclease is Cas9. In some embodiments, the first attachment site sequence is provided using a reverse transcriptase. In some embodiments, the second attachment site sequence is 5′ of the donor polynucleotide. In some embodiments, the first attachment site sequence is a bacterial genomic recombination sequence (attB). In some embodiments, the first attachment site sequence is a phage genomic recombination sequence (attP). In some embodiments, the second attachment site sequence is a bacterial genomic recombination sequence (attB). In some embodiments, the second attachment site sequence is a phage genomic recombination sequence (attP). In some embodiments, the attB sequence comprises about 20 to about 500 nucleotides. In some embodiments, the attP sequence comprises about 20 to about 500 nucleotides. In some embodiments, the attB sequence comprises at least about 80% sequence identity to any one of SEQ ID NOs: 1, 2, 5, 6, 9, 10, 13, 14, 7151, 7155, 7159, 7163, 7167, 7171, 7175, 7179, 7188-7200, 7206-7210, 7215, 7220, 7225, 7226, 7233, 7238, 7243, 7248, 7253, 7258, 7263, 7264, 7271, 7277, 7282, 7287, 7292, 7297, 7302, 7307, 7312, 7317, 7322, 7327, 7332, 7337, 7342, 7347, 7352, 7357, 7362, 7367, 7372, 7377, 7382, 7387, 7392, 7397, and 7402. In some embodiments, the attB sequence comprises at least about 80% sequence identity to any one of SEQ ID NOs: 1, 5, 9, and 13. In some embodiments, the attP sequence comprises at least about 80% sequence identity to any one of SEQ ID NOs: 1, 2, 5, 6, 9, 10, 13, 14, 7151, 7155, 7159, 7163, 7167, 7171, 7175, 7179, 7188-7200, 7206-7210, 7215, 7220, 7225, 7226, 7233, 7238, 7243, 7248, 7253, 7258, 7263, 7264, 7271, 7277, 7282, 7287, 7292, 7297, 7302, 7307, 7312, 7317, 7322, 7327, 7332, 7337, 7342, 7347, 7352, 7357, 7362, 7367, 7372, 7377, 7382, 7387, 7392, 7397, and 7402. In some embodiments, the attP sequence comprises at least about 80% sequence identity to any one of SEQ ID NOs: 2, 6, 10, and 14. In some embodiments, the nucleic acid comprising the donor polynucleotide and the second attachment site sequence is delivered by a plasmid, a nanoplasmid, a phagemid, a phage derivative, a virus, a bacmid, a bacterial artificial chromosome (BAC), a minicircle, a doggybone, a yeast artificial chromosome (YAC), or a cosmid. In some embodiments, the nucleic acid encoding the serine recombinase is delivered by a plasmid, a nanoplasmid, a phagemid, a phage derivative, a virus, a bacmid, a bacterial artificial chromosome (BAC), a minicircle, a doggybone, a yeast artificial chromosome (YAC), or a cosmid. In some embodiments, the virus is an alphavirus, a parvovirus, an adenovirus, an AAV, a baculovirus, a Dengue virus, a lentivirus, a herpesvirus, a poxvirus, an anellovirus, a bocavirus, a vaccinia virus, or a retrovirus. In some embodiments, the AAV is AAV1, AAV2, AAV3, AAV4, AAV5, AAV6, AAV7, AAV8, AAV9, AAV10, AAV11, AAV12, AAV13, AAV14, AAV15, AAV16, AAV-rh8, AAV-rh10, AAV-rh20, AAV-rh39, AAV-rh74, AAV-rhM4-1, AAV-hu37, AAV-Anc80, AAV-Anc80L65, AAV-7m8, AAV-PHP-B, AAV-PHP-EB, AAV-2.5, AAV-2tYF, AAV-3B, AAV-LK03, AAV-HSC1, AAV-HSC2, AAV-HSC3, AAV-HSC4, AAV-HSC5, AAV-HSC6, AAV-HSC7, AAV-HSC8, AAV-HSC9, AAV-HSC10, AAV-HSC11, AAV-HSC12, AAV-HSC13, AAV-HSC14, AAV-HSC15, AAV-TT, AAV-DJ/8, AAV-Myo, AAV-NP40, AAV-NP59, AAV-NP22, AAV-NP66, or AAV-HSC16, or a derivative thereof. In some embodiments, the herpesvirus is HSV-1, HSV-2, VZV, EBV, CMV, HHV-6, HHV-7, or HHV-8. In some embodiments, the donor polynucleotide comprises a size of at least about 1 kilobase (kb), 2 kb, 3 kb, 4 kb, 5 kb, 6 kb, 7 kb, 8 kb, 9 kb, 10 kb, 20 kb, 30 kb, 40 kb, 50 kb, 60 kb, 70 kb, 80 kb, 90 kb, 100 kb, 110 kb, 120 kb, or more than 120 kb. In some embodiments, the donor polynucleotide encodes a therapeutic, a reporter, or a marker. In some embodiments, the reporter comprises a fluorescent protein. In some embodiments, the fluorescent protein is GFP, EBFP, EBFP2, Azurite, mKalamal, ECFP, Cerulean, CyPet, YFP, Citrine, Venus, YPet, RFP, CFP, or a derivative thereof. In some embodiments, the reporter is acetohydroxyacid synthase (AHAS), alkaline phosphatase (AP), beta galactosidase (LacZ), beta glucuronidase (GUS), chloramphenicol acetyltransferase (CAT), horseradish peroxidase (HRP), luciferase (Luc), nopaline synthase (NOS), octopine synthase (OCS), luciferase, or a derivative thereof. In some embodiments, the marker is an antibiotic resistance marker. In some embodiments, the antibiotic resistance marker is kanamycin, spectinomycin, streptomycin, ampicillin, carbenicillin, bleomycin, erythromycin, polymyxin B, tetracycline, chloramphenicol, neomycin, zeocin, or a derivative thereof. In some embodiments, the marker is a cell surface marker.

### BRIEF DESCRIPTION OF THE DRAWINGS

[0024] The features of the disclosure are set forth with particularity in the appended claims. A better understanding of the features and advantages of the present disclosure will be obtained by reference to the following detailed description that sets forth illustrative embodiments, in which the principles of the disclosure are utilized, and the accompanying drawings of which:

[0025] FIG. 1 shows a multiple sequence alignment of MG178 family Large Serine Recombinase (LSR) candidates vs. a Bxb1 LSR reference sequence. Resolvase, recombinase, and Zn-finger domains are shown as boxes, and catalytic residues required for activity are highlighted as bars below each residue.

[0026] FIGS. 2A and 2B show a phylogenetic protein tree of LSRs of the disclosure. The tree was inferred from a global multiple sequence alignment of LSR sequences clustered at 90% amino acid identity (AAI). Selected MG178 family candidates are highlighted by large dots and are color-coded by the bacterial host that they target (FIG. 2A) or the host gene into which they insert (FIG. 2B).

[0027] FIG. 3 shows the analysis of an exemplary LSR integration site that was identified from alignments of genomic fragments with and without the prophage. The top panel shows a multiple sequence alignment of the genomic fragment with an integrated prophage (top) and its unintegrated host (bottom). Genes are predicted as arrows and functional domains supporting functional annotations are represented by black bars under genes. The prophage was predicted with CheckV (top) and integrates into a gene with a Quenosine biosynthesis protein annotation (bottom). The bottom panel shows a graph demonstrating that from the confirmation of prophage boundaries, the common core motif that is shared with the unintegrated host can be determined. The LSR gene is located on one of the prophage edges (black box).

[0028] FIGS. 4A-4C show a schematic of an exemplary in vitro screening procedure for serine recombinase recombination activity. FIG. 4A shows a schematic of recombinase in vitro expression from a linear or circular dsDNA construct. FIG. 4B shows a schematic for a recombination reaction using integrase that is added to the recombination reaction together with attP and attB dsDNA fragments specific to the serine recombinase. FIG. 4C shows a schematic of a PCR analysis by agarose gel electrophoresis of the recombined DNA amplified by attL- and attR-specific primers.

[0029] FIGS. 5A-5B show the results of in vitro recombinase assays for LSRs MG178-4, MG178-9, MG178-10, and MG178-11. Arrows indicate positive recombination event products. FIG. 5A shows the results of in vitro recombinase assays with AttL-specific primers used to amplify potential recombination events. Lane 1 shows the negative control for MG178-4 containing MG178-4 attB and MG178-4 attP dsDNA fragments. Lane 2 shows the experimental conditions for MG178-4 containing MG178-4 attB and MG178-4 attP dsDNA fragments and expressed MG178-4 recombinase. Lane 3 shows the negative control for MG178-9 containing MG178-9 attB and MG178-9 attP dsDNA fragments. Lane 4 shows the experimental conditions for MG178-9 containing MG178-9 attB and MG178-9 attP dsDNA fragments and expressed MG178-9 recombinase. Lane 5 shows the negative control for MG178-10 containing MG178-10 attB and MG178-10 attP dsDNA fragments. Lane 6 shows the experimental conditions for MG178-10 containing MG178-10 attB and MG178-10 attP dsDNA fragments and expressed MG178-10 recombinase. Lane 7 shows the negative control for MG178-11 containing MG178-11 attB and MG178-11 attP dsDNA fragments. Lane 8 shows the experimental conditions for MG178-11 containing MG178-11 attB and MG178-11 attP dsDNA fragments and expressed MG178-11 recombinase. FIG. 5B shows the results of in vitro recombinase assays with AttR-specific primers used to amplify potential recombination events. Lane 1 shows the negative control for MG178-4 containing MG178-4 attB and MG178-4 attP dsDNA fragments. Lane 2 shows the experimental conditions for MG178-4 containing MG178-4 attB and MG178-4 attP dsDNA fragments and expressed MG178-4 recombinase. Lane 3 shows the negative control for MG178-9 containing MG178-9 attB and MG178-9 attP dsDNA fragments. Lane 4 shows the experimental conditions for MG178-9 containing MG178-9 attB and MG178-9 attP dsDNA fragments and expressed MG178-9 recombinase. Lane 5 shows the negative control for MG178-10 containing MG178-10 attB and MG178-10 attP dsDNA fragments. Lane 6 shows the experimental conditions for MG178-10 containing MG178-10 attB and MG178-10 attP dsDNA fragments and expressed MG178-10 recombinase. Lane 7 shows the negative control for MG178-11 containing MG178-11 attB and MG178-11 attP dsDNA fragments. Lane 8 shows the experimental conditions for MG178-11 containing MG178-11 attB and MG178-11 attP dsDNA fragments and expressed MG178-11 recombinase.

[0030] FIG. 6 shows a schematic of an experimentally validated MG178-10 attL sequence that aligns with the bioinformatically identified MG178-10 attL. Black bars indicate 100% identity to the reference sequence (Found attL). The lower panel shows a zoomed sequence view of the alignment of reconstituted attP, reconstituted attB, and the experimentally determined attL site to the bioinformatically identified attL site for MG178-10. The grey highlighted sequence reflects the identity of the reconstructed attP and attB sites, and the lighter bases indicate discordant alignment from the reference sequence (bioinformatically identified attL). The boxed sequence is highlighting the conservation of the common core across found attL, attP, attB and sequenced attL. FIG. 6 discloses SEQ ID NOS 7435-7437 and 7435, respectively, in order of appearance.

[0031] FIG. 7 shows a schematic of an experimentally validated MG178-10 attR sequence aligned with the bioinformatically identified MG178-10 attR. Black bars indicate 100% identity to the reference sequence (Found attR). The lower panel shows a zoomed sequence view of the alignment of reconstituted attP, reconstituted attB, and the experimentally determined attR site to the bioinformatically identified attR site for MG178-10. The grey highlighted sequence reflects the identity of the reconstructed attP and attB site, and the lighter colored bases indicate discordant alignment from the reference sequence (bioinformatically identified attR). The boxed sequence is highlighting the conservation of the common core across found attR, attP, attB and sequenced attR. FIG. 7 discloses SEQ ID NOS 7438-7440 and 7438, respectively, in order of appearance.

[0032] FIG. 8 shows multiple sequence alignment of MG178 LSR candidates vs. a Bxb1 LSR reference sequence. Resolvase, recombinase, and Zn-finger domains are shown as boxes and catalytic residues required for activity are highlighted as bars below each residue.

[0033] FIGS. 9A-9C show pairwise alignments of the 3′ and 5′ regions flanking the proviruses of MG178-7202 (FIG. 9A), MG178-1859 (FIG. 9B), and MG178-7193 (FIG. 9C). Annotated are the provirus boundaries and common cores. Provirus boundaries were predicted and determined by aligning the provirus containing contigs to contigs lacking the provirus. The common cores were identified by finding conserved regions in the alignment. In cases where the alignment showed no conservation (FIG. 9C), repeats were identified within and outside of the provirus boundaries and the alignment was manually refined. FIG. 9A discloses SEQ ID NOS 7441-7443, FIG. 9B discloses SEQ ID NOS 7444-7446, and FIG. 9C discloses SEQ ID NOS 7447-7449, all respectively, in order of appearance.

[0034] FIGS. 10A-10B show the LSR-mediated attachment site recombination event and in cell plasmid recombination activity. FIG. 10A depicts a schematic illustration showing the LSR-mediated attachment site recombination event. FIG. 10B depicts a bar graph showing recombination activities. Active LSRs with recombination over 5% are plotted in comparison to BxB1 as reference. Each bar represents an experimental condition with a recombinase, AttB, and AttP plasmids transfected in HEK293T cells. Plasmid recombination was quantified by flow cytometry after 48 hours and percent recombination was calculated based on cells expressing both eGFP (recombinase protein) and mCherry (recombination event). Error bars are included for candidates with replicates.

[0035] FIG. 11 depicts the results of in vitro recombinase assays for LSR systems MG178-7202, MG178-1859, MG178-7193, MG178-7177. Lane 1 shows the ladder. Lane 2 shows the experimental conditions for MG178-7202 containing MG178-7202 attB and MG178-7202 attP dsDNA fragments, with addition of expressed MG178-7202 recombinase. Lane 3 shows the experimental conditions for MG178-1859 containing MG178-1859 attB and MG178-1859 attP dsDNA fragments, with addition of expressed MG178-1859 recombinase. Lane 4 shows the experimental conditions for MG178-7193 containing MG178-7193 attB and MG178-7193 attP dsDNA fragments, with addition of expressed MG178-7193 recombinase. Lane 5 shows the experimental conditions for MG178-7177 containing MG178-7177 attB and MG178-7177 attP dsDNA fragments, with addition of expressed MG178-7177 recombinase. Lane 6 shows the negative controls ladder. Lane 7 shows the negative control for MG178-7202 containing MG178-7202 attB and MG178-7202 attP dsDNA fragments but no enzyme. Lane 8 shows the negative control for MG178-1859 containing MG178-1859 attB and MG178-1859 attP dsDNA fragments but no enzyme. Lane 9 shows the negative control for MG178-7193 containing MG178-7193 attB and MG178-7193 attP dsDNA fragments but no enzyme. Lane 10 shows the negative control for MG178-7177 containing MG178-7177 attB and MG178-7177 attP dsDNA fragments but no enzyme.

[0036] FIG. 12 depicts a bar plot showing active candidates in human cells. Percent recombination was determined as the percentage of cells positive for mCherry (recombination) divided by the total number of cells positive for eGFP (integrase transfection and expression).

[0037] FIGS. 13A-13B depict plasmid dosage finds for optimal plasmid transfection concentrations in human cells. FIG. 13A depicts a bar plot showing percent recombination. FIG. 13B shows a table outlined the tested conditions. Optimal performance of MG178-7202 was found to be with equal weight integrase, attB, and attP plasmids at 250 ng per transfection for each.

[0038] FIG. 14 depicts a bar plot showing attachment site minimization for MG178-7202 (−47) in human cells. AttB sites were tested from 108 nt to 28 nt and AttP from 68 to 48 nt. Optimal conditions were determined to be 48 nt AttB and 58 nt AttP, while measurable recombination is able to be measured down to 32 nt of attB.

[0039] FIG. 15 depicts a bar plot showing attachment site minimization for MG178-7193 (−36) in human cells. AttB sites were tested from 72 to 52 nt and AttP from 72 to 52 nt. Optimal conditions were determined to be 52 nt AttB and 72 nt AttP.

[0040] FIGS. 16A-16C show the results of the purification and activity analyses of MG178-7202. Proteins expression induction and purification was monitored via SDS-PAGE (FIG. 16A). Expected protein MW was ˜76 kDa. Sumo-fused concentrated protein was run over an S200i 10 300 SEC column (FIG. 16B). Eluted fractions were visualized via SDS-PAGE (FIG. 16C) and fraction with purified protein were collected and concentrated (shaded area in FIG. 16B).

[0041] FIG. 17 depicts the results of in vitro recombinase assays for LSR MG178-7202, MG178-1859. Expected band for MG178-7202 and MG178-1859 are 1027 bp and 1167 bp respectively. Lane 1 shows the ladder for in vitro expressed proteins. Lane 2 shows the negative control for MG178-7202 containing MG178-7202 attB and MG178-7202 attP dsDNA fragments. Lane 3 shows the experimental conditions for MG178-7202 containing MG178-7202 attB and MG178-7202 attP dsDNA fragments and expressed MG178-7202 recombinase. Lane 4 shows the negative control for MG178-1859 containing MG178-1859 attB and MG178-1859 attP dsDNA fragments. Lane 5 shows the experimental conditions for MG178-1859 containing MG178-1859 attB and MG178-1859 attP dsDNA fragments and expressed MG178-1859 recombinase. Lane 6 shows the ladder for purified proteins. Lane 7 shows the negative control for MG178-7202 containing MG178-7202 attB and MG178-7202 attP dsDNA fragments. Lane 8 shows the experimental conditions for MG178-7202 containing MG178-7202 attB and MG178-7202 attP dsDNA fragments and purified MG178-7202 recombinase. Lane 9 shows the negative control for MG178-1859 containing MG178-1859 attB and MG178-1859 attP dsDNA fragments. Lane 10 shows the experimental conditions for MG178-1859 containing MG178-1859 attB and MG178-1859 attP dsDNA fragments and purified MG178-1859 recombinase.

### BRIEF DESCRIPTION OF THE SEQUENCE LISTING

[0042] The Sequence Listing filed herewith provides exemplary polynucleotide and polypeptide sequences for use in methods, compositions, and systems according to the disclosure. Below are exemplary descriptions of sequences therein.

[0043] SEQ ID NOs: 1-16, 7151-7210, 7215-7218, 7220-7223, 7225-7230, 7233-7236, 7238-7241, 7243-7246, 7248-7251, 7253-7256, 7258-7261, 7263-7268, 7271-7274, 7277-7280, 7282-7285, 7287-7290, 7292-7295, 7297-7300, 7302-7305, 7307-7310, 7312-7315, 7317-7320, 7322-7325, 7327-7330, 7332-7335, 7337-7340, 7342-7345, 7347-7350, 7352-7355, 7357-7360, 7362-7365, 7367-7370, 7372-7375, 7377-7380, 7382-7385, 7387-7390, 7392-7395, 7397-7400, and 7402-7405 show nucleotide sequences of MG178 recombinase attachment sites.

[0044] SEQ ID NOs: 17-18, 7145, 7147, 7150, 7219, 7224, 7231, 7232, 7237, 7242, 7252, 7269, 7270, 7275, 7276, 7281, 7301, 7306, 7311, 7316, 7326, 7336, 7341, 7346, 7351, 7356, 7361, 7366, 7371, 7376, 7381, 7386, 7391, and 7401 show nucleotide sequences of MG178 conserved cores.

[0045] SEQ ID NOs: 21-7060, 7105-7142, and 7211-7214 show amino acid sequences of MG178 family large serine recombinases suitable for use in gene editing as described herein.

[0046] SEQ ID NOs: 7412-7415 and 7418 show amino acid sequences of MG178 recombinases protein tags.

[0047] SEQ ID NOs: 7407-7411 and 7416-7417 show nucleotide sequences of primers.

### DETAILED DESCRIPTION

[0048] Site-directed gene editing systems are powerful tools for site-directed genome engineering in cells. Most of the current gene editing systems depend on DNA double-stranded breaks (DSBs) to direct cellular DNA repair pathways such as homologous recombination (HR). However, these gene editing systems are often correlated with high indel rates, low insertion efficiency, high off-target activity, and a limited cargo size.

[0049] Additionally, the repair or insertion of longer pieces of DNA has remained challenging, and a safe and efficient way of targeted integration of large templates into a genome, for example for gene therapies or engineered cell therapies, is lacking. To date, lentiviruses or adeno-associated viruses (AAV) in combination with a CRISPR nuclease are used to insert large pieces of DNA, for example whole genes. However, lentiviral-mediated integration lacks the targetability feature, as integration occurs mostly randomly in open chromatin. AAV-mediated delivery has a limited cargo capacity and is not available for all cell types. A safe and efficient targeted genome editing system that allows for large template integration is needed.

[0050] The present disclosure is based, in part, upon the development of gene editing systems comprising large serine recombinases (LSRs) or serine recombinases for targetable and programmable integration of large fragments of DNA into a eukaryotic genome. In some embodiments, serine recombinases described herein can integrate multi-kilobase DNA sequences.

### Definitions

[0051] Unless defined otherwise, all technical and scientific terms used herein have the same meaning as is commonly understood by one of skill in the art to which the claimed subject matter belongs. It is to be understood that the foregoing general description and the following detailed description are exemplary and explanatory only and are not restrictive of any subject matter claimed. The section headings used herein are for organizational purposes only and are not to be construed as limiting the subject matter described.

[0052] The practice of some methods disclosed herein employ, unless otherwise indicated, techniques of immunology, biochemistry, chemistry, molecular biology, microbiology, cell biology, genomics, and recombinant DNA. See for example Sambrook and Green, Molecular Cloning: A Laboratory Manual, 4th Edition (2012); the series Current Protocols in Molecular Biology (F. M. Ausubel, et al. eds.); the series Methods In Enzymology (Academic Press, Inc.), PCR 2: A Practical Approach (M. J. MacPherson, B. D. Hames and G. R. Taylor eds. (1995)), Harlow and Lane, eds. (1988) Antibodies, A Laboratory Manual, and Culture of Animal Cells: A Manual of Basic Technique and Specialized Applications, 6th Edition (R. I. Freshney, ed. (2010)).

[0053] As used herein, the singular forms “a”, “an” and “the” are intended to include the plural forms as well, unless the context clearly indicates otherwise. Furthermore, to the extent that the terms “including”, “includes”, “having”, “has”, “with”, or variants thereof are used in either the detailed description and/or the claims, such terms are intended to be inclusive in a manner similar to the term “comprising”.

[0054] The term “about” or “approximately” means within an acceptable error range for the particular value as determined by one of ordinary skill in the art, which will depend in part on how the value is measured or determined, i.e., the limitations of the measurement system. For example, “about” can mean within one or more than one standard deviation, per the practice in the art. Alternatively, “about” can mean a range of up to 20%, up to 15%, up to 10%, up to 5%, or up to 1% of a given value.

[0055] The term “nucleotide,” as used herein, refers to a base-sugar-phosphate combination. Contemplated nucleotides include naturally occurring nucleotides and synthetic nucleotides. Nucleotides are monomeric units of a nucleic acid sequence (e.g., deoxyribonucleic acid (DNA) and ribonucleic acid (RNA)). The term nucleotide includes ribonucleoside triphosphates adenosine triphosphate (ATP), uridine triphosphate (UTP), cytosine triphosphate (CTP), guanosine triphosphate (GTP) and deoxyribonucleoside triphosphates such as dATP, dCTP, dITP, dUTP, dGTP, dTTP, or derivatives thereof. Such derivatives include, for example, [αS] dATP, 7-deaza-dGTP and 7-deaza-dATP, and nucleotide derivatives that confer nuclease resistance on the nucleic acid molecule containing them. The term nucleotide as used herein encompasses dideoxyribonucleoside triphosphates (ddNTPs) and their derivatives. Illustrative examples of ddNTPs include, but are not limited to, ddATP, ddCTP, ddGTP, ddITP, and ddTTP. A nucleotide may be unlabeled or detectably labeled, such as using moieties comprising optically detectable moieties (e.g., fluorophores) or quantum dots. Detectable labels include, for example, radioactive isotopes, fluorescent labels, chemiluminescent labels, bioluminescent labels, and enzyme labels. Fluorescent labels of nucleotides include but are not limited fluorescein, 5-carboxyfluorescein (FAM), 2′7′-dimethoxy-4′5-dichloro-6-carboxyfluorescein (JOE), rhodamine, 6-carboxyrhodamine (R6G), N,N,N′,N′-tetramethyl-6-carboxyrhodamine (TAMRA), 6-carboxy-X-rhodamine (ROX), 4-(4′dimethylaminophenylazo) benzoic acid (DABCYL), Cascade Blue, Oregon Green, Texas Red, Cyanine and 5-(2′-aminoethyl) aminonaphthalene-1-sulfonic acid (EDANS). Specific examples of fluorescently labeled nucleotides include [R6G] dUTP, [TAMRA] dUTP, [R110] dCTP, [R6G] dCTP, [TAMRA] dCTP, [JOE] ddATP, [R6G] ddATP, [FAM] ddCTP, [R110] ddCTP, [TAMRA] ddGTP, [ROX] ddTTP, [dR6G] ddATP, [dR110] ddCTP, [dTAMRA] ddGTP, and [dROX] ddTTP available from Perkin Elmer, Foster City, Calif; FluoroLink DeoxyNucleotides, FluoroLink Cy3-dCTP, FluoroLink Cy5-dCTP, FluoroLink Fluor X-dCTP, FluoroLink Cy3-dUTP, and FluoroLink Cy5-dUTP available from Amersham, Arlington Heights, IL; Fluorescein-15-dATP, Fluorescein-12-dUTP, Tetramethyl-rodamine-6-dUTP, IR770-9-dATP, Fluorescein-12-ddUTP, Fluorescein-12-UTP, and Fluorescein-15-2′-dATP available from Boehringer Mannheim, Indianapolis, Ind.; and Chromosome Labeled Nucleotides, BODIPY-FL-14-UTP, BODIPY-FL-4-UTP, BODIPY-TMR-14-UTP, BODIPY-TMR-14-dUTP, BODIPY-TR-14-UTP, BODIPY-TR-14-dUTP, Cascade Blue-7-UTP, Cascade Blue-7-dUTP, fluorescein-12-UTP, fluorescein-12-dUTP, Oregon Green 488-5-dUTP, Rhodamine Green-5-UTP, Rhodamine Green-5-dUTP, tetramethylrhodamine-6-UTP, tetramethylrhodamine-6-dUTP, Texas Red-5-UTP, Texas Red-5-dUTP, and Texas Red-12-dUTP available from Molecular Probes, Eugene, Oreg. The term nucleotide encompasses chemically modified nucleotides. An exemplary chemically-modified nucleotide is biotin-dNTP. Non-limiting examples of biotinylated dNTPs include, biotin-dATP (e.g., bio-N6-ddATP, biotin-14-dATP), biotin-dCTP (e.g., biotin-11-dCTP, biotin-14-dCTP), and biotin-dUTP (e.g., biotin-11-dUTP, biotin-16-dUTP, biotin-20-dUTP).

[0056] The terms “polynucleotide,” “oligonucleotide,” and “nucleic acid” are used interchangeably to refer to a polymeric form of nucleotides of any length, either deoxyribonucleotides or ribonucleotides, or analogs thereof, either in single-, double-, or multi-stranded form. Contemplated polynucleotides include a gene or fragment thereof. Exemplary polynucleotides include, but are not limited to, DNA, RNA, coding or non-coding regions of a gene or gene fragment, loci (locus) defined from linkage analysis, exons, introns, messenger RNA (mRNA), transfer RNA (tRNA), ribosomal RNA (rRNA), short interfering RNA (siRNA), short-hairpin RNA (shRNA), micro-RNA (miRNA), ribozymes, cDNA, recombinant polynucleotides, branched polynucleotides, plasmids, vectors, cell-free polynucleotides including cell-free DNA (cfDNA) and cell-free RNA (cfRNA), nucleic acid probes, and primers. In a polynucleotide when referring to a T, a T means U (Uracil) in RNA and T (Thymine) in DNA. A polynucleotide can be exogenous or endogenous to a cell and/or exist in a cell-free environment. The term polynucleotide encompasses modified polynucleotides (e.g., altered backbone, sugar, or nucleobase). If present, modifications to the nucleotide structure are imparted before or after assembly of the polymer. Non-limiting examples of modifications include: 5-bromouracil, peptide nucleic acid, xeno nucleic acid, morpholinos, locked nucleic acids, glycol nucleic acids, threose nucleic acids, dideoxynucleotides, cordycepin, 7-deaza-GTP, fluorophores (e.g., rhodamine or fluorescein linked to the sugar), thiol-containing nucleotides, biotin-linked nucleotides, fluorescent base analogs, CpG islands, methyl-7-guanosine, methylated nucleotides, inosine, thiouridine, pseudouridine, dihydrouridine, queuosine, and wyosine. The sequence of nucleotides may be interrupted by non-nucleotide components.

[0057] The terms “transfection” or “transfected” generally refer to introduction of a nucleic acid into a cell by non-viral or viral-based methods. The nucleic acid molecules may be gene sequences encoding complete proteins or functional portions thereof. See, e.g., Sambrook et al., 1989, Molecular Cloning: A Laboratory Manual, 18.1-18.88.

[0058] The terms “peptide,” “polypeptide,” and “protein” are used interchangeably herein to refer to a polymer of at least two amino acid residues joined by peptide bond(s). This term does not connote a specific length of polymer, nor is it intended to imply or distinguish whether the peptide is produced using recombinant techniques, chemical or enzymatic synthesis, or is naturally occurring. The terms apply to naturally occurring amino acid polymers as well as amino acid polymers comprising at least one modified amino acid. In some cases, the polymer is interrupted by non-amino acids. The terms include amino acid chains of any length, including full length proteins, and proteins with or without secondary or tertiary structure (e.g., domains). The terms also encompass an amino acid polymer that has been modified, for example, by disulfide bond formation, glycosylation, lipidation, acetylation, phosphorylation, oxidation, and any other manipulation such as conjugation with a labeling component. The terms “amino acid” and “amino acids,” as used herein, refer to natural and non-natural amino acids, including, but not limited to, modified amino acids. Modified amino acids include amino acids that have been chemically modified to include a group or a chemical moiety not naturally present on the amino acid. The term “amino acid” includes both D-amino acids and L-amino acids.

[0059] As used herein, the “non-native” refers to a nucleic acid or polypeptide sequence that is non-naturally occurring. Non-native refers to a non-naturally occurring nucleic acid or polypeptide sequence that comprises modifications such as mutations, insertions, or deletions. The term non-native encompasses fusion nucleic acids or polypeptides that encodes or exhibits an activity (e.g., enzymatic activity, methyltransferase activity, acetyltransferase activity, kinase activity, ubiquitinating activity, etc.) of the nucleic acid or polypeptide sequence to which the non-native sequence is fused. A non-native nucleic acid or polypeptide sequence includes those linked to a naturally-occurring nucleic acid or polypeptide sequence (or a variant thereof) by genetic engineering to generate a chimeric nucleic acid or polypeptide sequence encoding a chimeric nucleic acid or polypeptide.

[0060] The term “promoter”, as used herein, refers to the regulatory DNA region which controls transcription or expression of a polynucleotide (e.g., a gene) and which may be located adjacent to or overlapping a nucleotide or region of nucleotides at which RNA transcription is initiated. A promoter may contain specific DNA sequences which bind protein factors, often referred to as transcription factors, which facilitate binding of RNA polymerase to the DNA leading to gene transcription. Eukaryotic basal promoters typically, though not necessarily, contain a TATA-box and/or a CAAT box.

[0061] The term “expression”, as used herein, refers to the process by which a nucleic acid sequence or a polynucleotide is transcribed from a DNA template (such as into mRNA or other RNA transcript) and/or the process by which a transcribed mRNA is subsequently translated into peptides, polypeptides, or proteins. Transcripts and encoded polypeptides may be collectively referred to as “gene product.” If the polynucleotide is derived from genomic DNA, the term expression includes splicing of the mRNA in a eukaryotic cell.

[0062] As used herein, “operably linked”, “operable linkage”, “operatively linked”, or grammatical equivalents thereof refer to an arrangement of genetic elements, e.g., a promoter, an enhancer, a polyadenylation sequence, etc., wherein an operation (e.g., movement or activation) of a first genetic element has some effect on the second genetic element. The effect on the second genetic element can be, but need not be, of the same type as operation of the first genetic element. For example, two genetic elements are operably linked if movement of the first element causes an activation of the second element. For instance, a regulatory element, which may comprise promoter and/or enhancer sequences, is operatively linked to a coding region if the regulatory element helps initiate transcription of the coding sequence. There may be intervening residues between the regulatory element and coding region so long as this functional relationship is maintained.

[0063] A “vector” as used herein, refers to a macromolecule or association of macromolecules that comprises or associates with a polynucleotide and which mediates delivery of the polynucleotide to a cell. Examples of vectors include nucleic-based vectors (e.g., plasmids and viral vectors) and liposomes. An exemplary nucleic-acid based vector comprises genetic elements, e.g., regulatory elements, operatively linked to a gene to facilitate expression of the gene in a target.

[0064] As used herein, “expression cassette” and “nucleic acid cassette” are used interchangeably to refer to a component of a vector comprising a combination of nucleic acid sequences or elements (e.g., therapeutic gene, promoter, and a terminator) that are expressed together or are operably linked for expression. The terms encompass an expression cassette including a combination of regulatory elements and a gene or genes to which they are operably linked for expression.

[0065] A “functional fragment” of a DNA or protein sequence refers to a fragment that retains a biological activity (either functional or structural) that is substantially similar to a biological activity of the full-length DNA or protein sequence. A biological activity of a DNA sequence includes its ability to influence expression in a manner attributed to the full-length sequence.

[0066] The terms “engineered,” “synthetic,” and “artificial” are used interchangeably herein to refer to an object that has been modified by human intervention. For example, the terms refer to a polynucleotide or polypeptide that is non-naturally occurring. An engineered peptide has, but does not require, low sequence identity (e.g., less than 50% sequence identity, less than 25% sequence identity, less than 10% sequence identity, less than 5% sequence identity, less than 1% sequence identity) to a naturally occurring human protein. For example, VPR and VP64 domains are synthetic transactivation domains. Non-limiting examples include the following: a nucleic acid modified by changing its sequence to a sequence that does not occur in nature; a nucleic acid modified by ligating it to a nucleic acid that it does not associate with in nature such that the ligated product possesses a function not present in the original nucleic acid; an engineered nucleic acid synthesized in vitro with a sequence that does not exist in nature; a protein modified by changing its amino acid sequence to a sequence that does not exist in nature; an engineered protein acquiring a new function or property. An “engineered” system comprises at least one engineered component.

[0067] As used herein, a “guide nucleic acid” or “guide polynucleotide” refers to a nucleic acid that may hybridize to a target nucleic acid and thereby directs an associated nuclease to the target nucleic acid. A guide nucleic acid is, but is not limited to, RNA (guide RNA or gRNA), DNA, or a mixture of RNA and DNA. A guide nucleic acid can include a crRNA or a tracrRNA or a combination of both. The term guide nucleic acid encompasses an engineered guide nucleic acid and a programmable guide nucleic acid to specifically bind to the target nucleic acid. A portion of the target nucleic acid may be complementary to a portion of the guide nucleic acid. The strand of a double-stranded target polynucleotide that is complementary to and hybridizes with the guide nucleic acid is the complementary strand. The strand of the double-stranded target polynucleotide that is complementary to the complementary strand, and therefore is not complementary to the guide nucleic acid is called noncomplementary strand. A guide nucleic acid having a polynucleotide chain is a “single guide nucleic acid.” A guide nucleic acid having two polynucleotide chains is a “double guide nucleic acid.” If not otherwise specified, the term “guide nucleic acid” is inclusive, referring to both single guide nucleic acids and double guide nucleic acids. A guide nucleic acid may comprise a segment referred to as a “nucleic acid-targeting segment” or a “nucleic acid-targeting sequence,” or a “spacer.” A nucleic acid-targeting segment can include a sub-segment referred to as a “protein binding segment” or “protein binding sequence” or “Cas protein binding segment.”

[0068] The term “tracrRNA” or “tracr sequence” means trans-activating CRISPR RNA. tracrRNA interacts with the CRISPR (cr) RNA to form a guide nucleic acid (e.g., guide RNA or gRNA) that may hybridize to a target nucleic acid and thereby directs an associated nuclease to the target nucleic acid.

[0069] As used herein, the term “RuvC_III domain” refers to a third discontinuous segment of a RuvC endonuclease domain (the RuvC nuclease domain being comprised of three discontiguous segments, RuvC_I, RuvC_II, and RuvC_III). A RuvC domain or segments thereof can generally be identified by alignment to documented domain sequences, structural alignment to proteins with annotated domains, or by comparison to Hidden Markov Models (HMMs) built based on documented domain sequences (e.g., Pfam HMM PF18541 for RuvC_III).

[0070] As used herein, the term “HNH domain” refers to an endonuclease domain having characteristic histidine and asparagine residues. An HNH domain can generally be identified by alignment to documented domain sequences, structural alignment to proteins with annotated domains, or by comparison to Hidden Markov Models (HMMs) built based on documented domain sequences (e.g., Pfam HMM PF01844 for domain HNH).

[0071] As used herein, the term “transposon” refers to mobile elements that move in and out of genomes carrying “cargo DNA” with them. These transposons can differ on the type of nucleic acid to transpose, the type of repeat at the ends of the transposon, the type of cargo to be carried, or by the mode of transposition (i.e., self-repair or host-repair).

[0072] As used herein, the term “transposase” or “transposases” refers to an enzyme that binds to the end of a transposon and catalyzes its movement to another part of the genome. Types of movement include a cut and paste mechanism and a replicative transposition mechanism.

[0073] As used herein, the term “Tn7” or “Tn7-like transposase” refers to a family of transposases comprising three main components: a heteromeric transposase (TnsA and/or TnsB) alongside a regulator protein (TnsC). In addition to the TnsABC transposition proteins, Tn7 elements can encode dedicated target site-selection proteins, TnsD and TnsE. In conjunction with TnsABC, the sequence-specific DNA-binding protein TnsD directs transposition into a conserved site referred to as the “Tn7 attachment site,” attTn7. TnsD is a member of a large family of proteins that also includes TniQ. TniQ has been shown to target transposition into resolution sites of plasmids.

[0074] As used herein, the terms “gene editing” and “genome editing” can be used interchangeably. Gene editing or genome editing means to change the nucleic acid sequence of a gene or a genome. Genome editing can include, for example, insertions, deletions, and mutations. Genome editing can be performed by a gene editing system, for example a nuclease, a reverse transcriptase, a recombinase, or a base editor.

[0075] As used herein, the term “recombinase” refers to an enzyme that mediates the recombination of DNA fragments located between recombinase recognition sequences, which results in the excision, insertion, inversion, exchange or translocation) of the DNA fragments located between the recombinase recognition sequences.

[0076] As used herein, the term “recombine,” or “recombination,” in the context of a nucleic acid modification (e.g., a genomic modification), refers to the process by which two or more nucleic acid molecules, or two or more regions of a single nucleic acid molecule, are modified by the action of a recombinase protein. Recombination can result in, inter alia, the insertion, inversion, excision, or translocation of a nucleic acid sequence, e.g., in or between one or more nucleic acid molecules.

[0077] As used herein, the term “complex” refers to a joining of at least two components. The two components may each retain the properties/activities they had prior to forming the complex or gain properties as a result of forming the complex. The joining includes, but is not limited to, covalent bonding, non-covalent bonding (i.e., hydrogen bonding, ionic interactions, Van der Waals interactions, and hydrophobic bond), use of a linker, fusion, or any other suitable method. Contemplated components of the complex include polynucleotides, polypeptides, or combinations thereof. For example, a complex comprises an endonuclease and a guide polynucleotide.

[0078] The term“contig” or “contigs” is a set of DNA segments or sequences that overlap in a way that provides a contiguous representation of a genomic region.

[0079] The term “sequence identity” or “percent identity” in the context of two or more nucleic acids or polypeptide sequences, refers to two (e.g., in a pairwise alignment) or more (e.g., in a multiple sequence alignment) sequences that are the same or have a specified percentage of amino acid residues or nucleotides that are the same, when compared and aligned for maximum correspondence over a local or global comparison window, as measured using a sequence comparison algorithm. Suitable sequence comparison algorithms for polypeptide sequences include, e.g., BLASTP using parameters of a wordlength (W) of 3, an expectation (E) of 10, and the BLOSUM62 scoring matrix setting gap costs at existence of 11, extension of 1, and using a conditional compositional score matrix adjustment for polypeptide sequences longer than 30 residues; BLASTP using parameters of a wordlength (W) of 2, an expectation (E) of 1000000, and the PAM30 scoring matrix setting gap costs at 9 to open gaps and 1 to extend gaps for sequences of less than 30 residues (these are the default parameters for BLASTP in the BLAST suite available at https://blast.ncbi.nlm.nih.gov); CLUSTALW with the Smith-Waterman homology search algorithm parameters with a match of 2, a mismatch of −1, and a gap of −1; MUSCLE with default parameters; MAFFT with parameters of a retree of 2 and max iterations of 1000; Novafold with default parameters; HMMER hmmalign with default parameters.

[0080] The term “optimally aligned” in the context of two or more nucleic acids or polypeptide sequences, refers to two (e.g., in a pairwise alignment) or more (e.g., in a multiple sequence alignment) sequences that have been aligned to maximal correspondence of amino acids residues or nucleotides, for example, as determined by the alignment producing a highest or “optimized” percent identity score.

[0081] Included in the current disclosure are variants of any of the enzymes described herein with one or more conservative amino acid substitutions. Such conservative substitutions can be made in the amino acid sequence of a polypeptide without disrupting the three-dimensional structure or function of the polypeptide. Conservative substitutions can be accomplished by substituting amino acids with similar hydrophobicity, polarity, and R chain length for one another. Additionally, or alternatively, by comparing aligned sequences of homologous proteins from different species, conservative substitutions can be identified by locating amino acid residues that have been mutated between species (e.g., non-conserved residues) without altering the basic functions of the encoded proteins. Such conservatively substituted variants include variants with at least about 20%, at least about 25%, at least about 30%, at least about 35%, at least about 40%, at least about 45%, at least about 50%, at least about 55%, at least about 60%, at least about 65%, at least about 70%, at least about 75%, at least about 80%, at least about 85%, at least about 90%, at least about 91%, at least about 92%, at least about 93%, at least about 94%, at least about 95%, at least about 96%, at least about 97%, at least about 98%, or at least about 99% identity to any one of the large serine recombinase protein sequences described herein (e.g., MG178 family large serine recombinase, or any other family large serine recombinase described herein). In some embodiments, such conservatively substituted variants are functional variants. Such functional variants can encompass sequences with substitutions such that the activity of one or more critical active site residues are not disrupted.

[0082] Also included in the current disclosure are variants of any of the enzymes described herein with substitution of one or more catalytic residues to decrease or eliminate activity of the enzyme (e.g. decreased-activity variants). In some embodiments, a decreased activity variant of a protein described herein comprises a disrupting substitution of at least one, at least two, or all three catalytic residues.

[0083] Conservative substitution tables providing functionally similar amino acids are available from a variety of references (see, for e.g., Creighton, Proteins: Structures and Molecular Properties (W H Freeman & Co.; 2nd edition (December 1993)). The following eight groups each contain amino acids that are conservative substitutions for one another:
[0084] 1) Alanine (A), Glycine (G);
[0085] 2) Aspartic acid (D), Glutamic acid (E);
[0086] 3) Asparagine (N), Glutamine (Q);
[0087] 4) Arginine (R), Lysine (K);
[0088] 5) Isoleucine (I), Leucine (L), Methionine (M), Valine (V);
[0089] 6) Phenylalanine (F), Tyrosine (Y), Tryptophan (W);
[0090] 7) Serine(S), Threonine (T); and
[0091] 8) Cysteine (C), Methionine (M)

### Serine Recombinase Gene Editing Systems

[0092] Current gene editing systems lack the ability to integrate multi-kilobase nucleic acid sequences. Several of these gene editing systems primarily rely on nuclease-directed DNA double-stranded breaks (DSBs) to direct cellular DNA repair pathways, such as homologous recombination (HR). Despite important advances in optimizing HR in specific contexts, these approaches generally suffer from low insertion efficiency, high indel rates and cargo size limitations, with limited success for cargoes larger than 1 kilobase (kb).

[0093] Large serine recombinases (LSRs) are capable of integrating large fragments of DNA into a eukaryotic genome in a non-random, site-specific manner. Viral LSRs range between 400 and 700 amino acids long and drive phage genome integration into a bacterial host genome when the virus enters its lysogenic life cycle. The mechanism for prophage integration involves the LSR recognizing a specific attachment site in the host genome, the attB site, and a phage attachment site, the attP site, on the phage genome. Viral genome integration occurs via recombination at these attachment sites, a process that leads to the generation of two new attachment sites, the attL and attR sites flanking the prophage.

[0094] By recognizing these attachment sites (i.e. recognition sequences found on DNA donor and acceptor molecules), recombinases are capable of catalyzing target cleavage, strand exchange and DNA rejoining. This mechanism enables site-specific DNA insertion without requiring any cellular cofactors and without generating exposed double strand breaks. However, several LSRs suffer from limited efficiency in DNA integration. As such, improved LSRs are needed.

[0095] Serine recombinases described herein provided for genome engineering due to their ability to integrate a desired cargo into a specific target site.

### Serine Recombinases

[0096] Described herein are gene editing systems comprising: a serine recombinase comprising at least about 80% sequence identity to any one of SEQ ID NOs: 21-7060 and 7105-7142 or a nucleic acid encoding the serine recombinase. Further described herein are nucleic acids, vectors, and cells comprising a serine recombinase described herein. Further described herein are means for integrating nucleic acid sequences in a genome.

[0097] Serine recombinases are enzymes that catalyze site-specific recombination events by facilitating DNA strand exchanges between two DNA segments possessing cognate recombinase recognition sites. The serine recombinase family comprises, for example, the small serine recombinases gamma-delta resolvase (from the Tn1000 transposon) and Tn3 resolvase (from the Tn3 transposon), or the large serine recombinases (LSRs) φC31-integrase (from the φC31 phage), Bxb1-integrase (from the mycobacteriophage), and R4 integrase. Serine recombinases are characterized by a conserved catalytic serine amino acid residue that attacks the DNA phosphodiester and becomes covalently linked to a DNA strand end during catalysis. Serine recombinases recognize cognate attachment site sequences termed attB on the acceptor DNA strand (for example a bacterial genome) and attP on the donor DNA strand (for example the phage genome). After the recombination event, the attB and attP sites are recombined to form the attL and attR sites flanking the newly integrated sequence. attB and attP sites are typically up to about 50 bases long. During the recombination event, the serine recombinases form a tetrameric complex, with a protein dimer each attaching to an attB or attP attachment site. The serine recombinases cleave each strand producing a double strand break and leaving a 2 bp overhang and then strand exchange and ligate the strands. Typically, for serine recombinases, no other enzymes are needed to perform the reaction.

[0098] In some embodiments, the serine recombinase comprises a sequence with at least 80%, at least 81%, at least 82%, at least 83%, at least 84%, at least 85%, at least 86%, at least 87%, at least 88%, at least 89%, at least 90%, at least 91%, at least 92%, at least 93%, at least 94%, at least 95%, at least 96%, at least 97%, at least 98%, at least 99%, or 100% sequence identity to any one of SEQ ID NOs: 21-7060 and 7105-7142. In some embodiments, the serine recombinase comprises a sequence having at least about 70% identity to any one of SEQ ID NOs: 21-7060 and 7105-7142. In some embodiments, the serine recombinase comprises a sequence having at least about 75% identity to any one of SEQ ID NOs: 21-7060 and 7105-7142. In some embodiments, the serine recombinase comprises a sequence having at least about 80% identity to any one of SEQ ID NOs: 21-7060 and 7105-7142. In some embodiments, the serine recombinase comprises a sequence having at least about 85% identity to any one of SEQ ID NOs: 21-7060 and 7105-7142. In some embodiments, the serine recombinase comprises a sequence having at least about 90% identity to any one of SEQ ID NOs: 21-7060 and 7105-7142. In some embodiments, the serine recombinase comprises a sequence having at least about 95% identity to any one of SEQ ID NOs: 21-7060 and 7105-7142. In some embodiments, the serine recombinase comprises a sequence having at least about 96% identity to any one of SEQ ID NOs: 21-7060 and 7105-7142. In some embodiments, the serine recombinase comprises a sequence having at least about 97% identity to any one of SEQ ID NOs: 21-7060 and 7105-7142. In some embodiments, the serine recombinase comprises a sequence having at least about 98% identity to any one of SEQ ID NOs: 21-7060 and 7105-7142. In some embodiments, the serine recombinase comprises a sequence having at least about 99% identity to any one of SEQ ID NOs: 21-7060 and 7105-7142. In some embodiments, the serine recombinase comprises a sequence having 100% identity to any one of SEQ ID NOs: 21-7060 and 7105-7142.

[0099] In some embodiments, the serine recombinase comprises a sequence with at least 80%, at least 81%, at least 82%, at least 83%, at least 84%, at least 85%, at least 86%, at least 87%, at least 88%, at least 89%, at least 90%, at least 91%, at least 92%, at least 93%, at least 94%, at least 95%, at least 96%, at least 97%, at least 98%, at least 99%, or 100% sequence identity to SEQ ID NO: 21. In some embodiments, the serine recombinase comprises a sequence having at least about 70% identity to SEQ ID NO: 21. In some embodiments, the serine recombinase comprises a sequence having at least about 75% identity to SEQ ID NO: 21. In some embodiments, the serine recombinase comprises a sequence having at least about 80% identity to SEQ ID NO: 21. In some embodiments, the serine recombinase comprises a sequence having at least about 85% identity to SEQ ID NO: 21. In some embodiments, the serine recombinase comprises a sequence having at least about 90% identity to SEQ ID NO: 21. In some embodiments, the serine recombinase comprises a sequence having at least about 95% identity to SEQ ID NO: 21. In some embodiments, the serine recombinase comprises a sequence having at least about 96% identity to SEQ ID NO: 21. In some embodiments, the serine recombinase comprises a sequence having at least about 97% identity to SEQ ID NO: 21. In some embodiments, the serine recombinase comprises a sequence having at least about 98% identity to SEQ ID NO: 21. In some embodiments, the serine recombinase comprises a sequence having at least about 99% identity to SEQ ID NO: 21. In some embodiments, the serine recombinase comprises a sequence having 100% identity to SEQ ID NO: 21.

[0100] In some embodiments, the serine recombinase comprises a sequence with at least 80%, at least 81%, at least 82%, at least 83%, at least 84%, at least 85%, at least 86%, at least 87%, at least 88%, at least 89%, at least 90%, at least 91%, at least 92%, at least 93%, at least 94%, at least 95%, at least 96%, at least 97%, at least 98%, at least 99%, or 100% sequence identity to SEQ ID NO: 22. In some embodiments, the serine recombinase comprises a sequence having at least about 70% identity to SEQ ID NO: 22. In some embodiments, the serine recombinase comprises a sequence having at least about 75% identity to SEQ ID NO: 22. In some embodiments, the serine recombinase comprises a sequence having at least about 80% identity to SEQ ID NO: 22. In some embodiments, the serine recombinase comprises a sequence having at least about 85% identity to SEQ ID NO: 22. In some embodiments, the serine recombinase comprises a sequence having at least about 90% identity to SEQ ID NO: 22. In some embodiments, the serine recombinase comprises a sequence having at least about 95% identity to SEQ ID NO: 22. In some embodiments, the serine recombinase comprises a sequence having at least about 96% identity to SEQ ID NO: 22. In some embodiments, the serine recombinase comprises a sequence having at least about 97% identity to SEQ ID NO: 22. In some embodiments, the serine recombinase comprises a sequence having at least about 98% identity to SEQ ID NO: 22. In some embodiments, the serine recombinase comprises a sequence having at least about 99% identity to SEQ ID NO: 22. In some embodiments, the serine recombinase comprises a sequence having 100% identity to SEQ ID NO: 22.

[0101] In some embodiments, the serine recombinase comprises a sequence with at least 80%, at least 81%, at least 82%, at least 83%, at least 84%, at least 85%, at least 86%, at least 87%, at least 88%, at least 89%, at least 90%, at least 91%, at least 92%, at least 93%, at least 94%, at least 95%, at least 96%, at least 97%, at least 98%, at least 99%, or 100% sequence identity to SEQ ID NO: 23. In some embodiments, the serine recombinase comprises a sequence having at least about 70% identity to SEQ ID NO: 23. In some embodiments, the serine recombinase comprises a sequence having at least about 75% identity to SEQ ID NO: 23. In some embodiments, the serine recombinase comprises a sequence having at least about 80% identity to SEQ ID NO: 23. In some embodiments, the serine recombinase comprises a sequence having at least about 85% identity to SEQ ID NO: 23. In some embodiments, the serine recombinase comprises a sequence having at least about 90% identity to SEQ ID NO: 23. In some embodiments, the serine recombinase comprises a sequence having at least about 95% identity to SEQ ID NO: 23. In some embodiments, the serine recombinase comprises a sequence having at least about 96% identity to SEQ ID NO: 23. In some embodiments, the serine recombinase comprises a sequence having at least about 97% identity to SEQ ID NO: 23. In some embodiments, the serine recombinase comprises a sequence having at least about 98% identity to SEQ ID NO: 23. In some embodiments, the serine recombinase comprises a sequence having at least about 99% identity to SEQ ID NO: 23. In some embodiments, the serine recombinase comprises a sequence having 100% identity to SEQ ID NO: 23.

[0102] In some embodiments, the serine recombinase comprises a sequence with at least 80%, at least 81%, at least 82%, at least 83%, at least 84%, at least 85%, at least 86%, at least 87%, at least 88%, at least 89%, at least 90%, at least 91%, at least 92%, at least 93%, at least 94%, at least 95%, at least 96%, at least 97%, at least 98%, at least 99%, or 100% sequence identity to SEQ ID NO: 24. In some embodiments, the serine recombinase comprises a sequence having at least about 70% identity to SEQ ID NO: 24. In some embodiments, the serine recombinase comprises a sequence having at least about 75% identity to SEQ ID NO: 24. In some embodiments, the serine recombinase comprises a sequence having at least about 80% identity to SEQ ID NO: 24. In some embodiments, the serine recombinase comprises a sequence having at least about 85% identity to SEQ ID NO: 24. In some embodiments, the serine recombinase comprises a sequence having at least about 90% identity to SEQ ID NO: 24. In some embodiments, the serine recombinase comprises a sequence having at least about 95% identity to SEQ ID NO: 24. In some embodiments, the serine recombinase comprises a sequence having at least about 96% identity to SEQ ID NO: 24. In some embodiments, the serine recombinase comprises a sequence having at least about 97% identity to SEQ ID NO: 24. In some embodiments, the serine recombinase comprises a sequence having at least about 98% identity to SEQ ID NO: 24. In some embodiments, the serine recombinase comprises a sequence having at least about 99% identity to SEQ ID NO: 24. In some embodiments, the serine recombinase comprises a sequence having 100% identity to SEQ ID NO: 24.

[0103] In some embodiments, the serine recombinase comprises a sequence with at least 80%, at least 81%, at least 82%, at least 83%, at least 84%, at least 85%, at least 86%, at least 87%, at least 88%, at least 89%, at least 90%, at least 91%, at least 92%, at least 93%, at least 94%, at least 95%, at least 96%, at least 97%, at least 98%, at least 99%, or 100% sequence identity to SEQ ID NO: 7140. In some embodiments, the serine recombinase comprises a sequence having at least about 70% identity to SEQ ID NO: 7140. In some embodiments, the serine recombinase comprises a sequence having at least about 75% identity to SEQ ID NO: 7140. In some embodiments, the serine recombinase comprises a sequence having at least about 80% identity to SEQ ID NO: 7140. In some embodiments, the serine recombinase comprises a sequence having at least about 85% identity to SEQ ID NO: 7140. In some embodiments, the serine recombinase comprises a sequence having at least about 90% identity to SEQ ID NO: 7140. In some embodiments, the serine recombinase comprises a sequence having at least about 95% identity to SEQ ID NO: 7140. In some embodiments, the serine recombinase comprises a sequence having at least about 96% identity to SEQ ID NO: 7140. In some embodiments, the serine recombinase comprises a sequence having at least about 97% identity to SEQ ID NO: 7140. In some embodiments, the serine recombinase comprises a sequence having at least about 98% identity to SEQ ID NO: 7140. In some embodiments, the serine recombinase comprises a sequence having at least about 99% identity to SEQ ID NO: 7140. In some embodiments, the serine recombinase comprises a sequence having 100% identity to SEQ ID NO: 7140.

[0104] In some embodiments, the serine recombinase comprises a sequence with at least 80%, at least 81%, at least 82%, at least 83%, at least 84%, at least 85%, at least 86%, at least 87%, at least 88%, at least 89%, at least 90%, at least 91%, at least 92%, at least 93%, at least 94%, at least 95%, at least 96%, at least 97%, at least 98%, at least 99%, or 100% sequence identity to SEQ ID NO: 7131. In some embodiments, the serine recombinase comprises a sequence having at least about 70% identity to SEQ ID NO: 7131. In some embodiments, the serine recombinase comprises a sequence having at least about 75% identity to SEQ ID NO: 7131. In some embodiments, the serine recombinase comprises a sequence having at least about 80% identity to SEQ ID NO: 7131. In some embodiments, the serine recombinase comprises a sequence having at least about 85% identity to SEQ ID NO: 7131. In some embodiments, the serine recombinase comprises a sequence having at least about 90% identity to SEQ ID NO: 7131. In some embodiments, the serine recombinase comprises a sequence having at least about 95% identity to SEQ ID NO: 7131. In some embodiments, the serine recombinase comprises a sequence having at least about 96% identity to SEQ ID NO: 7131. In some embodiments, the serine recombinase comprises a sequence having at least about 97% identity to SEQ ID NO: 7131. In some embodiments, the serine recombinase comprises a sequence having at least about 98% identity to SEQ ID NO: 7131. In some embodiments, the serine recombinase comprises a sequence having at least about 99% identity to SEQ ID NO: 7131. In some embodiments, the serine recombinase comprises a sequence having 100% identity to SEQ ID NO: 7131.

[0105] In some embodiments, the serine recombinase comprises a sequence with at least 80%, at least 81%, at least 82%, at least 83%, at least 84%, at least 85%, at least 86%, at least 87%, at least 88%, at least 89%, at least 90%, at least 91%, at least 92%, at least 93%, at least 94%, at least 95%, at least 96%, at least 97%, at least 98%, at least 99%, or 100% sequence identity to SEQ ID NO: 7115. In some embodiments, the serine recombinase comprises a sequence having at least about 70% identity to SEQ ID NO: 7115. In some embodiments, the serine recombinase comprises a sequence having at least about 75% identity to SEQ ID NO: 7115. In some embodiments, the serine recombinase comprises a sequence having at least about 80% identity to SEQ ID NO: 7115. In some embodiments, the serine recombinase comprises a sequence having at least about 85% identity to SEQ ID NO: 7115. In some embodiments, the serine recombinase comprises a sequence having at least about 90% identity to SEQ ID NO: 7115. In some embodiments, the serine recombinase comprises a sequence having at least about 95% identity to SEQ ID NO: 7115. In some embodiments, the serine recombinase comprises a sequence having at least about 96% identity to SEQ ID NO: 7115. In some embodiments, the serine recombinase comprises a sequence having at least about 97% identity to SEQ ID NO: 7115. In some embodiments, the serine recombinase comprises a sequence having at least about 98% identity to SEQ ID NO: 7115. In some embodiments, the serine recombinase comprises a sequence having at least about 99% identity to SEQ ID NO: 7115. In some embodiments, the serine recombinase comprises a sequence having 100% identity to SEQ ID NO: 7115.

[0106] In some embodiments, the serine recombinase comprises a sequence with at least 80%, at least 81%, at least 82%, at least 83%, at least 84%, at least 85%, at least 86%, at least 87%, at least 88%, at least 89%, at least 90%, at least 91%, at least 92%, at least 93%, at least 94%, at least 95%, at least 96%, at least 97%, at least 98%, at least 99%, or 100% sequence identity to SEQ ID NO: 7139. In some embodiments, the serine recombinase comprises a sequence having at least about 70% identity to SEQ ID NO: 7139. In some embodiments, the serine recombinase comprises a sequence having at least about 75% identity to SEQ ID NO: 7139. In some embodiments, the serine recombinase comprises a sequence having at least about 80% identity to SEQ ID NO: 7139. In some embodiments, the serine recombinase comprises a sequence having at least about 85% identity to SEQ ID NO: 7139. In some embodiments, the serine recombinase comprises a sequence having at least about 90% identity to SEQ ID NO: 7139. In some embodiments, the serine recombinase comprises a sequence having at least about 95% identity to SEQ ID NO: 7139. In some embodiments, the serine recombinase comprises a sequence having at least about 96% identity to SEQ ID NO: 7139. In some embodiments, the serine recombinase comprises a sequence having at least about 97% identity to SEQ ID NO: 7139. In some embodiments, the serine recombinase comprises a sequence having at least about 98% identity to SEQ ID NO: 7139. In some embodiments, the serine recombinase comprises a sequence having at least about 99% identity to SEQ ID NO: 7139. In some embodiments, the serine recombinase comprises a sequence having 100% identity to SEQ ID NO: 7139.

[0107] In some embodiments, the serine recombinase comprises a sequence with at least 80%, at least 81%, at least 82%, at least 83%, at least 84%, at least 85%, at least 86%, at least 87%, at least 88%, at least 89%, at least 90%, at least 91%, at least 92%, at least 93%, at least 94%, at least 95%, at least 96%, at least 97%, at least 98%, at least 99%, or 100% sequence identity to SEQ ID NO: 1848. In some embodiments, the serine recombinase comprises a sequence having at least about 70% identity to SEQ ID NO: 1848. In some embodiments, the serine recombinase comprises a sequence having at least about 75% identity to SEQ ID NO: 1848. In some embodiments, the serine recombinase comprises a sequence having at least about 80% identity to SEQ ID NO: 1848. In some embodiments, the serine recombinase comprises a sequence having at least about 85% identity to SEQ ID NO: 1848. In some embodiments, the serine recombinase comprises a sequence having at least about 90% identity to SEQ ID NO: 1848. In some embodiments, the serine recombinase comprises a sequence having at least about 95% identity to SEQ ID NO: 1848. In some embodiments, the serine recombinase comprises a sequence having at least about 96% identity to SEQ ID NO: 1848. In some embodiments, the serine recombinase comprises a sequence having at least about 97% identity to SEQ ID NO: 1848. In some embodiments, the serine recombinase comprises a sequence having at least about 98% identity to SEQ ID NO: 1848. In some embodiments, the serine recombinase comprises a sequence having at least about 99% identity to SEQ ID NO: 1848. In some embodiments, the serine recombinase comprises a sequence having 100% identity to SEQ ID NO: 1848.

[0108] In some embodiments, the serine recombinase comprises a sequence with at least 80%, at least 81%, at least 82%, at least 83%, at least 84%, at least 85%, at least 86%, at least 87%, at least 88%, at least 89%, at least 90%, at least 91%, at least 92%, at least 93%, at least 94%, at least 95%, at least 96%, at least 97%, at least 98%, at least 99%, or 100% sequence identity to SEQ ID NO: 7111. In some embodiments, the serine recombinase comprises a sequence having at least about 70% identity to SEQ ID NO: 7111. In some embodiments, the serine recombinase comprises a sequence having at least about 75% identity to SEQ ID NO: 7111. In some embodiments, the serine recombinase comprises a sequence having at least about 80% identity to SEQ ID NO: 7111. In some embodiments, the serine recombinase comprises a sequence having at least about 85% identity to SEQ ID NO: 7111. In some embodiments, the serine recombinase comprises a sequence having at least about 90% identity to SEQ ID NO: 7111. In some embodiments, the serine recombinase comprises a sequence having at least about 95% identity to SEQ ID NO: 7111. In some embodiments, the serine recombinase comprises a sequence having at least about 96% identity to SEQ ID NO: 7111. In some embodiments, the serine recombinase comprises a sequence having at least about 97% identity to SEQ ID NO: 7111. In some embodiments, the serine recombinase comprises a sequence having at least about 98% identity to SEQ ID NO: 7111. In some embodiments, the serine recombinase comprises a sequence having at least about 99% identity to SEQ ID NO: 7111. In some embodiments, the serine recombinase comprises a sequence having 100% identity to SEQ ID NO: 7111.

[0109] In some embodiments, the serine recombinase comprises a sequence with at least 80%, at least 81%, at least 82%, at least 83%, at least 84%, at least 85%, at least 86%, at least 87%, at least 88%, at least 89%, at least 90%, at least 91%, at least 92%, at least 93%, at least 94%, at least 95%, at least 96%, at least 97%, at least 98%, at least 99%, or 100% sequence identity to SEQ ID NO: 7136. In some embodiments, the serine recombinase comprises a sequence having at least about 70% identity to SEQ ID NO: 7136. In some embodiments, the serine recombinase comprises a sequence having at least about 75% identity to SEQ ID NO: 7136. In some embodiments, the serine recombinase comprises a sequence having at least about 80% identity to SEQ ID NO: 7136. In some embodiments, the serine recombinase comprises a sequence having at least about 85% identity to SEQ ID NO: 7136. In some embodiments, the serine recombinase comprises a sequence having at least about 90% identity to SEQ ID NO: 7136. In some embodiments, the serine recombinase comprises a sequence having at least about 95% identity to SEQ ID NO: 7136. In some embodiments, the serine recombinase comprises a sequence having at least about 96% identity to SEQ ID NO: 7136. In some embodiments, the serine recombinase comprises a sequence having at least about 97% identity to SEQ ID NO: 7136. In some embodiments, the serine recombinase comprises a sequence having at least about 98% identity to SEQ ID NO: 7136. In some embodiments, the serine recombinase comprises a sequence having at least about 99% identity to SEQ ID NO: 7136. In some embodiments, the serine recombinase comprises a sequence having 100% identity to SEQ ID NO: 7136.

[0110] Further described herein are eukaryotic cells comprising a serine recombinase comprising at least about 80% sequence identity to any one of SEQ ID NOs: 21-7060 and 7105-7142. Further described herein are eukaryotic cells comprising a serine recombinase comprising at least about 80% sequence identity to SEQ ID NO: 21. Further described herein are eukaryotic cells comprising a serine recombinase comprises at least about 80% sequence identity to SEQ ID NO: 22. Further described herein are eukaryotic cells comprising a serine recombinase comprises at least about 80% sequence identity to SEQ ID NO: 23. Further described herein are eukaryotic cells comprising a serine recombinase comprises at least about 80% sequence identity to SEQ ID NO: 24.

[0111] In some embodiments, the eukaryotic cell is a mammalian cell. In some embodiments, the eukaryotic cell is a human cell.

[0112] In some embodiments, the serine recombinases described herein comprise improved integration efficiency. In some embodiments, the serine recombinases described herein comprise an integration efficiency of at least about 5%. In some embodiments, the serine recombinases described herein comprise an integration efficiency of at least about 25%. In some embodiments, the serine recombinases described herein comprise an integration efficiency of at least about 50%. In some embodiments, the serine recombinases described herein comprise an integration efficiency of at least about 5%, 10%, 15%, 20%, 25%, 30%, 35%, 40%, 45%, 50%, 55%, 60%, 65%, 70%, 75%, 80%, 85%, 90%, 95%, or more than 95%. In some embodiments, the serine recombinases described herein comprise an improved integration efficiency as compared to a serine recombinase selected from the group consisting of: β-six, CinH, ParA γδ, Bxb1, φC31, TP901, TG1, φBT1, R4, φRV1, φFC1, MR11, A118, U153, and gp29.

[0113] In some embodiments, the serine recombinase is a viral, prokaryotic, or eukaryotic serine recombinase. In some embodiments, the serine recombinase is capable of targeting genes comprising a catalase domain or synthase domain. In some embodiments, the catalase is manganese catalase. In some embodiments, the synthase is Queuosine synthase. In some embodiments, the serine recombinase is capable of targeting genes comprising a DUF4244 Pfam domain.

[0114] In some embodiments, the serine recombinase described herein comprises one or more nuclear localization sequences (NLSs) proximal to an N- or C-terminus of serine recombinase. In some embodiments, the NLS comprises any of the sequences in Table 1 below, or a combination thereof:

TABLE 1
Example NLS Sequences

| Source | NLS amino acid sequence | SEQ ID NO: |
|---|---|---|
| SV40 | PKKKRKV | 7419 |
| nucleoplasmin bipartite NLS | KRPAATKKAGQAKKKK | 7420 |
| c-myc NLS | PAAKRVKLD | 7421 |
| c-myc NLS | RQRRNELKRSP | 7422 |
| hRNPA1 M9 NLS | NQSSNFGPMKGGNFGGRSSGPYGGGGQYFA | 7423 |
| | KPRNQGGY | |
| Importin-alpha IBB domain | RMRIZFKNKGKDTAELRRRRVEVSVELRKAK | 7424 |
| | KDEQILKRRNV | |
| Myoma T protein | VSRKRPRP | 7425 |
| Myoma T protein | PPKKARED | 7426 |
| p53 | PQPKKKPL | 7427 |
| mouse c-abl IV | SALIKKKKKMAP | 7428 |
| influenza virus NS1 | DRLRR | 7429 |
| influenza virus NS1 | PKQKKRK | 7430 |
| Hepatitis virus delta antigen | RKLKKKIKKL | 7431 |
| mouse Mx1 protein | REKKKFLKRR | 7432 |
| human poly(ADP-ribose) | KRKGDEVDGVDEVAKKKSKK | 7433 |
| polymerase | | |
| steroid hormone receptor | RKCLQAGMNLEARKTKK | 7434 |
| (human) glucocorticoid | | |

[0115] In some embodiments, the serine recombinase comprises a tag. In some embodiments, the tag is an affinity tag. Exemplary affinity tags include, but are not limited to, a His-tag, a Flag tag, a Myc-tag, an MBP-tag, and a GST-tag.

[0116] In some embodiments, the serine recombinase comprises a protease cleavage site. Exemplary protease cleavage sites include, but are not limited to, a TEV site, a C3 site, a Factor Xa site, and an Enterokinase site.

### Recombination Sites

[0117] Described herein are gene editing systems comprising: a serine recombinase comprising at least about 80% sequence identity to any one of SEQ ID NOs: 21-7060 and 7105-7142 or a nucleic acid encoding the serine recombinase; and a nucleic acid comprising a donor polynucleotide and a first attachment site sequence.

[0118] In some embodiments, the first attachment site sequence is 5′ of the donor polynucleotide.

[0119] In some embodiments, the nucleic acid encoding the serine recombinase further comprises a second attachment site sequence. In some embodiments, the second attachment site sequence is 5′ of the serine recombinase. In some embodiments, the nucleic acid encoding the serine recombinase comprises one or more attachment site sequences. In some embodiments, the nucleic acid encoding the serine recombinase comprises 1, 2, 3, 4, 5, or more than 5 attachment site sequences.

[0120] In some embodiments, the nucleic acid comprising a donor polynucleotide comprises one or more attachment site sequences. In some embodiments, the nucleic acid comprising a donor polynucleotide comprises 1, 2, 3, 4, 5, or more than 5 attachment site sequences.

[0121] In some embodiments, the first attachment site sequence and the second attachment site sequence are capable of recombination.

[0122] In some embodiments, the first attachment site sequence is a bacterial genomic recombination sequence (attB). In some embodiments, the attB sequence comprises about 20 to about 500 nucleotides. In some embodiments, the attB sequence comprises about 20 to about 450, about 20 to about 400, about 20 to about 350, about 20 to about 300, about 20 to about 250, about 20 to about 200, about 20 to about 250, about 20 to about 100, about 20 to about 50, about 50 to about 450, about 50 to about 400, about 50 to about 350, about 50 to about 300, about 50 to about 250, about 50 to about 200, about 50 to about 150, about 50 to about 100, about 100 to about 450, about 100 to about 400, about 100 to about 350, about 100 to about 300, about 100 to about 250, about 100 to about 200, or about 100 to about 150 nucleotides.

[0123] In some embodiments, the first attachment site sequence is a phage genomic recombination sequence (attP). In some embodiments, the attP sequence comprises about 20 to about 450, about 20 to about 400, about 20 to about 350, about 20 to about 300, about 20 to about 250, about 20 to about 200, about 20 to about 250, about 20 to about 100, about 20 to about 50, about 50 to about 450, about 50 to about 400, about 50 to about 350, about 50 to about 300, about 50 to about 250, about 50 to about 200, about 50 to about 150, about 50 to about 100, about 100 to about 450, about 100 to about 400, about 100 to about 350, about 100 to about 300, about 100 to about 250, about 100 to about 200, or about 100 to about 150 nucleotides.

[0124] In some embodiments, the second attachment site sequence is a bacterial genomic recombination sequence (attB). In some embodiments, the attB sequence comprises about 20 to about 500 nucleotides. In some embodiments, the attB sequence comprises about 20 to about 450, about 20 to about 400, about 20 to about 350, about 20 to about 300, about 20 to about 250, about 20 to about 200, about 20 to about 250, about 20 to about 100, about 20 to about 50, about 50 to about 450, about 50 to about 400, about 50 to about 350, about 50 to about 300, about 50 to about 250, about 50 to about 200, about 50 to about 150, about 50 to about 100, about 100 to about 450, about 100 to about 400, about 100 to about 350, about 100 to about 300, about 100 to about 250, about 100 to about 200, or about 100 to about 150 nucleotides.

[0125] In some embodiments, the second attachment site sequence is a phage genomic recombination sequence (attP). In some embodiments, the attP sequence comprises about 20 to about 450, about 20 to about 400, about 20 to about 350, about 20 to about 300, about 20 to about 250, about 20 to about 200, about 20 to about 250, about 20 to about 100, about 20 to about 50, about 50 to about 450, about 50 to about 400, about 50 to about 350, about 50 to about 300, about 50 to about 250, about 50 to about 200, about 50 to about 150, about 50 to about 100, about 100 to about 450, about 100 to about 400, about 100 to about 350, about 100 to about 300, about 100 to about 250, about 100 to about 200, or about 100 to about 150 nucleotides.

[0126] In some embodiments, the attB sequence comprises at least 70% (e.g., 75%, 80%, 90%, 95%, 97%, 98%, or 99%) sequence identity to any one of SEQ ID NOs: 1, 2, 5, 6, 9, 10, 13, 14, 7151, 7155, 7159, 7163, 7167, 7171, 7175, 7179, 7188-7200, 7206-7210, 7215, 7220, 7225, 7226, 7233, 7238, 7243, 7248, 7253, 7258, 7263, 7264, 7271, 7277, 7282, 7287, 7292, 7297, 7302, 7307, 7312, 7317, 7322, 7327, 7332, 7337, 7342, 7347, 7352, 7357, 7362, 7367, 7372, 7377, 7382, 7387, 7392, 7397, and 7402. In some embodiments, the attB sequence comprises at least 75% sequence identity to any one of SEQ ID NOs: 1, 2, 5, 6, 9, 10, 13, 14, 7151, 7155, 7159, 7163, 7167, 7171, 7175, 7179, 7188-7200, 7206-7210, 7215, 7220, 7225, 7226, 7233, 7238, 7243, 7248, 7253, 7258, 7263, 7264, 7271, 7277, 7282, 7287, 7292, 7297, 7302, 7307, 7312, 7317, 7322, 7327, 7332, 7337, 7342, 7347, 7352, 7357, 7362, 7367, 7372, 7377, 7382, 7387, 7392, 7397, and 7402. In some embodiments, the attB sequence comprises at least 80% sequence identity to any one of SEQ ID NOs: 1, 2, 5, 6, 9, 10, 13, 14, 7151, 7155, 7159, 7163, 7167, 7171, 7175, 7179, 7188-7200, 7206-7210, 7215, 7220, 7225, 7226, 7233, 7238, 7243, 7248, 7253, 7258, 7263, 7264, 7271, 7277, 7282, 7287, 7292, 7297, 7302, 7307, 7312, 7317, 7322, 7327, 7332, 7337, 7342, 7347, 7352, 7357, 7362, 7367, 7372, 7377, 7382, 7387, 7392, 7397, and 7402. In some embodiments, the attB sequence comprises at least 90% sequence identity to any one of SEQ ID NOs: 1, 2, 5, 6, 9, 10, 13, 14, 7151, 7155, 7159, 7163, 7167, 7171, 7175, 7179, 7188-7200, 7206-7210, 7215, 7220, 7225, 7226, 7233, 7238, 7243, 7248, 7253, 7258, 7263, 7264, 7271, 7277, 7282, 7287, 7292, 7297, 7302, 7307, 7312, 7317, 7322, 7327, 7332, 7337, 7342, 7347, 7352, 7357, 7362, 7367, 7372, 7377, 7382, 7387, 7392, 7397, and 7402. In some embodiments, the attB sequence comprises at least 95% sequence identity to any one of SEQ ID NOs: 1, 2, 5, 6, 9, 10, 13, 14, 7151, 7155, 7159, 7163, 7167, 7171, 7175, 7179, 7188-7200, 7206-7210, 7215, 7220, 7225, 7226, 7233, 7238, 7243, 7248, 7253, 7258, 7263, 7264, 7271, 7277, 7282, 7287, 7292, 7297, 7302, 7307, 7312, 7317, 7322, 7327, 7332, 7337, 7342, 7347, 7352, 7357, 7362, 7367, 7372, 7377, 7382, 7387, 7392, 7397, and 7402. In some embodiments, the attB sequence comprises at least 97% sequence identity to any one of SEQ ID NOs: 1, 2, 5, 6, 9, 10, 13, 14, 7151, 7155, 7159, 7163, 7167, 7171, 7175, 7179, 7188-7200, 7206-7210, 7215, 7220, 7225, 7226, 7233, 7238, 7243, 7248, 7253, 7258, 7263, 7264, 7271, 7277, 7282, 7287, 7292, 7297, 7302, 7307, 7312, 7317, 7322, 7327, 7332, 7337, 7342, 7347, 7352, 7357, 7362, 7367, 7372, 7377, 7382, 7387, 7392, 7397, and 7402. In some embodiments, the attB sequence comprises at least 98% sequence identity to any one of SEQ ID NOs: 1, 2, 5, 6, 9, 10, 13, 14, 7151, 7155, 7159, 7163, 7167, 7171, 7175, 7179, 7188-7200, 7206-7210, 7215, 7220, 7225, 7226, 7233, 7238, 7243, 7248, 7253, 7258, 7263, 7264, 7271, 7277, 7282, 7287, 7292, 7297, 7302, 7307, 7312, 7317, 7322, 7327, 7332, 7337, 7342, 7347, 7352, 7357, 7362, 7367, 7372, 7377, 7382, 7387, 7392, 7397, and 7402. In some embodiments, the attB sequence comprises at least 99% sequence identity to any one of SEQ ID NOs: 1, 2, 5, 6, 9, 10, 13, 14, 7151, 7155, 7159, 7163, 7167, 7171, 7175, 7179, 7188-7200, 7206-7210, 7215, 7220, 7225, 7226, 7233, 7238, 7243, 7248, 7253, 7258, 7263, 7264, 7271, 7277, 7282, 7287, 7292, 7297, 7302, 7307, 7312, 7317, 7322, 7327, 7332, 7337, 7342, 7347, 7352, 7357, 7362, 7367, 7372, 7377, 7382, 7387, 7392, 7397, and 7402. In some embodiments, the attB sequence comprises any one of SEQ ID NOs: 1, 2, 5, 6, 9, 10, 13, 14, 7151, 7155, 7159, 7163, 7167, 7171, 7175, 7179, 7188-7200, 7206-7210, 7215, 7220, 7225, 7226, 7233, 7238, 7243, 7248, 7253, 7258, 7263, 7264, 7271, 7277, 7282, 7287, 7292, 7297, 7302, 7307, 7312, 7317, 7322, 7327, 7332, 7337, 7342, 7347, 7352, 7357, 7362, 7367, 7372, 7377, 7382, 7387, 7392, 7397, and 7402.

[0127] In some embodiments, the attB sequence comprises at least 70% (e.g., 75%, 80%, 90%, 95%, 97%, 98%, or 99%) sequence identity to any one of SEQ ID NOs: 1, 5, 9, and 13. In some embodiments, the attB sequence comprises at least 75% sequence identity to any one of SEQ ID NOs: 1, 5, 9, and 13. In some embodiments, the attB sequence comprises at least 80% sequence identity to any one of SEQ ID NOs: 1, 5, 9, and 13. In some embodiments, the attB sequence comprises at least 90% sequence identity to any one of SEQ ID NOs: 1, 5, 9, and 13. In some embodiments, the attB sequence comprises at least 95% sequence identity to any one of SEQ ID NOs: 1, 5, 9, and 13. In some embodiments, the attB sequence comprises at least 97% sequence identity to any one of SEQ ID NOs: 1, 5, 9, and 13. In some embodiments, the attB sequence comprises at least 98% sequence identity to any one of SEQ ID NOs: 1, 5, 9, and 13. In some embodiments, the attB sequence comprises at least 99% sequence identity to any one of SEQ ID NOs: 1, 5, 9, and 13. In some embodiments, the attB sequence comprises any one of SEQ ID NOs: 1, 5, 9, and 13.

[0128] In some embodiments, the attP sequence comprises at least 70% (e.g., 75%, 80%, 90%, 95%, 97%, 98%, or 99%) sequence identity to any one of SEQ ID NOs: 1, 2, 5, 6, 9, 10, 13, 14, 7152, 7156, 7160, 7164, 7168, 7172, 7176, 7180, 7183-7187, 7201-7205, 7217, 7222, 7228, 7229, 7235, 7240, 7245, 7250, 7255, 7260, 7266, 7267, 7273, 7279, 7284, 7289, 7294, 7299, 7304, 7309, 7314, 7319, 7324, 7329, 7334, 7339, 7344, 7349, 7354, 7359, 7364, 7369, 7374, 7379, 7384, 7389, 7394, 7399, and 7404. In some embodiments, the attP sequence comprises at least 75% sequence identity to any one of SEQ ID NOs: 1, 2, 5, 6, 9, 10, 13, 14, 7152, 7156, 7160, 7164, 7168, 7172, 7176, 7180, 7183-7187, 7201-7205, 7217, 7222, 7228, 7229, 7235, 7240, 7245, 7250, 7255, 7260, 7266, 7267, 7273, 7279, 7284, 7289, 7294, 7299, 7304, 7309, 7314, 7319, 7324, 7329, 7334, 7339, 7344, 7349, 7354, 7359, 7364, 7369, 7374, 7379, 7384, 7389, 7394, 7399, and 7404. In some embodiments, the attP sequence comprises at least 80% sequence identity to any one of SEQ ID NOs: 1, 2, 5, 6, 9, 10, 13, 14, 7152, 7156, 7160, 7164, 7168, 7172, 7176, 7180, 7183-7187, 7201-7205, 7217, 7222, 7228, 7229, 7235, 7240, 7245, 7250, 7255, 7260, 7266, 7267, 7273, 7279, 7284, 7289, 7294, 7299, 7304, 7309, 7314, 7319, 7324, 7329, 7334, 7339, 7344, 7349, 7354, 7359, 7364, 7369, 7374, 7379, 7384, 7389, 7394, 7399, and 7404. In some embodiments, the attP sequence comprises at least 90% sequence identity to any one of SEQ ID NOs: 1, 2, 5, 6, 9, 10, 13, 14, 7152, 7156, 7160, 7164, 7168, 7172, 7176, 7180, 7183-7187, 7201-7205, 7217, 7222, 7228, 7229, 7235, 7240, 7245, 7250, 7255, 7260, 7266, 7267, 7273, 7279, 7284, 7289, 7294, 7299, 7304, 7309, 7314, 7319, 7324, 7329, 7334, 7339, 7344, 7349, 7354, 7359, 7364, 7369, 7374, 7379, 7384, 7389, 7394, 7399, and 7404. In some embodiments, the attP sequence comprises at least 95% sequence identity to any one of SEQ ID NOs: 1, 2, 5, 6, 9, 10, 13, 14, 7152, 7156, 7160, 7164, 7168, 7172, 7176, 7180, 7183-7187, 7201-7205, 7217, 7222, 7228, 7229, 7235, 7240, 7245, 7250, 7255, 7260, 7266, 7267, 7273, 7279, 7284, 7289, 7294, 7299, 7304, 7309, 7314, 7319, 7324, 7329, 7334, 7339, 7344, 7349, 7354, 7359, 7364, 7369, 7374, 7379, 7384, 7389, 7394, 7399, and 7404. In some embodiments, the attP sequence comprises at least 97% sequence identity to any one of SEQ ID NOs: 1, 2, 5, 6, 9, 10, 13, 14, 7152, 7156, 7160, 7164, 7168, 7172, 7176, 7180, 7183-7187, 7201-7205, 7217, 7222, 7228, 7229, 7235, 7240, 7245, 7250, 7255, 7260, 7266, 7267, 7273, 7279, 7284, 7289, 7294, 7299, 7304, 7309, 7314, 7319, 7324, 7329, 7334, 7339, 7344, 7349, 7354, 7359, 7364, 7369, 7374, 7379, 7384, 7389, 7394, 7399, and 7404. In some embodiments, the attP sequence comprises at least 98% sequence identity to any one of SEQ ID NOs: 1, 2, 5, 6, 9, 10, 13, 14, 7152, 7156, 7160, 7164, 7168, 7172, 7176, 7180, 7183-7187, 7201-7205, 7217, 7222, 7228, 7229, 7235, 7240, 7245, 7250, 7255, 7260, 7266, 7267, 7273, 7279, 7284, 7289, 7294, 7299, 7304, 7309, 7314, 7319, 7324, 7329, 7334, 7339, 7344, 7349, 7354, 7359, 7364, 7369, 7374, 7379, 7384, 7389, 7394, 7399, and 7404. In some embodiments, the attP sequence comprises at least 99% sequence identity to any one of SEQ ID NOs: 1, 2, 5, 6, 9, 10, 13, 14, 7152, 7156, 7160, 7164, 7168, 7172, 7176, 7180, 7183-7187, 7201-7205, 7217, 7222, 7228, 7229, 7235, 7240, 7245, 7250, 7255, 7260, 7266, 7267, 7273, 7279, 7284, 7289, 7294, 7299, 7304, 7309, 7314, 7319, 7324, 7329, 7334, 7339, 7344, 7349, 7354, 7359, 7364, 7369, 7374, 7379, 7384, 7389, 7394, 7399, and 7404. In some embodiments, the attP sequence comprises any one of SEQ ID NOs: 1, 2, 5, 6, 9, 10, 13, 14, 7152, 7156, 7160, 7164, 7168, 7172, 7176, 7180, 7183-7187, 7201-7205, 7217, 7222, 7228, 7229, 7235, 7240, 7245, 7250, 7255, 7260, 7266, 7267, 7273, 7279, 7284, 7289, 7294, 7299, 7304, 7309, 7314, 7319, 7324, 7329, 7334, 7339, 7344, 7349, 7354, 7359, 7364, 7369, 7374, 7379, 7384, 7389, 7394, 7399, and 7404.

[0129] In some embodiments, the attP sequence comprises at least 70% (e.g., 75%, 80%, 90%, 95%, 97%, 98%, or 99%) sequence identity to any one of SEQ ID NOs: 2, 6, 10, and 14. In some embodiments, the attP sequence comprises at least 75% sequence identity to any one of SEQ ID NOs: 2, 6, 10, and 14. In some embodiments, the attP sequence comprises at least 80% sequence identity to any one of SEQ ID NOs: 2, 6, 10, and 14. In some embodiments, the attP sequence comprises at least 90% sequence identity to any one of SEQ ID NOs: 2, 6, 10, and 14. In some embodiments, the attP sequence comprises at least 95% sequence identity to any one of SEQ ID NOs: 2, 6, 10, and 14. In some embodiments, the attP sequence comprises at least 97% sequence identity to any one of SEQ ID NOs: 2, 6, 10, and 14. In some embodiments, the attP sequence comprises at least 98% sequence identity to any one of SEQ ID NOs: 2, 6, 10, and 14. In some embodiments, the attP sequence comprises at least 99% sequence identity to any one of SEQ ID NOs: 2, 6, 10, and 14. In some embodiments, the attP sequence comprises any one of SEQ ID NOs: 2, 6, 10, and 14.

[0130] In some embodiments, the nucleic acid comprising a donor polynucleotide and a first attachment site sequence are delivered by a plasmid, a nanoplasmid, a phagemid, a phage derivative, a virus, a bacmid, a bacterial artificial chromosome (BAC), a minicircle, a doggybone, a yeast artificial chromosome (YAC), or a cosmid.

[0131] Described herein are eukaryotic genomes comprising a donor polynucleotide sequence; and an attL sequence 5′ to the donor polynucleotide sequence, wherein the attL sequence comprises a sequence selected from the group consisting of: SEQ ID NOs: 17-18, 7145, 7147, 7150, GCATCCCC, TATTCGAT, GGGCAACC, GGGCACCC, CAAGTTC, ACCGCC, CATATGT, 7219, 7224, 7231, 7232, 7237, 7242, ATGGTGGGC, 7252, GCCATTTC, TCAGCTCCA, 7269, 7270, 7275, 7276, 7281, GGGTC, TTCATGAG, ATGGTGGGC, 7301, 7306, 7311, 7316, GGGATCCC, 7326, GCCGA, 7336, 7341, 7346, 7351, 7356, 7361, 7366, 7371, 7376, 7381, 7386, 7391, AGGCGG, 7401, and GGATGC. In some embodiments, the eukaryotic genomes further comprise an attR sequence 3′ to the donor polynucleotide sequence.

[0132] Described herein are eukaryotic genomes comprising a donor polynucleotide sequence; and an attL sequence 3′ to the donor polynucleotide sequence, wherein the attL sequence comprises a sequence selected from the group consisting of: SEQ ID NOs: 17-18, 7145, 7147, 7150, GCATCCCC, TATTCGAT, GGGCAACC, GGGCACCC, CAAGTTC, ACCGCC, CATATGT, 7219, 7224, 7231, 7232, 7237, 7242, ATGGTGGGC, 7252, GCCATTTC, TCAGCTCCA, 7269, 7270, 7275, 7276, 7281, GGGTC, TTCATGAG, ATGGTGGGC, 7301, 7306, 7311, 7316, GGGATCCC, 7326, GCCGA, 7336, 7341, 7346, 7351, 7356, 7361, 7366, 7371, 7376, 7381, 7386, 7391, AGGCGG, 7401, and GGATGC. In some embodiments, the eukaryotic genomes further comprise an attR sequence 3′ to the donor polynucleotide sequence.

[0133] Described herein are eukaryotic genomes comprising a donor polynucleotide sequence; and an attL sequence 5′ or 3′ to the donor polynucleotide sequence, wherein the attL sequence comprises a sequence selected from the group consisting of: SEQ ID NOs: 17-18, 7145, 7147, 7150, GCATCCCC, TATTCGAT, GGGCAACC, GGGCACCC, CAAGTTC, ACCGCC, CATATGT, 7219, 7224, 7231, 7232, 7237, 7242, ATGGTGGGC, 7252, GCCATTTC, TCAGCTCCA, 7269, 7270, 7275, 7276, 7281, GGGTC, TTCATGAG, ATGGTGGGC, 7301, 7306, 7311, 7316, GGGATCCC, 7326, GCCGA, 7336, 7341, 7346, 7351, 7356, 7361, 7366, 7371, 7376, 7381, 7386, 7391, AGGCGG, 7401, and GGATGC; and an attR sequence 5′ or 3′ to the donor polynucleotide sequence, wherein the attR sequence comprises a sequence selected from the group consisting of: SEQ ID NOs: 17-18, 7145, 7147, 7150, GCATCCCC, TATTCGAT, GGGCAACC, GGGCACCC, CAAGTTC, ACCGCC, CATATGT, 7219, 7224, 7231, 7232, 7237, 7242, ATGGTGGGC, 7252, GCCATTTC, TCAGCTCCA, 7269, 7270, 7275, 7276, 7281, GGGTC, TTCATGAG, ATGGTGGGC, 7301, 7306, 7311, 7316, GGGATCCC, 7326, GCCGA, 7336, 7341, 7346, 7351, 7356, 7361, 7366, 7371, 7376, 7381, 7386, 7391, AGGCGG, 7401, and GGATGC.

[0134] Exemplary conserved cores of recombination sites are shown in Table 2.

TABLE 2
Recombination Site Sequences

| SEQ | Serine | Nucleotide |
|---|---|---|
| ID NO: | Recombinase | Sequence |
| 17 | MG178-4 core | AAACATCGCATC |
| 18 | MG178-9 core | GAACTGGCACAT |
| | MG178-10 core | GCATCCCC |
| | MG178-11 core | TATTCGAT |

[0135] In some embodiments, the attL sequence and the attR sequence are the same.

[0136] In some embodiments, the attL sequence is a recombined sequence of a first attachment site sequence and a second attachment site sequence. In some embodiments, the attR sequence is a recombined sequence of a first attachment site sequence and a second attachment site sequence.

### Donor Polynucleotides

[0137] Serine recombinases described herein can provide for integration of polynucleotides (e.g., donor polynucleotides) of large sizes. In some embodiments, the donor polynucleotide comprises a size of at least about 1 kilobase (kb), 2 kb, 3 kb, 4 kb, 5 kb, 6 kb, 7 kb, 8 kb, 9 kb, 10 kb, 20 kb, 30 kb, 40 kb, 50 kb, or more than 50 kb. In some embodiments, the donor polynucleotide comprises a size of at least about 15 kb, 20 kb, 25 kb, 30 kb, 35 kb, 50 kb, 100 kb, 200 kb, 300 kb, 400 kb, or 500 kb. In some embodiments, the donor polynucleotide comprises a size of about 200 base pairs (bp) to about 500 kb, 200 bp to about 250 kb, or 200 bp to about 100 kb. In some embodiments, the donor polynucleotide comprises a size of about 1 kb to about 10 kb, about 1 to about 7.5 kb, about 1 to about 5 kb, about 1 to about 3 kb, about 2 to about 10 kb, about 2 to about 7.5 kb, about 2 to about 5 kb, about 2 to about 3 kb, about 3 to about 10 kb, about 3 to about 7.5 kb, or about 3 to about 5 kb. In some embodiments, the donor polynucleotide comprises a size of about 10 kb to about 500 kb, 10 kb to about 400 kb, 10 kb to about 300 kb, 10 kb to about 200 kb, 10 kb to about 100 kb, about 10 kb to about 75 kb, about 10 kb to about 50 kb, about 10 kb to about 30 kb, about 20 kb to about 100 kb, about 20 to about 75 kb, about 20 kb to about 50 kb, about 20 kb to about 30 kb, about 30 kb to about 100 kb, about 30 kb to about 75 kb, or about 30 kb to about 50 kb. In some embodiments, the donor polynucleotide comprises a size of about 10 to about 500, 20 to about 400, 10 to about 300, 10 to about 200, or 10 to about 100. In some embodiments, the donor polynucleotide is circular. In some embodiments, the donor polynucleotide is linear.

[0138] In some embodiments, the donor polynucleotide encodes a therapeutic, a reporter, or a marker.

[0139] In some embodiments, the reporter comprises a fluorescent protein. In some embodiments, the fluorescent protein is GFP, EBFP, EBFP2, Azurite, mKalamal, ECFP, Cerulean, CyPet, YFP, Citrine, Venus, YPet, RFP, CFP, or a derivative thereof.

[0140] In some embodiments, the reporter is acetohydroxyacid synthase (AHAS), alkaline phosphatase (AP), beta galactosidase (LacZ), beta glucuronidase (GUS), chloramphenicol acetyltransferase (CAT), horseradish peroxidase (HRP), luciferase (Luc), nopaline synthase (NOS), octopine synthase (OCS), luciferase, or a derivative thereof.

[0141] In some embodiments, the marker is an antibiotic resistance marker. In some embodiments, the antibiotic resistance marker is kanamycin, spectinomycin, streptomycin, ampicillin, carbenicillin, bleomycin, erythromycin, polymyxin B, tetracycline, chloramphenicol, neomycin, zeocin, or a derivative thereof.

[0142] In some embodiments, the marker is a cell surface marker. In some embodiments, the cell surface marker is a membrane protein, a sugar moiety, or a small molecule (for example biotin) presented on the cell surface. In some embodiments, the cell surface marker is a CD3, B2M, CD4, CD8, CD28, HLA proteins, MHC complex, streptavidin, or avidin. In some embodiments, the cell surface marker is an antibody for example an IgG, or an antibody fragment for example an scFv, or an Fc. In some embodiments, the cell surface marker can be bound by a specific antibody. In some embodiments, the cell is analyzed for expression of the cell surface marker by flow cytometry.

### Delivery and Vectors

[0143] Disclosed herein, in some embodiments, are nucleic acid sequences encoding a serine recombinase or a serine recombinase gene editing system disclosed herein.

[0144] In some embodiments, the nucleic acid encoding the serine recombinase or the serine recombinase gene editing system is a DNA, for example a linear DNA, a plasmid DNA, or a minicircle DNA. In some embodiments, the nucleic acid is an RNA, for example a mRNA.

[0145] Described herein are vectors comprising: a) a nucleic acid encoding a serine recombinase comprising at least about 80% sequence identity to any one of SEQ ID NOs: 21-7060 and 7105-7142; and b) one or more regulatory elements. Further described herein are vectors comprising a nucleic acid encoding a serine recombinase comprising at least about 80% sequence identity to any one of SEQ ID NOs: 21-7060 and 7105-7142, wherein the vector is selected from the group consisting of: a plasmid, a nanoplasmid, a phagemid, a phage derivative, a bacmid, a bacterial artificial chromosome (BAC), a minicircle, a doggybone, a yeast artificial chromosome (YAC), and a cosmid.

[0146] In some embodiments, the nucleic acid encoding the serine recombinase or the serine recombinase gene editing system is delivered by a nucleic acid-based vector. In some embodiments, the nucleic acid-based vector is a plasmid (e.g., circular DNA molecules that can autonomously replicate inside a cell), cosmid (e.g., pWE or sCos vectors), artificial chromosome, human artificial chromosome (HAC), yeast artificial chromosomes (YAC), bacterial artificial chromosome (BAC), P1-derived artificial chromosomes (PAC), phagemid, phage derivative, bacmid, or virus. In some embodiments, the nucleic acid-based vector is selected from the list consisting of: pSF-CMV-NEO-NH2-PPT-3XFLAG, pSF-CMV-NEO-COOH-3XFLAG, pSF-CMV-PURO-NH2-GST-TEV, pSF-OXB20-COOH)-TEV-FLAG (R)-6His, pCEP4 pDEST27, pSF-CMV-Ub-KrYFP, pSF-CMV-FMDV-daGFP, pEFla-mCherry-N1 vector, pEF1a-tdTomato vector, pSF-CMV-FMDV-Hygro, pSF-CMV-PGK-Puro, pMCP-tag (m), pSF-CMV-PURO-NH2-CMYC, pSF-OXB20-BetaGal, pSF-OXB20-Fluc, pSF-OXB20, pSF-Tac, pRI 101-AN DNA, pCambia2301, pTYB21, pKLAC2, pAc5.1/V5-His A, and pDEST8.

[0147] In some embodiments, the one or more regulatory elements comprises a promoter, an enhancer, an intron, a microRNA, a linker, a splicing element, or a polyA signal. In some embodiments, the promoter is selected from a constitutive promoter, an inducible promoter, a mini promoter, or a derivative thereof. In some embodiments, the promoter is selected from the group consisting of: CMV, CBA, EF1a, CAG, PGK, TRE, U6, UAS, T7, Sp6, lac, araBad, trp, Ptac, p5, p19, p40, Synapsin, CaMKII, GRK1, polH, EM7, OpIE1, and a derivative thereof. In some embodiments the promoter is a U6 promoter. In some embodiments, the promoter is a CAG promoter.

[0148] In some embodiments, the nucleic acid-based vector is a virus. In some embodiments, the virus is an alphavirus, a parvovirus, an adenovirus, an AAV, a baculovirus, a Dengue virus, a lentivirus, a herpesvirus, a poxvirus, an anellovirus, a bocavirus, a vaccinia virus, or a retrovirus. In some embodiments, the virus is an alphavirus. In some embodiments, the virus is a parvovirus. In some embodiments, the virus is an adenovirus. In some embodiments, the virus is an AAV. In some embodiments, the virus is a baculovirus. In some embodiments, the virus is a Dengue virus. In some embodiments, the virus is a lentivirus. In some embodiments, the virus is a herpesvirus. In some embodiments, the virus is a poxvirus. In some embodiments, the virus is an anellovirus. In some embodiments, the virus is a bocavirus. In some embodiments, the virus is a vaccinia virus. In some embodiments, the virus is or a retrovirus.

[0149] In some embodiments, the AAV is AAV1, AAV2, AAV3, AAV4, AAV5, AAV6, AAV7, AAV8, AAV9, AAV10, AAV11, AAV12, AAV13, AAV14, AAV15, AAV16, AAV-rh8, AAV-rh10, AAV-rh20, AAV-rh39, AAV-rh74, AAV-rhM4-1, AAV-hu37, AAV-Anc80, AAV-Anc80L65, AAV-7m8, AAV-PHP-B, AAV-PHP-EB, AAV-2.5, AAV-21YF, AAV-3B, AAV-LK03, AAV-HSC1, AAV-HSC2, AAV-HSC3, AAV-HSC4, AAV-HSC5, AAV-HSC6, AAV-HSC7, AAV-HSC8, AAV-HSC9, AAV-HSC10, AAV-HSC11, AAV-HSC12, AAV-HSC13, AAV-HSC14, AAV-HSC15, AAV-TT, AAV-DJ/8, AAV-Myo, AAV-NP40, AAV-NP59, AAV-NP22, AAV-NP66, AAV-HSC16, or a derivative thereof. In some embodiments, the herpesvirus is HSV type 1, HSV-2, VZV, EBV, CMV, HHV-6, HHV-7, or HHV-8.

[0150] In some embodiments, the virus is AAV1 or a derivative thereof. In some embodiments, the virus is AAV2 or a derivative thereof. In some embodiments, the virus is AAV3 or a derivative thereof. In some embodiments, the virus is AAV4 or a derivative thereof. In some embodiments, the virus is AAV5 or a derivative thereof. In some embodiments, the virus is AAV6 or a derivative thereof. In some embodiments, the virus is AAV7 or a derivative thereof. In some embodiments, the virus is AAV8 or a derivative thereof. In some embodiments, the virus is AAV9 or a derivative thereof. In some embodiments, the virus is AAV10 or a derivative thereof. In some embodiments, the virus is AAV11 or a derivative thereof. In some embodiments, the virus is AAV12 or a derivative thereof. In some embodiments, the virus is AAV13 or a derivative thereof. In some embodiments, the virus is AAV14 or a derivative thereof. In some embodiments, the virus is AAV15 or a derivative thereof. In some embodiments, the virus is AAV16 or a derivative thereof. In some embodiments, the virus is AAV-rh8 or a derivative thereof. In some embodiments, the virus is AAV-rh10 or a derivative thereof. In some embodiments, the virus is AAV-rh20 or a derivative thereof. In some embodiments, the virus is AAV-rh39 or a derivative thereof. In some embodiments, the virus is AAV-rh74 or a derivative thereof. In some embodiments, the virus is AAV-rhM4-1 or a derivative thereof. In some embodiments, the virus is AAV-hu37 or a derivative thereof. In some embodiments, the virus is AAV-Anc80 or a derivative thereof. In some embodiments, the virus is AAV-Anc80L65 or a derivative thereof. In some embodiments, the virus is AAV-7m8 or a derivative thereof. In some embodiments, the virus is AAV-PHP-B or a derivative thereof. In some embodiments, the virus is AAV-PHP-EB or a derivative thereof. In some embodiments, the virus is AAV-2.5 or a derivative thereof. In some embodiments, the virus is AAV-2tYF or a derivative thereof. In some embodiments, the virus is AAV-3B or a derivative thereof. In some embodiments, the virus is AAV-LK03 or a derivative thereof. In some embodiments, the virus is AAV-HSC1 or a derivative thereof. In some embodiments, the virus is AAV-HSC2 or a derivative thereof. In some embodiments, the virus is AAV-HSC3 or a derivative thereof. In some embodiments, the virus is AAV-HSC4 or a derivative thereof. In some embodiments, the virus is AAV-HSC5 or a derivative thereof. In some embodiments, the virus is AAV-HSC6 or a derivative thereof. In some embodiments, the virus is AAV-HSC7 or a derivative thereof. In some embodiments, the virus is AAV-HSC8 or a derivative thereof. In some embodiments, the virus is AAV-HSC9 or a derivative thereof. In some embodiments, the virus is AAV-HSC10 or a derivative thereof. In some embodiments, the virus is AAV-HSC11 or a derivative thereof. In some embodiments, the virus is AAV-HSC12 or a derivative thereof. In some embodiments, the virus is AAV-HSC13 or a derivative thereof. In some embodiments, the virus is AAV-HSC14 or a derivative thereof. In some embodiments, the virus is AAV-HSC15 or a derivative thereof. In some embodiments, the virus is AAV-TT or a derivative thereof. In some embodiments, the virus is AAV-DJ/8 or a derivative thereof. In some embodiments, the virus is AAV-Myo or a derivative thereof. In some embodiments, the virus is AAV-NP40 or a derivative thereof. In some embodiments, the virus is AAV-NP59 or a derivative thereof. In some embodiments, the virus is AAV-NP22 or a derivative thereof. In some embodiments, the virus is AAV-NP66 or a derivative thereof. In some embodiments, the virus is AAV-HSC16 or a derivative thereof.

[0151] In some embodiments, the virus is HSV-1 or a derivative thereof. In some embodiments, the virus is HSV-2 or a derivative thereof. In some embodiments, the virus is VZV or a derivative thereof. In some embodiments, the virus is EBV or a derivative thereof. In some embodiments, the virus is CMV or a derivative thereof. In some embodiments, the virus is HHV-6 or a derivative thereof. In some embodiments, the virus is HHV-7 or a derivative thereof. In some embodiments, the virus is HHV-8 or a derivative thereof.

[0152] In some embodiments, the nucleic acid encoding the serine recombinase or a serine recombinase gene editing system is delivered by a non-nucleic acid-based delivery system (e.g., a non-viral delivery system). In some embodiments, the non-viral delivery system is a liposome. In some embodiments, the nucleic acid is associated with a lipid. The nucleic acid associated with a lipid, in some embodiments, is encapsulated in the aqueous interior of a liposome, interspersed within the lipid bilayer of a liposome, attached to a liposome via a linking molecule that is associated with both the liposome and the nucleic acid, entrapped in a liposome, complexed with a liposome, dispersed in a solution containing a lipid, mixed with a lipid, combined with a lipid, contained as a suspension in a lipid, contained or complexed with a micelle, or otherwise associated with a lipid. In some embodiments, the nucleic acid is comprised in a lipid nanoparticle (LNP).

[0153] In some embodiments, the serine recombinase or the serine recombinase gene editing system is introduced into the cell in any suitable way, either stably or transiently. In some embodiments, the serine recombinase or the serine recombinase gene editing system is transfected into the cell. In some embodiments, the cell is transduced or transfected with a nucleic acid construct that encodes the serine recombinase or the serine recombinase gene editing system. For example, a cell is transduced (e.g., with a virus encoding the serine recombinase or the serine recombinase gene editing system), or transfected (e.g., with a plasmid encoding the serine recombinase or the serine recombinase gene editing system) with a nucleic acid that encodes the serine recombinase or the serine recombinase gene editing system, or the translated the serine recombinase or the serine recombinase gene editing system. In some embodiments, the transduction is a stable or transient transduction. In some embodiments, a plasmid expressing the serine recombinase or the serine recombinase gene editing system is introduced into cells through electroporation, transient (e.g., lipofection) and stable genome integration (e.g., piggybac) and viral transduction (for example lentivirus or AAV) or other methods known to those of skill in the art. In some embodiments, the gene editing system is introduced into the cell as one or more polypeptides. In some embodiments, delivery is achieved through the use of RNP complexes. Delivery methods to cells for polypeptides and/or RNPs are known in the art, for example by electroporation or by cell squeezing.

[0154] Exemplary methods of delivery of nucleic acids include lipofection, nucleofection, electroporation, stable genome integration (e.g., piggybac), microinjection, biolistics, virosomes, liposomes, immunoliposomes, polycation or lipid nucleic acid conjugates, naked DNA, artificial virions, and agent-enhanced uptake of DNA. Lipofection is described in e.g., U.S. Pat. Nos. 5,049,386; 4,946,787; and 4,897,355) and lipofection reagents are sold commercially (e.g., Transfectam™, Lipofectin™ and SF Cell Line 4D-Nucleofector X Kit™ (Lonza)). Cationic and neutral lipids that are suitable for efficient receptor-recognition lipofection of polynucleotides include those of WO 91/17424 and WO 91/16024. In some embodiments, the delivery is to cells (e.g., in vitro or ex vivo administration) or target tissues (e.g., in vivo administration). In some embodiments, the nucleic acid is comprised in a liposome or a nanoparticle that specifically targets a host cell.

[0155] Additional methods for the delivery of nucleic acids to cells are known to those skilled in the art. See, for example, US 2003/0087817.

[0156] In some embodiments, delivery of the serine recombinase or the serine recombinase gene editing system to the target nucleic acid site comprises delivering a nucleic acid comprising an open reading frame encoding the serine recombinase or the serine recombinase gene editing system. In some embodiments, the nucleic acid comprises a promoter. In some embodiments, the open reading frame encoding the serine recombinase or the serine recombinase gene editing system is operably linked to the promoter. In some embodiments, the promoter is a ribonucleic acid (RNA) pol III promoter.

[0157] In some embodiments, delivery of the serine recombinase or the serine recombinase gene editing system to the target nucleic acid site comprises delivering a capped mRNA containing the open reading frame encoding the serine recombinase or the serine recombinase gene editing system. In some embodiments, delivery of the serine recombinase or the serine recombinase gene editing system to the target nucleic acid site comprises delivering a translated polypeptide. In some embodiments, delivery of the serine recombinase or the serine recombinase gene editing system to the target nucleic acid site comprises delivering a deoxyribonucleic acid (DNA) encoding the serine recombinase or the serine recombinase gene editing system operably linked to a ribonucleic acid (RNA) pol III promoter.

### Lipid Nanoparticles

[0158] Disclosed herein, in certain embodiments, are lipid nanoparticles comprising the serine recombinase or the serine recombinase gene editing system of the disclosure for delivery into a cell.

[0159] In some embodiments, the lipid nanoparticle comprises the serine recombinase or the serine recombinase gene editing system or a nucleic acid encoding the serine recombinase or the serine recombinase gene editing system. In some embodiments, the lipid nanoparticle comprises the one or more components of the serine recombinase gene editing system. In some embodiments, the lipid nanoparticle comprises the serine recombinase or a nucleic acid encoding the serine recombinase. In some embodiments, the lipid nanoparticle comprises the donor polynucleotide.

[0160] In some embodiments, the lipid nanoparticle is tethered to the serine recombinase gene editing system.

[0161] Lipid nanoparticles as described herein can be 4-component lipid nanoparticles. Such nanoparticles can be configured for delivery of RNA or other nucleic acids (e.g., synthetic RNA, mRNA, or in vitro-synthesized mRNA) and can be generally formulated as described in WO2012135805A2. Such nanoparticles can generally comprise: (a) a cationic lipid, (b) a neutral lipid (e.g., DSPC or DOPE), (c) a sterol (e.g., cholesterol or a cholesterol analog), or (d) a PEG-modified lipid (e.g., PEG-DMG).

[0162] The cationic lipid referred to herein as “C12-200” is disclosed by Love et al., Proc Natl Acad Sci USA. 2010 107:1864-1869 and Liu and Huang, Molecular Therapy. 2010 669-670. Cationic lipid formulations can include particles comprising either 3 or 4 or more components in addition to polynucleotide, primary construct, or RNA (e.g., mRNA). As an example, formulations with certain cationic lipids, include, but are not limited to, 98N12-5 and may contain 42% lipidoid, 48% cholesterol and 10% PEG (C14 or greater alkyl chain length). As another example, formulations with certain lipidoids include, but are not limited to, C12-200 and may contain 50% cationic lipid, 10% disteroylphosphatidyl choline, 38.5% cholesterol, and 1.5% PEG-DMG.

[0163] In some embodiments, the cationic lipid nanoparticle comprises a cationic lipid, a PEG-modified lipid, a sterol, and a non-cationic lipid. In some embodiments, the cationic lipid nanoparticle has a molar ratio of about 20-60% cationic lipid: about 5-25% non-cationic lipid: about 25-55% sterol; and about 0.5-15% PEG-modified lipid. In some embodiments, the cationic lipid nanoparticle comprises a molar ratio of about 50% cationic lipid, about 1.5% PEG-modified lipid, about 38.5% cholesterol, and about 10% non-cationic lipid. In some embodiments, the cationic lipid nanoparticle comprises a molar ratio of about 55% cationic lipid, about 2.5% PEG-modified lipid, about 32.5% cholesterol, and about 10% non-cationic lipid. In some embodiments, the cationic lipid is an ionizable cationic lipid, the non-cationic lipid is a neutral lipid, and the sterol is a cholesterol. In some embodiments, the cationic lipid nanoparticle has a molar ratio of 50:38.5:10:1.5 of cationic lipid:cholesterol: PEG2000-DMG:DSPC or DMG:DOPE. In some embodiments, lipid nanoparticles as described herein can comprise cholesterol, 1,2-dioleoyl-sn-glycero-3-phosphoethanolamine (DOPE), 1,1′-((2-(4-(2-((2-(bis(2-hydroxydodecyl)amino)ethyl) (2-hydroxydodecyl)amino)ethyl) piperazin-1-yl)ethyl) azanediyl)bis(dodecan-2-ol) (C12-200), and DMG-PEG-2000 at molar ratios of 47.5:16:35:1.5.

### Methods for Gene Editing

[0164] Described herein, in some embodiments, are methods for gene editing, comprising: a) providing or identifying a first attachment site sequence in a host genome; b) providing a nucleic acid comprising a donor polynucleotide and a second attachment site sequence to a host cell; and c) contacting the host cell with a serine recombinase comprising at least about 80% sequence identity to any one of SEQ ID NOs: 21-7060 and 7105-7142 or a nucleic acid encoding the serine recombinase, wherein the first attachment site sequence and the second attachment site sequence are capable of recombination.

[0165] In some embodiments, the first attachment site sequence is endogenous in the host genome.

[0166] In some embodiments, the first attachment site sequence is provided using viral delivery. In some embodiments, viral delivery comprises use of a virus, wherein the virus is an alphavirus, a parvovirus, an adenovirus, an AAV, a baculovirus, a Dengue virus, a lentivirus, a herpesvirus, a poxvirus, an anellovirus, a bocavirus, a vaccinia virus, or a retrovirus. In some embodiments, the AAV is AAV1, AAV2, AAV3, AAV4, AAV5, AAV6, AAV7, AAV8, AAV9, AAV10, AAV11, AAV12, AAV13, AAV14, AAV15, AAV16, AAV-rh8, AAV-rh10, AAV-rh20, AAV-rh39, AAV-rh74, AAV-rhM4-1, AAV-hu37, AAV-Anc80, AAV-Anc80L65, AAV-7m8, AAV-PHP-B, AAV-PHP-EB, AAV-2.5, AAV-2tYF, AAV-3B, AAV-LK03, AAV-HSC1, AAV-HSC2, AAV-HSC3, AAV-HSC4, AAV-HSC5, AAV-HSC6, AAV-HSC7, AAV-HSC8, AAV-HSC9, AAV-HSC10, AAV-HSC11, AAV-HSC12, AAV-HSC13, AAV-HSC14, AAV-HSC15, AAV-TT, AAV-DJ/8, AAV-Myo, AAV-NP40, AAV-NP59, AAV-NP22, AAV-NP66, AAV-HSC16, or a derivative thereof. In some embodiments, the herpesvirus is HSV type 1, HSV-2, VZV, EBV, CMV, HHV-6, HHV-7, or HHV-8.

[0167] In some embodiments, the first attachment site sequence is provided using a transposase. In some embodiments, the transposase is transposase (Tnp) Tn5, Sleeping Beauty transposase, or a Tn7 transposon. In some embodiments, the gene editing system comprises an enzyme with transposase activity. Additional enzymes with transposase activity include, but are not limited to, retrons and IS200/IS605 transposons.

[0168] In some embodiments, the first attachment site sequence is provided using a nuclease. In some embodiments, the nuclease is a double-strand nuclease.

[0169] In some embodiments, the nuclease is a Type II CRISPR endonuclease. In some embodiments, the nuclease is Cas9. Type II CRISPR systems are considered the simplest in terms of components. In Type II CRISPR systems, the processing of the CRISPR array into mature crRNAs does not require the presence of a special endonuclease subunit, but rather a small trans-encoded crRNA (tracrRNA) with a region complementary to the array repeat sequence; the tracrRNA interacts with both its corresponding effector nuclease (e.g., Cas9) and the repeat sequence to form a precursor dsRNA structure, which is cleaved by endogenous RNAse III to generate a mature effector enzyme loaded with both tracrRNA and crRNA. Type II nucleases are known as DNA nucleases. Type II nucleases generally exhibit a structure consisting of a RuvC-like endonuclease domain that adopts the RNase H fold with an unrelated HNH nuclease domain inserted within the folds of the RuvC-like nuclease domain. The RuvC-like domain is responsible for the cleavage of the target (e.g., crRNA complementary) DNA strand, while the HNH domain is responsible for cleavage of the displaced DNA strand. Exemplary CRISPR Cas9 proteins include, but are not limited to, Cas9 from Streptococcus pyogenes (UniProtKB-Q99ZW2 (CAS9 STRP1)), Streptococcus thermophilus (UniProtKB-G3ECR1 (CAS9 STRTR)), Staphylococcus aureus (UniProtKB-J7RUA5 (CAS9 STAAU), Campylobacter jejuni (UniProtKB-QOP897 (CAS9 CAMJE)), Campylobacter lari (UniProtKB-A0A0A8HTA3 (A0A0A8HTA3 CAMLA), Helicobacter canadensis (UniProtKB-C5ZYI3 (C5ZYI3 9HELI)), and Francisella tularensis subsp. Novicida (UniProtKB-A0Q5Y3 (CAS9_FRATN). Additional Type II nucleases are described in International Patent Application Publication WO 2021/226363, WO 2022/159758, and WO 2022/056324.

[0170] In some embodiments, the nuclease is a CRISPR nuclease. In some embodiments, the CRISPR nuclease is a Class 2 Type II SpCas9 or a Class 2 Type V-A Cas12a (previously Cpf1). In some embodiments, the Type V-A nuclease has a guide RNA of 42-44 nucleotides compared with approximately 100 nt for SpCas9. In some embodiments, the Type V-A nuclease results in staggered cut sites. In some embodiments, the Type V-A nuclease results in staggered cut sites to facilitate directed repair pathways, such as microhomology-dependent targeted integration (MITI).

[0171] In some embodiments, the nuclease is a Type V CRISPR endonuclease. Type V CRISPR systems are characterized by a nuclease effector (e.g., Cas12) structure similar to that of Type II effectors, comprising a RuvC-like domain. Similar to Type II, most (but not all) Type V CRISPR systems use a tracrRNA to process pre-crRNAs into mature crRNAs; however, unlike Type II systems which requires RNAse III to cleave the pre-crRNA into multiple crRNAs, Type V systems are capable of using the effector nuclease itself to cleave pre-crRNAs. Like Type II CRISPR systems, Type V CRISPR systems are known as DNA nucleases. Unlike Type II CRISPR systems, some Type V enzymes (e.g., Cas12a) appear to have a robust single-stranded nonspecific deoxyribonuclease activity that is activated by the first crRNA-directed cleavage of a double-stranded target sequence.

[0172] The most commonly used Type V-A enzymes require a 5′ protospacer adjacent motif (PAM) next to the chosen target site: 5′-TTTV-3′ for Lachnospiraceae bacterium ND2006 LbCas12a and Acidaminococcus sp. AsCas12a; and 5′-TTV-3′ for Francisella novicida FnCas12a. In some embodiments the PAM sequence is YTV, YYN, or TTN. Additional Type II nucleases are described in International Patent Application Publication WO 2021/226363.

[0173] In some embodiments, the first attachment site sequence is provided using a reverse transcriptase. Reverse transcription is the translation of an RNA template into a complementary DNA. Reverse transcription is performed by enzymes termed reverse transcriptases (RT) that are enzymes with RNA-dependent DNA polymerase activity that create the complementary DNA (cDNA) strand from an RNA template. Some of the RT enzymes also have DNA-dependent DNA polymerase activity to create a double-stranded dsDNA. Reverse transcriptases can be of viral origin (for example HIV, hepatitis B, Moloney murine leukemia virus (MMLV), or avian myeloblastosis virus (AMV)) or bacterial origin (for example group II introns, retrons/retron-like RTs, diversity-generating retroelements (DGRs), Abi-like RTs, CRISPR-associated RTs, and group II-like RTs (G2L)). Reverse transcriptases of eukaryotic origin comprise the telomerase reverse transcriptase that maintains the telomeres of eukaryotic chromosomes. Reverse transcription allows the introduction of site-directed insertions, deletions, and mutations into the cDNA by encoding them in the RNA template.

[0174] In some embodiments, the reverse transcriptase is a viral, prokaryotic, or eukaryotic reverse transcriptase. In some embodiments, the reverse transcriptase is an MG151, MG153, or MG160 family reverse transcriptase. In some embodiments, the reverse transcriptase is an MG140, MG146, MG148, MG149, MG151, MG153, MG154, MG155, MG156, MG157, MG158, MG159, MG160, MG163, MG164, MG165, MG166, MG167, MG168, MG169, MG170, or MG176 family reverse transcriptase. In some embodiments, the reverse transcriptase comprises a sequence with at least 80%, at least 81%, at least 82%, at least 83%, at least 84%, at least 85%, at least 86%, at least 87%, at least 88%, at least 89%, at least 90%, at least 91%, at least 92%, at least 93%, at least 94%, at least 95%, at least 96%, at least 97%, at least 98%, at least 99%, or 100% sequence identity to any one of the MG140, MG146, MG148, MG149, MG151, MG153, MG154, MG155, MG156, MG157, MG158, MG159, MG160, MG163, MG164, MG165, MG166, MG167, MG168, MG169, MG170, MG172, MG173, or MG176 family reverse transcriptases or retrotransposases. In some embodiments, the reverse transcriptase comprises a sequence with at least 80% sequence identity to any one of the MG140, MG146, MG148, MG149, MG151, MG153, MG154, MG155, MG156, MG157, MG158, MG159, MG160, MG163, MG164, MG165, MG166, MG167, MG168, MG169, MG170, MG172, MG173, or MG176 family reverse transcriptases or retrotransposases or variants thereof. In some embodiments, the reverse transcriptase is smaller than 300 amino acids. In some embodiments, the reverse transcriptase is smaller than 250 amino acids.

[0175] In some embodiments, the methods are used to introduce a modification in the genome of a cell. In some embodiments, the modification is an insertion, deletion, or mutation. In some embodiments, the methods are used to introduce site-directed insertions, deletions, and/or mutations in the genome of a cell (for example an insertion and a mutation). In some embodiments, the methods are used in combination with a nucleic acid template to facilitate site-directed insertions into the genome of a cell. In some embodiments, the cell is a human cell. In some embodiments, the cell genome or a vector comprised in the cell is modified. In some embodiments, the cell genome is modified ex vivo. In some embodiments, the cell genome is modified in vivo.

[0176] In some embodiments, the methods described herein further comprise detecting the genome modifications. In some embodiments, after the cell genome is modified, the cell is cultured for a certain amount of time. In some embodiments, the DNA or RNA is extracted and sequenced, and modified sequence areas are mapped and compared with an unmodified sequence. In some embodiments, cells are stained with antibodies for protein products that are translated from the modified nucleic acid, and the resulting stained proteins or polypeptides in the cell are analyzed, for example by flow cytometry.

### Cells

[0177] Described herein, in certain embodiments, is a cell comprising the serine recombinase or the serine recombinase system described herein. In some embodiments, the cell (e.g., mammalian cell) comprises the eukaryotic genome described herein. In some embodiments, the cell is a human cell.

[0178] In some embodiments, the cell is a eukaryotic cell (e.g., a plant cell, an animal cell, a protist cell, or a fungi cell), a mammalian cell (a Chinese hamster ovary (CHO) cell, baby hamster kidney (BHK), human embryo kidney (HEK), mouse myeloma (NSO), or human retinal cells), an immortalized cell (e.g., a HeLa cell, a COS cell, a HEK-293T cell, a MDCK cell, a 3T3 cell, a PC12 cell, a Huh7 cell, a HepG2 cell, a K562 cell, a N2a cell, or a SY5Y cell), an insect cell (e.g., a Spodoptera frugiperda cell, a Trichoplusia ni cell, a Drosophila melanogaster cell, a S2 cell, or a Heliothis virescens cell), a yeast cell (e.g., a Saccharomyces cerevisiae cell, a Cryptococcus cell, or a Candida cell), a plant cell (e.g., a parenchyma cell, a collenchyma cell, or a sclerenchyma cell), a fungal cell (e.g., a Saccharomyces cerevisiae cell, a Cryptococcus cell, or a Candida cell), or a prokaryotic cell (e.g., a E. coli cell, a streptococcus bacterium cell, a streptomyces soil bacteria cell, or an archaea cell). In some embodiments, the cell is a eukaryotic cell. In some embodiments, the cell is a mammalian cell. In some embodiments, the cell is an immortalized cell. In some embodiments, the cell is an insect cell. In some embodiments, the cell is a yeast cell. In some embodiments, the cell is a plant cell. In some embodiments, the cell is a fungal cell. In some embodiments, the cell is a prokaryotic cell.

[0179] In some embodiments, the cell is an A549, HEK-293, HEK-293T, BHK, CHO, HeLa, MRC5, Sf9, Cos-1, Cos-7, Vero, BSC 1, BSC 40, BMT 10, WI38, HeLa, Saos, C2C12, L cell, HT1080, HepG2, Huh7, K562, a primary cell, or derivative thereof.

[0180] In some embodiments, the cell is a liver cell.

### Kits

[0181] In some embodiments, this disclosure provides kits comprising one or more nucleic acid constructs encoding the various components of the serine recombinases described herein, e.g., comprising a nucleotide sequence encoding the components of the serine recombinases capable of modifying a target DNA sequence. In some embodiments, the nucleotide sequence comprises a heterologous promoter that drives expression of the serine recombinases described herein.

[0182] In some embodiments, any of the serine recombinases disclosed herein is assembled into a pharmaceutical, diagnostic, or research kit to facilitate its use in therapeutic, diagnostic, or research applications. A kit may include one or more containers housing any of the vectors disclosed herein and instructions for use.

[0183] The kit may be designed to facilitate use of the methods described herein by researchers and can take many forms. Each of the compositions of the kit, where applicable, may be provided in liquid form (e.g., in solution), or in solid form, (e.g., a dry powder). In some embodiments, the compositions are constitutable or otherwise processable (e.g., to an active form), for example, by the addition of a suitable solvent or other species (for example, water or a cell culture medium), which may or may not be provided with the kit. As used herein, “instructions” can define a component of instruction and/or promotion, and typically involve written instructions on or associated with packaging of the disclosure. Instructions also can include any oral or electronic instructions provided in any manner such that a user will clearly recognize that the instructions are to be associated with the kit, for example, audiovisual (e.g., videotape, DVD, etc.), Internet, and/or web-based communications, etc. The written instructions, in some embodiments, are in a form prescribed by a governmental agency regulating the manufacture, use, or sale of pharmaceuticals or biological products, which instructions can also reflect approval by the agency of manufacture, use, or sale for animal administration.

### EXAMPLES

[0184] The following examples are given for the purpose of illustrating various embodiments of the disclosure and are not meant to limit the present disclosure in any fashion. The present examples, along with the methods described herein are presently representative of preferred embodiments, are exemplary, and are not intended as limitations on the scope of the disclosure. Changes therein and other uses which are encompassed within the spirit of the disclosure as defined by the scope of the claims will occur to those skilled in the art.

### Example 1. Bioinformatic Identification of Large Serine Recombinases

[0185] This example describes the identification of proteins with large serine recombinase function by a bioinformatic approach.

[0186] Putative large serine recombinases (LSRs) were identified in an extensive database of viral, prokaryotic, and eukaryotic proteins. The search resulted in 163,797 non-partial homologs with a score>50. LSRs were further filtered by requiring contigs to have a 1 kbp flank on either side of the LSR, and dereplicated at 90% average amino acid identity (AAI). After dereplication, 8,364 LSRs were globally aligned and a phylogenetic tree was constructed. Closely related contigs lacking the LSRs were identified by searching for contigs containing the two genes flanking approximate proviral boundaries. To ensure the contigs were from a closely related strain, local alignments were performed requiring the two genes to share ≥99% AAI. Precise proviral boundaries were identified by locally aligning the contigs containing and lacking the LSRs at the nucleotide level. Once integration boundaries were delineated, the attL and attR sites flanking the prophage, as well as the attachment sites' common core, were identified by searching for imperfect repeats near the boundaries.

[0187] LSR candidates were identified based on the presence of resolvase, recombinase, and Zn-finger domains, as well as catalytic residues required for activity (FIG. 1). Selected LSR candidates belonging to the MG178 family share 26.8% AAI amongst them and <37% AAI with a known Bxb1 LSR reference (FIG. 1). Phylogenetic analysis of LSR candidates indicated that these enzymes are encoded in highly diverse genomes, and prophage boundaries were predicted for many (FIGS. 2A and 2B). The LSR-integrated prophages appeared to be inserted into genes containing Mn_catalase, Queuosine_synth, and DUF4244 Pfam domains (FIG. 2A) and were shown to infect hosts belonging to several Phyla, including Actinobacteria, Firmicutes, and Proteobacteria (FIG. 2B). Prophage genomes mobilized by LSR reached nearly 94 kb in length. Prophage boundaries were identified by aligning the contigs containing the LSR with highly similar contig sequences lacking the LSRs, which likely represent the host without the integration event (FIG. 3). With integration boundaries delineated, the attachment site's common cores were identified by searching for repeats near the boundaries (FIG. 3).

### Example 2. In Vitro Assay of Serine Recombinase Activity

### In Vitro Recombination Reactions

[0188] To test the functionality of the serine recombinases, the attP and attB sites from the attL, attR, and common core sequences from the native integrated prophage genomic context (SEQ ID NOs: 1-18, GCATCCCC and TATTCGAT) were determined bioinformatically and tested in in vitro recombination reactions. The attB and attP sites were synthesized in gene fragments˜300 bp in length with primer-binding sites unique to each attachment site end (FIG. 4C). Serine recombinases were expressed in vitro, while negative controls included in vitro expression reactions without template (null) (FIG. 4A). Negative recombination reaction controls were set up in 10 μL reactions using 50 ng of attB, 50 ng of attP, recombination buffer (20 mM HEPES pH 7.5, 50 g/mL bovine serum albumin (BSA), 2 mM TCEP, 5 mM MgCl₂, 100 mM KCl, 5 mM spermidine, 2 mM ZnCl2, and 5% glycerol) and 1 μL of null reaction (no recombinase template). Experimental conditions included 50 ng of attB, 50 ng of attP, and 1 μL in vitro-expressed recombinase (FIG. 4B). Recombination reactions were incubated at 30° C. for 1 hour and diluted with water at 1:10. PCR reactions were then performed with attL-(attB5 and attP3) or attR-(attB3 and attP5) specific primer sets (FIG. 4C) and analyzed on a 2% agarose gel to determine amplification and size of resulting products. Product forming reactions were Sanger sequenced and aligned to the predicted attL and attR sequences determined bioinformatically.

[0189] The LSR candidates were expressed in vitro and added to a reaction buffer with putative attB and attP dsDNA fragments (FIGS. 4A-4C). Four LSRs (MG178-4 (SEQ ID NO: 21), MG178-9 (SEQ ID NO: 22), MG178-10 (SEQ ID NO: 23), and MG178-11 (SEQ ID NO: 24) were active based on formation of both recombination products of attL and attR (FIG. 5). PCR amplifications were then Sanger sequenced to confirm crossover events of the predicted attB- and attP-forming attL and attR sequences. The results show that Sanger sequencing confirmed the recombination events of the active recombinase-containing reactions for both predicted attL and attR and conservation of the common core in both reactants and recombination products (FIG. 6 and FIG. 7).

### Example 3. Prophetic—In Cell Plasmid Recombination

[0190] Recombinases are tested for their activity in human cells by synthesizing the attP fragment into a donor plasmid (pDonor) with the attP site upstream of a promoterless mCherry coding ORF. attB fragments are synthesized into a pTarget plasmid encoding a pCMV promoter upstream of the attB site without a downstream coding ORF. When co-transfected with the active recombinase, the pCMV promoter of pTarget is recombined with the pDonor mCherry, and the junction of the pCMV promoter to the mCherry drives transcription and translation of the mCherry coding region. Efficiency of the recombinase is compared to the negative control of a cell population transfected with both pDonor and pTarget without the recombinase plasmid.

### Example 4. Prophetic-Landing Pad Activity in Mammalian Cells

[0191] To introduce exogenous donor DNA into the human genome using large serine recombinases, the landing pad, an attP or attB sequence site, is (1) found to be endogenous to the human genome sequence, or (2) introduced using viral delivery or by way of a transposable element, (3) integrated into the genome using HDR coupled with a nuclease, or (4) reverse transcribed into the genome using a targeted reverse transcriptase.

[0192] After introduction or identification of the landing pad (either an attP or attB) site to the genome, LSR activity to the genome is determined by using a DNA donor comprising (1) a promoter driven fluorescent protein construct or (2) a promoterless fluorescent coding construct with the cognate attachment (attB/attP) site and/or (3) an antibiotic resistance marker or (4) a screenable cell surface marker. The donor is introduced into the cell as a plasmid, a minicircle, a Bacterial Artificial Chromosome, a nanoplasmid, or a linear dsDNA construct to integrate into the landing pad.

[0193] Along with introducing the donor into the cell, the LSR is transfected into the cell using either, (1) a plasmid encoding for the transcription and translation of the LSR, (2) an mRNA coded for LSR translation, or (3) a purified protein. Landing pad efficiency is determined by flow analysis in the case of a fluorescent protein and/or cell surface marker donor, or colony formation under selective conditions and subsequent PCR analysis of exogenous/endogenous DNA junction formation.

### Example 5. In Silico Identification of Large Serine Recombinases in the MG178 Family

In Silico Identification of LSR and their Putative Attachment Sites

[0194] Putative large serine recombinases (LSRs) were identified with the following modifications: LSR domain specific (PF00239 and PF07508) hmm searches resulted in 987,835 non-partial homologs with a score>50 and length>450 aa. LSRs with at least a 1 kbp flank on either side were dereplicated at 99% AAI resulting in 146,897 non-redundant homologs. LSR attL and attR sites were identified.

### Results

[0195] LSR candidates were identified based on the presence of resolvase, recombinase, and Zn-finger domains, as well as catalytic residues required for activity (FIG. 8). Selected LSR candidates belonging to the MG178 family share 16.9% AAI amongst them and <18% AAI with a known BxB1 LSR reference. The LSRs identified in this work integrate into genes belonging to the radical SAM superfamily, glycosyl hydrolases family 18, helix-turn-helix domain of transposase family ISL3, peptidase family M3, transcriptional regulators, outer membrane protein beta-barrel domain, type II/IV secretion system protein, acetyltransferase (GNAT) family, MFS_1 like family, magnesium chelatase, and manganese containing catalase Pfam domains, as well as into unannotated genes, transfer-messenger RNAs, T-box leader RNAs, and intergenic regions. The viruses that encode the identified LSRs infect a diverse array of hosts including Actinobacteria, Proteobacteria, Bacteroidetes, Firmicutes, Lentisphaerota, Fusobacteria, Candidatus Aminicenantes, and unknown phyla. Proviral genomes mobilized by the LSRs reached nearly 62 kbp in length. Proviral boundaries were identified by aligning the contigs containing the LSR with highly similar sequences lacking the LSRs, which likely represent the host without the integration event. With integration boundaries delineated, the LSR's attachment site's common cores were identified by searching for direct repeats near the boundaries. Perfect and imperfect repeats representing the common cores were identified by finding conserved regions in local alignments of the proviral boundaries (FIGS. 9A and 9B), and in cases where alignments showed no conservation, repeats were visually identified, and the alignments were manually refined (FIG. 9C).

### Example 6. In Cell Plasmid Recombination

### In Cell Plasmid Recombination Reactions

[0196] 150,000 HEK293T cells, seeded for 24 hours, were transfected with 1 μg of integrase, 0.5 μg of attP containing plasmid, and 0.5 μg of attB containing plasmid using LT1 transfection reagent. Transfected cells were incubated for 48 hours at 37° C. and then harvested using 0.25% Trypsin reagent, washed in 1×PBS and stained with Fixable near-IR Live/Dead reagent. Processed cells were then analyzed by flow cytometry using a negative control to gate for cells not expressing eGFP (integrase) nor mCherry (recombination) and eGFP only (integrase expression only). Cell analysis was performed by calculating the percentage of cells positive for mCherry (recombination) over the total number of cells positive for eGFP (integrase transfection and expression).

### Results

[0197] Selected LSRs recombinases were tested for their activity in human cells by synthesizing the recombinase, as well as the attP fragment into a donor plasmid (pDonor) with the attP site upstream of a promoterless mCherry coding ORF. The attB fragments were synthesized into a pTarget plasmid encoding a pCMV promoter upstream of the attB site without a downstream coding ORF (FIG. 10A). When co-transfected with the active recombinase, the pCMV promoter of pTarget will be recombined with the pDonor mCherry, and the junction of the pCMV promoter to the mCherry will drive transcription and translation of the mCherry coding region. Efficiency of the recombinase was compared to the negative control of a cell population transfected with both recombinase plasmid and pDonor without the pTarget plasmid. Of the recombinases tested, MG178-7202 (SEQ ID NO: 7140) was active only to a single predicted attachment site 1 (GGGCACCC) at 50% of all transfected cells, MG178-7193 (SEQ ID NO: 7131) was active at up to 45%, MG178-1859 (SEQ ID NO: 1848) and MG178-7177 (SEQ ID NO: 7115) were active up to 30%, MG178-7201 (SEQ ID NO: 7139) recombined at up to 20%, and MG178-7173 (SEQ ID NO: 7111) and MG178-7198 (SEQ ID NO: 7136) recombined at less than 20% of total transfected cells (FIG. 10B).

### Example 7. In Vitro Recombination of LSR Systems

### In Vitro Testing of Recombination

[0198] To test the functionality of the serine recombinases, the attP and attB sites were predicted from the attL, attR and common core sequences from the native integrated prophage genomic context. attB and attP sites were synthesized in gene fragments of approximately 300 bp in length with primer binding sites unique to each attachment site end (FIG. 4C). Serine recombinases were expressed in vitro, while negative controls included in vitro expression reactions without template (null) (FIGS. 4A-4C). Negative recombination reaction controls were set up in 10 μL reactions using 100 ng of attB, 100 ng of attP, recombination buffer (20 mM HEPES pH 7.5, 50 μg/ml bovine serum albumin (BSA), 2 mM TCEP, 5 mM MgCl2, 100 mM KCl, 5 mM spermidine, 0.2 mM ZnCl, and 5% glycerol) and 1 μL of spent null reaction (no recombinase template). Experimental conditions included 100 ng of attB, 100 ng of attP and 1 μL in vitro expressed recombinase. Recombination reactions were incubated at 30° C. for 1 hour and diluted with water at 1:10. PCR reactions were then performed with recombinase specific primer sets (SEQ ID NOs: 7407-7411) and run on a 2% agarose gel to determine amplification and size of resulting products.

### Results

[0199] LSR candidates were expressed in vitro and added to a reaction buffer with in cell recombination determined attB and attP dsDNA fragments. Four LSR (MG178-7202, SEQ ID NO: 7096; MG178-7193, SEQ ID NO: 7087; MG178-1859, SEQ ID NO: 1848; and MG178-7177, SEQ ID NO: 7071) were active based on strong PCR amplified recombination products that were not observed in negative control conditions containing no recombinase enzyme (FIG. 11).

### Example 8. In Cell Plasmid Recombination by Active MG178 Candidates

### In Cell Plasmid Recombination Reactions

[0200] 24 hour seeded 150,000 HEK293T cells were transfected with 1 μg of integrase, 0.5 μg of attP containing plasmid and 0.5 μg of attB containing plasmid using LT1 transfection reagent. Transfected cells were incubated for 48 hours at 37° C. and then harvested using 0.25% Trypsin reagent, washed in 1×PBS and stained with Fixable near-IR Live/Dead reagent. Processed cells were then analyzed by flow cytometry using a negative control to gate for cells not expressing eGFP (integrase) nor mCherry (recombination) and eGFP only (integrase expression only). Cell analysis was performed by calculating the percentage of cells positive for mCherry (recombination) over the total number of cells positive for eGFP (integrase transfection and expression).

### Results

[0201] Selected LSRs recombinases were tested for their activity in human cells by synthesizing the recombinase, as well as the attP fragment into a donor plasmid (pDonor) with the attP site upstream of a promoterless mCherry coding ORF. The attB fragments were synthesized into a pTarget plasmid encoding a pCMV promoter upstream of the attB site without a downstream coding ORF (FIGS. 10A and 10B). When co-transfected with the active recombinase, the pCMV promoter of pTarget will be recombined with the pDonor mCherry, and the junction of the pCMV promoter to the mCherry will drive transcription and translation of the mCherry coding region. Efficiency of the recombinase was compared to the negative control of a cell population transfected with both recombinase plasmid and pDonor without the pTarget plasmid. Of the recombinases tested, MG178-7178 (SEQ ID NO: 7072), MG178-7199 (SEQ ID NO: 7093), MG178-7170 (SEQ ID NO: 7064) recombined at less than 5% of total transfected cells, while MG178-7201 (SEQ ID NO: 7095) promoted recombination above 15% (FIG. 12).

### Example 9. Human Cell Recombination as a Result of Plasmid Dosage

[0202] Active levels of recombinase activity in cells are easily affected by the amount of recombinase, target and donor plasmids introduced into the cell. To test the most effective ratio of plasmid dosing, we altered the recombinase plasmid individually, or with the target and donor plasmids.

### In Cell Plasmid Recombination Reactions

[0203] 24 hour seeded 150,000 HEK293T cells were transfected with varying levels (0.1-1 μg) of integrase, 0.1-0.5 μg of attP containing plasmid and 0.1-0.5 μg of attB containing plasmid using LT1 transfection reagent. Transfected cells were incubated for 48 hours at 37° C. and then harvested using 0.25% Trypsin reagent, washed in 1×PBS and stained with Fixable near-IR Live/Dead reagent. Processed cells were then analyzed by flow cytometry using a negative control to gate for cells not expressing eGFP (integrase) nor mCherry (recombination) and eGFP only (integrase expression only). Cell analysis was performed by calculating the percentage of cells positive for mCherry (recombination) over the total number of cells positive for eGFP (integrase transfection and expression).

### Results

[0204] Candidate MG178-7202 (SEQ ID NO: 7096) LSR recombinase was tested for their activity in human cells by dosing varying levels of integrase, donor, and target plasmids for measured increases in recombination efficiency. MG178-7202 was found to be the most active at integrase plasmid amounts equal to target and donor plasmids, at 250 ng per transfection. This represents a 30% increase in recombinase activity given by the concentration of plasmids in cells (FIG. 13A and FIG. 13B).

### Example 10. In Cell Attachment Site Minimization

### Construction of Minimized Attachment Sites

[0205] Attachment site minimization is crucial to understanding the limits of recombinase activity into the eukaryotic cell. A smaller attachment site footprint allows for the streamlined incorporation of the attB or attP site to any locus of interest in the human genome by means of a dsDNA donor or a RNA templated addition to the genome for attachment site incorporation. In order to identify a minimized sequence, a series of AttP and attB variant sites were synthesized with the previously described promoterless mCherry for attP and a markerless promoter with attB. Decreasing sizes of both attB and attP were benchmarked against the 300 nt active attachment site (SEQ ID NO: 7100). For MG178-7202, attB sequences tested correspond to 108, 88, 68, 58, 48, 46, 44, 42, 40 38, 36, 32, 28 nt in size (SEQ ID NOs: 7188-7200), and attP sequences were tested at 108, 88, 68, 58, 48 nt (SEQ ID NOs: 7183-7187). For MG178-7193, attB sites were tested at 112, 92, 72, 62, and 52 nt (SEQ ID NOs: 7206-7210) and attP sites were tested at sizes 112, 92, 72, 62 and 52 nt (SEQ ID NOs: 7201-7205).

### In Cell Plasmid Synthesis and Recombination Reactions

[0206] 24 hour seeded 150,000 HEK293T cells were transfected 250 ng of integrase, 250 ng of attP containing plasmid and 250 ng of attB containing plasmid using LT1 transfection reagent. Transfected cells were incubated for 48 hours at 37° C. and then harvested using 0.25% Trypsin reagent, washed in 1×PBS and stained with Fixable near-IR Live/Dead reagent. Processed cells were then analyzed by flow cytometry using a negative control to gate for cells not expressing eGFP (integrase) nor mCherry (recombination) and eGFP only (integrase expression only). Cell analysis was performed by calculating the percentage of cells positive for mCherry (recombination) over the total number of cells positive for eGFP (integrase transfection and expression).

### Results

[0207] A range of minimal attachment sites were tested for two LSR recombinases. All the combinations were benchmarked to the original 300 bp attachment sites for comparison of recombination efficiency. Highest efficiency recombination occurred between 58 nt for attP to 48 nt attB site for MG178-7202 (FIG. 14). Recombinase activity was further detected with a 48 nt attP and down to 32 nt for attB. MG178-7193 attachment sites were shown to be most active at 52/72 attB/attP sizes, but recombinase activity was measured down to 52/62 attB/attP (FIG. 15).

### Example 11. MG178s Purification and In Vitro Activity Assay

[0208] Isolating pure and functional proteins is essential for extensive in vitro analysis of biochemical properties and mechanistic studies. MG178 candidates were expressed and purified to obtain proteins of sufficient quantity and quality for such characterizations. MG178-1859 (SEQ ID NO: 1848) was expressed as an N-terminal Sumo-fusion protein in a Carbenicillin-resistant pMGF expression vector, while MG178-7202 (SEQ ID NO: 7096) was expressed as N-terminal Sumo-fusion protein in a Kanamycin-resistant pET28 expression vector. All constructs were expressed in E. coli.

### Protein Expression

[0209] Protein expression plasmids were transformed into competent cells and cultured overnight in 50 mL 2×YT media (1.6% tryptone, 1% yeast extract, 0.5% NaCl) with 100 μg/mL Carbenicillin or 50 μg/mL Kanamycin at 37° C. depending on the expression vector. The next day, 7 mL from each overnight culture was used to inoculate 1000 mL TB media (1.2% Tryptone, 2.4% Yeast Extract, 0.4% Glycerol, 17 mM Potassium Phosphate Monobasic, 72 mM Potassium Phosphate Dibasic) containing 100 μg/L Carbenicillin or 50 g/mL Kanamycin at 37° C., and cultures were grown, shaking at 37° C. At OD600≈0.8-1.2, cultures were cooled on ice before induction with 0.3 mM IPTG and 0.2% w/v L-(+)-Arabinose and further incubation at 16° C., shaking, for approximately 18 hrs. Cultures were then harvested by centrifugation at 6,000×g for 10 min, and pellets were resuspended in Nickel_A Buffer (50 mM HEPES, 500 mM NaCl, 10 mM MgCl2, 1 mM EDTA, 20 mM imidazole, 5% glycerol, pH 7.5)+protease inhibitors (EDTA-free)+2 mg/mL lysozyme (Lysozyme from Chicken Egg White, Research Product International L38100) and stored at −80° C. Culture samples were taken pre- and post-induction, and cells were pelleted via centrifugation (15,000×g, 1.5 min) and resuspended in 100 μL 2× Laemmli Buffer per 1 OD cells.

### Protein Purification

[0210] MG178-7202 (SEQ ID NO: 7096) is shown here as an example of the protein purification process. Expressed proteins have the following sequence architecture: 6×His-(GS) 1-Sumo-GSGSGGSGS-PSP-SV40 NLS-HA-MG178. Cell pellets were thawed and the volume supplemented to 120 mL with Nickel_A buffer with 0.5% β-octylglucoside (P1P1P1, CI-00234). Samples were sonicated in an ice-water bath at 75% amplitude for a total processing time of 3 min using a 5 s on/15 s off cycle. Lysates were clarified by centrifugation at 30,000×g for 15 min, and supernatants batch bound to 5 mL Ni-NTA resin (for ≥15 min. Samples were loaded onto a gravity column and washed with 10 CV Nickel_A Buffer and washed again with 10 CV Nickel_A2 Buffer (Nickel_A Buffer+100 mM imidazole), then eluted in 2 CV Nickel_B Buffer (Nickel_A Buffer+300 mM imidazole) and 2 CV Nickel_B2 Buffer (Nickel_A Buffer+500 mM imidazole). Fractions collected with Nickel_B and Nickel_B2 Buffer were pooled before concentrating in a 50 kDa MWCO concentrator. Samples were taken throughout the purification process and run on an SDS-PAGE protein gel, which was imaged on a ChemiDoc in the stain-free channel following 5 min UV activation. These gels were used to track the progress of purification throughout the protocol (FIG. 16A). MG178-7202 sample was then filtered through a 0.22 μm cellulose acetate membrane before loading onto an S200i 10/300 GL column and run into SEC buffer (50 mM HEPES, 250 mM NaCl, 10 mM MgCl2, 1 mM EDTA, 5% glycerol, 0.5 mM TCEP, pH to 7.5) to further isolate purified protein (FIGS. 16B and 16C).

### In Vitro Testing of Recombination

[0211] To test the functionality of the serine recombinases, we predicted the attP and attB sites from the attL, attR and common core sequences from the native integrated prophage genomic context. attB and attP sites are synthesized in gene fragments ˜300 bp in length with primer binding sites unique to each attachment site end. Serine recombinases were expressed in vitro, while negative controls included in vitro expression reactions without template (null). Negative recombination reaction controls were set up in 10 μL reactions using 100 ng of attB, 100 ng of attP, recombination buffer (20 mM HEPES pH 7.5, 50 μg/ml bovine serum albumin (BSA), 2 mM TCEP, 5 mM MgCl₂, 100 mM KCl, 5 mM spermidine, 0.2 mM ZnCl, and 5% glycerol) and 1 μL of spent null reaction (no recombinase template). Experimental conditions included 100 ng of attB, 100 ng of attP and 1 μL in vitro expressed recombinase. Recombination reactions were incubated at 30° C. for 1 hour and diluted with water at 1:10. PCR reactions were then performed with specific primer sets (SEQ ID NOs: 7416 and 7417) and run on a 2% agarose gel to determine amplification and size of resulting products. Product forming reactions were Sanger sequenced and aligned to predicted attL and attR sequences determined bioinformatically.

### Results

[0212] LSR candidates were expressed in vitro and added to a reaction buffer with in cell recombination determined attB and attP dsDNA fragments. Two LSR candidates (MG178-7202 (SEQ ID NO: 7096) and MG178-1859 (SEQ ID NO: 1848) were active based on strong PCR amplified recombination products that are not observed in negative control conditions containing no recombinase enzyme, and more specific when compared to the in vitro expressed control (FIG. 17). Results support prior observations of active protein expression from cell-free extracts for in vitro recombination activity (Example 7).

### REFERENCES

[0213] Anzalone A V, Gao X D, Podracky C J, Nelson A T, Koblan L W, Raguram A, Levy J M, Mercer J A M, Liu D R. Programmable deletion, replacement, integration and inversion of large DNA sequences with twin prime editing. Nat Biotechnol. 2022, 40 (5): 731-740. doi: 10.1038/s41587-021-01133-w. Epub 2021 Dec. 9. PMID: 34887556; PMCID: PMC9117393.
[0214] Durrant M G, Fanton A, Tycko J, Hinks M, Chandrasekaran S S, Perry N T, Schaepe J, Du P P, Lotfy P, Bassik M C, Bintu L, Bhatt A S, Hsu P D. Systematic discovery of recombinases for efficient integration of large DNA sequences into the human genome. Nat Biotechnol. 2022 Oct. 10. doi: 10.1038/s41587-022-01494-w. PMID: 36217031
[0215] Smith M C M. Phage-encoded Serine Integrases and Other Large Serine Recombinases. Microbiol Spectr. 2015 August;3 (4). doi: 10.1128/microbiolspec.MDNA3-0059-2014. PMID: 26350324
[0216] Robert C. Edgar, Search and clustering orders of magnitude faster than BLAST, Bioinformatics, Volume 26, Issue 19, 1 Oct. 2010, Pages 2460-2461, doi.org/10.1093/bioinformatics/btq461
[0217] Nayfach, S., Camargo, A. P., Schulz, F. et al. CheckV assesses the quality and completeness of metagenome-assembled viral genomes. Nat Biotechnol 39, 578-585 (2021). doi.org/10.1038/s41587-020-00774-7
[0218] Price M N, Dehal P S, Arkin A P (2010) FastTree 2-Approximately Maximum-Likelihood Trees for Large Alignments. PLOS ONE 5 (3): e9490. doi.org/10.1371/journal.pone.0009490
[0219] Katoh K, Standley D M. MAFFT multiple sequence alignment software version 7: improvements in performance and usability. Mol Biol Evol. 2013; 30 (4): 772-780. doi: 10.1093/molbev/mst010
[0220] Steinegger, M., Söding, J. MMseqs2 enables sensitive protein sequence searching for the analysis of massive data sets. Nat Biotechnol 35, 1026-1028 (2017). doi.org/10.1038/nbt.3988

### EQUIVALENTS

[0221] The disclosure may be embodied in other specific forms without departing from the spirit or essential characteristics thereof. The foregoing embodiments are therefore to be considered in all respects illustrative rather than limiting on the disclosure described herein. Scope of the disclosure is thus indicated by the appended claims rather than by the foregoing description, and all changes that come within the meaning and range of equivalency of the claims are intended to be embraced therein.

SEQUENCE LISTING

| | SEQ | | | |
|---|---|---|---|---|
| | ID | | | |
| Category | NO: | Description | Type | Sequence |
| MG178 | 7105 | MG178- | protein | MSKLSNKLNSIRVAIYVRVSTHYQVDKDSLPLQREELV |
| recombinases | | 7163 large | | AYAKYVLNAKSHEVFEDAGYSAKNTDRPDYQQMMA |
| | | serine | | RVRTGEFSHILVWKLDRISRNLLDFATMYDELKKLGVT |
| | | recombinase | | FVSKNEQFDTSSAMGEAMLKIILVFAELERKMTAERVT |
| | | | | AVMVSRAGTGQWNGGRIPYGYDYDKESETFSINPDEE |
| | | | | KIVLKIFELYEERQSILYVARTLNDSGIRHRSGKEWSPT |
| | | | | TVSIILKNIFYTGAYRYNYFDMSKRGSRQDIKPESEWVI |
| | | | | IPEHHPAIITEERWRNVLLILEQNRRGWKASGKTYHRK |
| | | | | NVHVFAGLLTCQLCGATMSATSSSRELKGGYRPSIYAC |
| | | | | MSHRKGTGCTNKYISDTVLGPFVLNYIANLIKAKASFG |
| | | | | KTTSPETLHKKILRGDMFSEVTGIKEHGLMELYSLYRS |
| | | | | QISGIKYIPASIDTEETDSASERDILLSERRRIERALSRLK |
| | | | | TLYLYAEADMAEKDYIIEKKQLDEQLDKVNSRLEEISK |
| | | | | GLTAQFSISDDELLAKASYFIMSQKLSDKRFVNYRRLL |
| | | | | EETDPRILKDFINTVTCNFCIENGKIRSITFKNGIIHEFMY |
| | | | | KDD |
| MG178 | 7106 | MG178- | protein | MVKKLSKRASEILETINSLRVAIYIRVSTHWQIDKDSLP |
| recombinases | | 7165 large | | LQRSDLINYCKVILGTENYVVFEDAGYSAKNFERPDFQ |
| | | serine | | KMMARVRSGEFSHILVWKIDRISRNLLDFATMYQELK |
| | | recombinase | | ELGVTFVSKNEQFDTSTAIGEAMLKIILVFAELERNMTS |
| | | | | ERVTATMLARASDGKWNGGKVPFGYSYDKEEKSFVIN |
| | | | | EAESRVVRLMYDLYDEQHSLLAVSKELNRRGYRSRKG |
| | | | | AEWSPVTVGNIMRSPFYIGSLRYNYRRESGPSFTFRPES |
| | | | | EWVMIEDHHPQTVTHEQWNRVVSTMRSQRRGQPGHG |
| | | | | KSFNRGNVHIFAGIITCGYCGSLMRASQDRPRKDGWRP |
| | | | | SIYTCSRKRVSNDCPNKYVSDISVGPFVLNFIANMIRAR |
| | | | | KSFGVSTSIETLQKKLLRGDAFKDVIGIGQSGLKELYRH |
| | | | | FKGTQDQEQNFMADPGSTATTEQEEREVLLSEKRRKE |
| | | | | RAINRLKALYLYSEDEDAISETDYIVERKRLIDSLETIDA |
| | | | | RLAEIDKALSEQATLSDEEFIAKASYFIMAQQLSDKRYI |
| | | | | DYERFVRKVDPQIVKNFVNLVCSNFCIKNGRVVSIRFK |
| | | | | NGIELQFFYNDL |
| MG178 | 7107 | MG178- | protein | MRTAAYARYSSDNQREASLDDQLRNCRAYCVRQGWP |
| recombinases | | 7169 large | | APTVYQDAEISGSRTDRADYQRLLRDARQFDVILVDDL |
| | | serine | | TRFGRDKEELGTIIKRLRFHGVRLIGVSDGIDTARKGYK |
| | | recombinase | | VETGLRGLMSELFLDDLADKTHRGLTGRALAGASAGG |
| | | | | LPFGYIVTETGQRAIDETKAAIVRRIYADYLAGRSPREI |
| | | | | VSALNAERVPAPRGGQWHLSGVYGDVRRGLGILANPI |
| | | | | YTGRQVWNRSHWIKHPDTGRRVRQERPPSEWITTEQP |
| | | | | DLAIIDAATWTAAQARIRAASPKRTGDKQGGPGRPAR |
| | | | | YLLSGILHCDQCDGPMVIVDRYRYGCSRHKDQGDAVC |
| | | | | TSRTRVPRALVEDALVAGVRAELLSDAAFRRYQRATA |
| | | | | EALKRAAPDTAAAKRSLAAAEQVQQNIMAALRAGIIT |
| | | | | PSTRTELIAAEAAVTTATSELQALQSIQPTHILPRARER |
| | | | | WNNVVARLTDTRDIPAARDALRELIGNRVTVKNENGE |
| | | | | LFAEIAASECQIKLVAGAGFEPATFGL |
| MG178 | 7108 | MG178- | protein | MAYCIYLRKSRMDLEAEARGEGDTLARHEKILLELAK |
| recombinases | | 7170 large | | KLKLNIGAIYREIVSGETIAARPVVQRLLSEVGQGMWE |
| | | serine | | GTLVMEIERLARGETIDQGIVAQAYKYSNTKIITPQKIY |
| | | recombinase | | DPQNDFDEEYFEFSLFMSRREYKTINRRLQTGRIASVKE |
| | | | | GKYLGSVPPYGYTIKRLEKQKGNTLAIVPEQAEVVRNI |
| | | | | FHWYTRSENRLGVSLICRRLNEMKIPPAKGDVWVPASI |
| | | | | QTILRNPTYAGKVRWKVRPHRKKMVDGQVVKERPRA |
| | | | | NPSEWIVVDGLHKAIIDWETFELAQQYLSINSSRPCPKF |
| | | | | APIKNPLGGLIICGLCGRKMVRRPHGTRYPDTLMCPNV |
| | | | | ACQNISTQLSIVEERLLEAIDNWMQNYKLQWKDDDFE |
| | | | | SSKTADYRILLKSIKRLDDEIATLDKQMNSIHDLLEQGV |
| | | | | YTTEVFLDRSKKISDRINELKQAKKELNEQYQAFEQQE |
| | | | | VNKKFIIPKIEKVLDIYRTVDDPEIRNQLLHEILEKVIYT |
| | | | | KTQRGNRGGHADNFNLVLYPKLNVSKDFNY |
| MG178 | 7109 | MG178- | protein | MYLTLSEYINSIEKLNAAGTKDTKIRDLLEYYQRYNCS |
| recombinases | | 7171 large | | VTPGPGVFYAVIYARYSSHSQRDESIEGQVREDLEYAS |
| | | serine | | RNNMIVLGVYIDRALTGKEIDKRISFQQMIKDSTRGKW |
| | | recombinase | | QYVITWKVDRFARNRYDAAIYKARLKKHNVRVVYAR |
| | | | | EQIPDGPEGILLESVLEGQAEYYSASLSQNIRRGQEDNA |
| | | | | MECKVNGSIPLGYRVGADRRFEIDPGTAPIIHTIFELYD |
| | | | | AGHTYQDIEGYLNSRGYKTQKGGPFNKNSFNRILKND |
| | | | | RYIGTYRYKEVTVENGMPAIIDKELFESVQRKIEKNRK |
| | | | | ARAHKKSDMNFLLTTKLYCGLCGKAMIGESGTGKLG |
| | | | | GKYYYYTCVGKKRDKTCKKKPIKKDWIENLVIQETVR |
| | | | | LILQDDMINEIADKVMEYQAREADHTILHSLQIQLNDT |
| | | | | EKAIKNLIAAIEQGIITPSTKNRLEELEDEKIRIMNGIAEE |
| | | | | DTIQPVVERDQILFYLKHFQNGDVSDPQYCQTLIDVFV |
| | | | | NAVYVYDDRIVITYNYSGAHNSVTLEQIEQALGESEGS |
| | | | | DTVSSAPC |
| MG178 | 7110 | MG178- | protein | MSRKLIRVAIYARFSCDKQRDASIEDQLYECNKYAERH |
| recombinases | | 7172 large | | GYTVVMQYCDYAMSGRSDDRPNFLRMIEDAKTGMFE |
| | | serine | | IILVWKMDRFARNIEEQYYYEHVLRKNGGVTFESVKE |
| | | recombinase | | NIAGTSIEATSTKALNALFAEVRSRQSAEDTMRGMLGK |
| | | | | ARKCQYLGYPLYGYSHDGDKITLDPEKAPIAKRIHVDF |
| | | | | LSGVAPKQILDWLLSIGVKTARGKDPGYGFVVSMLKN |
| | | | | VRYAGVYMWGVKKDEAGNDVLDDLGRPVPLVYIED |
| | | | | GMPAIVSMSQKLSCIEKLGFRRRLKTNADYLLSGKLIC |
| | | | | SKCKEPMHGETAIGGSGIEYWRYSCRGKRKACLGSFN |
| | | | | KETVEQGVVSGVREMLRDAALVDYLIDRHIQFRDERQ |
| | | | | SKATIEAVRKDIRAVKKQRDNLLSAVAEGLDFNHVKP |
| | | | | KIAALDAQERALEKRIEELKREQNSVSREELRAFFSDM |
| | | | | SKGALSDEQITLTFVSKVWLYESTAVAVMNFDSCESTQ |
| | | | | YEIELALKKHERPDQQAVRETSKWCPRRDSNARHPL |
| MG178 | 7111 | MG178- | protein | MSYLMYLRKSRADKEAELRGEGETLARHEQILSEFAA |
| recombinases | | 7173 large | | KMDLPIGAIYKEIVSGETISSRPKMQQLLIEVMQGHWD |
| | | serine | | GVLVMEIERLARGDTKDQGTVAEAFKFSNTKIITPIKTY |
| | | recombinase | | DPLNEYDEEYFEFNLFMSRREYKTINRRIQRGRIAAFND |
| | | | | GWYIAGTAPYGYKKVKRKGDKGYTLDIVDNEAQVVR |
| | | | | MIYDLYTHGELQDDGSYLRFGSYQIKDRLNDLHIQSRS |
| | | | | GSTWSAAAIIDILRNPAYAGYQRWSWRKVQKKLVGG |
| | | | | NIVESRPKNDDCSKVKGRFEAIITDEQFELAQKIREGKP |
| | | | | TPIRSTNALQNPLSGLVYCEKCGTLMTRQPSNTKDHYP |
| | | | | VLRCPNSKCTNISAPLYLIEQKLIEGLAEWADEYELNW |
| | | | | PKKDWEDTEISTATYQHSVDSMQGKLDTITKQLSAAY |
| | | | | DLLEQGIYTLQVFQERRSTLEKQKEESETELQRLNRAL |
| | | | | EISQARARAKREFLPTIRHIVDTYWTIDDVLVKNTMLK |
| | | | | EVLEKVDYLKTERNKKGGKGNANFSIYFYPRVPKY |
| MG178 | 7112 | MG178- | protein | MKIAAAYLRVSTERQDEYSLDSQLKLIRDYAASNDYIV |
| recombinases | | 7174 large | | PDEFVFIDDGISGRSAEKRPEFLRMIGTAKEKEPPFEAIL |
| | | serine | | VWKFSRFARNQEESIVYKSMLARCGVTVVSISEPLAEG |
| | | recombinase | | AFGSLIERILEWMDEFYSIRLSGEVRRGMTERVSRGEPV |
| | | | | TIPSFGYDITDKTYVPNRDANTVRRIYADYLAGKGVSTI |
| | | | | ARELALEGVKTRRGKSPENRWVQYILENPVYIGKLRW |
| | | | | SPDGKANYTRSEVGDSAMLVDGTHEHIIDDATWAAVQ |
| | | | | DKIARSKRGRIPYQRREQPVDWMLKGLVRCDTCGSTL |
| | | | | VYTSTACPSMQCHKYAHGACPTSHALSIAKANRAVIA |
| | | | | ALESCAASLSFPVAPQTVKPVADEPDYSKLIKQEQQKL |
| | | | | RRLMDAYEEGVYTIEEFAARRAKLDDKIAQLKKQAEK |
| | | | | NTPAIIDVQEYKVRVLDVLDIIKSDNVSEADKNTALKAI |
| | | | | LSYIVYEKANNRLALYFYF |
| MG178 | 7113 | MG178- | protein | MRTAAYLRYSSDQQRDASIRDQLRNIETYCDRQGWQK |
| recombinases | | 7175 large | | PLVFQDEAVSGARSDRPGYRALIKAARDRQFEVLLVD |
| | | serine | | DLSRLSRDHIEAAQAVRLLKFLGVRLIGVSDGLDTARN |
| | | recombinase | | GYKLETGMRGLMAELYLDDLAEKTHRGLMGQALDG |
| | | | | YSAGGLPYGYASVHDGHGHRRVILEEQAQWVRWMFD |
| | | | | RYIRGHSPRAIAAELNALGIPSARGKTWCLTAIYPDAK |
| | | | | HVGILGNPIYNGRQIWNRTKWIKDPSTGRRKRILRPESE |
| | | | | WVITEHPELKIVDDDTWSAARDRALKTRARTARQREN |
| | | | | LRRASISGGRGPKYLFSGLLRCACCGSSYVVVDRYRYG |
| | | | | CSAHKDRGSAACSNSIKVPRYAIERTLLAGIKEELLSDR |
| | | | | AYRAFESEVRRLLKTAQPDIGEARRAAAKAQAEVDNII |
| | | | | GAIRQGIITPATKQALEEAEGRLDAAKRRIKEIEAWQPT |
| | | | | QMLPRAKQIYRGLAERLERIEDIADAREALRSILGEDIK |
| | | | | LVPENGVLWAELKGGCAALSQITVVAGAGFEPTTFGL |
| MG178 | 7114 | MG178- | protein | MMRAAVYARKSNEQDVQEEVRSVTRQLEHGRAFAES |
| recombinases | | 7176 large | | KGWSVKDDHVFSDDAISGMHGEEKRPGLKLLLATME |
| | | serine | | LVPRPFDVIVMASDDRLMRNQLKVGAVLERIQEAGVD |
| | | recombinase | | LYYYLENRKVDLSTVVGQFMESVHAMAAHDYRVKLA |
| | | | | RHTRDGMKARAKAGFVIGGRTFGYDHVPVDRGEVST |
| | | | | RKTRRVPMTRVINEAQANIVRDIFTRYAAGQSPKQIAR |
| | | | | TLNSRPGILVPGGKHGIPMLRWSRHQVRETLQHVLYT |
| | | | | GVLLSTWNGEQIRVERPDLRIIEDDLWQQTRARFANLR |
| | | | | EQYIRMKHGQLLGRPAHSVESAYLLTGLIQCGVCGRS |
| | | | | MLATTRKRANHTKRKYYQCVSNMNNRRRACDNTLLA |
| | | | | PMDATDAAVLQAVEQSVLNPSILCDAIAHALSKLDGTE |
| | | | | NRQQEQTRLAEELSQLDTQMKHLADSIAKLGGNDTLL |
| | | | | DEVRQREARRQEIGAERSRLESLESLSTLDLGQVEQDL |
| | | | | RRITDEWKGAQGFTNRHPAAARTILKKVLPSKLILTPH |
| | | | | PESRSYSFAGDGAIGPLLGQVVSSQMGKGQGSSGEGR |
| | | | | VRRPNHAATKDSWTTSSACCRSRRRARA |
| MG178 | 7115 | MG178- | protein | MNNTYTLENVIIYLRKSQSDDPAMSVEEVLKKHEDVL |
| recombinases | | 7177 large | | QEFCENEFGKRIPEKQIYREVASGETIEDRPVIQAILKLM |
| | | serine | | ETDSLKGVIVVEPQRFSRGDLQDCGRIVNALRYTNTLA |
| | | recombinase | | ITPQKTYNLNDEYDRKFFEMELTKGSDYLEYYKKIQRR |
| | | | | GREASVKKGNYIGSVTPYGYNKATYMDGNRTCHTLAI |
| | | | | NQIEAEAIRMMADLYLNKGYGFTKIARALDEMGYKPR |
| | | | | KSEKWSPAAIKDIMENPIIIGKIRWNRRKTIKKLCDGEIT |
| | | | | KSRPKAQDYILVDGKHEAILDEETYYKILDKRGKNPRL |
| | | | | RKSKELTNPYAGLLFCGTCGRAMSHKKYKQRKSNTIS |
| | | | | ESMLCNNQANCHTKSVMYSSFEKSVIESLEKAIADFEV |
| | | | | KLQNNNGDITSLRASRIKTLESELKTLLEKDERQKDNL |
| | | | | DDGIYSKEEFLKRNAKVQEQIEATKKALSQVKDSILPEI |
| | | | | DYKEKIVRFQDCLNALTDPNVSAPCKNMLLKSCIDKIV |
| | | | | YHNDSESKAGIGRYVDNPFKLDIFLRL |
| MG178 | 7116 | MG178- | protein | MSEYIMYLRKSRQDDPTETVEEVLKKHEIQLQDFALN |
| recombinases | | 7178 large | | NFHYRIPSDDIYREVVSGETIDDRPMIQAVLKRIEDENI |
| | | serine | | KGVLVIDCQRLTRGDMLDCGIIVHSFRYTNTLIITPQKT |
| | | recombinase | | YTLSDKYDRKFFETELSRGSDYLDYTKEILRRGRDASK |
| | | | | RRGNYIGSVAPYGYDRIKIGKDWTLKPNDESQYVKLIF |
| | | | | ERYTQGVGTFDIVNEIEKLGAKPRNSKSFDYNRITDIIK |
| | | | | NPVYVGKIKVNEDETFKVMQDGKLVKKRKARKEYEL |
| | | | | VDGKHEPIVSQELFDKAQNERKKRTREPNSCVLQNPY |
| | | | | ASLIKCGYCGKAVTLHYGSKKRGGDKYKRLACTGRG |
| | | | | CECVSHNYSEMNDAIIDALRNKLDDIKVQIDTDDNQSN |
| | | | | ANSKIIESLESRLSLNEKKMNDICGYLENGIYTIGIFTKR |
| | | | | KKALEDERTTLEEAIMNAKKESESSSELESKTITLSQAIE |
| | | | | MLKDDSISAKIKNNFLKEIIQVIYYKKDKLGNITLDIYL |
| | | | | R |
| MG178 | 7117 | MG178- | protein | MNPAKIYLLYARVSPKGSTWDCNETSIGVQLADMRTH |
| recombinases | | 7179 large | | ILRQVPDAQFIEVVDEFKSGKNLKRPGVQKILFDLESRP |
| | | serine | | VPWHCLVVWNLDRLSRSLCDAIPIFSKLRDAGCEFISIN |
| | | recombinase | | QEYLSYTGAMARYMLHQTIALAELERGMTSERVSAK |
| | | | | MRWIASEGKIPWGNIPLGYIRKPGVKNTVVIDEPKAEIV |
| | | | | RTIFDMYIAGNLSYTAINKRWPGMIKDRGYLYRILRNP |
| | | | | LYIGELHYAGKVQKAEHPAIIDKEIFEQTQSLLASRRRN |
| | | | | YQRRGIQKYDYLLSGIVRCHCGRQMTGYSVNKKDGK |
| | | | | YFYYKCTSPTCKNAINAETLDSSVLQQIASVFRNKSEIR |
| | | | | ASLQAYLEEQKEKQLAVKIHRNELEKQLAEAKQKQTR |
| | | | | IMDMFLAGVVDQSNAKLWNSELAATRQSVELLEKEIT |
| | | | | ELSVVPEIVFDDIFSDLMKAAEEWTKKIASGEADFATK |
| | | | | RNLIMSVIESLECVKRSDTQIGFKMKLVMSSSCKWWA |
| MG178 | 7118 | MG178- | protein | MAKKYRYGPVAPCTQAVIFARVSTKEQEPGASLKAQK |
| recombinases | | 7180 large | | EAMEDYCNKKGLPIVKKYKAIESSTNGKRVQFNEMLD |
| | | serine | | FVRKQKQKTAIVVHCIDRFQRRFNECVEVESLLLDDKT |
| | | recombinase | | DLHFCKEGLILTKNSPSSDIMRWDMGILSGKMYVANL |
| | | | | RDNVNRGMNYNWSIGKYQTKAPVGYLNVNKDIVVEP |
| | | | | DRAPFVKKMFEMYATGLHSIKSLHNFAKEMNLCSSHS |
| | | | | KTNKPLGRETIYAMLKNPFYYGEMVIRGEKMPHAYEP |
| | | | | LIAKSLYDKVQELLSGGKIHTRTQEYAGIPFVFRGLVK |
| | | | | CAECGCTISSETHKKKSGRSYTYLRCGHTKGACNQEL |
| | | | | VSENLLLQQLDDEVFSKIRLSRNILEPLKKCVQKRLIEE |
| | | | | SDANMIMKRKITTELNNLEARERRIKDSFFDGDITREE |
| | | | | WQEEKANIVAKREELQRIAEKYADISKDIQITVNEVLDI |
| | | | | AATVSDIMKEANPTQQNKLLSLMFAECYLDGQKLIYK |
| | | | | LQKPFDKLVNLKSAGTWFDFDKSDIKEYETMAEKVQ |
| | | | | MYKIERTKYLG |
| MG178 | 7119 | MG178- | protein | MQKKIIDNKGKAVIYARYSSDRQREESIEGQLRVCEEF |
| recombinases | | 7181 large | | AEKNNLQVIETYIDRALTARTDRRPSFQKMIADCKKKQ |
| | | serine | | FEYILVYKLNRFSRNRYDSAVYKHKIAQYGVKVLSAM |
| | | recombinase | | ERITDDPSGILLESLIEGIAEYYSAELAENVHRGMKENA |
| | | | | LEGKANGRLPLGYQKGSDGKVIVDPATVHAVKAIFNG |
| | | | | TAAGKRMKAIAAELNEAGYKNAFGRPYVPSSFAAIIRN |
| | | | | KKYIGTYQWADTEVEGVLPALIDNATFEKANEVLDSR |
| | | | | KRKSNRVRSDQYLLTGRLVCGDCGASYVGKSGTGRL |
| | | | | GHPYPYYCCANRIKRKGCTAKNFRQDKLETWLAVETV |
| | | | | KALNHPEVIQQLSTQILDAQKRLKSEKDPLIDGLAAEIK |
| | | | | DYQKRLANSIKAIESGIFSKTISANIKDYEEKIKALEKQL |
| | | | | SRAKLKQQPFTLTADHIEFFLTALLQGNPEDQMYRNNL |
| | | | | LDVLVSRVVLYPNRAEVFYRYKKELPSLPNPVIIREERG |
| | | | | SNGTQLVGPLGFEPRTNRL |
| MG178 | 7120 | MG178- | protein | MKKAALLLRCSTDSQDYDRQQRDLLPTAESMGYEIIE |
| recombinases | | 7182 large | | DLIFGEYVTGKDDVRKKDRESIANLKQACKEGKVDAIF |
| | | serine | | INEVSRLSRDSIAGRLFIREFNDDYKVPVFFRDLQMWTI |
| | | recombinase | | DPNSRIKNTYLEQMLGFYFDAAAAELKSMKTRFASGK |
| | | | | RKNARTGKSIGGVPSIGYTKDKEGIIIIDEDTAKYIRIIFS |
| | | | | KYLEKEGTITTVGRYLRGISNIRTWGNGTIGNILRNRAY |
| | | | | TGKLEVSITNPDETDDSKKIEKFITTIPVIIDEETFNKVQQ |
| | | | | KLDSNRSTQEYTRSKVHLLQKLIICSDCGKAFSTKTVN |
| | | | | SGRNYTYCCVSKQNGINCSLPIALDADKTEAIIWNLVK |
| | | | | SKLIELNKLGEKEKEERIAKEKQQIQIYEEEITAIELGIAK |
| | | | | IARKKKNLIDYLEEAESDEEIADIKARRKKYDSEIAENK |
| | | | | TRINHLKEKIEICKSNINQHLNSSLTSSILSSIESDRNKMK |
| | | | | VQIKEFIKRIIPYPIANSHSVLEVCTTFGRYYILYSSRDK |
| | | | | YKQAYFLYGDYYRYFQKNNKFLVLGDMDEDTIEKNM |
| | | | | KVSAFARTFTVDGYSKPKNTDTSNDKENISLSDAIKQNI |
| | | | | YHFSKNNNIGVYTYEEMKEKCRKMDWVLPFTI |
| MG178 | 7121 | MG178- | protein | MKPKCFSYTRFSRPEQAEGDTLRRQDSMAFEYAEKHG |
| recombinases | | 7183 large | | LVLDKSLNMSDHGLSAYSGDNKKKGALGSFLKLIKDG |
| | | serine | | KIAKGSVLLIEHVDRLSREPFNDAHVQFNSILESGVDIV |
| | | recombinase | | TLSDSQHFNRQSINDIGSVIPTLIKMDLSHQESEKKSQR |
| | | | | LKAAWQNKRDNVSTKKLTSRGPAWLELSDDRSEFIAV |
| | | | | EERAKVIKMIFDMKLGGKGSQLIARTLNQDSELWKPST |
| | | | | KWRKSYIGKILRNRACIGEFQPMRRIEGVRQPVDQPVK |
| | | | | DYFPTVVQEETFLKVQALIKNNKFYGGRNGAISNLFSH |
| | | | | LMRCGYCQGPMRLIDKGKGRKKLICDNAVRGIGCERL |
| | | | | QIHYKNFEDIILDFCVGLKVSDLIKDDQHLIELEQLKDK |
| | | | | VLLIDDRLKTIEKEEAFFIKRMKKTLDDRIADDYEKGIS |
| | | | | ALKDEKEILKEDRSKAQTEIEKLSVLDADIKLRLSDIKD |
| | | | | LKEIMKNLKGDELRDIRLRLRDKIRDLIDSIDIFAKGDP |
| | | | | KETENLIEDMKGIYTEDELKDELKGDPNYVISFKSGVIR |
| | | | | SLFPYKDKKLSWQLDKTKKQLDIY |
| MG178 | 7122 | MG178- | protein | MQNNSGVLWVRVSSDDQAKGYSPDSQERLLESIAAKR |
| recombinases | | 7184 large | | EIIPVKKFNVTESAKTSENRKLFKEMIEFIKKNEIRNLVA |
| | | serine | | LSADRLARNYQDFTTLQILVDKHNVSIILAETNKIINQN |
| | | recombinase | | SDYSDRFLFQLLASLSEMGNRQRSADTRRGMEQKARQ |
| | | | | GGAPYYVPIGYLNVVDPQNPKRKFVIVDEERGSLIKKA |
| | | | | FELYDTGKYSLFTLADELNRLGLRTRPTKSHSAAPITKS |
| | | | | SIEVILKNKFYIGLVLQRGQYYPGAHQPLISKQLFDSVQ |
| | | | | GRLAQHCSYSRPDSKKVFPFKKFLKCGYCGCQLTGEE |
| | | | | QQGKNGNSQYRYYRCTFSKDRNCPQKYYREEEIDKML |
| | | | | TEAMGDLYVDETIAEEIRKRLKSTHLEQSSWEDKERAR |
| | | | | LQAAETKKTRHLDLIYEDRLNEIITPEQYKQKSNAIQGE |
| | | | | LAQIKSDINKLGKTNLKYKEEGSTILALLKGLKQTYEK |
| | | | | QDYQGKAEILALVLDKVFLRDGKAQFHWKPPFDFLFSI |
| | | | | NKILEEEEPQAGSFIRSSERDPDSGLKSICSISRKGRFSRG |
| | | | | IYPGSPLI |
| MG178 | 7123 | MG178- | protein | MTKRTAIYARYSTDLQNERSIEDQLALCRSYAERNGLL |
| recombinases | | 7185 large | | IVDTYTDAAVSGSSTVNRQGWLKLMRDAEAKRFDLV |
| | | serine | | LAEDVDRISRDEADYHTARKRLAFLGIEIWTAHSGKVT |
| | | recombinase | | GIEGSVRAMMASHYIENLAHKTRRGLAGVIKSGRHAG |
| | | | | GRAYGYRTVPGKPGELEIIPEEAEVVRRIFTDYVCGRTP |
| | | | | REIAHALNNEGTPPPRGKRWSASTINGNKARGYGVLQ |
| | | | | NELYAGRLVWNRVRMVRDPATGKRISRANPKSAWQT |
| | | | | QEAPHLAIVSREVFDAAQFRKAARSIGGGHKHRRPKRL |
| | | | | LSGLLKCGACGSGMSVFGADKTGKVRIRCTAATESNS |
| | | | | CPDPRTFYLLAVEETVVDGLRRELQDPKVLTEYARTYI |
| | | | | EERNRIAQRAAQDRGKLERKLAKVSGEYDRTLRLYQK |
| | | | | GVLSEEVAERKLPRLQAERDRLTAELEAEPVVENKITF |
| | | | | HPGTLARYEGALARLQTELEKGAAESDAEQAAAIREL |
| | | | | VETVTVRRDPSRRGGVEVEISGRLAALLNAPVYPGHLR |
| | | | | SPVGGNAGSGGGTRTPDTRIMIPLL |
| MG178 | 7124 | MG178- | protein | VRAATYERISQDRESTEHGVDNQRSANLALAARLGFD |
| recombinases | | 7186 large | | VVSDYRDNDTGASTRSRKARPGYAAMLAAAKRGEFE |
| | | serine | | AILAYSNSRLTRRPREFEDLIELHEQYGIRIVTVVSGDD |
| | | recombinase | | DLSTADGRMVARIKAAADAAEAERTGERVAFAQAAK |
| | | | | LRRGEDIGGRRPFGFEADRITIRESEATLIREGVRMILGG |
| | | | | ASLYAVARAWDAAGIREKPWRSQTVRDILTRPRNTGR |
| | | | | LVVGGVEYGRGDRPAILTDEEYADLLAVLRTNERPRR |
| | | | | GRKPQTSTAVSVVRCGVCGAGVELTIKSGGVRTIRCSV |
| | | | | RGGGQRHPTMTDDRLEMQLAQVALMRVVDPFATENA |
| | | | | DRPEVAKLRRTLADVTTRRDRAREDVEAYDDPDDRA |
| | | | | HARKRVTELTAAVREARAALDAALAENVASRARHLV |
| | | | | DVAHKRLGGEIVAVDPFQVWPQWVELWRSWPVADR |
| | | | | RELLRGRLIELMPHVRGESWRLRVDGKRPAGATQREG |
| | | | | EPI |
| MG178 | 7125 | MG178- | protein | MAKGNRAAIYARFSSHNQRDESIEIQVEKSREYCEQRG |
| recombinases | | 7187 large | | LDVVCVYSDYAQTGRNTARAEFQKMMDHAKLGMFD |
| | | serine | | YVVIYKVTRIMRNRDEMALARIMLRQAGVEILYAGET |
| | | recombinase | | LGHGSTRVLHLGMLEVLAEYESAVDSERIRDGIQKNAE |
| | | | | RGMANGQTRYGWDIVDGYYQVNEQEAALLRRMKNM |
| | | | | LLSGSTLAEITRAMEGERTRAGKKFTIKGITKLLRRWQ |
| | | | | NCGVYEYAGVRIEDGMPALWTREEQEMLIRILTHRTIT |
| | | | | QRRRGEAEEYPLSGKLFCRECGRYYSGTCGTSKSGTRY |
| | | | | FYYRCPSCRRAFRSGLIEAWACDAVFEATKGKHFKEQ |
| | | | | LADAMAVFDESSNGAHEIEAKRLRKEISKIDAAFERIW |
| | | | | KAIEDGCAPPGGKDRIADLKTRKAALEEDLAQAEAVSS |
| | | | | CENISKEDLEEWIGLIAKENDTKKIIDRFVRFIEFDGQEG |
| | | | | HIYFTFDHHGNDFMPTKKANTQMKGCSPIESMVDRRG |
| | | | | LEPRTLGLRVPCSTN |
| MG178 | 7126 | MG178- | protein | MQNLPSGEYWMYLRKSRADLEAEARGEGETLKKHER |
| recombinases | | 7188 large | | MLYKLAKDLGILITEEPFREIASGESIYHRPEMLRMLDL |
| | | serine | | MEERRPKGILVMDIDRLGRGDMQEQGLILGTFQRLNIL |
| | | recombinase | | IITPRKIYDLNNEFDEEYSEFEAFMARKELKIITRRLQRG |
| | | | | RVLSVEAGNYIATRPPYGYQVIKDGRNRYLVPHPEQAP |
| | | | | VVKLIFELYTHDDPEKRMGSNKIAIKLNELGYTSYTGK |
| | | | | KWTSSSVLTIIKNAVYIGRIQWKKKEVKKSKITGKKKD |
| | | | | VRTRPVQEWIDVQGKHEPLIDEVTFQKAQEILKQKYH |
| | | | | VPYQQLNGITNPLAGVIKCAKCGASMILRPYTKQAPHL |
| | | | | MCYNRFCDNKSSQIAYVEEKLLQALEKWMDTYVIEYG |
| | | | | QRKRKVSNMVEVKQNAVNLLKREMDELEAQKERLHD |
| | | | | LLERGIYDEETYLDRSKKLAERISSTKERIERAEQELKE |
| | | | | EQHKEQAQKDVIPKLKNVIKLYWKSKYPAKKNALLKS |
| | | | | VLLHATYKKEKWQRKDQFELVLVPKFK |
| MG178 | 7127 | MG178- | protein | MKKEIKEEPKKKAVVYARYSSHRQGEQSIEGQLAEAY |
| recombinases | | 7189 large | | KYAAAHGIKIIHEYIDRAMTGRNDNREQFQKMLRDTA |
| | | serine | | KKQFETIILWKIDRFGRNREEIAFNKYRCKKNGVKVVY |
| | | recombinase | | VAESIPDSPEGVILESVLEGMAEYYSLQLSQNIRRGQRA |
| | | | | SAEKCQCTGGNRPLGYRTDPKTKKFVIDKETAPTVKMI |
| | | | | FEMYANGIPLADIIRTVNNKGLRTLRGNKFNKNSFKRL |
| | | | | LKNEKYIGVYKYKDDILVEGGIPAIIDKETFERVQEML |
| | | | | KKNQTARSAKGKKADFLLTDKIFCGRCGEPMIGESGV |
| | | | | GKTGKVYYYYTCTDRKNKKQACKKKPVPKNKIEKLVI |
| | | | | NKIAEILHNEDLLDMIIDKVYAVYREEHNNDDERIMLN |
| | | | | KKLAEIHLAQENILKAIEQGMISPLFKDRTAELTAQQSE |
| | | | | IESELASIEAQEKIQLTKEHIRFFLEDLSSKDIDDTDVQK |
| | | | | KLIDTFLNAVFVYDESVTFAFNYSNNGEKVTLSEVDNI |
| | | | | NGSGDFFECGYDGGDDETRTHYLYNANVALSQMSYA |
| | | | | PKRL |
| MG178 | 7128 | MG178- | protein | MFSDFGNELKYAVKYTRVSTNQQDDRGSKEIQDLKIN |
| recombinases | | 7190 large | | EFADKNHFKVVNSFTDTDHGDNPLRPGINALKSYLKA |
| | | serine | | NGEVKYVICLFQDRFTRDFREGLENLYFLKDLGVSLIT |
| | | recombinase | | VNEGLIKMDGTFDSIPALIRFIGAQEEKTKIVKKTTDSM |
| | | | | YNYANTNRFLGGSILPWFKLEKVSENGKRIKIIVKNEET |
| | | | | WNIYRKFFIDIIRMKSVKKAALENNLNPYTVRDWVKM |
| | | | | PELIGYRTYGKKGKINNTYKKGKRAEYMVTSEKVLPSI |
| | | | | LSEEEYAKIDSVYKTYKVKFTSSRFPYLFTTLLHCECGG |
| | | | | RYFGNSLKNRYNTYYHYYKCEKCAKRYNAKNIEQEII |
| | | | | DAILENKNLNMLNDYNFRIADLYDQITILNKKIEIEKAK |
| | | | | ENNIVELMLEGIISNDISKEKLRTLKNNITNIEKEKKKLE |
| | | | | EQIEIESNKEITEEHIESLKFLLKNYDEETVSELKEILNLII |
| | | | | QKIVLSKNGEIEVIF |
| MG178 | 7129 | MG178- | protein | MNAVIYARFSSDRQNEASINAQVRACTEYAERHDLTV |
| recombinases | | 7191 large | | TGIYADEAISGKESKTAARAQYQKMLRDAHKGLFSVIL |
| | | serine | | IHKYDRVARSLAEHVNLEGRLKADNIELVAVAQDFGN |
| | | recombinase | | TSEAKIMRALMWSMSEYYLDNLSAEVQKGHRETALK |
| | | | | GLHNGGYAPFGYDVVNQQYVINELEAAYVRRIFTAAQ |
| | | | | EGTGFKHIIAELEAAGITGKRGKPIKYTQIYEMLRNEKY |
| | | | | TGVYLYTPQEAVERAQRRQKPEAIRVEGAIPAIVTKAQ |
| | | | | FMEVQAIMNSRKNAGRKADYMCSGLVYCSCGAKMH |
| | | | | ACKSTRKGHTYYRYVCSEHCGRPTVLMSAVDEAAIRY |
| | | | | LRELLSDPNQMLITAAMRRYQSDSKNRLTAFYDVLNA |
| | | | | RIAEKQKEYDTLLKNLSSGVLPSDVVADIGQRMTEIKD |
| | | | | EIKALEATEPPEDYTVDTITRWLNALKNNPDEKAVKLL |
| | | | | VKRIDVSGDKKNNVFNIQSTLNTLLEIMVAETGFEPAT |
| | | | | SGL |
| MG178 | 7130 | MG178- | protein | MTLQKARIGGETTKAVIYARYSSHSQREESIEGQLREC |
| recombinases | | 7192 large | | HEFALKNGFTIINEYIDRAISGKTDNRPSFQRLIKDSEKG |
| | | serine | | QFEAVIMYTLDRFARNRYDSAIYKAKLKKNGVRVYYA |
| | | recombinase | | KQPMPDTPEGIILESVLEGYAEYYSENLARNIKRGIREN |
| | | | | ALQGLATGGANLLLGYTVGEDRKYAIDPTGAKIVQEIF |
| | | | | QLYADGMSATQIIAYCNERGYKTARGNAFNKNSLRTIL |
| | | | | RNEKYIGTYKLMDIVIPDGMPAIIDKVLFEKVQAMLKH |
| | | | | NGKARAKAKAHENYLLTTKLFCGHCGSPMVGESGTS |
| | | | | KTGQVHYYYKCTKAKREHACKKKSERKDWIEKLVVR |
| | | | | YTVQNVLTDENIALIAKRAMEIIEKESADTTYLDGLNA |
| | | | | ELKDVQKKIKNLVSAIEQGIITSATKDRLDELEQEKSDV |
| | | | | EGRIAREEMKKPLLNESRIRYWLTSFKSGNVDDEDYQR |
| | | | | RVIDTLVNSVYVYDDEDGGKRIMLTFNLSGNNTATLTS |
| | | | | SDIGCYAPPKEIRRNTVSAVFLYNRPTVFVPVPHLQRR |
| | | | | HHEKETDRKRVRLCCQHAVWLVLRRR |
| MG178 | 7131 | MG178- | protein | MLSKNACAYIRVSTDKQEELSPDAQKRLILEYCKKNNL |
| recombinases | | 7193 large | | TIMSEHIFVENGISGKKADKRPQFQRMIALAKQKEHPF |
| | | serine | | DVILVWKFSRFARNQEESIVYKAMLQRAGVEVVSISEP |
| | | recombinase | | IIDGPFGSLIERIIEWMDEYYSIRLSGEVMRGMTEKAMR |
| | | | | GGYQSTLPLGYHMNPDTGVPEIYEPEAAIYRIILDRYLN |
| | | | | AGMSPLAIARELNAAGYRTRRGAPFERRTIIYILENPFY |
| | | | | TGMIRWNRQNHSDHTIKDRSEWIFAKGAHAPLIDKDT |
| | | | | YDHIQAVTALRTRPYKARGTSSIKHWLSGIVKCSDCGK |
| | | | | SLVGNALYNGVPSSWQCSDYNKGRCCHSHFIKNTALE |
| | | | | QAVFNALEHAITSGDISYTLKSTDSSSDLASDLDRMLS |
| | | | | KIDDKERRIKQAYRDGIDSIEEYRENKEILTKERQDILSR |
| | | | | LAALSERSSEDDKKKLLAEVQSVYDIVTGNADKLTKA |
| | | | | NAIRSIVDHCVYDKANDSFDIFFFFSKGSEPL |
| MG178 | 7132 | MG178- | protein | MVFASYTRKSIYSDKSDSTKNQAKMCRDYVDFHYAGS |
| recombinases | | 7194 large | | VDSFLVYEDEGLTGSNTKRPDLQRLMKDIKSGLIDFLIV |
| | | serine | | YQLDRLSRDIKDFSNIYAFLEEHHVQFISVAENIDTNTPI |
| | | recombinase | | GKAMMYVSVIFAQMERETIANRVNDNMIGLADDGW |
| | | | | WVGGNPPYGWRRTRITSSDGKNHVTIVAEEEEAEFVIS |
| | | | | VGRIFLQNNFSLQQLERYFKNHNILTKNGKFFSTNQLH |
| | | | | KLLTMPYCAPATQAIYDYYSNLGCIMSSRCPRELWDG |
| | | | | THGVMIYGRTTERNKKHALQPPNKWRVCIGRHKPFM |
| | | | | DESTWLSIQNQFTHNVFDKKMKHPIPLLKGVLRCKCG |
| | | | | RLMMLARKAKVDGSVSTWYYCPKRMRQGADYCDMS |
| | | | | QIKTDIIDDKVIDIFNKISKDPDTINEYLLVSVPVKDFNT |
| | | | | EIKDANKSIIKIKNKIQNLTNALAETPDTSAAKYILNTID |
| | | | | GLDKNLKLTERHIADLQSQERKSSQTELEVYEKQRKIT |
| | | | | DFIRNFENFTPEERNAIARTCIKECVWDGHTLSVVL |
| MG178 | 7133 | MG178- | protein | MLNVVIYARFSSSAQREESIEDQLRECQEFADKEGLQVI |
| recombinases | | 7195 large | | NTYCDYAISGKTDHRDQFQKMIKDAEKQLFQAVIIYKT |
| | | serine | | DRFARNRLDSAIYKKRLKDCGVKVIPAKEVIPDGPGGII |
| | | recombinase | | LESIYEGWAEMYSVNLAENVRRGQHGNALKCKANCK |
| | | | | APFGYKINPQTRLYELDDTTAPIAEKVFAMAAEGKPTK |
| | | | | DLQKFLLSNGIKKSASYIHYMLRNERYKGIYIFDGVRV |
| | | | | DGGMPKLVSEDTFTKIAKTLKQRSIRPQANAAKYFLSL |
| | | | | KLYCGYCGKLMSGEYGRSRNGDQYRYYTCPSSRRKK |
| | | | | TCELKALPADKTENTIAEKLQTTLLSDEIIDTMADYIID |
| | | | | YQRQVYENDSMEKALSKQLSDVEKRINNLLAAIEAGA |
| | | | | MTDSTVNRLHDLETKQKELLTSLSIEKLKAPIITKEKIV |
| | | | | YYIKKYRDNDITVNEIRQEFLNTFVSKAYVFSDHLFVIY |
| | | | | DAINGINTEVTPEILSNPNEFGYIPIWWN |
| MG178 | 7134 | MG178- | protein | MNAVIYARFSSDKQSEDSIEAQVRACREYAAKHGFNV |
| recombinases | | 7196 large | | LSVYADEAISGKTANRAQYQKMLRDCNKGLFDTILIH |
| | | serine | | KYDRIARNLGEHVNLEMKLKEKGITLIAVAQDFGRSKE |
| | | recombinase | | AKIMRALMWSLSEYYLDNLSSETKKGHKETALKGLHN |
| | | | | GGYAPFGYDVVNQTYIINELEAGYVKRIFDAALNREGF |
| | | | | TSLIEEMDKAGIRGKRGKPIKYPQIYEMLRNEKYTGVY |
| | | | | TYSQEEETNRSDRRNKPHAIRIENALPVIISKAQFMEVQ |
| | | | | KIMNKRKQTGRKGNYLCSGLVYCECGAKMHGMTSKR |
| | | | | KGHEYRYYTCSKHCGAPVVRADDVEQAAYRYLYTLL |
| | | | | SEENQTRIADALRQYQAGEGSRMDEFKQALAKRIQEK |
| | | | | QNQYKALLANLSTGALPAEIVADIAAEMKDIKEEIALL |
| | | | | ERTEPPKDFTVDQIRAWLEALKATPDDKAVRLLISRIDI |
| | | | | KQKTIINMESTLTMVLSEIGCGSWI |
| MG178 | 7135 | MG178- | protein | MQKTDNKMRAVIYARYSSDRQREESIEGQLRVCEDFA |
| recombinases | | 7197 large | | QKNDLMVVDTYIDRALTARTDRRPAFQKMIADCKKR |
| | | serine | | QFEYILVYKLNRFSRNRYDSAVYKHKIAQYGVKVLSA |
| | | recombinase | | MERITDDPSGILLESLIEGIAEYYSVELAENVLRGMKEN |
| | | | | ALEGKANGRLPLGYQKGPDGKVIIDPSTAPAVKLIFKG |
| | | | | TAAGKRMKVIAEELNAAGYKNASGRPYNPNSFAALIR |
| | | | | NKKYIGMYQWADTELEGVIPALIDKATWEKANGVLNS |
| | | | | RKHKSNRIRSDQYLLTGRLVCGSCGSAYVGKSGTSHR |
| | | | | GTTYQYYCCSNRIKRKGCKGKNFRQDQLESWLAAETI |
| | | | | RTLNHPDIIRQLSNQILAVQKSLETEKDPLIDGLSAELKE |
| | | | | YQKRLANSIKAIESGIISDTISANIQQYEEKIKILEKQLAR |
| | | | | AKLKQQPFTLTASHVEFFLSALLDGDPKDQEYRTKLLD |
| | | | | ILVSRVVLYPNKAEVFYRYQKELPSLPNPVIIREERGSN |
| | | | | GNQLVGPLGFEPRTNRL |
| MG178 | 7136 | MG178- | protein | MNAVIYARYSSDKQTEDSIEAQVRACQEYATKNNINII |
| recombinases | | 7198 large | | GVYADEAVSGKTANRAQYQKMLRDCDKGTFDTILIHK |
| | | serine | | YDRIARNLGEHVNLEVKLKDKRVTLVAVAQDFGTSKE |
| | | recombinase | | SKIMRALMWSLSEYYIDNLAAETRKGHRETALKGLHN |
| | | | | GGYAPFGYDVVNQTYVINELEAAYVKRMFNAALNRE |
| | | | | GFTELIEEMNRAGIRGKRGKPIRYPQIYEILHNEKYTGV |
| | | | | YVYTQEEESDRGNRRAKVNAIRKENALPVIISKAQFME |
| | | | | VQQIMKQRKHSGRKSNYLCSGLVYCECGAKMHGMTS |
| | | | | KRKGHEYRYFTCSQHCGAPVIRMEEVDEAAYHYLHTL |
| | | | | LSEENQDRIADALRLYQAGEGSRMTEFKQVLAKRIREK |
| | | | | EEQYQSLMENLSSGILPKEVVSDIAERMQQIKEEIAVLE |
| | | | | ATEPPKDFTVEQIHSWLEALKAAPDDKAVRLLVSRIEV |
| | | | | KQKTVFNIASTLKAVLCETGCGSWI |
| MG178 | 7137 | MG178- | protein | MENNSAVIFARVSSKEQFERWSPKIQEEAAAKYAEAH |
| recombinases | | 7199 large | | KLDVVRVWNIAESGYKSRKEFQAMLAFIKGNSVRHLI |
| | | serine | | TMNSDRLTRDLRGMLDVDKMIQDENLSVHFIESNEIID |
| | | recombinase | | ANTTRSQKSLWKIKVIFAENYIGDLQEKVRRSMEARLD |
| | | | | IGLFPFINPPFGYDFKKNRLTPNGNADVVRKAFSLYAG |
| | | | | GTESAFSLMKKLKAEGLRLSEPAVNNLLHNPVVAGLL |
| | | | | VWPWDNSKYVKTEHFRNELIQGQQEAIVDRETFERVQ |
| | | | | EILKRKTHSHPFKKDQIFFQYRGLIRCACGKLLSGAQFG |
| | | | | KIVYYAPKHRDSSCGEKPVRSEVIDKAVAQALKGFSFP |
| | | | | KDLYDWARDVLRTTREDTKSHAQAERRKAQTEYSLTI |
| | | | | KELDVAFSSAVTGIFDVVTVRRNVMEIKERQEKAKAV |
| | | | | LNGLDRSDRKFVDDGLAILELLKNVEKAYSQAMPEHR |
| | | | | AELLRVLFEDISISGGKFVFTPQAVFAPLFDLRHGKPRQ |
| | | | | AAIRLAVGVPDLPEHGR |
| MG178 | 7138 | MG178- | protein | MNMSAGPRAVIYVRISVAQEASVSIERQVEAAEQYAA |
| recombinases | | 7200 large | | ARGWQVVATFRDEGVSATHNKPEDRAGWRALLDSPE |
| | | serine | | KYDAVLVWKIDRLARRVLDFLHADASLQERGAGIVAV |
| | | recombinase | | EDPVDMTTPQGRAFATLLAVFGEMEGEAIRARVKAAR |
| | | | | DHLLRARRVVGGTVPYGWRKVANPDGPGYVLAQDPE |
| | | | | RVGWVRGMVERAQAGASVYSIVQWLDEAGAPLPEAS |
| | | | | QSRRKAGGWSYSTVERLLRNPLVAGMTAYNPGNRTK |
| | | | | ERGADVLRDADGLPVVDESVALLSPGEWRALVKALD |
| | | | | ERDTAQSKPVALRAKTSALLSGLLWCEADGTRLHRGT |
| | | | | INGRHGYYCPECHQSISNFEDALVAEFLRQKGEHVRWS |
| | | | | VVEEVYEGGAAVLPEIEHRLAELSDALRATDDDAEAD |
| | | | | RLMEQIGNLRAIRREARGKAPKVEYRPVRGTQRFGDD |
| | | | | WADAETVEDRRAILEDGLERVWVSRGRPGRTTDAQRL |
| | | | | ARLRFDWKQPEHLGPLARPSDAELAAWAE |
| MG178 | 7139 | MG178- | protein | VIPIEVEKKRLGACYIRVSTDDQTEYSPDSQERLIREYA |
| recombinases | | 7201 large | | EKNNIFIPDEYVFRESEGISGRKADKRPEFQRMIGAAKQ |
| | | serine | | KPAPFEIILVWKFSRFARNQEESIVYKSMLRKQCGVDV |
| | | recombinase | | VSISEPLMEGPFGGLIERIIEWMDEFYSIRLSGEVKRGM |
| | | | | TERISRGKPTNAAPFGYRWGNDNYEIVPEDAELVRQIF |
| | | | | ERFINGESYLSIARWLRTVCDKRDWENRTVEYILRNPA |
| | | | | YIGMLRAGIAGEKNNSRDFYGSNMKLYQGTHQPILSPE |
| | | | | TFQAAQKRADHIKNTHPKWDHSARAVPRLWTGILKCS |
| | | | | NCGGTLSSGGKNDSWQCVRYLHGKGCGVSHYTTTKA |
| | | | | VSEALLPVIIQDLKTGKNLEKLDLGQHTKSSESQDVIKQ |
| | | | | IDRLKARLKRVREAYEAGVDTLAEYKASREAIEKEIET |
| | | | | LQHKVDKAPNAADIEKLHQKLMEKNQRYIKLLQDEK |
| | | | | ASDAEKNEALHHIVDKIVFQRSTNHFDVFYSESYML |
| MG178 | 7140 | MG178- | protein | MSSLITGECKISARVYSYLRFSDPRQATGSSADRQLQY |
| recombinases | | 7202 large | | AQRWAAERGLVLDESLSLRDEGLSAYHQNHVKQGAL |
| | | serine | | GAFLRAVDEGRIPDGSVLIVEGLDRLSRAEPIQAQAQL |
| | | recombinase | | AQIINAGITVVTASDGREYNRAGLKAQPMDLVYSLLV |
| | | | | MIRAHEESDTKSKRVKASIRRLCEGWVAGTYRGLIRN |
| | | | | GQDPQWLRWDGQAWHLIPERVEAVRYAIELYKQGEG |
| | | | | ATRAARKLAERGYVLSDWGIAGQQIYRLVKLPALRGA |
| | | | | KRISVDGEDYLLEGYYPPVLTDEEYEALQAATETRHGR |
| | | | | RGAPEIVGLVTGLGIAYCGYCGTAVVAQNLLSRARKD |
| | | | | GTVADGHRRLHCTSYSKSTGCKAASCSVVPVEKALLS |
| | | | | YCSDQMNLTRLLEPADDGQQLRQRLQACRRKQADVE |
| | | | | RQLQRITEALLADDQGAAPLAFVRKARELEAQLGQLQ |
| | | | | AEAEHLEREQGKVGQTQTPAGAELWRKLAIEAQDIKS |
| | | | | PAREQLRQLVLDTFSRITVYMRGLVPDPKSKVIHLVLV |
| | | | | SRSGQRVVLDVDRRSGAWKAGRDRRG |
| MG178 | 7141 | MG178- | protein | MKTAVAYARYSSDNQRDESITAQLRAIREYAAKNGIEI |
| recombinases | | 7203 large | | VREYTDEARSATTDDRPGFQEMIRDLKNGLKVDLVLV |
| | | serine | | HKLDRFARNRYDAAVYRREIQKAGARLVAVDQPLDD |
| | | recombinase | | SPEAVLLESLLEGLAEYYSRNLAREVMKGLKENALKG |
| | | | | LHTGGRPPLGYRLENGRLVIEPREAEAVRLIFQGVLDG |
| | | | | KSYTAIQQELNAKGYRTREDRPFGKNSLSDILRNEKYT |
| | | | | GVYVYNRTARKVAGKRNHHASKPPEEVIKIPGLIPAIIT |
| | | | | REEWDKVQEILNQRRKVRPRKRGETEYVLTGKLVCGV |
| | | | | CGSAMVGNSKRNGKGTVYRYYECNKAQRTGECTNRP |
| | | | | IGQKVLEQIVVQQIEEDILSNPEELAEQMAAYHAERGG |
| | | | | YLKRKKMALKARLAACQEKIDKVIDRLIEIGREEELLR |
| | | | | KLNELKAEREALQKEYAALPEEEPPVTKETALEYLNH |
| | | | | VSEALKEAKSPAEYRAAIHRFIDRIVVGEKMIQIHFLAD |
| | | | | FGGGVWIKLVELEGFEPSTS |
| MG178 | 7142 | MG178- | protein | MKRIAIYSRVSTADKQDYTRQVNELKKIGYDNGFSDK |
| recombinases | | 7204 large | | QMTLYSEAISGYKKDERHQLNAMLSQIEADPTYFSAV |
| | | serine | | YVSEISRLGRNPKETRRIVDRLSELKVTLYIQSLKRYTL |
| | | recombinase | | DDKGAMSIDTSIILQVLMEYANLEAETFKTRSRSGLRK |
| | | | | AAMDGKYIGGVASAYGYTQDKNNYVIIDDFEADIVRM |
| | | | | IFTMYSEGQGTKKIANVLNTRKIPTKYNRIFEGTKRIIK |
| | | | | GSLKEATKINWSDAVVYAILKNTSYIGEKKYKGEIIATP |
| | | | | AIIDKKLFNKCQEIMSGKSHRNYLTNYTFLLKDLITCTC |
| | | | | GRNFYARYKPVEGGDKVYVCSSRLVRGGRCACPNGIN |
| | | | | ITLLESAIYDYLVTHSRYLTNMASVDKMKAKLWQEIK |
| | | | | SLTDKANIDQKAMKAKANEEKRLLDVYVSGAITKAEF |
| | | | | EAKKKKIKQEISVISEREKILEKDINEKNEAFKRADSGN |
| | | | | APLNALEKAKDNRNELQALYRQILTKVNVESTTKETA |
| | | | | VVSIVINATKAVMIELDLSGIRRKPMQYQYRTGKDWV |
| | | | | AIPDKRLISL |
| MG178 | | MG178- | nucleo- | GGGCAACC |
| conserved | | 7202 2 core | tide | |
| core | | | | |
| MG178 | | MG178- | nucleo- | GGGCACCC |
| conserved | | 7202 1 core | tide | |
| core | | | | |
| MG178 | 7145 | MG178- | nucleo- | AGTATGGTGGAC |
| conserved | | 7193 core | tide | |
| core | | | | |
| MG178 | | MG178- | nucleo- | CAAGTTC |
| conserved | | 7177 core | tide | |
| core | | | | |
| MG178 | 7147 | MG178- | nucleo- | TTCATTTGACATCC |
| conserved | | 1859 core | tide | |
| core | | | | |
| MG178 | | MG178- | nucleo- | ACCGCC |
| conserved | | 7201 core | tide | |
| core | | | | |
| MG178 | | MG178- | nucleo- | CATATGT |
| conserved | | 7173 core | tide | |
| core | | | | |
| MG178 | 7150 | MG178- | nucleo- | AACTGGTTGCGGGAGCTGGATT |
| conserved | | 7198 core | tide | |
| core | | | | |
| MG178 | 7151 | MG178- | nucleo- | CCGATGGCGTCCAGCGACTCGGCCTTGGCACTGTCG |
| recombinases | | 7202 AttB_1 | tide | ATGAAGCCACAGGTGTTGACCACCACCACGTCGGCA |
| attachment | | | | TCCTGGTAGGTCGGCACGATCTCGTAACCTTCCATGC |
| sites | | | | GCAGCTGGGTCAGGATGCGTTCGGAGTCGACAGTTG |
| | | | | CCTTCGGGCACCCAAGGCTGACGAATCCGACTTTCG |
| | | | | GGGTGGCGGTGGACATGCGGGCTAACCTCTAAGGGC |
| | | | | GCCTGGCTGGCGCCTCTGATCAAAAAGTGCGCAATT |
| | | | | CTAGCGATGGATCATACGCTTGACCAGTGCTGTAAA |
| | | | | AGACGCGCAAACGAAAAAG |
| MG178 | 7152 | MG178- | nucleo- | CAGATCCGCAGGGCTCACCTGCGAGCGCGTCTATGA |
| recombinases | | 7202 AttP_1 | tide | CGGAGTGAAGGCAGTAGCTGAGCAAAAATGAAAAG |
| attachment | | | | GCCCGGTGCCGTGGGGGAGTCCCTGCGGCACCGGGC |
| sites | | | | CTTTTTTTGTTCCTGCGATTTTAGTTTAGAAAATGTA |
| | | | | GCCTATGGGCACCCCAAGGAAATAAACCCTACACTT |
| | | | | GGAGCTTTCTTAGTTTGAGTAGTTGTCATCACTGATC |
| | | | | ACGGGGGAATGCAAAATTAGCGCGCGAGTATACAG |
| | | | | CTATCTGAGGTTTTCCGATCCCCGGCAGGCGACCGG |
| | | | | CAGCAGTGCCGACCGTCAGC |
| MG178 | 7153 | MG178- | nucleo- | CCGATGGCGTCCAGCGACTCGGCCTTGGCACTGTCG |
| recombinases | | 7202 AttL_1 | tide | ATGAAGCCACAGGTGTTGACCACCACCACGTCGGCA |
| attachment | | | | TCCTGGTAGGTCGGCACGATCTCGTAACCTTCCATGC |
| sites | | | | GCAGCTGGGTCAGGATGCGTTCGGAGTCGACAGTTG |
| | | | | CCTTCGGGCACCCCAAGGAAATAAACCCTACACTTG |
| | | | | GAGCTTTCTTAGTTTGAGTAGTTGTCATCACTGATCA |
| | | | | CGGGGGAATGCAAAATTAGCGCGCGAGTATACAGCT |
| | | | | ATCTGAGGTTTTCCGATCCCCGGCAGGCGACCGGCA |
| | | | | GCAGTGCCGACCGTCAGC |
| MG178 | 7154 | MG178- | nucleo- | CAGATCCGCAGGGCTCACCTGCGAGCGCGTCTATGA |
| recombinases | | 7202 AttR_1 | tide | CGGAGTGAAGGCAGTAGCTGAGCAAAAATGAAAAG |
| attachment | | | | GCCCGGTGCCGTGGGGGAGTCCCTGCGGCACCGGGC |
| sites | | | | CTTTTTTTGTTCCTGCGATTTTAGTTTAGAAAATGTA |
| | | | | GCCTATGGGCACCCAAGGCTGACGAATCCGACTTTC |
| | | | | GGGGTGGCGGTGGACATGCGGGCTAACCTCTAAGGG |
| | | | | CGCCTGGCTGGCGCCTCTGATCAAAAAGTGCGCAAT |
| | | | | TCTAGCGATGGATCATACGCTTGACCAGTGCTGTAA |
| | | | | AAGACGCGCAAACGAAAAAG |
| MG178 | 7155 | MG178- | nucleo- | CCGATGGCGTCCAGCGACTCGGCCTTGGCACTGTCG |
| recombinases | | 7202 AttB_2 | tide | ATGAAGCCACAGGTGTTGACCACCACCACGTCGGCA |
| attachment | | | | TCCTGGTAGGTCGGCACGATCTCGTAACCTTCCATGC |
| sites | | | | GCAGCTGGGTCAGGATGCGTTCGGAGTCGACAGTTG |
| | | | | CCTTCGGGCAACCAAGGCTGACGAATCCGACTTTCG |
| | | | | GGGTGGCGGTGGACATGCGGGCTAACCTCTAAGGGC |
| | | | | GCCTGGCTGGCGCCTCTGATCAAAAAGTGCGCAATT |
| | | | | CTAGCGATGGATCATACGCTTGACCAGTGCTGTAAA |
| | | | | AGACGCGCAAACGAAAAAG |
| MG178 | 7156 | MG178- | nucleo- | CAGATCCGCAGGGCTCACCTGCGAGCGCGTCTATGA |
| recombinases | | 7202 AttP_2 | tide | CGGAGTGAAGGCAGTAGCTGAGCAAAAATGAAAAG |
| attachment | | | | GCCCGGTGCCGTGGGGGAGTCCCTGCGGCACCGGGC |
| sites | | | | CTTTTTTTGTTCCTGCGATTTTAGTTTAGAAAATGTA |
| | | | | GCCTATGGGCAACCCAAGGAAATAAACCCTACACTT |
| | | | | GGAGCTTTCTTAGTTTGAGTAGTTGTCATCACTGATC |
| | | | | ACGGGGGAATGCAAAATTAGCGCGCGAGTATACAG |
| | | | | CTATCTGAGGTTTTCCGATCCCCGGCAGGCGACCGG |
| | | | | CAGCAGTGCCGACCGTCAGC |
| MG178 | 7157 | MG178- | nucleo- | CCGATGGCGTCCAGCGACTCGGCCTTGGCACTGTCG |
| recombinases | | 7202 AttL_2 | tide | ATGAAGCCACAGGTGTTGACCACCACCACGTCGGCA |
| attachment | | | | TCCTGGTAGGTCGGCACGATCTCGTAACCTTCCATGC |
| sites | | | | GCAGCTGGGTCAGGATGCGTTCGGAGTCGACAGTTG |
| | | | | CCTTCGGGCAACCCAAGGAAATAAACCCTACACTTG |
| | | | | GAGCTTTCTTAGTTTGAGTAGTTGTCATCACTGATCA |
| | | | | CGGGGGAATGCAAAATTAGCGCGCGAGTATACAGCT |
| | | | | ATCTGAGGTTTTCCGATCCCCGGCAGGCGACCGGCA |
| | | | | GCAGTGCCGACCGTCAGC |
| MG178 | 7158 | MG178- | nucleo- | CAGATCCGCAGGGCTCACCTGCGAGCGCGTCTATGA |
| recombinases | | 7202 AttR_2 | tide | CGGAGTGAAGGCAGTAGCTGAGCAAAAATGAAAAG |
| attachment | | | | GCCCGGTGCCGTGGGGGAGTCCCTGCGGCACCGGGC |
| sites | | | | CTTTTTTTGTTCCTGCGATTTTAGTTTAGAAAATGTA |
| | | | | GCCTATGGGCAACCAAGGCTGACGAATCCGACTTTC |
| | | | | GGGGTGGCGGTGGACATGCGGGCTAACCTCTAAGGG |
| | | | | CGCCTGGCTGGCGCCTCTGATCAAAAAGTGCGCAAT |
| | | | | TCTAGCGATGGATCATACGCTTGACCAGTGCTGTAA |
| | | | | AAGACGCGCAAACGAAAAAG |
| MG178 | 7159 | MG178- | nucleo- | CACGTAACATGTAACAGCCGTTTTGACTGGATTGAC |
| recombinases | | 7193 AttB | tide | GGGCCTTGGCCATGGGAAGGAGGAATGGAATAATG |
| attachment | | | | TGGGTTTATGAAAAAAGACTTCAATTTCCGGTAAAC |
| sites | | | | ATCAAGCGGCCCGACCCGAAGGCGGCACAGATAAT |
| | | | | CATCAGCCAGTATGGTGGACCGGACGGTGAAATGGG |
| | | | | TGCCAGCATGCGTTACCTCTCACAGCGCTATTCAATG |
| | | | | CCTGACAATAAAGTTGCCGGACTGCTTACGGATATC |
| | | | | GGCACCGAAGAGCTGGCGCATCTTGAGATAGTTGCC |
| | | | | ACAATGGTTCACCAGCTTACCAGAA |
| MG178 | 7160 | MG178- | nucleo- | CGATAAACTTACCAAAGCTAATGCTATCCGGTCCAT |
| recombinases | | 7193 AttP | tide | TGTTGACCACTGCGTCTATGACAAAGCAAACGACAG |
| attachment | | | | TTTTGATATATTTTTCTTTTTTTCTAAAGGCTCCGAAC |
| sites | | | | CCCTATAAAATAAGGCCTTATCATAATTATACCTTAC |
| | | | | GGAAGTATGGTGGACTATTCTTCCGTAAGGTATAAT |
| | | | | ATCATCACAAAGCCTTTATTTAAAGCAATTACAGGC |
| | | | | TTTTTACGTCCACCCAGAAGCTTACCTGTCCCGGCTT |
| | | | | TCCTACGCGGGATGCCTTATTGGTCATCCTGATTCTG |
| | | | | CCATTGACAATCTCATCTG |
| MG178 | 7161 | MG178- | nucleo- | CACGTAACATGTAACAGCCGTTTTGACTGGATTGAC |
| recombinases | | 7193 AttL | tide | GGGCCTTGGCCATGGGAAGGAGGAATGGAATAATG |
| attachment | | | | TGGGTTTATGAAAAAAGACTTCAATTTCCGGTAAAC |
| sites | | | | ATCAAGCGGCCCGACCCGAAGGCGGCACAGATAAT |
| | | | | CATCAGCCAGTATGGTGGACTATTCTTCCGTAAGGT |
| | | | | ATAATATCATCACAAAGCCTTTATTTAAAGCAATTA |
| | | | | CAGGCTTTTTACGTCCACCCAGAAGCTTACCTGTCCC |
| | | | | GGCTTTCCTACGCGGGATGCCTTATTGGTCATCCTGA |
| | | | | TTCTGCCATTGACAATCTCATCTG |
| MG178 | 7162 | MG178- | nucleo- | CGATAAACTTACCAAAGCTAATGCTATCCGGTCCAT |
| recombinases | | 7193 AttR | tide | TGTTGACCACTGCGTCTATGACAAAGCAAACGACAG |
| attachment | | | | TTTTGATATATTTTTCTTTTTTTCTAAAGGCTCCGAAC |
| sites | | | | CCCTATAAAATAAGGCCTTATCATAATTATACCTTAC |
| | | | | GGAAGTATGGTGGACCGGACGGTGAAATGGGTGCC |
| | | | | AGCATGCGTTACCTCTCACAGCGCTATTCAATGCCTG |
| | | | | ACAATAAAGTTGCCGGACTGCTTACGGATATCGGCA |
| | | | | CCGAAGAGCTGGCGCATCTTGAGATAGTTGCCACAA |
| | | | | TGGTTCACCAGCTTACCAGAA |
| MG178 | 7163 | MG178- | nucleo- | TTGCGCAGAAAGGTACACCTCCTGCAGCCTGCGGCC |
| recombinases | | 7177 AttB | tide | ATACTCCAACCGTATGATCAACATAATATGCCTCAA |
| attachment | | | | ACGGAGTTCCTTTTATCTGTTCCATTGTAAGATTTCT |
| sites | | | | TGTAAGCTGATGAACCATTGTACTGACCATTTCAAG |
| | | | | ATGGCCAAGTTCTTCCGTGCCTATATCAGTCAGCAAT |
| | | | | CCGGCAACCTCCCTGTATGGCATGGAATATCTCTGT |
| | | | | GAAAGGTATCTCATTGATGCTCCAAGCTCACCATCT |
| | | | | GGTCCACCATACTGCGAAATAATCATTGCTGCCAGC |
| | | | | GTAGGATTACAATTCTT |
| MG178 | 7164 | MG178- | nucleo- | TGCTCCGTGTAAAAACATGCTGTTAAAATCTTGCATT |
| recombinases | | 7177 AttP | tide | GATAAAATTGTATATCACAATGACAGTGAATCAAAA |
| attachment | | | | GCTGGTATAGGCAGGTACGTTGATAATCCGTTCAAG |
| sites | | | | CTTGATATTTTCTTGCGCCTTTGATTTCCAACATCAA |
| | | | | GGTGCAAGTTCATTAGCTCATGGTTGTTGGATATGA |
| | | | | ATTTAACTTTAATATGTAAAGAATCTCTTCTTATTTA |
| | | | | TATATAGTTTAATATTAACCATGAAGGGGTAGTTTA |
| | | | | ACCTATTCCTTTATGGTTAATTTATATGTTCTTCCTGA |
| | | | | TTTTTCTCTAATAA |
| MG178 | 7165 | MG178- | nucleo- | TTGCGCAGAAAGGTACACCTCCTGCAGCCTGCGGCC |
| recombinases | | 7177 AttL | tide | ATACTCCAACCGTATGATCAACATAATATGCCTCAA |
| attachment | | | | ACGGAGTTCCTTTTATCTGTTCCATTGTAAGATTTCT |
| sites | | | | TGTAAGCTGATGAACCATTGTACTGACCATTTCAAG |
| | | | | ATGGCCAAGTTCATTAGCTCATGGTTGTTGGATATG |
| | | | | AATTTAACTTTAATATGTAAAGAATCTCTTCTTATTT |
| | | | | ATATATAGTTTAATATTAACCATGAAGGGGTAGTTT |
| | | | | AACCTATTCCTTTATGGTTAATTTATATGTTCTTCCTG |
| | | | | ATTTTTCTCTAATAA |
| MG178 | 7166 | MG178- | nucleo- | TGCTCCGTGTAAAAACATGCTGTTAAAATCTTGCATT |
| recombinases | | 7177 AttR | tide | GATAAAATTGTATATCACAATGACAGTGAATCAAAA |
| attachment | | | | GCTGGTATAGGCAGGTACGTTGATAATCCGTTCAAG |
| sites | | | | CTTGATATTTTCTTGCGCCTTTGATTTCCAACATCAA |
| | | | | GGTGCAAGTTCTTCCGTGCCTATATCAGTCAGCAATC |
| | | | | CGGCAACCTCCCTGTATGGCATGGAATATCTCTGTG |
| | | | | AAAGGTATCTCATTGATGCTCCAAGCTCACCATCTG |
| | | | | GTCCACCATACTGCGAAATAATCATTGCTGCCAGCG |
| | | | | TAGGATTACAATTCTT |
| MG178 | 7167 | MG178- | nucleo- | AACTCGCCGATTTTGCCGAGAACCTTGTCTTCCGCCG |
| recombinases | | 1859 AttB | tide | TTTCACGGACACAGCATGTATTCATCAAAATAACAT |
| attachment | | | | CGGCCAGTTCCGCATCCTCCGTCATCGTATAGCCGA |
| sites | | | | GCTCTTCAAGCTGTCCGGCATAACGCTCCGAATCGG |
| | | | | ACGAATTCATTTGACATCCGTATGTAATGAGACAAT |
| | | | | ACTGTTTATTGGTCAGCAAATCCATTTCTATATACAC |
| | | | | TCCGTTTATTACAACATAAAGTTCGGTTTTACATTTT |
| | | | | ATAATACCATATACGGCGTATATTCACCAGCACAGA |
| | | | | CAACAACTCTCAAAATTAGATGC |
| MG178 | 7168 | MG178- | nucleo- | TTGCCGGCAGACGGGTACAATCCATTACATTCGCCA |
| recombinases | | 1859 AttP | tide | ACGGCGTCACTCATACATTCACATATTAATTATATCC |
| attachment | | | | CGTCATAAAAGGCGGGATATTTTTTTGTAAAAAAAT |
| sites | | | | AAACGGCGCCATTGCGCCGTTCTTTTCATCTGATTTA |
| | | | | ATTGTTCATTTGACATCCATATGTAATTATAAATGCG |
| | | | | AATTTCTGTTTATGCATAGATATCCTCTCGTTGGTAT |
| | | | | TTTATACTATATAATATCATATCAACCACATAGAAA |
| | | | | ACAGGCTGGATAACCAACATCTTTATATCCAGCCTG |
| | | | | TTCTTTTTTAATAAGTTGTTTA |
| MG178 | 7169 | MG178- | nucleo- | AACTCGCCGATTTTGCCGAGAACCTTGTCTTCCGCCG |
| recombinases | | 1859 AttL | tide | TTTCACGGACACAGCATGTATTCATCAAAATAACAT |
| attachment | | | | CGGCCAGTTCCGCATCCTCCGTCATCGTATAGCCGA |
| sites | | | | GCTCTTCAAGCTGTCCGGCATAACGCTCCGAATCGG |
| | | | | ACGAATTCATTTGACATCCATATGTAATTATAAATGC |
| | | | | GAATTTCTGTTTATGCATAGATATCCTCTCGTTGGTA |
| | | | | TTTTATACTATATAATATCATATCAACCACATAGAAA |
| | | | | ACAGGCTGGATAACCAACATCTTTATATCCAGCCTG |
| | | | | TTCTTTTTTAATAAGTTGTTTA |
| MG178 | 7170 | MG178- | nucleo- | TTGCCGGCAGACGGGTACAATCCATTACATTCGCCA |
| recombinases | | 1859 AttR | tide | ACGGCGTCACTCATACATTCACATATTAATTATATCC |
| attachment | | | | CGTCATAAAAGGCGGGATATTTTTTTGTAAAAAAAT |
| sites | | | | AAACGGCGCCATTGCGCCGTTCTTTTCATCTGATTTA |
| | | | | ATTGTTCATTTGACATCCGTATGTAATGAGACAATAC |
| | | | | TGTTTATTGGTCAGCAAATCCATTTCTATATACACTC |
| | | | | CGTTTATTACAACATAAAGTTCGGTTTTACATTTTAT |
| | | | | AATACCATATACGGCGTATATTCACCAGCACAGACA |
| | | | | ACAACTCTCAAAATTAGATGC |
| MG178 | 7171 | MG178- | nucleo- | TCGGGTCAGCTGATAGAGGAGCGCCGAGATCATCTC |
| recombinases | | 7201 AttB | tide | GACATGCGCAAGCTCTTCAGTCCCGACGTCTGTAAG |
| attachment | | | | GATCCCTATCAGCTCCCCGTAGGGCATCGAATAGCG |
| sites | | | | CTGCTGAAGATAGCGGGTAGCCGCTCCGAGCTCGCC |
| | | | | ATGCGGACCGCCGAGCTGGCTAATAATGATCGAAGC |
| | | | | GCTCATCGGGTCGGGCTTTTGGACGCTGACCGGGTG |
| | | | | GATCAGCCGTTTATCATAGTTCCACATTTTCTTCCCT |
| | | | | CCTTACGCTTCGCTCTGCCACGGCCAGGGCGTTCGG |
| | | | | ACGTAATCCCAACAATC |
| MG178 | 7172 | MG178- | nucleo- | GCTTCTTCAGGATGAAAAAGCCTCTGACGCCGAAAA |
| recombinases | | 7201 AttP | tide | GAACGAGGCTTTGCACCATATCGTTGATAAAATCGT |
| attachment | | | | CTTTCAACGAAGCACCAATCACTTTGATGTTTTTTAC |
| sites | | | | TCGGAAAGCTATATGCTTTAGTATAACTTAATGTGAT |
| | | | | TAGCACCGCCAAATATCTTTAAGTTATACTACTGAC |
| | | | | AAACAGCATTTTTCTCAAAATGCCCCTATCACCAAG |
| | | | | CAGGCACTATATGAATTCCTTTCTTGCCATAATGGAT |
| | | | | TTTTATCCGGTTTGTCTTTTTAGACCCTCCTTTTAGAT |
| | | | | TTTTCGCCTCGCC |
| MG178 | 7173 | MG178- | nucleo- | TCGGGTCAGCTGATAGAGGAGCGCCGAGATCATCTC |
| recombinases | | 7201 AttL | tide | GACATGCGCAAGCTCTTCAGTCCCGACGTCTGTAAG |
| attachment | | | | GATCCCTATCAGCTCCCCGTAGGGCATCGAATAGCG |
| sites | | | | CTGCTGAAGATAGCGGGTAGCCGCTCCGAGCTCGCC |
| | | | | ATGCGGACCGCCAAATATCTTTAAGTTATACTACTG |
| | | | | ACAAACAGCATTTTTCTCAAAATGCCCCTATCACCA |
| | | | | AGCAGGCACTATATGAATTCCTTTCTTGCCATAATGG |
| | | | | ATTTTTATCCGGTTTGTCTTTTTAGACCCTCCTTTTAG |
| | | | | ATTTTTCGCCTCGCC |
| MG178 | 7174 | MG178- | nucleo- | GCTTCTTCAGGATGAAAAAGCCTCTGACGCCGAAAA |
| recombinases | | 7201 AttR | tide | GAACGAGGCTTTGCACCATATCGTTGATAAAATCGT |
| attachment | | | | CTTTCAACGAAGCACCAATCACTTTGATGTTTTTTAC |
| sites | | | | TCGGAAAGCTATATGCTTTAGTATAACTTAATGTGAT |
| | | | | TAGCACCGCCGAGCTGGCTAATAATGATCGAAGCGC |
| | | | | TCATCGGGTCGGGCTTTTGGACGCTGACCGGGTGGA |
| | | | | TCAGCCGTTTATCATAGTTCCACATTTTCTTCCCTCCT |
| | | | | TACGCTTCGCTCTGCCACGGCCAGGGCGTTCGGACG |
| | | | | TAATCCCAACAATC |
| MG178 | 7175 | MG178- | nucleo- | CCGCTTTTGTCACCCCCTGCTCGTAGGGAAGCGGCC |
| recombinases | | 7173 AttB | tide | AGTCATAGCCGTAGTTGGGGATTCCCAGGCTGATCT |
| attachment | | | | TTTCCGCCGGTATTTCCGTCAGGGCGTACTCTGCCAC |
| sites | | | | GCGTCTGACCATATTGATCGGGGCCACTGCCATGGG |
| | | | | CGGGCCATATGTGTATCCCCATTCATACGTCATCAGC |
| | | | | AGAACCCGGTTGGCCGCCTCTCCGAGCAGGCGGTAA |
| | | | | TCGATTCCTTCGTAAAGCAGCCCCCTCTGGTCTCTGG |
| | | | | CCGTCTTAGGAGCCAGTGCAACGCTCACCTGATAGC |
| | | | | CGAACAGGTTCATCAC |
| MG178 | 7176 | MG178- | nucleo- | TGGAGAAAGTTGATTATCTAAAAACCGAGAGAAAC |
| recombinases | | 7173 AttP | tide | AAAAAAGGCGGAAAGGGAAATGCTAATTTCTCTATT |
| attachment | | | | TATTTTTATCCACGCGTCCCGAAATACTGAAATTATG |
| sites | | | | TATACTTTTTCGGGGCGCATAATTACCTATGATTTAT |
| | | | | CGGCGCATATGTATAAGCGCCAACAATCATATGGTA |
| | | | | TCAAATTATAAAGGAAAGAAGGGGGAAAAATGGAC |
| | | | | AGAACAGACGAATTATTTTTTGAGATGATTGAAGCC |
| | | | | TATCAGCGGCACGCCCAGACTGCCAGACACGCAAAG |
| | | | | TTCAAGGAGACTCGCGAGA |
| MG178 | 7177 | MG178- | nucleo- | CCGCTTTTGTCACCCCCTGCTCGTAGGGAAGCGGCC |
| recombinases | | 7173 AttL | tide | AGTCATAGCCGTAGTTGGGGATTCCCAGGCTGATCT |
| attachment | | | | TTTCCGCCGGTATTTCCGTCAGGGCGTACTCTGCCAC |
| sites | | | | GCGTCTGACCATATTGATCGGGGCCACTGCCATGGG |
| | | | | CGGGCCATATGTATAAGCGCCAACAATCATATGGTA |
| | | | | TCAAATTATAAAGGAAAGAAGGGGGAAAAATGGAC |
| | | | | AGAACAGACGAATTATTTTTTGAGATGATTGAAGCC |
| | | | | TATCAGCGGCACGCCCAGACTGCCAGACACGCAAAG |
| | | | | TTCAAGGAGACTCGCGAGA |
| MG178 | 7178 | MG178- | nucleo- | TGGAGAAAGTTGATTATCTAAAAACCGAGAGAAAC |
| recombinases | | 7173 AttR | tide | AAAAAAGGCGGAAAGGGAAATGCTAATTTCTCTATT |
| attachment | | | | TATTTTTATCCACGCGTCCCGAAATACTGAAATTATG |
| sites | | | | TATACTTTTTCGGGGCGCATAATTACCTATGATTTAT |
| | | | | CGGCGCATATGTGTATCCCCATTCATACGTCATCAGC |
| | | | | AGAACCCGGTTGGCCGCCTCTCCGAGCAGGCGGTAA |
| | | | | TCGATTCCTTCGTAAAGCAGCCCCCTCTGGTCTCTGG |
| | | | | CCGTCTTAGGAGCCAGTGCAACGCTCACCTGATAGC |
| | | | | CGAACAGGTTCATCAC |
| MG178 | 7179 | MG178- | nucleo- | AAAACTCTCTATTGGTTTTTCCTTAGGTCGGCGACGA |
| recombinases | | 7198 AttB | tide | CCAACTGATAGCCCATGACACCTCAGTCAATCTAAT |
| attachment | | | | TTGTTCTCTCTGCTGTTATTCGGAACAACGATGAAAA |
| sites | | | | CACGCAAAAAAGACTTATCGTCTGTTGACGATAAGT |
| | | | | TCTTAACTGGTTGCGGGAGCTGGATTTGAACCAACG |
| | | | | ACCTTCGGGTTATGAGCCCGACGAGCTACCAAACTG |
| | | | | CTCCATCCCGCGATATTTATTTTTCAGTGCCTAATTA |
| | | | | TAATACCATATTTGCTTTACAAATGCAAGCCCTTTTT |
| | | | | TCAAAAAAATATAACAAATAATTAGAGGAA |
| MG178 | 7180 | MG178- | nucleo- | AGATTTTACAGTAGAGCAGATTCATTCATGGCTGGA |
| recombinases | | 7198 AttP | tide | AGCGCTGAAAGCCGCCCCGGATGATAAAGCTGTTCG |
| attachment | | | | CCTTTTGGTTTCTCGTATTGAGGTAAAACAAAAGAC |
| sites | | | | CGTCTTCAACATAGCAAGTACATTGAAAGCGGTCTT |
| | | | | ATGTGAAACTGGTTGCGGGAGCTGGATTGATATATT |
| | | | | ACCAAGAATCCTAATGAATTACCCCCAGCAGAACGA |
| | | | | GATTTAACAACCAGAATCAGACATATTTTCTGGAAG |
| | | | | TTCGACCCCTCCTTCCCCAATAAATTCTTCTATTGCA |
| | | | | TCATAAAGAGCTATAGACAAAGGGTCAGCGGCG |
| MG178 | 7181 | MG178- | nucleo- | AAAACTCTCTATTGGTTTTTCCTTAGGTCGGCGACGA |
| recombinases | | 7198 AttL | tide | CCAACTGATAGCCCATGACACCTCAGTCAATCTAAT |
| attachment | | | | TTGTTCTCTCTGCTGTTATTCGGAACAACGATGAAAA |
| sites | | | | CACGCAAAAAAGACTTATCGTCTGTTGACGATAAGT |
| | | | | TCTTAACTGGTTGCGGGAGCTGGATTGATATATTACC |
| | | | | AAGAATCCTAATGAATTACCCCCAGCAGAACGAGAT |
| | | | | TTAACAACCAGAATCAGACATATTTTCTGGAAGTTC |
| | | | | GACCCCTCCTTCCCCAATAAATTCTTCTATTGCATCA |
| | | | | TAAAGAGCTATAGACAAAGGGTCAGCGGCG |
| MG178 | 7182 | MG178- | nucleo- | AGATTTTACAGTAGAGCAGATTCATTCATGGCTGGA |
| recombinases | | 7198 AttR | tide | AGCGCTGAAAGCCGCCCCGGATGATAAAGCTGTTCG |
| attachment | | | | CCTTTTGGTTTCTCGTATTGAGGTAAAACAAAAGAC |
| sites | | | | CGTCTTCAACATAGCAAGTACATTGAAAGCGGTCTT |
| | | | | ATGTGAAACTGGTTGCGGGAGCTGGATTTGAACCAA |
| | | | | CGACCTTCGGGTTATGAGCCCGACGAGCTACCAAAC |
| | | | | TGCTCCATCCCGCGATATTTATTTTTCAGTGCCTAAT |
| | | | | TATAATACCATATTTGCTTTACAAATGCAAGCCCTTT |
| | | | | TTTCAAAAAAATATAACAAATAATTAGAGGAA |
| MG178 | 7183 | MG178- | nucleo- | ACCGGGCCTTTTTTTGTTCCTGCGATTTTAGTTTAGA |
| recombinases | | 7202 large | tide | AAATGTAGCCTATGGGCACCCCAAGGAAATAAACCC |
| attachment | | serine | | TACACTTGGAGCTTTCTTAGTTTGAGTAGTTGTCA |
| sites | | recombinase | | |
| | | attp_1 | | |
| MG178 | 7184 | MG178- | nucleo- | TTTTTGTTCCTGCGATTTTAGTTTAGAAAATGTAGCC |
| recombinases | | 7202 large | tide | TATGGGCACCCCAAGGAAATAAACCCTACACTTGGA |
| attachment | | serine | | GCTTTCTTAGTTTGA |
| sites | | recombinase | | |
| | | attp_2 | | |
| MG178 | 7185 | MG178- | nucleo- | TGCGATTTTAGTTTAGAAAATGTAGCCTATGGGCAC |
| recombinases | | 7202 large | tide | CCCAAGGAAATAAACCCTACACTTGGAGCTTT |
| attachment | | serine | | |
| sites | | recombinase | | |
| | | attp_3 | | |
| MG178 | 7186 | MG178- | nucleo- | TTTTAGTTTAGAAAATGTAGCCTATGGGCACCCCAA |
| recombinases | | 7202 large | tide | GGAAATAAACCCTACACTTGGA |
| attachment | | serine | | |
| sites | | recombinase | | |
| | | attp_4 | | |
| MG178 | 7187 | MG178- | nucleo- | GTTTAGAAAATGTAGCCTATGGGCACCCCAAGGAAA |
| recombinases | | 7202 large | tide | TAAACCCTACAC |
| attachment | | serine | | |
| sites | | recombinase | | |
| | | attp_5 | | |
| MG178 | 7188 | MG178- | nucleo- | CTTCCATGCGCAGCTGGGTCAGGATGCGTTCGGAGT |
| recombinases | | 7202 large | tide | CGACAGTTGCCTTCGGGCACCCAAGGCTGACGAATC |
| attachment | | serine | | CGACTTTCGGGGTGGCGGTGGACATGCGGGCTAACC |
| sites | | recombinase | | |
| | | attB_1 | | |
| MG178 | 7189 | MG178- | nucleo- | CAGCTGGGTCAGGATGCGTTCGGAGTCGACAGTTGC |
| recombinases | | 7202 large | tide | CTTCGGGCACCCAAGGCTGACGAATCCGACTTTCGG |
| attachment | | serine | | GGTGGCGGTGGACATG |
| sites | | recombinase | | |
| | | attB_2 | | |
| MG178 | 7190 | MG178- | nucleo- | AGGATGCGTTCGGAGTCGACAGTTGCCTTCGGGCAC |
| recombinases | | 7202 large | tide | CCAAGGCTGACGAATCCGACTTTCGGGGTGGC |
| attachment | | serine | | |
| sites | | recombinase | | |
| | | attB_3 | | |
| MG178 | 7191 | MG178- | nucleo- | GCGTTCGGAGTCGACAGTTGCCTTCGGGCACCCAAG |
| recombinases | | 7202 large | tide | GCTGACGAATCCGACTTTCGGG |
| attachment | | serine | | |
| sites | | recombinase | | |
| | | attB_4 | | |
| MG178 | 7192 | MG178- | nucleo- | CGGAGTCGACAGTTGCCTTCGGGCACCCAAGGCTGA |
| recombinases | | 7202 large | tide | CGAATCCGACTT |
| attachment | | serine | | |
| sites | | recombinase | | |
| | | attB_5 | | |
| MG178 | 7193 | MG178- | nucleo- | GGAGTCGACAGTTGCCTTCGGGCACCCAAGGCTGAC |
| recombinases | | 7202 large | tide | GAATCCGACT |
| attachment | | serine | | |
| sites | | recombinase | | |
| | | attB_6 | | |
| MG178 | 7194 | MG178- | nucleo- | GAGTCGACAGTTGCCTTCGGGCACCCAAGGCTGACG |
| recombinases | | 7202 large | tide | AATCCGAC |
| attachment | | serine | | |
| sites | | recombinase | | |
| | | attB_7 | | |
| MG178 | 7195 | MG178- | nucleo- | AGTCGACAGTTGCCTTCGGGCACCCAAGGCTGACGA |
| recombinases | | 7202 large | tide | ATCCGA |
| attachment | | serine | | |
| sites | | recombinase | | |
| | | attB_8 | | |
| MG178 | 7196 | MG178- | nucleo- | GTCGACAGTTGCCTTCGGGCACCCAAGGCTGACGAA |
| recombinases | | 7202 large | tide | TCCG |
| attachment | | serine | | |
| sites | | recombinase | | |
| | | attB_9 | | |
| MG178 | 7197 | MG178- | nucleo- | TCGACAGTTGCCTTCGGGCACCCAAGGCTGACGAAT |
| recombinases | | 7202 large | tide | CC |
| attachment | | serine | | |
| sites | | recombinase | | |
| | | attB_10 | | |
| MG178 | 7198 | MG178- | nucleo- | CGACAGTTGCCTTCGGGCACCCAAGGCTGACGAATC |
| recombinases | | 7202 large | tide | |
| attachment | | serine | | |
| sites | | recombinase | | |
| | | attB_11 | | |
| MG178 | 7199 | MG178- | nucleo- | ACAGTTGCCTTCGGGCACCCAAGGCTGACGAA |
| recombinases | | 7202 large | tide | |
| attachment | | serine | | |
| sites | | recombinase | | |
| | | attB_12 | | |
| MG178 | 7200 | MG178- | nucleo- | AGTTGCCTTCGGGCACCCAAGGCTGACG |
| recombinases | | 7202 large | tide | |
| attachment | | serine | | |
| sites | | recombinase | | |
| | | attB_13 | | |
| MG178 | 7201 | MG178- | nucleo- | GGCTCCGAACCCCTATAAAATAAGGCCTTATCATAA |
| recombinases | | 7193 large | tide | TTATACCTTACGGAAGTATGGTGGACTATTCTTCCGT |
| attachment | | serine | | AAGGTATAATATCATCACAAAGCCTTTATTTAAAGC |
| sites | | recombinase | | AAT |
| | | attp_1 | | |
| MG178 | 7202 | MG178- | nucleo- | CCCTATAAAATAAGGCCTTATCATAATTATACCTTAC |
| recombinases | | 7193 large | tide | GGAAGTATGGTGGACTATTCTTCCGTAAGGTATAAT |
| attachment | | serine | | ATCATCACAAAGCCTTTAT |
| sites | | recombinase | | |
| | | attp_2 | | |
| MG178 | 7203 | MG178- | nucleo- | TAAGGCCTTATCATAATTATACCTTACGGAAGTATG |
| recombinases | | 7193 large | tide | GTGGACTATTCTTCCGTAAGGTATAATATCATCACA |
| attachment | | serine | | |
| sites | | recombinase | | |
| | | attp_3 | | |
| MG178 | 7204 | MG178- | nucleo- | CCTTATCATAATTATACCTTACGGAAGTATGGTGGA |
| recombinases | | 7193 large | tide | CTATTCTTCCGTAAGGTATAATATCA |
| attachment | | serine | | |
| sites | | recombinase | | |
| | | attp_4 | | |
| MG178 | 7205 | MG178- | nucleo- | TCATAATTATACCTTACGGAAGTATGGTGGACTATTC |
| recombinases | | 7193 large | tide | TTCCGTAAGGTATAA |
| attachment | | serine | | |
| sites | | recombinase | | |
| | | attp_5 | | |
| MG178 | 7206 | MG178- | nucleo- | GGTAAACATCAAGCGGCCCGACCCGAAGGCGGCAC |
| recombinases | | 7193 large | tide | AGATAATCATCAGCCAGTATGGTGGACCGGACGGTG |
| attachment | | serine | | AAATGGGTGCCAGCATGCGTTACCTCTCACAGCGCT |
| sites | | recombinase | | ATTCA |
| | | attB_1 | | |
| MG178 | 7207 | MG178- | nucleo- | AAGCGGCCCGACCCGAAGGCGGCACAGATAATCAT |
| recombinases | | 7193 large | tide | CAGCCAGTATGGTGGACCGGACGGTGAAATGGGTGC |
| attachment | | serine | | CAGCATGCGTTACCTCTCACA |
| sites | | recombinase | | |
| | | attB_2 | | |
| MG178 | 7208 | MG178- | nucleo- | ACCCGAAGGCGGCACAGATAATCATCAGCCAGTATG |
| recombinases | | 7193 large | tide | GTGGACCGGACGGTGAAATGGGTGCCAGCATGCGTT |
| attachment | | serine | | |
| sites | | recombinase | | |
| | | attB_3 | | |
| MG178 | 7209 | MG178- | nucleo- | AAGGCGGCACAGATAATCATCAGCCAGTATGGTGGA |
| recombinases | | 7193 large | tide | CCGGACGGTGAAATGGGTGCCAGCAT |
| attachment | | serine | | |
| sites | | recombinase | | |
| | | attB_4 | | |
| MG178 | 7210 | MG178- | nucleo- | GGCACAGATAATCATCAGCCAGTATGGTGGACCGGA |
| recombinases | | 7193 large | tide | CGGTGAAATGGGTGCC |
| attachment | | serine | | |
| sites | | recombinase | | |
| | | attB_5 | | |
| MG178 | 7211 | MG178- | protein | MAKRELMKNLMSDTFRRVAIYIRVSTNHQVDKDSLPL |
| recombinases | | 7205 large | | QREELINYCKYVLGIEDFEIFEDAGFSAKNTDRPGYQK |
| | | serine | | MMKMVRAGLFTHVLVWKLDRISRNLLDFAYMYEELK |
| | | recombinase | | KLDVAFISKNEQFDTSTAMGEAMLKIILVFAELERKTTS |
| | | | | ERVAATMISRAVNGKWNGGRVPYGYSYDYEQKEFSV |
| | | | | NPEEQKVALLMCDLYEASNSLLFVSRKLNEIGYRSRAG |
| | | | | NLWSPVQVRKVLVNPFNTGKYVYNQTSLSTGTQLPNK |
| | | | | EEDFIVIEDHHPALIPQERQDRLIARLNRNARSRSTANN |
| | | | | TTNRKNIHVFSGLIYCDNCGNMLTSSVGKKLAGDGWR |
| | | | | PSIYLCPSKRKHVSDGCHDTTDSSVGEFVLNFIMNMLN |
| | | | | AQRNFQLVRSAADLQRLLLYGKVFDDVDHLDQDSLN |
| | | | | DMFTVLSSNLPQNVKAGMKKKMRKPPSNPEVTKLNK |
| | | | | EKQRLERAMERLKRLYMYSDDSMTEQEYITEKNRIAD |
| | | | | AYSEAEARIVEITNYERMERSISDEDFVRQATAFILSKK |
| | | | | LSGSSYINYRKLAVSTDPLMLKEFFNSILDSITINTDGKV |
| | | | | GSIVFKNGLRHQFIYTSNKKEDKTMLAKCNYCGQVML |
| | | | | EADGCTKTYFTLNGKQYPRIRVGDKYDFEPGTTSRCH |
| | | | | DCAAKPGEYHHSGCDAERCPVCHEQLIGCECDFSDL |
| MG178 | 7212 | MG178- | protein | MPRAQKAAIYCRVSTLHQVDKDSLPMQRQDMINYAK |
| recombinases | | 7206 large | | YALGIEDYEVFEDAGYSGKNTDRPAFQDMMERIEAGE |
| | | serine | | FSHVLVWKIDRISRNLLDFATMYAKCKKLGVTFVSKN |
| | | recombinase | | EQFDTSTAMGEAMLKIILVFAELERNMTSERVSSTMNA |
| | | | | RAAEGKWNGGRVPFAYRYDRETDSFSIRDDEAKVALE |
| | | | | LKDIYLRTRSLTYTARTLNEAGKRTRRGYAWTPATVAI |
| | | | | ILRSPFYRGTYRYNYRDESETTFSFKGQNDWIMCAKHH |
| | | | | PPLFSEADCRQIDFWLTKNRRQHGKATHVQRKLVHVF |
| | | | | AGLIRCGFCGSNYIASIDRVRASGYQPSMYNCGGRRQK |
| | | | | GMCKNRYVTDIRIGGFVFNYISNVIRLRDAFRPQWSKA |
| | | | | RIQRLLLRGDDFQCVSLSDDTLRRVRAALLGSRLSTAE |
| | | | | YQPADEQNDDSAEQTRKSNLQAELEKNRRALSRLMHL |
| | | | | FLYAEDEMPQADFLREKKHLQDTITRLQAELEKAQQSS |
| | | | | VFASSLTDEEFLGKAAHLLFQSAMVRGGIDFPELAMRV |
| | | | | GNLELKNFVNAVIKQIIVLDGRVTQITFANDEIHTFLYH |
| MG178 | 7213 | MG178- | protein | MEEIKCAIYTRKSTDEGLEKEFNTLEAQREAGENYVKS |
| recombinases | | 7207 large | | QKHQGWILVDEHYDDGGFSGGNMKRPALQRLFKDIEL |
| | | serine | | GKINMIVVYKIDRLTRSLVDFSKMVDIFDKYHCSFVSV |
| | | recombinase | | TQNFNTSDSMGRLTLNMLLSFAQFEREIGSERVRDKTA |
| | | | | ASRKKGMWTGGTVPFGYRSVNKKLEIEPNEAEAVKF |
| | | | | MFEMYIKYKSAMAVCKLLTEKGYRAFRRDAVLRMLK |
| | | | | NPIYEGKIKYKHELYDGQHQAIIRQKTFEAVQYILLNK |
| | | | | DKRERTCLFNRNEVGILRGLLICGCCHAPMTPASCQSH |
| | | | | GVRRYYYTSTKAKYYGYHHCSNGAVPVALMDECMT |
| | | | | KIVTPLISDINVLNGLINKICPDKSAEIYKVMRNPEKIIER |
| | | | | MTERDKLQLMKLLIKKIIVNYDTIEINWSDLALSLLPAY |
| | | | | LRARTQNQITIIDYPFKRNKGALTLSLPEEVAPNINYNA |
| | | | | ELITALCKAFKYQKIMNKEKQSIIELAANENIDSGYLGR |
| | | | | LIRLTCLAPDIIKRILEGTQPTTIYLKRLLREDIPPIWQDQ |
| | | | | RIKYGFVK |
| MG178 | 7214 | MG178- | protein | MIAIYARQSIEKKDSVSIEAQIEKCKYYCENQDYKIYKD |
| recombinases | | 7208 large | | AGYSGKNINRPQFSKLLEDIKSGLITKVIAYRLDRISRSI |
| | | serine | | ADFSQLLILFDEHNVDFVSATENFDTNTPMGRAMINIV |
| | | recombinase | | MTFAQLERETIVERVTDNYYFRANNGYWAGGYAPYG |
| | | | | YEIKHIIGNDGKRHSVLVENKDESKIVKEIYDMYINQNI |
| | | | | SMRKIAQQLNYQNIPTKKQSGNWGINAVNAILSRPIYT |
| | | | | EATTKIYDYFNKRGTCITNNIEHFDGTKTANLYGNSKK |
| | | | | NNNVKALRNYDEMFLSLINCVPLISNEDWFKVQNIKGT |
| | | | | KKNLPPRTNSSKISFLCGLVKCGKCSSNMVTQGCKNR |
| | | | | YGIQYYYLICSTKRNLGRIKCDNKMIDISKLEDIVINDIK |
| | | | | KHFNSNEIETKIEKYMKNNKKENINLLKQKEEFENKIIK |
| | | | | IDIQIQNLINSIAEGNITISKYINQKIEVLEKEKQNISSQLS |
| | | | | TIIEKNNITQDNYLIEYVKNINEKINTKDFEQLKLLCHTII |
| | | | | DKIVITDKNIDIHYKI |
| MG178 | 7215 | MG178- | nucleo- | CGCTTCAAGGCGACGGAGGGACTGATTACCAACTTC |
| recombinases | | 7163 AttB | tide | CATTTACCGCAATCGACGCTGCTTATGCTTGTTTCGG |
| attachment | | | | CGTTCAGCTCACGGGAGATAATGATGAACGCATATG |
| sites | | | | AGACGGCGAAGAGAGAACAATATCGATTTTTCAGTT |
| | | | | TCGGAGATGCGATGTTTATGCGATAGCATCAAAAAA |
| | | | | CGGGCGCTTTTTATAAGCTGCCCGTTTTTCTGTTATT |
| | | | | TGTTATTTGAATTATTTCAGCTGAAAGCCTGTTCAAT |
| | | | | TCCCCAGTCGCAGAGGAATAGGATGGGATAGGTATA |
| | | | | GCAAAGGTGAAAGAGGCTGGTGTTCCATTTTACG |
| MG178 | 7216 | MG178- | nucleo- | CGCTTCAAGGCGACGGAGGGACTGATTACCAACTTC |
| recombinases | | 7163 AttL | tide | CATTTACCGCAATCGACGCTGCTTATGCTTGTTTCGG |
| attachment | | | | CGTTCAGCTCACGGGAGATAATGATGAACGCATATG |
| sites | | | | AGACGGCGAAGAGAGAACAATATCGATTTTTCAGTT |
| | | | | TCGGAGATGCGATGTTTATGCGATAGCATCATTTGTT |
| | | | | ACGGAATAATAACGACAAGAAAAGCCCAGAACACG |
| | | | | CTTGGTTTCTGGGCTTTTTGTTGTTCAATCGTCTTTGT |
| | | | | ACATAAATTCGTGGATTATGCCGTTTTTGAAGGTAAT |
| | | | | TGACCGGATTTTACCGTTTTCTATACAAAAGTT |
| MG178 | 7217 | MG178- | nucleo- | GAAAGACGAGGAAACGTCCGATAAATAAAAAAACG |
| recombinases | | 7163 AttP | tide | CCTTAAAAGGCGTCACAGGCGGTTTGTGAGGAAGCA |
| attachment | | | | AGTCAACAGAGATAAGGACTTGCGTAATTTATAAGC |
| sites | | | | GCCATTTCTGGGCGAGTAATGATGATATCCCGTGAG |
| | | | | CATCGGGGATGCGATGTTTATGCGATAGCATCATTT |
| | | | | GTTACGGAATAATAACGACAAGAAAAGCCCAGAAC |
| | | | | ACGCTTGGTTTCTGGGCTTTTTGTTGTTCAATCGTCTT |
| | | | | TGTACATAAATTCGTGGATTATGCCGTTTTTGAAGGT |
| | | | | AATTGACCGGATTTTACCGTTTTCTATACAAAAGTT |
| MG178 | 7218 | MG178- | nucleo- | GAAAGACGAGGAAACGTCCGATAAATAAAAAAACG |
| recombinases | | 7163 AttR | tide | CCTTAAAAGGCGTCACAGGCGGTTTGTGAGGAAGCA |
| attachment | | | | AGTCAACAGAGATAAGGACTTGCGTAATTTATAAGC |
| sites | | | | GCCATTTCTGGGCGAGTAATGATGATATCCCGTGAG |
| | | | | CATCGGGGATGCGATGTTTATGCGATAGCATCAAAA |
| | | | | AACGGGCGCTTTTTATAAGCTGCCCGTTTTTCTGTTA |
| | | | | TTTGTTATTTGAATTATTTCAGCTGAAAGCCTGTTCA |
| | | | | ATTCCCCAGTCGCAGAGGAATAGGATGGGATAGGTA |
| | | | | TAGCAAAGGTGAAAGAGGCTGGTGTTCCATTTTACG |
| MG178 | 7219 | MG178- | nucleo- | GATGCGATGTTTATGCGATAGCATC |
| conserved | | 7163 Core | tide | |
| core | | | | |
| MG178 | 7220 | MG178- | nucleo- | TACCGTTTTAAGGTATTGGATGCCCTGATTACGAATT |
| recombinases | | 7205 AttB | tide | TCCACCTGCCCCAGTCCACACTGGTGATGCTGGTCA |
| attachment | | | | GCGCGCTGGCCGGACGGGAGCATATTTTAAACGCCT |
| sites | | | | ACCGGGAAGCAGTGAAGGAACGTTACCGTTTCTTCT |
| | | | | CCTTTGGGGATGCTATGTTTATCGCGGCCCATCCGGC |
| | | | | TGCTGAGAAGCGGCAGGGATTGTGGGAATGACAGA |
| | | | | AGAAAGCGGGAGAAAATGGAAGAACGTTTAAATAA |
| | | | | ATGGCTGAGCCGGATGGGAGTCTGCTCCAGACGCGA |
| | | | | GGCGGACCGTCTGATTGAGGCCGG |
| MG178 | 7221 | MG178- | nucleo- | TACCGTTTTAAGGTATTGGATGCCCTGATTACGAATT |
| recombinases | | 7205 AttL | tide | TCCACCTGCCCCAGTCCACACTGGTGATGCTGGTCA |
| attachment | | | | GCGCGCTGGCCGGACGGGAGCATATTTTAAACGCCT |
| sites | | | | ACCGGGAAGCAGTGAAGGAACGTTACCGTTTCTTCT |
| | | | | CCTTTGGGGATGCTATGCTTATACTATAACACCAAA |
| | | | | AATAAACTGTACAGTTGACACTAAAAAAGCAGCCAG |
| | | | | GAGGTCAATTCTCCTGGCCGTTTTGATTATAAGTCTG |
| | | | | AAAAATCGCACTCACAGCCAATTAGCTGTTCATGGC |
| | | | | ATACGGGGCAACGCTCCGCATC |
| MG178 | 7222 | MG178- | nucleo- | GTTGGAGTTCCTGGGCTTTTCTGCATGTAGAAGAAG |
| recombinases | | 7205 AttP | tide | TTCGTTGCCTGCCGGATGATTTGGTGATATAATGCAG |
| attachment | | | | TGTATATGAAAAAAATGAAAGAAGTGGAAAGAATG |
| sites | | | | ATAAACCGTACAGTTAATTTTAGGTGCAGACCCGTG |
| | | | | AGTATGGGGGATGCTATGCTTATACTATAACACCAA |
| | | | | AAATAAACTGTACAGTTGACACTAAAAAAGCAGCCA |
| | | | | GGAGGTCAATTCTCCTGGCCGTTTTGATTATAAGTCT |
| | | | | GAAAAATCGCACTCACAGCCAATTAGCTGTTCATGG |
| | | | | CATACGGGGCAACGCTCCGCATC |
| MG178 | 7223 | MG178- | nucleo- | GTTGGAGTTCCTGGGCTTTTCTGCATGTAGAAGAAG |
| recombinases | | 7205 AttR | tide | TTCGTTGCCTGCCGGATGATTTGGTGATATAATGCAG |
| attachment | | | | TGTATATGAAAAAAATGAAAGAAGTGGAAAGAATG |
| sites | | | | ATAAACCGTACAGTTAATTTTAGGTGCAGACCCGTG |
| | | | | AGTATGGGGGATGCTATGTTTATCGCGGCCCATCCG |
| | | | | GCTGCTGAGAAGCGGCAGGGATTGTGGGAATGACA |
| | | | | GAAGAAAGCGGGAGAAAATGGAAGAACGTTTAAAT |
| | | | | AAATGGCTGAGCCGGATGGGAGTCTGCTCCAGACGC |
| | | | | GAGGCGGACCGTCTGATTGAGGCCGG |
| MG178 | 7224 | MG178- | nucleo- | GGGGATGCTATG |
| conserved | | 7205 Core | tide | |
| core | | | | |
| MG178 | 7225 | MG178- | nucleo- | TACCGCTTCAAGGTGCTGGATGCCCTGGTCACCAAT |
| recombinases | | 7165 AttB_1 | tide | TTCCACCTGCCCCAGTCCACCCTGATCATGCTGGTGT |
| attachment | | | | CCGCCCTGGCCGGGCGGGAGCACGTTCTGGCCGCCT |
| sites | | | | ATGAGGAGGCTGTGAAGGAGCGCTACCGCTTTTTCA |
| | | | | GCTTCGGAGATGCCATGTTCATCTCCTGATTCCAAAT |
| | | | | CATAAAATACGCAGAGATCCGACGGATCTCGTCAAA |
| | | | | GGAGTTTTTTTGTGTTTGAAGTGATCAAGACCGAGG |
| | | | | GGAACGCCCGCCGGGGCGTATTTACCTGCCCCCACG |
| | | | | GCACTGTCCAGACCCCTGTCTTTATGA |
| MG178 | 7226 | MG178- | nucleo- | TACCGCTTCAAGGTGCTGGATGCCCTGGTCACCAAT |
| recombinases | | 7165 AttB_2 | tide | TTCCACCTGCCCCAGTCCACCCTGATCATGCTGGTGT |
| attachment | | | | CCGCCCTGGCCGGGCGGGAGCACGTTCTGGCCGCCT |
| sites | | | | ATGAGGAGGCTGTGAAGGAGCGCTACCGCTTTTTCA |
| | | | | GCTTCGGAGATGCGATGTTCATCTCCTGATTCCAAAT |
| | | | | CATAAAATACGCAGAGATCCGACGGATCTCGTCAAA |
| | | | | GGAGTTTTTTTGTGTTTGAAGTGATCAAGACCGAGG |
| | | | | GGAACGCCCGCCGGGGCGTATTTACCTGCCCCCACG |
| | | | | GCACTGTCCAGACCCCTGTCTTTATGA |
| MG178 | 7227 | MG178- | nucleo- | TACCGCTTCAAGGTGCTGGATGCCCTGGTCACCAAT |
| recombinases | | 7165 AttL | tide | TTCCACCTGCCCCAGTCCACCCTGATCATGCTGGTGT |
| attachment | | | | CCGCCCTGGCCGGGCGGGAGCACGTTCTGGCCGCCT |
| sites | | | | ATGAGGAGGCTGTGAAGGAGCGCTACCGCTTTTTCA |
| | | | | GCTTCGGAGATGCGATGTTCATTGGAGACTAGATAC |
| | | | | AGAAATTTCCAGAGGACTGAGAAAAAGCCCAGGAA |
| | | | | CCAAGGGGTTCCTGGGCTTTTTGCTGTCATAGGTCGT |
| | | | | TGTAGAAAAATTGGAGCTCTATGCCGTTTTTGAAGC |
| | | | | GGATTGAGACGACTCGGCCGTTTTTTAT |
| MG178 | 7228 | MG178- | nucleo- | GGTAGCGACGATTGCCAGGACAGCTATGCCAAGTAT |
| recombinases | | 7165 AttP_1 | tide | CTCACCAACGTCTGCAAGTACGATGAAAAGTACGCA |
| attachment | | | | AAGAGCATGGCGGATCTGCAATTCCGAAGTTGCTCG |
| sites | | | | AAAAGTGTTACCAATGCGGAAATCTGGTCTCCCGTG |
| | | | | AGTATGGGAGATGCCATGTTCATTGGAGACTAGATA |
| | | | | CAGAAATTTCCAGAGGACTGAGAAAAAGCCCAGGA |
| | | | | ACCAAGGGGTTCCTGGGCTTTTTGCTGTCATAGGTCG |
| | | | | TTGTAGAAAAATTGGAGCTCTATGCCGTTTTTGAAG |
| | | | | CGGATTGAGACGACTCGGCCGTTTTTTAT |
| MG178 | 7229 | MG178- | nucleo- | GGTAGCGACGATTGCCAGGACAGCTATGCCAAGTAT |
| recombinases | | 7165 AttP_2 | tide | CTCACCAACGTCTGCAAGTACGATGAAAAGTACGCA |
| attachment | | | | AAGAGCATGGCGGATCTGCAATTCCGAAGTTGCTCG |
| sites | | | | AAAAGTGTTACCAATGCGGAAATCTGGTCTCCCGTG |
| | | | | AGTATGGGAGATGCGATGTTCATTGGAGACTAGATA |
| | | | | CAGAAATTTCCAGAGGACTGAGAAAAAGCCCAGGA |
| | | | | ACCAAGGGGTTCCTGGGCTTTTTGCTGTCATAGGTCG |
| | | | | TTGTAGAAAAATTGGAGCTCTATGCCGTTTTTGAAG |
| | | | | CGGATTGAGACGACTCGGCCGTTTTTTAT |
| MG178 | 7230 | MG178- | nucleo- | GGTAGCGACGATTGCCAGGACAGCTATGCCAAGTAT |
| recombinases | | 7165 AttR | tide | CTCACCAACGTCTGCAAGTACGATGAAAAGTACGCA |
| attachment | | | | AAGAGCATGGCGGATCTGCAATTCCGAAGTTGCTCG |
| sites | | | | AAAAGTGTTACCAATGCGGAAATCTGGTCTCCCGTG |
| | | | | AGTATGGGAGATGCCATGTTCATCTCCTGATTCCAA |
| | | | | ATCATAAAATACGCAGAGATCCGACGGATCTCGTCA |
| | | | | AAGGAGTTTTTTTGTGTTTGAAGTGATCAAGACCGA |
| | | | | GGGGAACGCCCGCCGGGGCGTATTTACCTGCCCCCA |
| | | | | CGGCACTGTCCAGACCCCTGTCTTTATGA |
| MG178 | 7231 | MG178- | nucleo- | GGAGATGCCATGTTCAT |
| conserved | | 7165 Core 1 | tide | |
| core | | | | |
| MG178 | 7232 | MG178- | nucleo- | GGAGATGCGATGTTCAT |
| conserved | | 7165 Core 2 | tide | |
| core | | | | |
| MG178 | 7233 | MG178- | nucleo- | AAGTCCACGTTGATCATGCTCATCAGCGCCTTCGCC |
| recombinases | | 7206 AttB | tide | GGCCGCAATTTCGTGCTGAACGCCTACAAGACCGCC |
| attachment | | | | GTCGAGATGAAGTACCGCTTTTTCTCGTTTGGCGATG |
| sites | | | | CAATGTTCTGCTCACGCAAGCAACCAGACGCCGAGC |
| | | | | GAGCCGAAGAACTCAAGGAGCTTGAGGAGCTCGAC |
| | | | | CGCCAGCGCGAGGCCGAGGGAAAAGCATAATCTAC |
| | | | | GTTATGATAGCGAAAGAGCCGCATGTCATCGGAACA |
| | | | | TGCGGCTCTTTTTTGTATGATGTTGATTTGTCTTATTT |
| | | | | CCGCTGCAGGCGCTTCCAGCCGAGGTAGAGGTGGCT |
| | | | | GGCGAAGAAGAAG |
| MG178 | 7234 | MG178- | nucleo- | AAGTCCACGTTGATCATGCTCATCAGCGCCTTCGCC |
| recombinases | | 7206 AttL | tide | GGCCGCAATTTCGTGCTGAACGCCTACAAGACCGCC |
| attachment | | | | GTCGAGATGAAGTACCGCTTTTTCTCGTTTGGCGATG |
| sites | | | | CAATGTTCTGCTCACGCAAGCAACCAGACGCCGAGC |
| | | | | GAGCCGAAGAACTCAAGGAGCTTGAGGAGCTCGAC |
| | | | | CGCCAGCGTGAGGCCGAGGCCGCGAAAAAAGAATG |
| | | | | ATGTGACAGTAAAAGCCTTCCCTGCGCGGGAAGGCT |
| | | | | TTTTTCAATGGTAGAGGAAAGTGTGGATTTCGTCATT |
| | | | | GGCGAAGGTGATCTGGGTGACGCGGCCATCGAGCAC |
| | | | | GATGATTTGCTTGA |
| MG178 | 7235 | MG178- | nucleo- | GCAGCGGGATCCTCAGCATGGTGCAGGGCAAGACC |
| recombinases | | 7206 AttP | tide | GGTAAGGCGGCAACGGAGTAATGCTATATAATAGTA |
| attachment | | | | GACAGTGGCTTGCTTAACTCAATGATACATTGGGGA |
| sites | | | | CGCCATGTTCATTCGCCGCAAGCAGCCCGATGCGGA |
| | | | | GCGCGCGGAAGAACTCAAGGAGCTTGAGGAGCTCG |
| | | | | ACCGCCAGCGTGAGGCCGAGGCCGCGAAAAAAGAA |
| | | | | TGATGTGACAGTAAAAGCCTTCCCTGCGCGGGAAGG |
| | | | | CTTTTTTCAATGGTAGAGGAAAGTGTGGATTTCGTCA |
| | | | | TTGGCGAAGGTGATCTGGGTGACGCGGCCATCGAGC |
| | | | | ACGATGATTTGCTTGA |
| MG178 | 7236 | MG178- | nucleo- | GCAGCGGGATCCTCAGCATGGTGCAGGGCAAGACC |
| recombinases | | 7206 AttR | tide | GGTAAGGCGGCAACGGAGTAATGCTATATAATAGTA |
| attachment | | | | GACAGTGGCTTGCTTAACTCAATGATACATTGGGGA |
| sites | | | | CGCCATGTTCATTCGCCGCAAGCAGCCCGATGCGGA |
| | | | | GCGCGCGGAAGAACTCAAGGAGCTTGAGGAGCTCG |
| | | | | ACCGCCAGCGCGAGGCCGAGGGAAAAGCATAATCT |
| | | | | ACGTTATGATAGCGAAAGAGCCGCATGTCATCGGAA |
| | | | | CATGCGGCTCTTTTTTGTATGATGTTGATTTGTCTTAT |
| | | | | TTCCGCTGCAGGCGCTTCCAGCCGAGGTAGAGGTGG |
| | | | | CTGGCGAAGAAGAAG |
| MG178 | 7237 | MG178- | nucleo- | GAAGAACTCAAGGAGCTTGAGGAGCTCGACCGCCA |
| conserved | | 7206 Core | tide | GCG |
| core | | | | |
| MG178 | 7238 | MG178- | nucleo- | TCCATTCGTATTATATGGCATAGGCTCTGCTTCGCCT |
| recombinases | | 7208 AttB | tide | CTATAATATGTTTCCATTCTATCTGTATCATTATTAA |
| attachment | | | | AACTAATATTTTTGCCAAGAAAAATCCCCCTCATAT |
| sites | | | | AATAATTTTATTTTATTATATGAAA |
| MG178 | 7239 | MG178- | nucleo- | TCTTTGGCTATTCCAACTTTGCATTGTCCTTTTTGTTG |
| recombinases | | 7208 AttL | tide | TCCATAATATGTTTGATTTGCTAGAGCCTCTAAATTC |
| attachment | | | | TCTAACTTTCAATGTTCCATTCGTATTATATGGCATA |
| sites | | | | GGCTCTGCTTCGCCTCTATAATATGTTTCCATTCTAT |
| | | | | CTGTATCATTATTAAAATCAAAATGGCATACTATTTG |
| | | | | TTGTAATAATTAAAACATTCAATCATGCCTTTTCTAT |
| | | | | ATACTTTTAAGAATGTTTTTGAAAACATTCTTACTAA |
| | | | | AATTTTTTCTTTAAAACTTAATCCATTTAATGCACTA |
| | | | | TTTAACACAATATCTTTTG |
| MG178 | 7240 | MG178- | nucleo- | ATAACCGATAAAAATATAGATATACACTACAAGATT |
| recombinases | | 7208 AttP | tide | TAGTGTATGTCTTTTTGAATTTAATGTATCATTATTA |
| attachment | | | | AAATCAAAATGGCATACTATTTGTTGTAATAATTAA |
| sites | | | | AACATTCAATCATGCCTTTTCTATATA |
| MG178 | 7241 | MG178- | nucleo- | GAATACGTTAAAAACATTAATGAAAAAATCAATACT |
| recombinases | | 7208 AttR | tide | AAAGACTTTGAACAATTAAAATTACTTTGTCACACA |
| attachment | | | | ATTATAGATAAAATAGTTATAACCGATAAAAATATA |
| sites | | | | GATATACACTACAAGATTTAGTGTATGTCTTTTTGAA |
| | | | | TTTAATGTATCATTATTAAAAACTAATATTTTTGCCA |
| | | | | AGAAAAATCCCCCTCATATAATAATTTTATTTTATTA |
| | | | | TATGAAAGGGAATATCTATTTGTGACTATATTTTTAC |
| | | | | CTTTATTTTACTTCTTTACATCTTACAATTACTCTTAA |
| | | | | TTTACTATCATCTGTACATGTA |
| MG178 | 7242 | MG178- | nucleo- | TGTATCATTATTAAAA |
| conserved | | 7208 Core | tide | |
| core | | | | |
| MG178 | 7243 | MG178- | nucleo- | CCTTATTAACCATTTGAAAAATATAAATATTGATAA |
| recombinases | | 7207 AttB | tide | AAAATAGTTCGGATATTTCAAAAAAATAATGTTTTT |
| attachment | | | | CAAAAAACGAACATCCGAACTCATCTAACCTATTGA |
| sites | | | | TTTATAAAAGAAAAACAGCTCCCGTGATAGGAGCTG |
| | | | | TTAACTATGGTGGGCCCTGCCTGACTCGAACAGGCG |
| | | | | ACCAGACCGTTATGAGCGGCCTGCTCTAACCAACTG |
| | | | | AGCTAAGGGCCCGGCATCTGAAAACGGTTAAAAAAT |
| | | | | AGGTCAAATATTTTCCGAAGTCAAGCGCTTTTTGGG |
| | | | | CACCCCGCCGATCCGCGCCGC |
| MG178 | 7244 | MG178- | nucleo- | CCTTATTAACCATTTGAAAAATATAAATATTGATAA |
| recombinases | | 7207 AttL | tide | AAAATAGTTCGGATATTTCAAAAAAATAATGTTTTT |
| attachment | | | | CAAAAAACGAACATCCGAACTCATCTAACCTATTGA |
| sites | | | | TTTATAAAAGAAAAACAGCTCCCGTGATAGGAGCTG |
| | | | | TTAACTATGGTGGGCGATACGCATCACACAGGCGAA |
| | | | | CGCACAAAAATGTATCTAATATTTTTCAAATTCAAG |
| | | | | GGGATATTTGTCATTACACAAGCCGCCAATATCCAT |
| | | | | TTTATGGTATGGCTTAAGCATTATAAAAAAAGGCCA |
| | | | | CCTTTTATTAAGGTGGTCGGA |
| MG178 | 7245 | MG178- | nucleo- | AGTATCTATTTTGCCCTGATATCAGAAAAAAACGCT |
| recombinases | | 7207 AttP | tide | AAAAAAAGGATATAAAAAAAGAGATAACGCTCAGA |
| attachment | | | | CCGGCTATCGCGAACACCGCGGAAATACTGCCGTTC |
| sites | | | | AGAGGATACAAAAAAAGCCTCTTAATTTAAGAGGCT |
| | | | | TTTGATGATGGTGGGCGATACGCATCACACAGGCGA |
| | | | | ACGCACAAAAATGTATCTAATATTTTTCAAATTCAA |
| | | | | GGGGATATTTGTCATTACACAAGCCGCCAATATCCA |
| | | | | TTTTATGGTATGGCTTAAGCATTATAAAAAAAGGCC |
| | | | | ACCTTTTATTAAGGTGGTCGGA |
| MG178 | 7246 | MG178- | nucleo- | AGTATCTATTTTGCCCTGATATCAGAAAAAAACGCT |
| recombinases | | 7207 AttR | tide | AAAAAAAGGATATAAAAAAAGAGATAACGCTCAGA |
| attachment | | | | CCGGCTATCGCGAACACCGCGGAAATACTGCCGTTC |
| sites | | | | AGAGGATACAAAAAAAGCCTCTTAATTTAAGAGGCT |
| | | | | TTTGATGATGGTGGGCCCTGCCTGACTCGAACAGGC |
| | | | | GACCAGACCGTTATGAGCGGCCTGCTCTAACCAACT |
| | | | | GAGCTAAGGGCCCGGCATCTGAAAACGGTTAAAAA |
| | | | | ATAGGTCAAATATTTTCCGAAGTCAAGCGCTTTTTGG |
| | | | | GCACCCCGCCGATCCGCGCCGC |
| MG178 | | MG178- | nucleo- | ATGGTGGGC |
| conserved | | 7207 Core | tide | |
| core | | | | |
| MG178 | 7248 | MG178- | nucleo- | GGGCTCCAACGGCCCATTTCCTTATCACGCCGATGTT |
| recombinases | | 7169 AttB | tide | CCTCCTCGTGCAGCTCTTTCCGGTGCGCTTGGCGGCA |
| attachment | | | | GAAGCCGCCAGGCACGACGCATCCGTGCGCCCAACA |
| sites | | | | AAAAAGCCTCACGAGGAGGCTTTCTTGCATCAAGAA |
| | | | | AGATCTGGTAGCGGGGGCAGGATTCGAACCTGCGAC |
| | | | | CTTCGGGTTATGAGCCCGACGAGCTGCCAGACTGCT |
| | | | | CCACCCCGCATCAGAGTCCGAAGAGTTTACCGGGGT |
| | | | | GGCCGGTTTCTTGCAAGCCTCAATCGTTCATCAATGG |
| | | | | CATCCATCGACCATTCAGAGACC |
| MG178 | 7249 | MG178- | nucleo- | GGGCTCCAACGGCCCATTTCCTTATCACGCCGATGTT |
| recombinases | | 7169 AttL | tide | CCTCCTCGTGCAGCTCTTTCCGGTGCGCTTGGCGGCA |
| attachment | | | | GAAGCCGCCAGGCACGACGCATCCGTGCGCCCAACA |
| sites | | | | AAAAAGCCTCACGAGGAGGCTTTCTTGCATCAAGAA |
| | | | | AGATCTGGTAGCGGGGGCGCGATGCGGTCTCTATCT |
| | | | | TACAGAGCCCTACCGCGTGCCTCTCTCCCGGCCAGA |
| | | | | GTCCGAGGATTGTACGGCAAAGCGCCGCCGCTGACA |
| | | | | ACACGTAGCGATATCCATTCTATGCATCGCACGGTG |
| | | | | AGACAGGCTGCCTGTACGCTTGAT |
| MG178 | 7250 | MG178- | nucleo- | TGGAACAACGTTGTCGCCCGCCTCACCGACACCCGC |
| recombinases | | 7169 AttP | tide | GACATCCCCGCCGCCCGCGACGCCCTGCGCGAACTC |
| attachment | | | | ATCGGCAACCGCGTAACCGTCAAAAACGAAAACGG |
| sites | | | | CGAACTCTTCGCAGAGATCGCCGCATCGGAATGTCA |
| | | | | GATAAAGCTGGTAGCGGGGGCGCGATGCGGTCTCTA |
| | | | | TCTTACAGAGCCCTACCGCGTGCCTCTCTCCCGGCCA |
| | | | | GAGTCCGAGGATTGTACGGCAAAGCGCCGCCGCTGA |
| | | | | CAACACGTAGCGATATCCATTCTATGCATCGCACGG |
| | | | | TGAGACAGGCTGCCTGTACGCTTGAT |
| MG178 | 7251 | MG178- | nucleo- | TGGAACAACGTTGTCGCCCGCCTCACCGACACCCGC |
| recombinases | | 7169 AttR | tide | GACATCCCCGCCGCCCGCGACGCCCTGCGCGAACTC |
| attachment | | | | ATCGGCAACCGCGTAACCGTCAAAAACGAAAACGG |
| sites | | | | CGAACTCTTCGCAGAGATCGCCGCATCGGAATGTCA |
| | | | | GATAAAGCTGGTAGCGGGGGCAGGATTCGAACCTGC |
| | | | | GACCTTCGGGTTATGAGCCCGACGAGCTGCCAGACT |
| | | | | GCTCCACCCCGCATCAGAGTCCGAAGAGTTTACCGG |
| | | | | GGTGGCCGGTTTCTTGCAAGCCTCAATCGTTCATCAA |
| | | | | TGGCATCCATCGACCATTCAGAGACC |
| MG178 | 7252 | MG178- | nucleo- | CTGGTAGCGGGGGC |
| conserved | | 7169 Core | tide | |
| core | | | | |
| MG178 | 7253 | MG178- | nucleo- | GTGGCAGTCCAAGGATTTCCTGTTGCATCCACATAG |
| recombinases | | 7170 AttB | tide | TAAAGGGCATTGTCATGGTCGGCATAATGCCCGCCC |
| attachment | | | | AGGCCTGCCCGCTCCATCTCTTCCGCAGAGGCCCCTT |
| sites | | | | TCGTCAGTTTATAGACCAAAGTGGCAATTATTTCTAA |
| | | | | ATGAGCCATTTCCTCAGTCCCTATATCCGTCAGTATG |
| | | | | GCCTTGGTTACATTGGTAGGCATACTGTACCGTTGAT |
| | | | | TTAAATAGCGTAATGCAGCTGACAGCTCCCCATCCG |
| | | | | GCCCGCCATATTGAGTGATCAAGTATTTGGCCATTCT |
| | | | | GAGATCGGGTTTGCT |
| MG178 | 7254 | MG178- | nucleo- | GTGGCAGTCCAAGGATTTCCTGTTGCATCCACATAG |
| recombinases | | 7170 AttL | tide | TAAAGGGCATTGTCATGGTCGGCATAATGCCCGCCC |
| attachment | | | | AGGCCTGCCCGCTCCATCTCTTCCGCAGAGGCCCCTT |
| sites | | | | TCGTCAGTTTATAGACCAAAGTGGCAATTATTTCTAA |
| | | | | ATGAGCCATTTCTTTTGCACCATAAGGTTATCTATAA |
| | | | | AAAACAACCCAGATTCAGGGGTTGTTTTTTTCGTATT |
| | | | | CATCCAGGTACTTTTCCACAATATACCTCAATTGCTC |
| | | | | CGAATTACTCCGGTGCTCCCTGGCTGCAACTTTAGTA |
| | | | | AACCTCTCATAAAG |
| MG178 | 7255 | MG178- | nucleo- | AGGAATCAGCTATTACACGAAATACTCGAAAAGGTG |
| recombinases | | 7170 AttP | tide | ATCTATACTAAAACCCAACGAGGTAATCGCGGAGGA |
| attachment | | | | CATGCAGATAATTTTAATCTAGTACTATATCCGAAG |
| sites | | | | CTAAACGTATCAAAGGATTTTAATTATTGATAACCTT |
| | | | | ATGGCGCCATTTCTTTTGCACCATAAGGTTATCTATA |
| | | | | AAAAACAACCCAGATTCAGGGGTTGTTTTTTTCGTAT |
| | | | | TCATCCAGGTACTTTTCCACAATATACCTCAATTGCT |
| | | | | CCGAATTACTCCGGTGCTCCCTGGCTGCAACTTTAGT |
| | | | | AAACCTCTCATAAAG |
| MG178 | 7256 | MG178- | nucleo- | AGGAATCAGCTATTACACGAAATACTCGAAAAGGTG |
| recombinases | | 7170 AttR | tide | ATCTATACTAAAACCCAACGAGGTAATCGCGGAGGA |
| attachment | | | | CATGCAGATAATTTTAATCTAGTACTATATCCGAAG |
| sites | | | | CTAAACGTATCAAAGGATTTTAATTATTGATAACCTT |
| | | | | ATGGCGCCATTTCCTCAGTCCCTATATCCGTCAGTAT |
| | | | | GGCCTTGGTTACATTGGTAGGCATACTGTACCGTTG |
| | | | | ATTTAAATAGCGTAATGCAGCTGACAGCTCCCCATC |
| | | | | CGGCCCGCCATATTGAGTGATCAAGTATTTGGCCAT |
| | | | | TCTGAGATCGGGTTTGCT |
| MG178 | | MG178- | nucleo- | GCCATTTC |
| conserved | | 7170 Core | tide | |
| core | | | | |
| MG178 | 7258 | MG178- | nucleo- | ACGTATGCAAAGCTTTGAGCATATGGGCGTATGATG |
| recombinases | | 7171 AttB | tide | AAGCTACTGAAACCATCCGGGTGTCCTTTCTCTGATG |
| attachment | | | | GCAGAGGGAATGTCAAATAAAGGACTATGATAGTA |
| sites | | | | GAAGAACAGGGAATTGATTTTCGGACAGGGGTTCGA |
| | | | | TTCCCCTCAGCTCCATGCTGAATGATGTCGGTTTTTC |
| | | | | CTTATTTTATAAGGAATTCCGGCATTTTCTTTTTAGA |
| | | | | AATGCTTGATAACCTTTTTAGGATACTGATTACCTTT |
| | | | | TTGATTACTTTTTAGGCTGTTTTCATTGGAATTGCAG |
| | | | | CCCGATTTATCTGCTGT |
| MG178 | 7259 | MG178- | nucleo- | ACGTATGCAAAGCTTTGAGCATATGGGCGTATGATG |
| recombinases | | 7171 AttL | tide | AAGCTACTGAAACCATCCGGGTGTCCTTTCTCTGATG |
| attachment | | | | GCAGAGGGAATGTCAAATAAAGGACTATGATAGTA |
| sites | | | | GAAGAACAGGGAATTGATTTTCGGACAGGGGTTCGA |
| | | | | TTCCCCTCAGCTCCACTTAAGGAGAATTATCCGAAC |
| | | | | ACTTTGTTTTATGCAAATGGAGTGTTTGGGATAATCG |
| | | | | TAAAGATTAACGGTAGGATTTGATTCCTACCGTTTTT |
| | | | | TTTTTGTGCGGGCCCGGTTCACCCGGTACCCGCCTTT |
| | | | | CACTTACTTCTCTTTCTC |
| MG178 | 7260 | MG178- | nucleo- | CAGACCCTGATTGACGTTTTTGTCAATGCAGTCTATG |
| recombinases | | 7171 AttP | tide | TCTATGATGACCGTATTGTAATCACGTACAATTATTC |
| attachment | | | | AGGGGCTCATAATTCGGTCACTTTGGAGCAGATTGA |
| sites | | | | ACAAGCCTTAGGGGAGTCTGAGGGTTCGGATACAGT |
| | | | | TTCGTCAGCTCCACTTAAGGAGAATTATCCGAACAC |
| | | | | TTTGTTTTATGCAAATGGAGTGTTTGGGATAATCGTA |
| | | | | AAGATTAACGGTAGGATTTGATTCCTACCGTTTTTTT |
| | | | | TTTGTGCGGGCCCGGTTCACCCGGTACCCGCCTTTCA |
| | | | | CTTACTTCTCTTTCTC |
| MG178 | 7261 | MG178- | nucleo- | CAGACCCTGATTGACGTTTTTGTCAATGCAGTCTATG |
| recombinases | | 7171 AttR | tide | TCTATGATGACCGTATTGTAATCACGTACAATTATTC |
| attachment | | | | AGGGGCTCATAATTCGGTCACTTTGGAGCAGATTGA |
| sites | | | | ACAAGCCTTAGGGGAGTCTGAGGGTTCGGATACAGT |
| | | | | TTCGTCAGCTCCATGCTGAATGATGTCGGTTTTTCCT |
| | | | | TATTTTATAAGGAATTCCGGCATTTTCTTTTTAGAAA |
| | | | | TGCTTGATAACCTTTTTAGGATACTGATTACCTTTTT |
| | | | | GATTACTTTTTAGGCTGTTTTCATTGGAATTGCAGCC |
| | | | | CGATTTATCTGCTGT |
| MG178 | | MG178- | nucleo- | TCAGCTCCA |
| conserved | | 7171 Core | tide | |
| core | | | | |
| MG178 | 7263 | MG178- | nucleo- | ATTGCGGTTTCAACTGAGAAGGACGAGCGCGGAATC |
| recombinases | | 7172 AttB 2 | tide | AACCTCGTTGCTCGCGGCTTTCGTTCGGCTGCTGTGT |
| attachment | | | | TTCGGTTGCGTCCTAGGCTGTGTTTTGCCTAGAACCG |
| sites | | | | CTACAGGCCACCGGCTGCGAAACCAACCGATGACCT |
| | | | | GCGATTCCCAATGGTGCCCCCGGCGCGATTCGAACG |
| | | | | CGCGGCACCCGCTTTAGGAGAGCGGTGCTCTGTCCC |
| | | | | CTGAGCTACGGAGGCGCGTTTGATATTGTAGCATTA |
| | | | | ATCGCCCTGCTGGCGCGGAACTTGCAAGACGCCTTG |
| | | | | CAGGACGCATAAAAAAGCGATGCGCC |
| MG178 | 7264 | MG178- | nucleo- | ATTGCGGTTTCAACTGAGAAGGACGAGCGCGGAATC |
| recombinases | | 7172 AttB 1 | tide | AACCTCGTTGCTCGCGGCTTTCGTTCGGCTGCTGTGT |
| attachment | | | | TTCGGTTGCGTCCTAGGCTGTGTTTTGCCTAGAACCG |
| sites | | | | CTACAGGCCACCGGCTGCGAAACCAACCGATGACCT |
| | | | | GCGATTCCAAATGGTGCCCCCGGCGCGATTCGAACG |
| | | | | CGCGGCACCCGCTTTAGGAGAGCGGTGCTCTGTCCC |
| | | | | CTGAGCTACGGAGGCGCGTTTGATATTGTAGCATTA |
| | | | | ATCGCCCTGCTGGCGCGGAACTTGCAAGACGCCTTG |
| | | | | CAGGACGCATAAAAAAGCGATGCGCC |
| MG178 | 7265 | MG178- | nucleo- | ATTGCGGTTTCAACTGAGAAGGACGAGCGCGGAATC |
| recombinases | | 7172 AttL | tide | AACCTCGTTGCTCGCGGCTTTCGTTCGGCTGCTGTGT |
| attachment | | | | TTCGGTTGCGTCCTAGGCTGTGTTTTGCCTAGAACCG |
| sites | | | | CTACAGGCCACCGGCTGCGAAACCAACCGATGACCT |
| | | | | GCGATTCCAAATGGTGCCCCAATCGCATGTCAAAAC |
| | | | | GAACGTCAAACGGGTATCCTTTTGAGACGTTGTACA |
| | | | | CCGAAAACGGAACGCCGATACTCATGCTTGAACATG |
| | | | | GTTTTGGGCTGGTCGTATCACTTAAAGCTTCTTGACG |
| | | | | AACTTGGACATGATGAAAAGGTCGT |
| MG178 | 7266 | MG178- | nucleo- | GATCACGCTTACTTTTGTATCTAAAGTTTGGCTGTAT |
| recombinases | | 7172 AttP 2 | tide | GAAAGCACCGCCGTGGCCGTGATGAACTTTGATTCG |
| attachment | | | | TGCGAAAGCACGCAATATGAGATAGAACTTGCTTTG |
| sites | | | | AAAAAACACGAACGGCCTGATCAACAGGCCGTTCGT |
| | | | | GAAACTTCCCAATGGTGCCCCAATCGCATGTCAAAA |
| | | | | CGAACGTCAAACGGGTATCCTTTTGAGACGTTGTAC |
| | | | | ACCGAAAACGGAACGCCGATACTCATGCTTGAACAT |
| | | | | GGTTTTGGGCTGGTCGTATCACTTAAAGCTTCTTGAC |
| | | | | GAACTTGGACATGATGAAAAGGTCGT |
| MG178 | 7267 | MG178- | nucleo- | GATCACGCTTACTTTTGTATCTAAAGTTTGGCTGTAT |
| recombinases | | 7172 AttP 1 | tide | GAAAGCACCGCCGTGGCCGTGATGAACTTTGATTCG |
| attachment | | | | TGCGAAAGCACGCAATATGAGATAGAACTTGCTTTG |
| sites | | | | AAAAAACACGAACGGCCTGATCAACAGGCCGTTCGT |
| | | | | GAAACTTCCAAATGGTGCCCCAATCGCATGTCAAAA |
| | | | | CGAACGTCAAACGGGTATCCTTTTGAGACGTTGTAC |
| | | | | ACCGAAAACGGAACGCCGATACTCATGCTTGAACAT |
| | | | | GGTTTTGGGCTGGTCGTATCACTTAAAGCTTCTTGAC |
| | | | | GAACTTGGACATGATGAAAAGGTCGT |
| MG178 | 7268 | MG178- | nucleo- | GATCACGCTTACTTTTGTATCTAAAGTTTGGCTGTAT |
| recombinases | | 7172 AttR | tide | GAAAGCACCGCCGTGGCCGTGATGAACTTTGATTCG |
| attachment | | | | TGCGAAAGCACGCAATATGAGATAGAACTTGCTTTG |
| sites | | | | AAAAAACACGAACGGCCTGATCAACAGGCCGTTCGT |
| | | | | GAAACTTCCAAATGGTGCCCCCGGCGCGATTCGAAC |
| | | | | GCGCGGCACCCGCTTTAGGAGAGCGGTGCTCTGTCC |
| | | | | CCTGAGCTACGGAGGCGCGTTTGATATTGTAGCATT |
| | | | | AATCGCCCTGCTGGCGCGGAACTTGCAAGACGCCTT |
| | | | | GCAGGACGCATAAAAAAGCGATGCGCC |
| MG178 | 7269 | MG178- | nucleo- | TTCCCAATGGTGCCCC |
| conserved | | 7172 Core 2 | tide | |
| core | | | | |
| MG178 | 7270 | MG178- | nucleo- | TTCCAAATGGTGCCCC |
| conserved | | 7172 Core 1 | tide | |
| core | | | | |
| MG178 | 7271 | MG178- | nucleo- | ATGGATCGCTACGCCTGGCTTGACAATCCCTGGCCC |
| recombinases | | 7174 AttB | tide | TGGGATTATCAGCCCCAGATGGAGGTATAAGAGATG |
| attachment | | | | TTTGTATATGAAAAGAAGCTCCAGTACCCTGTTAAG |
| sites | | | | ATAAAAAACACAAACCCTGCCCTTGCCAAATTCATT |
| | | | | ATTAGCCAATACGGCGGCCCTGACGGCGAGCTCGGC |
| | | | | GCTTCCCTTCGCTATCTAAGCCAGCGCTACTCAATGC |
| | | | | CATATCCAGAGCTGAAGGGTCTTCTGACGGATATCG |
| | | | | GCACGGAAGAGCTTGGGCATCTTGAGATGATAGGCG |
| | | | | CTATCGTTCATCAGCTGACAAG |
| MG178 | 7272 | MG178- | nucleo- | ATGGATCGCTACGCCTGGCTTGACAATCCCTGGCCC |
| recombinases | | 7174 AttL | tide | TGGGATTATCAGCCCCAGATGGAGGTATAAGAGATG |
| attachment | | | | TTTGTATATGAAAAGAAGCTCCAGTACCCTGTTAAG |
| sites | | | | ATAAAAAACACAAACCCTGCCCTTGCCAAATTCATT |
| | | | | ATTAGCCAATACGGCGGTGCTTATTGTAAAAACTTA |
| | | | | TTATATCTATTCTCCCAATTTTAAGCGCAGCAATCCT |
| | | | | TAATACGGTGCGGCTCGGCGCCGTATTAAGGATCGT |
| | | | | GCAATTACATATCAACGATTCGGCTCCGTGACAACT |
| | | | | GTCGCGATGGCGATAAGTATCC |
| MG178 | 7273 | MG178- | nucleo- | GTGCTTGATGTCCTTGATATAATCAAAAGCGACAAT |
| recombinases | | 7174 AttP | tide | GTATCTGAAGCTGACAAAAACACAGCTCTCAAAGCA |
| attachment | | | | ATTCTCAGTTATATTGTGTACGAAAAGGCTAATAAT |
| sites | | | | CGCCTCGCTTTGTATTTCTATTTTTGATATTATCGGTT |
| | | | | TTCACAATATGGCGGTGCTTATTGTAAAAACTTATTA |
| | | | | TATCTATTCTCCCAATTTTAAGCGCAGCAATCCTTAA |
| | | | | TACGGTGCGGCTCGGCGCCGTATTAAGGATCGTGCA |
| | | | | ATTACATATCAACGATTCGGCTCCGTGACAACTGTC |
| | | | | GCGATGGCGATAAGTATCC |
| MG178 | 7274 | MG178- | nucleo- | GTGCTTGATGTCCTTGATATAATCAAAAGCGACAAT |
| recombinases | | 7174 AttR | tide | GTATCTGAAGCTGACAAAAACACAGCTCTCAAAGCA |
| attachment | | | | ATTCTCAGTTATATTGTGTACGAAAAGGCTAATAAT |
| sites | | | | CGCCTCGCTTTGTATTTCTATTTTTGATATTATCGGTT |
| | | | | TTCACAATATGGCGGCCCTGACGGCGAGCTCGGCGC |
| | | | | TTCCCTTCGCTATCTAAGCCAGCGCTACTCAATGCCA |
| | | | | TATCCAGAGCTGAAGGGTCTTCTGACGGATATCGGC |
| | | | | ACGGAAGAGCTTGGGCATCTTGAGATGATAGGCGCT |
| | | | | ATCGTTCATCAGCTGACAAG |
| MG178 | 7275 | MG178- | nucleo- | CAATATGGCGG |
| conserved | | 7174 Core 1 | tide | |
| core | | | | |
| MG178 | 7276 | MG178- | nucleo- | CAATACGGCGG |
| conserved | | 7174 Core 2 | tide | |
| core | | | | |
| MG178 | 7277 | MG178- | nucleo- | TCCAGGCGGAGCGGGCAAACCCGGTTGGCAACTCGG |
| recombinases | | 7175 AttB | tide | GCGTTAATCAGACGTTCGGCAGGAGGAAAAGAGAC |
| attachment | | | | GGCTCGGTTTCTGCGTATCAACGGGATCGCCAGAAA |
| sites | | | | CGAAAAAAGCCTACAGATGTTGATCTGTAAGCCCTC |
| | | | | AAATTGTTGGTAGCGGGGGCAGGATTTGAACCTACG |
| | | | | ACCTTCGGGTTATGAGCCCGACGAGCTACCAGACTG |
| | | | | CTCCACCCCGCGTCAATTCAGAGTACTATACCGTAA |
| | | | | ATGCTTCCTCGATGCAATCCAACGTTTACTTTGGGTA |
| | | | | ACGAAACAGGCTCTTCGGATCTTCAGATTC |
| MG178 | 7278 | MG178- | nucleo- | TCCAGGCGGAGCGGGCAAACCCGGTTGGCAACTCGG |
| recombinases | | 7175 AttL | tide | GCGTTAATCAGACGTTCGGCAGGAGGAAAAGAGAC |
| attachment | | | | GGCTCGGTTTCTGCGTATCAACGGGATCGCCAGAAA |
| sites | | | | CGAAAAAAGCCTACAGATGTTGATCTGTAAGCCCTC |
| | | | | AAATTGTTGGTAGCGGGGGCAGGATACGTGCGTTAT |
| | | | | CTAACTCCGCTGCGCTGGCGGATATGGCCGCCGACC |
| | | | | TGATCAACCACGCCCGACACGAGCCCCGCCATTGGG |
| | | | | GCTTTTTTTATGCCTGAAAGAAACGGTTGAAGTCTCA |
| | | | | CGTATTAAAGGAATGACGGTCTTTTTGGCC |
| MG178 | 7279 | MG178- | nucleo- | TGGCCGAGCGACTGGAACGGATCGAAGACATCGCC |
| recombinases | | 7175 AttP | tide | GACGCGCGCGAAGCGCTCAGGAGCATTCTAGGGGA |
| attachment | | | | AGATATCAAGCTGGTGCCGGAGAACGGCGTATTGTG |
| sites | | | | GGCAGAACTCAAGGGCGGCTGCGCCGCTTTGAGTCA |
| | | | | GATAACGGTGGTAGCGGGGGCAGGATACGTGCGTTA |
| | | | | TCTAACTCCGCTGCGCTGGCGGATATGGCCGCCGAC |
| | | | | CTGATCAACCACGCCCGACACGAGCCCCGCCATTGG |
| | | | | GGCTTTTTTTATGCCTGAAAGAAACGGTTGAAGTCTC |
| | | | | ACGTATTAAAGGAATGACGGTCTTTTTGGCC |
| MG178 | 7280 | MG178- | nucleo- | TGGCCGAGCGACTGGAACGGATCGAAGACATCGCC |
| recombinases | | 7175 AttR | tide | GACGCGCGCGAAGCGCTCAGGAGCATTCTAGGGGA |
| attachment | | | | AGATATCAAGCTGGTGCCGGAGAACGGCGTATTGTG |
| sites | | | | GGCAGAACTCAAGGGCGGCTGCGCCGCTTTGAGTCA |
| | | | | GATAACGGTGGTAGCGGGGGCAGGATTTGAACCTAC |
| | | | | GACCTTCGGGTTATGAGCCCGACGAGCTACCAGACT |
| | | | | GCTCCACCCCGCGTCAATTCAGAGTACTATACCGTA |
| | | | | AATGCTTCCTCGATGCAATCCAACGTTTACTTTGGGT |
| | | | | AACGAAACAGGCTCTTCGGATCTTCAGATTC |
| MG178 | 7281 | MG178- | nucleo- | TGGTAGCGGGGGCAGGAT |
| conserved | | 7175 Core | tide | |
| core | | | | |
| MG178 | 7282 | MG178- | nucleo- | CGAGTCTCGCGTCGGGAGCCCCATCTGCGGCCGGAA |
| recombinases | | 7176 AttB | tide | TCGCCGCCGCGGCATCCAGAGGCAGCGGATCCCAGT |
| attachment | | | | GCCTCTGTCGGAGGAGCCGATGGGCCTGGTGGCGGA |
| sites | | | | CGATGCTGCGGAACCAGCCGGGGAACGCGGCCGGA |
| | | | | TCGGCCAGGGTCCGCAGGCCGAACCACGCGGCGAC |
| | | | | GAAAGACTCCTGGACGACGTCCTCCGCCTGTTGTAG |
| | | | | GTCACGCAGGAGAGCCAGGGCGTAGCCGAAGGCCA |
| | | | | TCTGCTGAAAGCGCCGCGTCACCTCCGCGAACGCGT |
| | | | | CCAGGTCGCCCTGCCTCGCC |
| MG178 | 7283 | MG178- | nucleo- | CGAGTCTCGCGTCGGGAGCCCCATCTGCGGCCGGAA |
| recombinases | | 7176 AttL | tide | TCGCCGCCGCGGCATCCAGAGGCAGCGGATCCCAGT |
| attachment | | | | GCCTCTGTCGGAGGAGCCGATGGGCCTGGTGGCGGA |
| sites | | | | CGATGCTGCGGAACCAGCCGGGGAACGCGGCCGGA |
| | | | | TCGGCCAGGGTCAGGAGACTCACCCGCGTGAACCCG |
| | | | | TCCAAGGTGGCCAAGCGCTCGATCGGGAAGGATCCC |
| | | | | ACAAGTTCCCTAGCGTGGTTCGGGGCCAGCGCGCTC |
| | | | | GACCTCGTTGTGTCGATCAGTGGTCAGGTACACAGA |
| | | | | CGTGCCGCATAGTGTTGC |
| MG178 | 7284 | MG178- | nucleo- | TGAAGAAGGTCTTGCCGAGCAAGTTGATTCTGACTC |
| recombinases | | 7176 AttP | tide | CCCATCCCGAGAGTCGGTCCTACTCGTTCGCTGGCG |
| attachment | | | | ACGGAGCCATCGGCCCTCTGCTGGGACAGGTGGTCT |
| sites | | | | CGTCTCAGATGGGGAAGGGCCAGGGTTCAAGTGGG |
| | | | | GAAGGTCGGGTCAGGAGACTCACCCGCGTGAACCCG |
| | | | | TCCAAGGTGGCCAAGCGCTCGATCGGGAAGGATCCC |
| | | | | ACAAGTTCCCTAGCGTGGTTCGGGGCCAGCGCGCTC |
| | | | | GACCTCGTTGTGTCGATCAGTGGTCAGGTACACAGA |
| | | | | CGTGCCGCATAGTGTTGC |
| MG178 | 7285 | MG178- | nucleo- | TGAAGAAGGTCTTGCCGAGCAAGTTGATTCTGACTC |
| recombinases | | 7176 AttR | tide | CCCATCCCGAGAGTCGGTCCTACTCGTTCGCTGGCG |
| attachment | | | | ACGGAGCCATCGGCCCTCTGCTGGGACAGGTGGTCT |
| sites | | | | CGTCTCAGATGGGGAAGGGCCAGGGTTCAAGTGGG |
| | | | | GAAGGTCGGGTCCGCAGGCCGAACCACGCGGCGAC |
| | | | | GAAAGACTCCTGGACGACGTCCTCCGCCTGTTGTAG |
| | | | | GTCACGCAGGAGAGCCAGGGCGTAGCCGAAGGCCA |
| | | | | TCTGCTGAAAGCGCCGCGTCACCTCCGCGAACGCGT |
| | | | | CCAGGTCGCCCTGCCTCGCC |
| MG178 | | MG178- | nucleo- | GGGTC |
| conserved | | 7176 Core | tide | |
| core | | | | |
| MG178 | 7287 | MG178- | nucleo- | TTTAACTTCTTTATCCTCTGTTTCATCAATCACTGCAT |
| recombinases | | 7178 AttB | tide | TCATAATGATATTTTCATTGAATGTACTTGCCGTTTC |
| attachment | | | | TGCAACTGGCATAGAATACTCCCAATTTAATGGTCT |
| sites | | | | ATGACTTTCAATGTTTAATCCATGATATGCATGTCCA |
| | | | | AGTTCATGAGCCAAAGTAACTACGTCTCCAAGTCCT |
| | | | | CCATCAAAATTAGTTAATACGCGTGATTGTTTCGCA |
| | | | | AACGGCATATTGCAGCAGAAAGCTCCACCAACTTTT |
| | | | | CCTTTATGTGGATAAAAATCAATCCAGTTATTGTCAA |
| | | | | ATGCTTCTTCCATCA |
| MG178 | 7288 | MG178- | nucleo- | TTTAACTTCTTTATCCTCTGTTTCATCAATCACTGCAT |
| recombinases | | 7178 AttL | tide | TCATAATGATATTTTCATTGAATGTACTTGCCGTTTC |
| attachment | | | | TGCAACTGGCATAGAATACTCCCAATTTAATGGTCT |
| sites | | | | ATGACTTTCAATGTTTAATCCATGATATGCATGTCCA |
| | | | | AGTTCATGAGAGCGTGGATGTATACGCAAAATAAAT |
| | | | | AAGCGTACTGTTTAGGAAAATAAAAAAATAGCCCTG |
| | | | | TTTCAACAGAGCTACCATAGATTAATGTCAAAATGT |
| | | | | ATATTAACCTCAAAGCTTTTCCATTATAGCATAAAA |
| | | | | AAAAGAACCTATGGAA |
| MG178 | 7289 | MG178- | nucleo- | ATTGAAATGCTAAAGGATGATTCTATATCCGCAAAA |
| recombinases | | 7178 AttP | tide | ATAAAAAATAATTTCCTAAAGGAAATCATACAAGTT |
| attachment | | | | ATTTATTATAAAAAAGATAAATTAGGAAATATTACA |
| sites | | | | TTAGATATTTATTTACGCTAGTAGCGAGCATTCACGG |
| | | | | ACTGATTCATGAGAGCGTGGATGTATACGCAAAATA |
| | | | | AATAAGCGTACTGTTTAGGAAAATAAAAAAATAGCC |
| | | | | CTGTTTCAACAGAGCTACCATAGATTAATGTCAAAA |
| | | | | TGTATATTAACCTCAAAGCTTTTCCATTATAGCATAA |
| | | | | AAAAAAGAACCTATGGAA |
| MG178 | 7290 | MG178- | nucleo- | ATTGAAATGCTAAAGGATGATTCTATATCCGCAAAA |
| recombinases | | 7178 AttR | tide | ATAAAAAATAATTTCCTAAAGGAAATCATACAAGTT |
| attachment | | | | ATTTATTATAAAAAAGATAAATTAGGAAATATTACA |
| sites | | | | TTAGATATTTATTTACGCTAGTAGCGAGCATTCACGG |
| | | | | ACTGATTCATGAGCCAAAGTAACTACGTCTCCAAGT |
| | | | | CCTCCATCAAAATTAGTTAATACGCGTGATTGTTTCG |
| | | | | CAAACGGCATATTGCAGCAGAAAGCTCCACCAACTT |
| | | | | TTCCTTTATGTGGATAAAAATCAATCCAGTTATTGTC |
| | | | | AAATGCTTCTTCCATCA |
| MG178 | | MG178- | nucleo- | TTCATGAG |
| conserved | | 7178 Core | tide | |
| core | | | | |
| MG178 | 7292 | MG178- | nucleo- | AAGGTAAGCTCGCCAGTCCTCCGACGCGCTGCGCGC |
| recombinases | | 7179 AttB | tide | TATGGAGGACATCCTTCCCCTGCGGGTACTCCTGTCT |
| attachment | | | | GCGCTCATCCTTTTCACTCGCTTTGCTCGCGGAAAAG |
| sites | | | | AATGGCTTGCCATCCGTAGCTCGACTTCGTCGAGCG |
| | | | | AAGGATGGTGGGCGTAACAGAACTCGAATCTGTGAC |
| | | | | CTTCACGATGTCAACGTGACGCTCTAACCAACTGAG |
| | | | | CTATACGCCCTTGCGGACTTGAAACACAATCCGGAC |
| | | | | CGGCGGGCGGCCGGATTCTTTTGCGGTTGCGGCGTT |
| | | | | TTACATAACCACCGACAAC |
| MG178 | 7293 | MG178- | nucleo- | AAGGTAAGCTCGCCAGTCCTCCGACGCGCTGCGCGC |
| recombinases | | 7179 AttL | tide | TATGGAGGACATCCTTCCCCTGCGGGTACTCCTGTCT |
| attachment | | | | GCGCTCATCCTTTTCACTCGCTTTGCTCGCGGAAAAG |
| sites | | | | AATGGCTTGCCATCCGTAGCTCGACTTCGTCGAGCG |
| | | | | AAGGATGGTGGGCCAAATCAAACTTACTCATAACAA |
| | | | | GATTTTTGGAATTTAAATGCGGGAGGCGGGGCCAGC |
| | | | | TTCGCGCATCGCAAGTATGACATTTCAAAAAAAAGG |
| | | | | CAAAAAATTCCCGGCCGAATTTTGGCAGCGGGGAGA |
| | | | | GCTGCGCCGCCTCTGATCC |
| MG178 | 7294 | MG178- | nucleo- | AGAATGGACAAAAAAAATTGCATCTGGTGAAGCTG |
| recombinases | | 7179 AttP | tide | ATTTTGCTACCAAACGCAATTTAATCATGTCGGTAAT |
| attachment | | | | CGAATCTCTTGAATGCGTCAAACGATCAGATACTCA |
| sites | | | | AATAGGCTTCAAGATGAAACTTGTTATGAGTAGTAG |
| | | | | TTGTAAATGGTGGGCCAAATCAAACTTACTCATAAC |
| | | | | AAGATTTTTGGAATTTAAATGCGGGAGGCGGGGCCA |
| | | | | GCTTCGCGCATCGCAAGTATGACATTTCAAAAAAAA |
| | | | | GGCAAAAAATTCCCGGCCGAATTTTGGCAGCGGGGA |
| | | | | GAGCTGCGCCGCCTCTGATCC |
| MG178 | 7295 | MG178- | nucleo- | AGAATGGACAAAAAAAATTGCATCTGGTGAAGCTG |
| recombinases | | 7179 AttR | tide | ATTTTGCTACCAAACGCAATTTAATCATGTCGGTAAT |
| attachment | | | | CGAATCTCTTGAATGCGTCAAACGATCAGATACTCA |
| sites | | | | AATAGGCTTCAAGATGAAACTTGTTATGAGTAGTAG |
| | | | | TTGTAAATGGTGGGCGTAACAGAACTCGAATCTGTG |
| | | | | ACCTTCACGATGTCAACGTGACGCTCTAACCAACTG |
| | | | | AGCTATACGCCCTTGCGGACTTGAAACACAATCCGG |
| | | | | ACCGGCGGGCGGCCGGATTCTTTTGCGGTTGCGGCG |
| | | | | TTTTACATAACCACCGACAAC |
| MG178 | | MG178- | nucleo- | ATGGTGGGC |
| conserved | | 7179 Core | tide | |
| core | | | | |
| MG178 | 7297 | MG178- | nucleo- | TAAAAATATGTCTTGACCTGAACGATATTTGCATAT |
| recombinases | | 7180 AttB | tide | ATACATTCGTTAGTTTTTGGCAGATTGCTGCTGAAAA |
| attachment | | | | GTCCTAACGGTCCCATCGTCTAATGGTTAGGACACC |
| sites | | | | ACCCTTTCACGGTGGCGATACGAGTTCGAATCTCGTT |
| | | | | GGGATCACCAATGCAAAGAAACCTCCCTTGCGGAGG |
| | | | | TTTCTTTGTATTGATAAAGAGCCCAGGAGAGATTTG |
| | | | | AACGAGTAGAGTTCGGAGCGGGTAGTTGGGGAGCG |
| | | | | CGATTAAAAGAAGCGCGGGCCGTACGTCGCGAAAG |
| | | | | GGGCCCGCGGTGGGAGCCGTGGGA |
| MG178 | 7298 | MG178- | nucleo- | TAAAAATATGTCTTGACCTGAACGATATTTGCATAT |
| recombinases | | 7180 AttL | tide | ATACATTCGTTAGTTTTTGGCAGATTGCTGCTGAAAA |
| attachment | | | | GTCCTAACGGTCCCATCGTCTAATGGTTAGGACACC |
| sites | | | | ACCCTTTCACGGTGGCGATACGAGTTCGAATCTCGTT |
| | | | | GGGATCACCAATGCAAGCGGCAGGTATAAAAACTG |
| | | | | CCGTTTTTCTTTTATAAATCAAGCACTTAGCCGAGTT |
| | | | | CGAATGTTGTAAATTTGAAAATGTCATTTTGGGAGA |
| | | | | ATTTTCCGAACTCGTTTGACGATAATCCTTTATTTTT |
| | | | | CAATGGTTTGTCTGAGTTAGA |
| MG178 | 7299 | MG178- | nucleo- | GAAAAGTTGAAGGAACAGATATTCCCGAAACCCTTA |
| recombinases | | 7180 AttP | tide | CGCTTAATAGTGATAATGAAATTATTAAAATTGAAG |
| attachment | | | | ATATGTTGAAAGAAATTGAAAAGTTTTGGGATAATA |
| sites | | | | AAATTTTATCATCTAAATAGCTCGTGGATTGTGAGTT |
| | | | | AAGCTTCACCAATACAAGCGGCAGGTATAAAAACTG |
| | | | | CCGTTTTTCTTTTATAAATCAAGCACTTAGCCGAGTT |
| | | | | CGAATGTTGTAAATTTGAAAATGTCATTTTGGGAGA |
| | | | | ATTTTCCGAACTCGTTTGACGATAATCCTTTATTTTT |
| | | | | CAATGGTTTGTCTGAGTTAGA |
| MG178 | 7300 | MG178- | nucleo- | GAAAAGTTGAAGGAACAGATATTCCCGAAACCCTTA |
| recombinases | | 7180 AttR | tide | CGCTTAATAGTGATAATGAAATTATTAAAATTGAAG |
| attachment | | | | ATATGTTGAAAGAAATTGAAAAGTTTTGGGATAATA |
| sites | | | | AAATTTTATCATCTAAATAGCTCGTGGATTGTGAGTT |
| | | | | AAGCTTCACCAATACAAAGAAACCTCCCTTGCGGAG |
| | | | | GTTTCTTTGTATTGATAAAGAGCCCAGGAGAGATTT |
| | | | | GAACGAGTAGAGTTCGGAGCGGGTAGTTGGGGAGC |
| | | | | GCGATTAAAAGAAGCGCGGGCCGTACGTCGCGAAA |
| | | | | GGGGCCCGCGGTGGGAGCCGTGGGA |
| MG178 | 7301 | MG178- | nucleo- | TCACCAATGCAA |
| conserved | | 7180 Core | tide | |
| core | | | | |
| MG178 | 7302 | MG178- | nucleo- | TTAAGAAAGCTTAAGAGGCCAGAAGCTCCTTACAGT |
| recombinases | | 7181 AttB | tide | TGGACCCATCTGAACCGAATTTTGCTAAAAGCAGAC |
| attachment | | | | GAAAAAACGGGAACGCCGTTCTTTTGCTCCCTAAAA |
| sites | | | | GATCAAGCCTCCTGTCCATGGACAGGAGGCTTGCAA |
| | | | | GTTATACAGTTGGTGGGCCCACTAGGATTCGAACCT |
| | | | | AGGACCAACCGGTTATGAGCCGGGGGCTCTACCGCT |
| | | | | GAGCTATAGGCCCAATGTAGGAATTATACCCCAGAA |
| | | | | AAAGATGCGCTGTCAACGTTTCTTACTCGAGGAATT |
| | | | | CCTTGAGGGGTTTGCTCCGTTTCG |
| MG178 | 7303 | MG178- | nucleo- | TTAAGAAAGCTTAAGAGGCCAGAAGCTCCTTACAGT |
| recombinases | | 7181 AttL | tide | TGGACCCATCTGAACCGAATTTTGCTAAAAGCAGAC |
| attachment | | | | GAAAAAACGGGAACGCCGTTCTTTTGCTCCCTAAAA |
| sites | | | | GATCAAGCCTCCTGTCCATGGACAGGAGGCTTGCAA |
| | | | | GTTATACAGTTGGTGGGCTATCTAACCCTGAGTGCG |
| | | | | AACCTAAAAGTAAAGATAGGCCGCGGCTGGTTTTCC |
| | | | | GTATCCTACCCCATCAGTACACAGGGGATTTGATAT |
| | | | | TTTATTCTAGGAGAAGGCAATTACTTTTGACCTGACT |
| | | | | TTTGAAGAGCTAGCCGAATGCCG |
| MG178 | 7304 | MG178- | nucleo- | CAGATGTACCGGAACAATTTACTTGATGTCCTGGTT |
| recombinases | | 7181 AttP | tide | AGTCGTGTTGTCCTTTACCCCAACAGGGCAGAAGTA |
| attachment | | | | TTTTATCGCTACAAAAAAGAACTCCCTTCCCTCCCTA |
| sites | | | | ATCCAGTTATCATCAGGGAAGAAAGGGGTTCGAATG |
| | | | | GCACGCAGTTGGTGGGCTATCTAACCCTGAGTGCGA |
| | | | | ACCTAAAAGTAAAGATAGGCCGCGGCTGGTTTTCCG |
| | | | | TATCCTACCCCATCAGTACACAGGGGATTTGATATTT |
| | | | | TATTCTAGGAGAAGGCAATTACTTTTGACCTGACTTT |
| | | | | TGAAGAGCTAGCCGAATGCCG |
| MG178 | 7305 | MG178- | nucleo- | CAGATGTACCGGAACAATTTACTTGATGTCCTGGTT |
| recombinases | | 7181 AttR | tide | AGTCGTGTTGTCCTTTACCCCAACAGGGCAGAAGTA |
| attachment | | | | TTTTATCGCTACAAAAAAGAACTCCCTTCCCTCCCTA |
| sites | | | | ATCCAGTTATCATCAGGGAAGAAAGGGGTTCGAATG |
| | | | | GCACGCAGTTGGTGGGCCCACTAGGATTCGAACCTA |
| | | | | GGACCAACCGGTTATGAGCCGGGGGCTCTACCGCTG |
| | | | | AGCTATAGGCCCAATGTAGGAATTATACCCCAGAAA |
| | | | | AAGATGCGCTGTCAACGTTTCTTACTCGAGGAATTC |
| | | | | CTTGAGGGGTTTGCTCCGTTTCG |
| MG178 | 7306 | MG178- | nucleo- | CAGTTGGTGGGC |
| conserved | | 7181 Core | tide | |
| core | | | | |
| MG178 | 7307 | MG178- | nucleo- | ATTTGTATTGAAATAAAGTACAGCAAAGAAAAGAA |
| recombinases | | 7182 AttB | tide | GATTTTTTGATATAAATACTGATATCGAATAAAAAA |
| attachment | | | | GAGAGTACAAGGTTATAGTCCTTGTACTCTCTTTTTT |
| sites | | | | ATTCGATAACAAATACGAACTTATTCTTCGTCTCCGT |
| | | | | TTTCGTCTTCCTTCATATTGTGGAACACATTCTGAAC |
| | | | | GTCTTCGTCCTCTTCCAACTTTTCAATCAATTTTTCAA |
| | | | | TCGATTCACGCTGCTCGGGAGTCACTTCTTTCACATC |
| | | | | GTTCGGAATACGGACAAATTCGCTACTGGTGATTTC |
| | | | | ATATCCATTCTCTTCCAG |
| MG178 | 7308 | MG178- | nucleo- | ATTTGTATTGAAATAAAGTACAGCAAAGAAAAGAA |
| recombinases | | 7182 AttL | tide | GATTTTTTGATATAAATACTGATATCGAATAAAAAA |
| attachment | | | | GAGAGTACAAGGTTATAGTCCTTGTACTCTCTTTTTT |
| sites | | | | ATTCGATAACAAATACGAACTTATTCTTCGTCTCCGT |
| | | | | TTTCGTCTTCCTTCATTACAATGGAAAAGTTTGCAAT |
| | | | | CTTAATACCTTCATTGTATATTTGCATACAAATAAAT |
| | | | | GATATTCAAGATGAAAAAAGCAGCTTTATTATTAAG |
| | | | | ATGTAGTACTGATTCACAGGATTATGATAGGCAGCA |
| | | | | AAGAGATTTACTACCTACGG |
| MG178 | 7309 | MG178- | nucleo- | TGGTAAGTTCCTAAAGTCCAAAACTCCATTACTACA |
| recombinases | | 7182 AttP | tide | AAAAACAAAAGGAAGCACAAATCAGCCTCCTTTTGT |
| attachment | | | | TAAATTATACTAAAATATAATATACTAATATTTATAA |
| sites | | | | TATATTGATATTCAAATTATTCTTCATTGTCATTAAT |
| | | | | TCCATCTTCCTTCATTACAATGGAAAAGTTTGCAATC |
| | | | | TTAATACCTTCATTGTATATTTGCATACAAATAAATG |
| | | | | ATATTCAAGATGAAAAAAGCAGCTTTATTATTAAGA |
| | | | | TGTAGTACTGATTCACAGGATTATGATAGGCAGCAA |
| | | | | AGAGATTTACTACCTACGG |
| MG178 | 7310 | MG178- | nucleo- | TGGTAAGTTCCTAAAGTCCAAAACTCCATTACTACA |
| recombinases | | 7182 AttR | tide | AAAAACAAAAGGAAGCACAAATCAGCCTCCTTTTGT |
| attachment | | | | TAAATTATACTAAAATATAATATACTAATATTTATAA |
| sites | | | | TATATTGATATTCAAATTATTCTTCATTGTCATTAAT |
| | | | | TCCATCTTCCTTCATATTGTGGAACACATTCTGAACG |
| | | | | TCTTCGTCCTCTTCCAACTTTTCAATCAATTTTTCAAT |
| | | | | CGATTCACGCTGCTCGGGAGTCACTTCTTTCACATCG |
| | | | | TTCGGAATACGGACAAATTCGCTACTGGTGATTTCA |
| | | | | TATCCATTCTCTTCCAG |
| MG178 | 7311 | MG178- | nucleo- | TCTTCCTTCAT |
| conserved | | 7182 Core | tide | |
| core | | | | |
| MG178 | 7312 | MG178- | nucleo- | GGCTAAGAAGGATGGTGAGATAAAAGATGCCCTCTC |
| recombinases | | 7183 AttB | tide | CTATATCAGGGAAACCGGCGCAGAGTTTGACCTGGA |
| attachment | | | | CCTCCCAGCCAAGGGTGTTCCGACCAAGGGCCTCAG |
| sites | | | | ATCAGACCGGTTAGGGGTTAAGAAGTCAGAGGAGG |
| | | | | CGGGCCGATGATGTTCAGATTCGCCTACCCGGTCGT |
| | | | | GCTCCTGCTTCTCCTTGTTGTGGCGGGATGGCTTTTC |
| | | | | TTTGCCCTATGGAGGAAGCCTTCCGGCATCACCTATT |
| | | | | CCATGACCTCAAAGATGGCTGGCCTTGCCGGGGGTG |
| | | | | TGAACCAGGTCCTGGCGAGGC |
| MG178 | 7313 | MG178- | nucleo- | GGCTAAGAAGGATGGTGAGATAAAAGATGCCCTCTC |
| recombinases | | 7183 AttL | tide | CTATATCAGGGAAACCGGCGCAGAGTTTGACCTGGA |
| attachment | | | | CCTCCCAGCCAAGGGTGTTCCGACCAAGGGCCTCAG |
| sites | | | | ATCAGACCGGTTAGGGGTTAAGAAGTCAGAGGAGG |
| | | | | CGGGCCGATGATGTTCATGTTGTAGACACTTTACAA |
| | | | | CTATCAACACATAATCAAAAATAATCATTGACAAGG |
| | | | | CATTTTCAAAGATGGTATAAGGTGAAAATGAAAGCA |
| | | | | AATCGAAGCTGTTAGTAGTAATTGGCTGATTATCGA |
| | | | | AGGAAATGAGGACATTTACTCTG |
| MG178 | 7314 | MG178- | nucleo- | AGGAGATCCTAATTATGTGATCTCATTCAAGAGCGG |
| recombinases | | 7183 AttP | tide | TGTCATTAGATCTCTATTCCCTTACAAAGATAAGAA |
| attachment | | | | GTTATCATGGCAATTAGACAAGACAAAGAAACAACT |
| sites | | | | GGACATCTATTAATGATAACAGCAATGGGTTAAATA |
| | | | | GACTATATGATGTTCATGTTGTAGACACTTTACAACT |
| | | | | ATCAACACATAATCAAAAATAATCATTGACAAGGCA |
| | | | | TTTTCAAAGATGGTATAAGGTGAAAATGAAAGCAAA |
| | | | | TCGAAGCTGTTAGTAGTAATTGGCTGATTATCGAAG |
| | | | | GAAATGAGGACATTTACTCTG |
| MG178 | 7315 | MG178- | nucleo- | AGGAGATCCTAATTATGTGATCTCATTCAAGAGCGG |
| recombinases | | 7183 AttR | tide | TGTCATTAGATCTCTATTCCCTTACAAAGATAAGAA |
| attachment | | | | GTTATCATGGCAATTAGACAAGACAAAGAAACAACT |
| sites | | | | GGACATCTATTAATGATAACAGCAATGGGTTAAATA |
| | | | | GACTATATGATGTTCAGATTCGCCTACCCGGTCGTGC |
| | | | | TCCTGCTTCTCCTTGTTGTGGCGGGATGGCTTTTCTTT |
| | | | | GCCCTATGGAGGAAGCCTTCCGGCATCACCTATTCC |
| | | | | ATGACCTCAAAGATGGCTGGCCTTGCCGGGGGTGTG |
| | | | | AACCAGGTCCTGGCGAGGC |
| MG178 | 7316 | MG178- | nucleo- | ATGATGTTCA |
| conserved | | 7183 Core | tide | |
| core | | | | |
| MG178 | 7317 | MG178- | nucleo- | TGGAACGGCACGAAGCGCCTTGGGAGGATTCAAGGT |
| recombinases | | 7184 AttB | tide | CATGGGGGGCCTGGTCTCGGCCAATATGACCTATAA |
| attachment | | | | TGCCAAAGAAAACAAATCCGTCATCGACAGCTCCAA |
| sites | | | | TAAACCCCGCGGCGGGTTCGGCGGCGGCCTGGGATA |
| | | | | TGAAAGGGGATCCCGACTCGGGTTTGAAATCGATTT |
| | | | | GCTCTATCTCCCGAAAGGGGCGCTTTTCAAGGGGGA |
| | | | | TTTATCCGGGATCACCTTTGATTTGAAGTTCAGCATC |
| | | | | GACGAAGTGAGCGTCCCCATCCTTCTCAAGCTGAAT |
| | | | | GTCCTCAGGAACAAAGTGC |
| MG178 | 7318 | MG178- | nucleo- | TGGAACGGCACGAAGCGCCTTGGGAGGATTCAAGGT |
| recombinases | | 7184 AttL | tide | CATGGGGGGCCTGGTCTCGGCCAATATGACCTATAA |
| attachment | | | | TGCCAAAGAAAACAAATCCGTCATCGACAGCTCCAA |
| sites | | | | TAAACCCCGCGGCGGGTTCGGCGGCGGCCTGGGATA |
| | | | | TGAAAGGGGATCCCAAAATATATGAACTTATAAATG |
| | | | | GGTTTGTAACCTTCCTCAAGCATTTCAGCGTATCCCC |
| | | | | TCAACTCCAAAACCTTTGTCAGATCAGAGGGTAAAA |
| | | | | AATGCCTACATCCCTGAGAAAGAGAATTGACCGGGA |
| | | | | CATGGAGCAGAAGGAAGAA |
| MG178 | 7319 | MG178- | nucleo- | AAATCCTTGCTCTCGTTCTTGATAAGGTTTTTCTAAG |
| recombinases | | 7184 AttP | tide | AGACGGCAAAGCACAATTCCACTGGAAACCTCCGTT |
| attachment | | | | CGACTTTCTATTTTCGATAAACAAAATCTTAGAAGA |
| sites | | | | AGAAGAACCCCAGGCAGGTTCTTTTATAAGGTCGAG |
| | | | | TGAAAGGGATCCCAAAATATATGAACTTATAAATGG |
| | | | | GTTTGTAACCTTCCTCAAGCATTTCAGCGTATCCCCT |
| | | | | CAACTCCAAAACCTTTGTCAGATCAGAGGGTAAAAA |
| | | | | ATGCCTACATCCCTGAGAAAGAGAATTGACCGGGAC |
| | | | | ATGGAGCAGAAGGAAGAA |
| MG178 | 7320 | MG178- | nucleo- | AAATCCTTGCTCTCGTTCTTGATAAGGTTTTTCTAAG |
| recombinases | | 7184 AttR | tide | AGACGGCAAAGCACAATTCCACTGGAAACCTCCGTT |
| attachment | | | | CGACTTTCTATTTTCGATAAACAAAATCTTAGAAGA |
| sites | | | | AGAAGAACCCCAGGCAGGTTCTTTTATAAGGTCGAG |
| | | | | TGAAAGGGATCCCGACTCGGGTTTGAAATCGATTTG |
| | | | | CTCTATCTCCCGAAAGGGGCGCTTTTCAAGGGGGAT |
| | | | | TTATCCGGGATCACCTTTGATTTGAAGTTCAGCATCG |
| | | | | ACGAAGTGAGCGTCCCCATCCTTCTCAAGCTGAATG |
| | | | | TCCTCAGGAACAAAGTGC |
| MG178 | | MG178- | nucleo- | GGGATCCC |
| conserved | | 7184 Core | tide | |
| core | | | | |
| MG178 | 7322 | MG178- | nucleo- | GGAAAATCTAATGCCTTCAGAGAACTCTGCAAAATT |
| recombinases | | 7185 AttB | tide | TCGGCCTGAAAAGTTCTCTATGGAGCTCGTAGAAAT |
| attachment | | | | GGTCCAGGTGCAAAAACCTCGCGATTTGGCGGGCTT |
| sites | | | | TCCGGCCAAACTTATGGGCCGCACGTTTCGCTGAGG |
| | | | | ACTGTTTGGTAGCGGGGGAGGGACTCGAACCCCCGA |
| | | | | CACGCGGATTATGATTCCGCTGCTCTAACCAGCTGA |
| | | | | GCTACCCCGCCGCCACCAGCCCGGCGAAACCGGGCA |
| | | | | TTTCAACCAACCATATAAGGGGTTGGGCGCCGGTTC |
| | | | | TAAAGGCGTGCGAGCCGGTGTCAA |
| MG178 | 7323 | MG178- | nucleo- | GGAAAATCTAATGCCTTCAGAGAACTCTGCAAAATT |
| recombinases | | 7185 AttL | tide | TCGGCCTGAAAAGTTCTCTATGGAGCTCGTAGAAAT |
| attachment | | | | GGTCCAGGTGCAAAAACCTCGCGATTTGGCGGGCTT |
| sites | | | | TCCGGCCAAACTTATGGGCCGCACGTTTCGCTGAGG |
| | | | | ACTGTTTGGTAGCGGGGGCTCGTCTCATTCAATCCCA |
| | | | | CCGACTGGCCAAGTGATACCCTTTAGGCTGACTTGC |
| | | | | CGGGGTCCGCTGGCGGCATGACCTACTGCCACTTCT |
| | | | | CCATGCGAGTAACTGCCGCCGCGGGCACCACGATGG |
| | | | | TCTTGCGGTCAAAGTAGAATACT |
| MG178 | 7324 | MG178- | nucleo- | GGCCATCCGCGAGCTAGTGGAGACGGTTACCGTCAG |
| recombinases | | 7185 AttP | tide | GCGTGACCCGAGCCGCCGCGGTGGTGTTGAAGTGGA |
| attachment | | | | AATATCCGGCCGCCTCGCGGCGCTCTTGAATGCGCC |
| sites | | | | AGTGTACCCAGGCCATTTGCGTTCCCCTGTCGGTGG |
| | | | | GAACGCTGGTAGCGGGGGCTCGTCTCATTCAATCCC |
| | | | | ACCGACTGGCCAAGTGATACCCTTTAGGCTGACTTG |
| | | | | CCGGGGTCCGCTGGCGGCATGACCTACTGCCACTTC |
| | | | | TCCATGCGAGTAACTGCCGCCGCGGGCACCACGATG |
| | | | | GTCTTGCGGTCAAAGTAGAATACT |
| MG178 | 7325 | MG178- | nucleo- | GGCCATCCGCGAGCTAGTGGAGACGGTTACCGTCAG |
| recombinases | | 7185 AttR | tide | GCGTGACCCGAGCCGCCGCGGTGGTGTTGAAGTGGA |
| attachment | | | | AATATCCGGCCGCCTCGCGGCGCTCTTGAATGCGCC |
| sites | | | | AGTGTACCCAGGCCATTTGCGTTCCCCTGTCGGTGG |
| | | | | GAACGCTGGTAGCGGGGGAGGGACTCGAACCCCCG |
| | | | | ACACGCGGATTATGATTCCGCTGCTCTAACCAGCTG |
| | | | | AGCTACCCCGCCGCCACCAGCCCGGCGAAACCGGGC |
| | | | | ATTTCAACCAACCATATAAGGGGTTGGGCGCCGGTT |
| | | | | CTAAAGGCGTGCGAGCCGGTGTCAA |
| MG178 | 7326 | MG178- | nucleo- | TGGTAGCGGGGG |
| conserved | | 7185 Core | tide | |
| core | | | | |
| MG178 | 7327 | MG178- | nucleo- | ATGACGCCGTCGGCGAGCGCGTCGGGAGCCAGGTAC |
| recombinases | | 7186 AttB | tide | ACGTCGACGGTGCGACCGAGCGCGACATCGACCGTG |
| attachment | | | | CGGACGTCGCCGGCGGCGACCGCCTGGCCCGCCACG |
| sites | | | | ATCGTGCGGGCAGCGGCGAGCACCGGAACCGTCTGA |
| | | | | CGCGAGGCCGAGACGACGAACCACACGCCCGCGAT |
| | | | | CGACGCGACGACCAGCACCACGCCGATGAGGAATC |
| | | | | GGGCGTCGGACCAGAACGGCTTCGGGCGTGGTCGGG |
| | | | | AGGCGTCGATCGCGGTCATGCCAACCATCGTGACCC |
| | | | | AGGCCGCGGAGTGCCCCTC |
| MG178 | 7328 | MG178- | nucleo- | ATGACGCCGTCGGCGAGCGCGTCGGGAGCCAGGTAC |
| recombinases | | 7186 AttL | tide | ACGTCGACGGTGCGACCGAGCGCGACATCGACCGTG |
| attachment | | | | CGGACGTCGCCGGCGGCGACCGCCTGGCCCGCCACG |
| sites | | | | ATCGTGCGGGCAGCGGCGAGCACCGGAACCGTCTGA |
| | | | | CGCGAGGCCGACCCTATGGTGTAATTACCACCGTGA |
| | | | | GGGCAGCGACCTACGAGCGGATCTCCCAAGACCGG |
| | | | | GAATCGACCGAGCACGGCGTTGACAACCAACGGTCG |
| | | | | GCCAATCTCGCCTTGGCCGCAAGGCTCGGGTTCGAT |
| | | | | GTGGTCTCGGACTACCGC |
| MG178 | 7329 | MG178- | nucleo- | CGATCGTCTCCGCACTGGCCGCAAGCGTGCCCACTG |
| recombinases | | 7186 AttP | tide | TAATGGAGGACATCGCCCGACCGCCCAGCGCATACT |
| attachment | | | | TCGTACGTTGCGAGCATCTCCAGTGGCAGGAGCCGA |
| sites | | | | TTCACATCGAGTATCTGTAGCCGGGGTGCCTATTGC |
| | | | | GCCATTGCCGACCCTATGGTGTAATTACCACCGTGA |
| | | | | GGGCAGCGACCTACGAGCGGATCTCCCAAGACCGG |
| | | | | GAATCGACCGAGCACGGCGTTGACAACCAACGGTCG |
| | | | | GCCAATCTCGCCTTGGCCGCAAGGCTCGGGTTCGAT |
| | | | | GTGGTCTCGGACTACCGC |
| MG178 | 7330 | MG178- | nucleo- | CGATCGTCTCCGCACTGGCCGCAAGCGTGCCCACTG |
| recombinases | | 7186 AttR | tide | TAATGGAGGACATCGCCCGACCGCCCAGCGCATACT |
| attachment | | | | TCGTACGTTGCGAGCATCTCCAGTGGCAGGAGCCGA |
| sites | | | | TTCACATCGAGTATCTGTAGCCGGGGTGCCTATTGC |
| | | | | GCCATTGCCGAGACGACGAACCACACGCCCGCGATC |
| | | | | GACGCGACGACCAGCACCACGCCGATGAGGAATCG |
| | | | | GGCGTCGGACCAGAACGGCTTCGGGCGTGGTCGGGA |
| | | | | GGCGTCGATCGCGGTCATGCCAACCATCGTGACCCA |
| | | | | GGCCGCGGAGTGCCCCTC |
| MG178 | | MG178- | nucleo- | GCCGA |
| conserved | | 7186 Core | tide | |
| core | | | | |
| MG178 | 7332 | MG178- | nucleo- | CCAAGCGCCGACCCAGCATGCCGGAACTAGCCAATG |
| recombinases | | 7187 AttB | tide | GAATAATGCTATAGATCTAAAATGAGAAATAGCCAA |
| attachment | | | | AGTTTTGGGCTCGAACAAGAAATGGGATAATAGAAG |
| sites | | | | ATTTTGTATACAAAAAAAGCCCCAATTAGGGGCTAA |
| | | | | ATCAATAAATGGTGGACCGTCGGGGACTCGAACCCC |
| | | | | GGACCTTGGGATTAAGAGTCCCCTGCTCTACCAACT |
| | | | | AAGCTAACGGTCCATGAGAATGCCGTGTATTTCAAC |
| | | | | GGCTATCTATTATGCATCATTGATGCGAATTATCAAG |
| | | | | GTTGCGCTGGGGTGGGTAATC |
| MG178 | 7333 | MG178- | nucleo- | CCAAGCGCCGACCCAGCATGCCGGAACTAGCCAATG |
| recombinases | | 7187 AttL | tide | GAATAATGCTATAGATCTAAAATGAGAAATAGCCAA |
| attachment | | | | AGTTTTGGGCTCGAACAAGAAATGGGATAATAGAAG |
| sites | | | | ATTTTGTATACAAAAAAAGCCCCAATTAGGGGCTAA |
| | | | | ATCAATAAATGGTGGAGCTACGCACACTTAATCAGA |
| | | | | ACAACGTTATTTGCATCAATTCAACGAGGATGGAAA |
| | | | | TCTCAAAACATTGGTTTGCGGTGATAACGCTATTGG |
| | | | | ACGATAGGTTCGAAGATGGACGAAAGAAGCCCAAG |
| | | | | AAGGATAAAGACGCCTAGGCAGA |
| MG178 | 7334 | MG178- | nucleo- | GCGAACACCCAGATGAAAGGGTGTTCGCCTATAGAA |
| recombinases | | 7187 AttP | tide | TCAATGGTGGACCGTCGGGGACTCGAACCCCGGACC |
| attachment | | | | TTGGGATTAAGAGTCCCCTGCTCTACCAACTAAGCT |
| sites | | | | AACGGTCCATGGTAAACGCTCTAAACGAACGTGAAA |
| | | | | AATCTCAAATGGTGGAGCTACGCACACTTAATCAGA |
| | | | | ACAACGTTATTTGCATCAATTCAACGAGGATGGAAA |
| | | | | TCTCAAAACATTGGTTTGCGGTGATAACGCTATTGG |
| | | | | ACGATAGGTTCGAAGATGGACGAAAGAAGCCCAAG |
| | | | | AAGGATAAAGACGCCTAGGCAGA |
| MG178 | 7335 | MG178- | nucleo- | GCGAACACCCAGATGAAAGGGTGTTCGCCTATAGAA |
| recombinases | | 7187 AttR | tide | TCAATGGTGGACCGTCGGGGACTCGAACCCCGGACC |
| attachment | | | | TTGGGATTAAGAGTCCCCTGCTCTACCAACTAAGCT |
| sites | | | | AACGGTCCATGGTAAACGCTCTAAACGAACGTGAAA |
| | | | | AATCTCAAATGGTGGACCGTCGGGGACTCGAACCCC |
| | | | | GGACCTTGGGATTAAGAGTCCCCTGCTCTACCAACT |
| | | | | AAGCTAACGGTCCATGAGAATGCCGTGTATTTCAAC |
| | | | | GGCTATCTATTATGCATCATTGATGCGAATTATCAAG |
| | | | | GTTGCGCTGGGGTGGGTAATC |
| MG178 | 7336 | MG178- | nucleo- | AAATGGTGGA |
| conserved | | 7187 Core | tide | |
| core | | | | |
| MG178 | 7337 | MG178- | nucleo- | ATCGAGAGCTACCAGCCCGACAAGGGAACCAAGCT |
| recombinases | | 7188 AttB | tide | CGCCACCTTTGCGGCTCGTTGTATCGAAAACGAGAT |
| attachment | | | | TTTGATGCATCTCCGTTCCCTGAAAAAAACGCGCAA |
| sites | | | | GGATGTGTCCCTGCACGATCCGATCGGAACGGACAA |
| | | | | AGAGGGCAACGAGTTTACGTTAATCGATATCCTGGG |
| | | | | AACCGATACCGACGAAGTCGTCGACAAAGTGCAGCT |
| | | | | GAAAATCGAGAAAAGCAAAATTTTTCGCAACCTGGA |
| | | | | CATTCTCGATGAACGCGAAAAAGAAGTGGTGATCGG |
| | | | | CCGTTTCGGCCTCGATGCGGGCGG |
| MG178 | 7338 | MG178- | nucleo- | ATCGAGAGCTACCAGCCCGACAAGGGAACCAAGCT |
| recombinases | | 7188 AttL | tide | CGCCACCTTTGCGGCTCGTTGTATCGAAAACGAGAT |
| attachment | | | | TTTGATGCATCTCCGTTCCCTGAAAAAAACGCGCAA |
| sites | | | | GGATGTGTCCCTGCACGATCCGATCGGAACGGACAA |
| | | | | AGAGGGCAACGAGTTTACATCAAATGGTTATCTGTA |
| | | | | TCCTTATGTACATCCTACCCATTATATGGTATAATAC |
| | | | | CCTTAACGATGCGGTGGCGGAATAGGTAGACGCACA |
| | | | | ACCTCAAGGGCAATAACGGGCGCGGTAAGGGTGCA |
| | | | | GCCCACTAAGGACCGCCCGCGTCA |
| MG178 | 7339 | MG178- | nucleo- | TGGAAATCCAAGTACCCCGCAAAGAAAAACGCCCTT |
| recombinases | | 7188 AttP | tide | CTCAAATCCGTCCTCCTTCATGCCACTTACAAAAAA |
| attachment | | | | GAAAAGTGGCAGCGTAAAGATCAATTCGAACTTGTC |
| sites | | | | CTGGTGCCGAAGTTCAAATAATACAGATAAGGTATT |
| | | | | GATGAGAACGAGTTTACATCAAATGGTTATCTGTAT |
| | | | | CCTTATGTACATCCTACCCATTATATGGTATAATACC |
| | | | | CTTAACGATGCGGTGGCGGAATAGGTAGACGCACAA |
| | | | | CCTCAAGGGCAATAACGGGCGCGGTAAGGGTGCAG |
| | | | | CCCACTAAGGACCGCCCGCGTCA |
| MG178 | 7340 | MG178- | nucleo- | TGGAAATCCAAGTACCCCGCAAAGAAAAACGCCCTT |
| recombinases | | 7188 AttR | tide | CTCAAATCCGTCCTCCTTCATGCCACTTACAAAAAA |
| attachment | | | | GAAAAGTGGCAGCGTAAAGATCAATTCGAACTTGTC |
| sites | | | | CTGGTGCCGAAGTTCAAATAATACAGATAAGGTATT |
| | | | | GATGAGAACGAAATTACGTTAATCGATATCCTGGGA |
| | | | | ACCGATACCGACGAAGTCGTCGACAAAGTGCAGCTG |
| | | | | AAAATCGAGAAAAGCAAAATTTTTCGCAACCTGGAC |
| | | | | ATTCTCGATGAACGCGAAAAAGAAGTGGTGATCGGC |
| | | | | CGTTTCGGCCTCGATGCGGGCGG |
| MG178 | 7341 | MG178- | nucleo- | AACGAAATTAC |
| conserved | | 7188 Core | tide | |
| core | | | | |
| MG178 | 7342 | MG178- | nucleo- | ACGCAAAGTTGTCTGCTGTTCAATGTCCTAATTGCAA |
| recombinases | | 7189 AttB | tide | AAAAAATCTTCGAGATCACCTCGAAGATTTTTTTATC |
| attachment | | | | TCATTGTATACCCGAAAACTATTTCACAAAAAAATA |
| sites | | | | AGTTCGGATAATACTCTTTTGGTGGAGAATTGCGCC |
| | | | | CGTCACTCGAACTCACTACCTCTACAATGCGAATGT |
| | | | | AGCGCTCTCCCAGATGAGCTACGCCCCCAAGCGCTT |
| | | | | ATAAAGTATAGCAGATTTTTTGTCGTTTGTCAATACC |
| | | | | GCCGCAAAATAAATTTGAAAAGGAAACGCAAATTTT |
| | | | | CGTGACGGTGTATTCGGTG |
| MG178 | 7343 | MG178- | nucleo- | ACGCAAAGTTGTCTGCTGTTCAATGTCCTAATTGCAA |
| recombinases | | 7189 AttL | tide | AAAAAATCTTCGAGATCACCTCGAAGATTTTTTTATC |
| attachment | | | | TCATTGTATACCCGAAAACTATTTCACAAAAAAATA |
| sites | | | | AGTTCGGATAATACTCTTTTGGTGGAGAATTGCGCC |
| | | | | CGTCACTCGAACTCTTTATAGTCTACAAGAATGTATT |
| | | | | CTTAACCACGTCCGCATTGCGATGATTTTATTTTTTC |
| | | | | AAAAACGCTTCGACCGCTTCTCTTACGATCTGCGCCT |
| | | | | GAGAAATACCCTCGCGGACGCACTTTGTCTTAAACT |
| | | | | CTTCGACCATTGCCTTT |
| MG178 | 7344 | MG178- | nucleo- | TTTCTCAATGCCGTTTTTGTCTATGACGAAAGTGTTA |
| recombinases | | 7189 AttP | tide | CATTTGCATTCAATTACTCCAATAACGGAGAAAAAG |
| attachment | | | | TCACCCTCTCCGAAGTTGATAATATCAACGGTTCAG |
| sites | | | | GTGACTTTTTCGAGTGTGGTTACGATGGTGGAGACG |
| | | | | ATGAGACTCGAACTCTTTATAGTCTACAAGAATGTA |
| | | | | TTCTTAACCACGTCCGCATTGCGATGATTTTATTTTT |
| | | | | TCAAAAACGCTTCGACCGCTTCTCTTACGATCTGCGC |
| | | | | CTGAGAAATACCCTCGCGGACGCACTTTGTCTTAAA |
| | | | | CTCTTCGACCATTGCCTTT |
| MG178 | 7345 | MG178- | nucleo- | TTTCTCAATGCCGTTTTTGTCTATGACGAAAGTGTTA |
| recombinases | | 7189 AttR | tide | CATTTGCATTCAATTACTCCAATAACGGAGAAAAAG |
| attachment | | | | TCACCCTCTCCGAAGTTGATAATATCAACGGTTCAG |
| sites | | | | GTGACTTTTTCGAGTGTGGTTACGATGGTGGAGACG |
| | | | | ATGAGACTCGAACTCACTACCTCTACAATGCGAATG |
| | | | | TAGCGCTCTCCCAGATGAGCTACGCCCCCAAGCGCT |
| | | | | TATAAAGTATAGCAGATTTTTTGTCGTTTGTCAATAC |
| | | | | CGCCGCAAAATAAATTTGAAAAGGAAACGCAAATTT |
| | | | | TCGTGACGGTGTATTCGGTG |
| MG178 | 7346 | MG178- | nucleo- | ACTCGAACTC |
| conserved | | 7189 Core | tide | |
| core | | | | |
| MG178 | 7347 | MG178- | nucleo- | AAGTTCCCTCTCAAAAAAATCCTTAATCAGCTTTATA |
| recombinases | | 7190 AttB | tide | GCAATTTCTGTTTCCATTATATTCTGTCTGGAAGTGT |
| attachment | | | | ATCCTTCCGGTATTATAATACTTCCCATGTTTCTACT |
| sites | | | | CCTAACTACAAATCTACAAAAAAAAATTACTAATTA |
| | | | | AAATGGCGCACCCAGCAGGAGTTGAACCCACAACCT |
| | | | | TCTGATCCGTAGTCAGACGCTCTATCCAATTGAGCTA |
| | | | | TGGATGCACATTTAAGTATATATTTTAAAAAAAAAT |
| | | | | GGCGGAGAAGGAGGGATTTGAACCCTCGATCCAAGT |
| | | | | TTTAGCCCGGATACTCCCT |
| MG178 | 7348 | MG178- | nucleo- | AAGTTCCCTCTCAAAAAAATCCTTAATCAGCTTTATA |
| recombinases | | 7190 AttL | tide | GCAATTTCTGTTTCCATTATATTCTGTCTGGAAGTGT |
| attachment | | | | ATCCTTCCGGTATTATAATACTTCCCATGTTTCTACT |
| sites | | | | CCTAACTACAAATCTACAAAAAAAAATTACTAATTA |
| | | | | AAATGGCGCACCCAAGTGCATACTTAGTCACCACAA |
| | | | | CTAAGAATCCTTGAATTGCAATATTTTATTTTTTCAT |
| | | | | GTTCCTTATAATACCATAATTTACTTGAATTTGCAAT |
| | | | | TCTTTTCATTGAGTTCCTCTTCTGAAATGCGATGCAC |
| | | | | TAAGCCTTTCAACTTTT |
| MG178 | 7349 | MG178- | nucleo- | GTATCAGAATTAAAAGAAATTTTGAATCTGATTATA |
| recombinases | | 7190 AttP | tide | CAAAAAATTGTTCTAAGTAAAAATGGAGAAATAGA |
| attachment | | | | AGTAATATTTTAAAAGAAAAAGACCCAATAAAAATT |
| sites | | | | TTAGGTCTTTTTTTATTTATTATAAAAAATTGTGTTTT |
| | | | | TTAACTGGCGCACCCAAGTGCATACTTAGTCACCAC |
| | | | | AACTAAGAATCCTTGAATTGCAATATTTTATTTTTTC |
| | | | | ATGTTCCTTATAATACCATAATTTACTTGAATTTGCA |
| | | | | ATTCTTTTCATTGAGTTCCTCTTCTGAAATGCGATGC |
| | | | | ACTAAGCCTTTCAACTTTT |
| MG178 | 7350 | MG178- | nucleo- | GTATCAGAATTAAAAGAAATTTTGAATCTGATTATA |
| recombinases | | 7190 AttR | tide | CAAAAAATTGTTCTAAGTAAAAATGGAGAAATAGA |
| attachment | | | | AGTAATATTTTAAAAGAAAAAGACCCAATAAAAATT |
| sites | | | | TTAGGTCTTTTTTTATTTATTATAAAAAATTGTGTTTT |
| | | | | TTAACTGGCGCACCCAGCAGGAGTTGAACCCACAAC |
| | | | | CTTCTGATCCGTAGTCAGACGCTCTATCCAATTGAGC |
| | | | | TATGGATGCACATTTAAGTATATATTTTAAAAAAAA |
| | | | | ATGGCGGAGAAGGAGGGATTTGAACCCTCGATCCAA |
| | | | | GTTTTAGCCCGGATACTCCCT |
| MG178 | 7351 | MG178- | nucleo- | TGGCGCACCCA |
| conserved | | 7190 Core | tide | |
| core | | | | |
| MG178 | 7352 | MG178- | nucleo- | GATCGAGATTCCAACGGTACTGCCCCTGCCGATCCC |
| recombinases | | 7191 AttB | tide | GGAAGTGTCCGTAAATACAAGAAAAGGCGTAGTCGT |
| attachment | | | | CAACTACGCCCCCTGTGAACTCGCTGTATAAAAAGC |
| sites | | | | GAGTGTTCTTACAGCCTTTCAAATGCTATAAGAACA |
| | | | | CTCGATATGGTTGCGGAGACAGGATTTGAACCTGCG |
| | | | | ACCTCCGGGTTATGAGCCCGACGAGCTACCGAACTG |
| | | | | CTCCACTCCGCGATATGAACTTGACCCCTCAAGGCT |
| | | | | CATATACTATAACATATGAGCCTTGGGTTGTCAAGT |
| | | | | GTTATTTTAGCGCTCGGAAACAGAAGA |
| MG178 | 7353 | MG178- | nucleo- | GATCGAGATTCCAACGGTACTGCCCCTGCCGATCCC |
| recombinases | | 7191 AttL | tide | GGAAGTGTCCGTAAATACAAGAAAAGGCGTAGTCGT |
| attachment | | | | CAACTACGCCCCCTGTGAACTCGCTGTATAAAAAGC |
| sites | | | | GAGTGTTCTTACAGCCTTTCAAATGCTATAAGAACA |
| | | | | CTCGATATGGTTGCGGAGACACACAACATAGATTAC |
| | | | | CAGCGATTTTTTCCGGAAATCCTTTTTATGTTCACAT |
| | | | | CAAGCATTTAAGTGCTGTATTTCACGCTGTTCTGCTG |
| | | | | TCTAATGTGGCTACGATTTGCGCCTTTTCTATAGAGT |
| | | | | ATCCTAGTCGGTGAAGCAAGGACA |
| MG178 | 7354 | MG178- | nucleo- | GTTGATACAATCACGCGGTGGTTGAATGCCTTGAAA |
| recombinases | | 7191 AttP | tide | AACAATCCGGATGAAAAGGCCGTAAAGCTGCTTGTG |
| attachment | | | | AAGCGAATTGACGTTTCCGGAGATAAAAAGAACAA |
| sites | | | | CGTGTTCAATATACAAAGCACATTGAACACGTTGTT |
| | | | | GGAAATAATGGTTGCGGAGACACACAACATAGATTA |
| | | | | CCAGCGATTTTTTCCGGAAATCCTTTTTATGTTCACA |
| | | | | TCAAGCATTTAAGTGCTGTATTTCACGCTGTTCTGCT |
| | | | | GTCTAATGTGGCTACGATTTGCGCCTTTTCTATAGAG |
| | | | | TATCCTAGTCGGTGAAGCAAGGACA |
| MG178 | 7355 | MG178- | nucleo- | GTTGATACAATCACGCGGTGGTTGAATGCCTTGAAA |
| recombinases | | 7191 AttR | tide | AACAATCCGGATGAAAAGGCCGTAAAGCTGCTTGTG |
| attachment | | | | AAGCGAATTGACGTTTCCGGAGATAAAAAGAACAA |
| sites | | | | CGTGTTCAATATACAAAGCACATTGAACACGTTGTT |
| | | | | GGAAATAATGGTTGCGGAGACAGGATTTGAACCTGC |
| | | | | GACCTCCGGGTTATGAGCCCGACGAGCTACCGAACT |
| | | | | GCTCCACTCCGCGATATGAACTTGACCCCTCAAGGC |
| | | | | TCATATACTATAACATATGAGCCTTGGGTTGTCAAGT |
| | | | | GTTATTTTAGCGCTCGGAAACAGAAGA |
| MG178 | 7356 | MG178- | nucleo- | ATGGTTGCGGAGACA |
| conserved | | 7191 Core | tide | |
| core | | | | |
| MG178 | 7357 | MG178- | nucleo- | GTTTTACCCGAATTTTTTTGAAAAAAGGTCTTTACAA |
| recombinases | | 7192 AttB | tide | ACTCCCCATGATATGCTATTATAGTCAAGCAGTCCA |
| attachment | | | | AAAACACATGGGGGCGTAGCTCACTTGGGAGAGCG |
| sites | | | | CTTGACTGGCAGTCAAGAGGTAGAGAGTTCGATCCT |
| | | | | CTTCGTCTCCACCAAAAGAGATCCGCAGGAACACAG |
| | | | | TTTCTGCGGTCTTTTTGTATAATCGACCGACTGTTTTT |
| | | | | GTTCCCGTTCCTCATCTACAAAGGAGACACCATGAA |
| | | | | AAAGAAACTGACCGTAAAAGAGTACGTCTATGTTGC |
| | | | | CAGCATGCTGTTTGGCTTGT |
| MG178 | 7358 | MG178- | nucleo- | GTTTTACCCGAATTTTTTTGAAAAAAGGTCTTTACAA |
| recombinases | | 7192 AttL | tide | ACTCCCCATGATATGCTATTATAGTCAAGCAGTCCA |
| attachment | | | | AAAACACATGGGGGCGTAGCTCACTTGGGAGAGCG |
| sites | | | | CTTGACTGGCAGTCAAGAGGTAGAGAGTTCGATCCT |
| | | | | CTTCGTCTCCACCAAATAGTGCAAATCCGAACTCTGT |
| | | | | GTTCTTCATCAAACACACCTTTGGATTTGTTTACAAG |
| | | | | ATAGAGAACGCTGATTGAATCGGCGTTCTTTTTCTTT |
| | | | | GCCACGGGACGAGATGAAGTAGTTAAAGTAGTTGTT |
| | | | | TTTCGGTTTTTGCGTAAAC |
| MG178 | 7359 | MG178- | nucleo- | ATGAGGATTACCAACGGCGCGTGATTGATACATTGG |
| recombinases | | 7192 AttP | tide | TAAACTCTGTATATGTGTATGACGATGAAGATGGTG |
| attachment | | | | GGAAGCGGATTATGCTAACATTCAATCTTTCGGGCA |
| sites | | | | ATAATACCGCTACTCTCACGAGTTCGGATATTGGGT |
| | | | | GTTATGCTCCACCAAATAGTGCAAATCCGAACTCTG |
| | | | | TGTTCTTCATCAAACACACCTTTGGATTTGTTTACAA |
| | | | | GATAGAGAACGCTGATTGAATCGGCGTTCTTTTTCTT |
| | | | | TGCCACGGGACGAGATGAAGTAGTTAAAGTAGTTGT |
| | | | | TTTTCGGTTTTTGCGTAAAC |
| MG178 | 7360 | MG178- | nucleo- | ATGAGGATTACCAACGGCGCGTGATTGATACATTGG |
| recombinases | | 7192 AttR | tide | TAAACTCTGTATATGTGTATGACGATGAAGATGGTG |
| attachment | | | | GGAAGCGGATTATGCTAACATTCAATCTTTCGGGCA |
| sites | | | | ATAATACCGCTACTCTCACGAGTTCGGATATTGGGT |
| | | | | GTTATGCTCCACCAAAAGAGATCCGCAGGAACACAG |
| | | | | TTTCTGCGGTCTTTTTGTATAATCGACCGACTGTTTTT |
| | | | | GTTCCCGTTCCTCATCTACAAAGGAGACACCATGAA |
| | | | | AAAGAAACTGACCGTAAAAGAGTACGTCTATGTTGC |
| | | | | CAGCATGCTGTTTGGCTTGT |
| MG178 | 7361 | MG178- | nucleo- | CTCCACCAAA |
| conserved | | 7192 Core | tide | |
| core | | | | |
| MG178 | 7362 | MG178- | nucleo- | CATTCCCATCAATACCATCGTCTCCAGCCTGGAAAG |
| recombinases | | 7194 AttB | tide | CATATCTGCCGTACTGTTGGCATGGCCGGTACTAAG |
| attachment | | | | ACTGCCATCGTGTCCAGTATTTAGGGCCTGCAGCAT |
| sites | | | | ATCGATCGCCTCCGCTCCCCGGACCTCGCCCACAAT |
| | | | | AATCCGATCTGGGCGCATTCTCAGGGCCGACTTGAT |
| | | | | CAGATCGCGGATCGTCACGGCGCCTGTCCCCTCCAC |
| | | | | ATTGGGATTCCTTGCCTCAAGGCTCACCAAATTGGG |
| | | | | GATTTCCTGCAATTTTAATTCTGCGTTGTCTTCAATG |
| | | | | GTTATAATTCTTTCATCCTTTGG |
| MG178 | 7363 | MG178- | nucleo- | CATTCCCATCAATACCATCGTCTCCAGCCTGGAAAG |
| recombinases | | 7194 AttL | tide | CATATCTGCCGTACTGTTGGCATGGCCGGTACTAAG |
| attachment | | | | ACTGCCATCGTGTCCAGTATTTAGGGCCTGCAGCAT |
| sites | | | | ATCGATCGCCTCCGCTCCCCGGACCTCGCCCACAAT |
| | | | | AATCCGATCTGGGCGCATGATAAAAATAAGAGATTC |
| | | | | CTCCTCCAGTCGCTTCCATATATTACCGTTTGAAATT |
| | | | | ATATATCACTTTGTATACAATATTTATGGAGGAACA |
| | | | | ATTACAATGAACCAGTTTGCAAAACGCTTAAAATAC |
| | | | | TTAAGAATAGAAAGAAATCTTAC |
| MG178 | 7364 | MG178- | nucleo- | AACAAAGAAAAATTACCGACTTTATTCGTAATTTTG |
| recombinases | | 7194 AttP | tide | AAAACTTTACTCCTGAAGAAAGAAACGCCATAGCCC |
| attachment | | | | GTACATGTATAAAAGAATGCGTTTGGGATGGTCATA |
| sites | | | | CGCTTTCTGTCGTCCTGTAGTTCTCTTTATTATCATGC |
| | | | | GTCTATCTGGGCGCATGATAAAAATAAGAGATTCCT |
| | | | | CCTCCAGTCGCTTCCATATATTACCGTTTGAAATTAT |
| | | | | ATATCACTTTGTATACAATATTTATGGAGGAACAATT |
| | | | | ACAATGAACCAGTTTGCAAAACGCTTAAAATACTTA |
| | | | | AGAATAGAAAGAAATCTTAC |
| MG178 | 7365 | MG178- | nucleo- | AACAAAGAAAAATTACCGACTTTATTCGTAATTTTG |
| recombinases | | 7194 AttR | tide | AAAACTTTACTCCTGAAGAAAGAAACGCCATAGCCC |
| attachment | | | | GTACATGTATAAAAGAATGCGTTTGGGATGGTCATA |
| sites | | | | CGCTTTCTGTCGTCCTGTAGTTCTCTTTATTATCATGC |
| | | | | GTCTATCTGGGCGCATTCTCAGGGCCGACTTGATCA |
| | | | | GATCGCGGATCGTCACGGCGCCTGTCCCCTCCACAT |
| | | | | TGGGATTCCTTGCCTCAAGGCTCACCAAATTGGGGA |
| | | | | TTTCCTGCAATTTTAATTCTGCGTTGTCTTCAATGGTT |
| | | | | ATAATTCTTTCATCCTTTGG |
| MG178 | 7366 | MG178- | nucleo- | ATCTGGGCGCAT |
| conserved | | 7194 Core | tide | |
| core | | | | |
| MG178 | 7367 | MG178- | nucleo- | AGCCGATATCTTTTTGCTCCGCCTGGAGCACGAAGC |
| recombinases | | 7195 AttB | tide | ACCTGTGTTTTTGCACAGGTGCTTTTGTATTTTGGGC |
| attachment | | | | CTGGTCCTTATATTTATAGTTTAAAACCAAAATATTA |
| sites | | | | AAACCCCATAACTTCGCTGGAAGTTATGGGGTTTAC |
| | | | | TCTTCAATTTGGTGGAACTAACTGGACTCGAACCAG |
| | | | | TGACCCCCTCGATGTCAACGAGGTACTCTAACCAAC |
| | | | | TGAGCTATAGTTCCGCAACGATGTTATTTTAGCGTAG |
| | | | | AATCGTCATTTTGTCAAGGACGTTTTACTCCCTGACC |
| | | | | GTTACTGCGGTACCTACTTTG |
| MG178 | 7368 | MG178- | nucleo- | AGCCGATATCTTTTTGCTCCGCCTGGAGCACGAAGC |
| recombinases | | 7195 AttL | tide | ACCTGTGTTTTTGCACAGGTGCTTTTGTATTTTGGGC |
| attachment | | | | CTGGTCCTTATATTTATAGTTTAAAACCAAAATATTA |
| sites | | | | AAACCCCATAACTTCGCTGGAAGTTATGGGGTTTAC |
| | | | | TCTTCAATTTGGTGGAAGAATTTGTATCGTACCCAAA |
| | | | | CAAATATTTCACTATATAGAACGGCATTGATAATAC |
| | | | | GCATCGATGCCGCCTAAAAACTAGCCTTATAAAGTT |
| | | | | TTCTTATTAAACTTCAAGTCTTCTAATGTGCCGGTCT |
| | | | | TAAATTTGCTTTTCTTAAAAC |
| MG178 | 7369 | MG178- | nucleo- | ATGAGATCCGGCAGGAATTTTTAAATACTTTCGTATC |
| recombinases | | 7195 AttP | tide | TAAAGCGTATGTATTTTCAGATCATCTTTTTGTGATC |
| attachment | | | | TATGATGCCATTAACGGCATCAATACTGAAGTTACA |
| sites | | | | CCCGAAATTTTATCAAATCCAAACGAGTTCGGATAC |
| | | | | ATTCCAATTTGGTGGAAGAATTTGTATCGTACCCAA |
| | | | | ACAAATATTTCACTATATAGAACGGCATTGATAATA |
| | | | | CGCATCGATGCCGCCTAAAAACTAGCCTTATAAAGT |
| | | | | TTTCTTATTAAACTTCAAGTCTTCTAATGTGCCGGTC |
| | | | | TTAAATTTGCTTTTCTTAAAAC |
| MG178 | 7370 | MG178- | nucleo- | ATGAGATCCGGCAGGAATTTTTAAATACTTTCGTATC |
| recombinases | | 7195 AttR | tide | TAAAGCGTATGTATTTTCAGATCATCTTTTTGTGATC |
| attachment | | | | TATGATGCCATTAACGGCATCAATACTGAAGTTACA |
| sites | | | | CCCGAAATTTTATCAAATCCAAACGAGTTCGGATAC |
| | | | | ATTCCAATTTGGTGGAACTAACTGGACTCGAACCAG |
| | | | | TGACCCCCTCGATGTCAACGAGGTACTCTAACCAAC |
| | | | | TGAGCTATAGTTCCGCAACGATGTTATTTTAGCGTAG |
| | | | | AATCGTCATTTTGTCAAGGACGTTTTACTCCCTGACC |
| | | | | GTTACTGCGGTACCTACTTTG |
| MG178 | 7371 | MG178- | nucleo- | CAATTTGGTGGAA |
| conserved | | 7195 Core | tide | |
| core | | | | |
| MG178 | 7372 | MG178- | nucleo- | CTTCGGCAGGATAAAAAAAGAGTCCGAACGCGAATT |
| recombinases | | 7196 AttB | tide | GCGTCCAGACTCAGCCAAGGAGAAGGAAAGATTCA |
| attachment | | | | CTGTACCTGCCGTCGCGAGCCGCTTCAGCAGGATAA |
| sites | | | | AAGAAAAGAGTCCGAACGCGAATTGCGTCCAGACTC |
| | | | | AGTCTGGTGGTTGCGGGAGCTGGATTTGAACCAACG |
| | | | | ACCTTCGGGTTATGAGCCCGACGAGCTACCAAACTG |
| | | | | CTCCATCCCGCGATATTGAATTTCCAGTGCTCTACTA |
| | | | | TAATACCACATTTCGGAGAAAAATGCAAGTCTTTTTT |
| | | | | TGATTTTTTTCAAAAGAGTGGGA |
| MG178 | 7373 | MG178- | nucleo- | CTTCGGCAGGATAAAAAAAGAGTCCGAACGCGAATT |
| recombinases | | 7196 AttL | tide | GCGTCCAGACTCAGCCAAGGAGAAGGAAAGATTCA |
| attachment | | | | CTGTACCTGCCGTCGCGAGCCGCTTCAGCAGGATAA |
| sites | | | | AAGAAAAGAGTCCGAACGCGAATTGCGTCCAGACTC |
| | | | | AGTCTGGTGGTTGCGGGAGTTCGCAACATCTTTTACC |
| | | | | AAGAATTTTATTGAGATTTATCTAATATAATATCATA |
| | | | | TATTGATTAATCAATGAGATTAACAGTAAAAAGTGA |
| | | | | GGAAGCAAGCTTTTAAGCTTTATTTCTTATCATTCTG |
| | | | | GCGTGAATCGAGATAAGATTCC |
| MG178 | 7374 | MG178- | nucleo- | CTTTACAGTCGATCAAATCCGTGCATGGTTGGAAGC |
| recombinases | | 7196 AttP | tide | ACTGAAAGCAACTCCCGATGATAAGGCAGTCCGTTT |
| attachment | | | | GCTTATTTCTCGCATTGACATAAAACAAAAGACCAT |
| sites | | | | TATTAACATGGAAAGCACGTTAACAATGGTCTTAAG |
| | | | | TGAAATTGGTTGCGGGAGTTCGCAACATCTTTTACC |
| | | | | AAGAATTTTATTGAGATTTATCTAATATAATATCATA |
| | | | | TATTGATTAATCAATGAGATTAACAGTAAAAAGTGA |
| | | | | GGAAGCAAGCTTTTAAGCTTTATTTCTTATCATTCTG |
| | | | | GCGTGAATCGAGATAAGATTCC |
| MG178 | 7375 | MG178- | nucleo- | CTTTACAGTCGATCAAATCCGTGCATGGTTGGAAGC |
| recombinases | | 7196 AttR | tide | ACTGAAAGCAACTCCCGATGATAAGGCAGTCCGTTT |
| attachment | | | | GCTTATTTCTCGCATTGACATAAAACAAAAGACCAT |
| sites | | | | TATTAACATGGAAAGCACGTTAACAATGGTCTTAAG |
| | | | | TGAAATTGGTTGCGGGAGCTGGATTTGAACCAACGA |
| | | | | CCTTCGGGTTATGAGCCCGACGAGCTACCAAACTGC |
| | | | | TCCATCCCGCGATATTGAATTTCCAGTGCTCTACTAT |
| | | | | AATACCACATTTCGGAGAAAAATGCAAGTCTTTTTTT |
| | | | | GATTTTTTTCAAAAGAGTGGGA |
| MG178 | 7376 | MG178- | nucleo- | TGGTTGCGGGAG |
| conserved | | 7196 Core | tide | |
| core | | | | |
| MG178 | 7377 | MG178- | nucleo- | TTAAGAAAGCTTAAGAGGCCAGAAGCTCCTTACAGT |
| recombinases | | 7197 AttB | tide | TGGACCCATCTGAACCGAATTTTGCTAAAAGCAGAC |
| attachment | | | | GAAAAAACGGGAACGCCGTTCTTTTGCTCCCTAAAA |
| sites | | | | GATCAAGCCTCCTGTCCATGGACAGGAGGCTTGCAA |
| | | | | GTTATACAGTTGGTGGGCCCACTAGGATTCGAACCT |
| | | | | AGGACCAACCGGTTATGAGCCGGGGGCTCTACCGCT |
| | | | | GAGCTATAGGCCCAATGTAGGAATTATACCCCAGAA |
| | | | | AAAGATGCGCTGTCAACGTTTCTTACTCGAGGAATT |
| | | | | CCTTGAGGGGTTTGCTCCGTTTCG |
| MG178 | 7378 | MG178- | nucleo- | TTAAGAAAGCTTAAGAGGCCAGAAGCTCCTTACAGT |
| recombinases | | 7197 AttL | tide | TGGACCCATCTGAACCGAATTTTGCTAAAAGCAGAC |
| attachment | | | | GAAAAAACGGGAACGCCGTTCTTTTGCTCCCTAAAA |
| sites | | | | GATCAAGCCTCCTGTCCATGGACAGGAGGCTTGCAA |
| | | | | GTTATACAGTTGGTGGGCTATCTAACCCTTAGTGCG |
| | | | | AACCTAAAAGTACGGATAGGGCGTGGCTGGTTTGCC |
| | | | | TTATCCTATCCAATCCCAGTCTAGCGATATTGTCAAC |
| | | | | TTTTATGAAAAATAAATCACCCCGTAAAGCCAGTTA |
| | | | | ATGCCTGACTCTACGGGGATTCT |
| MG178 | 7379 | MG178- | nucleo- | CAGGAATACAGAACCAAGCTGCTAGATATCTTGGTC |
| recombinases | | 7197 AttP | tide | AGCCGAGTTGTTCTCTACCCAAATAAAGCAGAGGTT |
| attachment | | | | TTTTATCGCTATCAAAAAGAACTCCCTTCCCTCCCTA |
| sites | | | | ATCCAGTGATTATCAGGGAAGAAAGGGGTTCGAATG |
| | | | | GCAATCAGTTGGTGGGCTATCTAACCCTTAGTGCGA |
| | | | | ACCTAAAAGTACGGATAGGGCGTGGCTGGTTTGCCT |
| | | | | TATCCTATCCAATCCCAGTCTAGCGATATTGTCAACT |
| | | | | TTTATGAAAAATAAATCACCCCGTAAAGCCAGTTAA |
| | | | | TGCCTGACTCTACGGGGATTCT |
| MG178 | 7380 | MG178- | nucleo- | CAGGAATACAGAACCAAGCTGCTAGATATCTTGGTC |
| recombinases | | 7197 AttR | tide | AGCCGAGTTGTTCTCTACCCAAATAAAGCAGAGGTT |
| attachment | | | | TTTTATCGCTATCAAAAAGAACTCCCTTCCCTCCCTA |
| sites | | | | ATCCAGTGATTATCAGGGAAGAAAGGGGTTCGAATG |
| | | | | GCAATCAGTTGGTGGGCCCACTAGGATTCGAACCTA |
| | | | | GGACCAACCGGTTATGAGCCGGGGGCTCTACCGCTG |
| | | | | AGCTATAGGCCCAATGTAGGAATTATACCCCAGAAA |
| | | | | AAGATGCGCTGTCAACGTTTCTTACTCGAGGAATTC |
| | | | | CTTGAGGGGTTTGCTCCGTTTCG |
| MG178 | 7381 | MG178- | nucleo- | CAGTTGGTGGGC |
| conserved | | 7197 Core | tide | |
| core | | | | |
| MG178 | 7382 | MG178- | nucleo- | GCCATCTGGTTCCTCAACTTCTCGACGTGGACGGGC |
| recombinases | | 6304 AttB | tide | CACCACGGCATCTACCTGGAGGACCTCTACGTCCGC |
| attachment | | | | CCCGAGGCGCGCGGCCTCGGGACCGGCCGGGCGCTC |
| sites | | | | CTCGCTGCCCTGGCCACCGTTGCCCACCGCTCCGACT |
| | | | | ACACCCGTATCGACTGGTCGGTGCTCGATTGGAACG |
| | | | | AGCCCGCGCTGCGCTTCTACCGGTCGCTGGGGGCCG |
| | | | | AGCCCATGGACGAATGGACCGGCTACCGGCTCTCGG |
| | | | | GCCCGGAGCTGGCCGCCCTGGCCGGCGGCGAACCCG |
| | | | | CCACGTGACCGGTCGGGCCCGGCCGG |
| MG178 | 7383 | MG178- | nucleo- | GCCATCTGGTTCCTCAACTTCTCGACGTGGACGGGC |
| recombinases | | 6304 AttL | tide | CACCACGGCATCTACCTGGAGGACCTCTACGTCCGC |
| attachment | | | | CCCGAGGCGCGCGGCCTCGGGACCGGCCGGGCGCTC |
| sites | | | | CTCGCTGCCCTGGCCACCGTTGCCCACCGCTCCGACT |
| | | | | ACACCCGTATCGACTGGTCGACTCTTGCGTTTGGTAA |
| | | | | CCAGAGAGAGCTACCCTGGTGGCATGACCCAACAAC |
| | | | | TGCGAGCTGCGATTTACTGCCGGATCTCCAAGGCTA |
| | | | | AGGGGACCAAGAAGACTCAGAGCGTCGAAGACCAG |
| | | | | GAGCGAGACTGCCGAGACCTCTGCGA |
| MG178 | 7384 | MG178- | nucleo- | TCAGCGGCTTCGAGTTCTTCTACAGCTCACTGTCGAA |
| recombinases | | 6304 AttP | tide | CATCCCCTACTATCGGAGGCACCCATCGGCCAGACT |
| attachment | | | | CGCTAGAACCACGAAATTCCCCTATGAATCGCGGCA |
| sites | | | | GAGCAGCCTGAGCTGGGCAAATGCTCGACTTATCAG |
| | | | | ATACACGTATCGACTGGTCGACTCTTGCGTTTGGTAA |
| | | | | CCAGAGAGAGCTACCCTGGTGGCATGACCCAACAAC |
| | | | | TGCGAGCTGCGATTTACTGCCGGATCTCCAAGGCTA |
| | | | | AGGGGACCAAGAAGACTCAGAGCGTCGAAGACCAG |
| | | | | GAGCGAGACTGCCGAGACCTCTGCGA |
| MG178 | 7385 | MG178- | nucleo- | TCAGCGGCTTCGAGTTCTTCTACAGCTCACTGTCGAA |
| recombinases | | 6304 AttR | tide | CATCCCCTACTATCGGAGGCACCCATCGGCCAGACT |
| attachment | | | | CGCTAGAACCACGAAATTCCCCTATGAATCGCGGCA |
| sites | | | | GAGCAGCCTGAGCTGGGCAAATGCTCGACTTATCAG |
| | | | | ATACACGTATCGACTGGTCGGTGCTCGATTGGAACG |
| | | | | AGCCCGCGCTGCGCTTCTACCGGTCGCTGGGGGCCG |
| | | | | AGCCCATGGACGAATGGACCGGCTACCGGCTCTCGG |
| | | | | GCCCGGAGCTGGCCGCCCTGGCCGGCGGCGAACCCG |
| | | | | CCACGTGACCGGTCGGGCCCGGCCGG |
| MG178 | 7386 | MG178- | nucleo- | CGTATCGACTGGTCG |
| conserved | | 6304 Core | tide | |
| core | | | | |
| MG178 | 7387 | MG178- | nucleo- | CAGCGAGCCGACCCCGTACAGGCTTAGAGCGCCGCC |
| recombinases | | 7199 AttB | tide | GGCATGGACCGGGCTGAAGCCGAGCTTCCGGGTCAG |
| attachment | | | | GTAGAGGGTCAGGAAAAAGATGACCATCGAGCCCG |
| sites | | | | AGGAATTGACCAGGTTGACCGTGAACAGGATCCAGG |
| | | | | CCTTGCGCGGCAGGCCGCTATACGCCTGGCGGTAGG |
| | | | | TGTCCCTGATCTTCCCGAGCATGGCCGTTAAAAGCG |
| | | | | TATTACACCAGGACGGGTGGGAACGTCAAAGAAAA |
| | | | | AACCGGGCTAGGATGGGGTCAGACGTTGAAGCGGA |
| | | | | TGCTCAGGATGTCGCCGTCCTTGACGCTG |
| MG178 | 7388 | MG178- | nucleo- | CAGCGAGCCGACCCCGTACAGGCTTAGAGCGCCGCC |
| recombinases | | 7199 AttL | tide | GGCATGGACCGGGCTGAAGCCGAGCTTCCGGGTCAG |
| attachment | | | | GTAGAGGGTCAGGAAAAAGATGACCATCGAGCCCG |
| sites | | | | AGGAATTGACCAGGTTGACCGTGAACAGGATCCAGG |
| | | | | CCTTGCGCGGCAGGCCGCTATTAGGGATTTCTTGGC |
| | | | | CGGCATTATTGCCACACCCGCCCATTTTTACTTGGAC |
| | | | | CGACTCAAAATTGTTTTGGAGGAATAAAATGAATGA |
| | | | | ATGTTTCGAATGCTGGCAAAACGCCAAAGAGGCCGG |
| | | | | CGAGATATCTGAATCGCAACATCAGC |
| MG178 | 7389 | MG178- | nucleo- | GTCGAGAAAGCCTATTCTCAGGCGATGCCTGAGCAC |
| recombinases | | 7199 AttP | tide | AGGGCCGAACTACTGCGCGTCCTCTTCGAGGACATT |
| attachment | | | | TCCATCAGCGGCGGAAAATTCGTCTTCACCCCACAG |
| sites | | | | GCCGTATTTGCCCCGCTCTTTGATTTAAGGCATGGCA |
| | | | | AACCACGGCAGGCCGCTATTAGGGATTTCTTGGCCG |
| | | | | GCATTATTGCCACACCCGCCCATTTTTACTTGGACCG |
| | | | | ACTCAAAATTGTTTTGGAGGAATAAAATGAATGAAT |
| | | | | GTTTCGAATGCTGGCAAAACGCCAAAGAGGCCGGCG |
| | | | | AGATATCTGAATCGCAACATCAGC |
| MG178 | 7390 | MG178- | nucleo- | GTCGAGAAAGCCTATTCTCAGGCGATGCCTGAGCAC |
| recombinases | | 7199 AttR | tide | AGGGCCGAACTACTGCGCGTCCTCTTCGAGGACATT |
| attachment | | | | TCCATCAGCGGCGGAAAATTCGTCTTCACCCCACAG |
| sites | | | | GCCGTATTTGCCCCGCTCTTTGATTTAAGGCATGGCA |
| | | | | AACCACGGCAGGCCGCTATACGCCTGGCGGTAGGTG |
| | | | | TCCCTGATCTTCCCGAGCATGGCCGTTAAAAGCGTA |
| | | | | TTACACCAGGACGGGTGGGAACGTCAAAGAAAAAA |
| | | | | CCGGGCTAGGATGGGGTCAGACGTTGAAGCGGATGC |
| | | | | TCAGGATGTCGCCGTCCTTGACGCTG |
| MG178 | 7391 | MG178- | nucleo- | CGGCAGGCCGCTAT |
| conserved | | 7199 Core | tide | |
| core | | | | |
| MG178 | 7392 | MG178- | nucleo- | CTCGTGGGCGGTCAACATCCGCAAGTACGTCGTGCG |
| recombinases | | 7200 AttB | tide | GGCGGACCACCTCGAGGACCTCGTCGCGCTCGGCTC |
| attachment | | | | GTTGCCGACCGATGCCGCGGCCTTCCTCTCGGCGGC |
| sites | | | | CGTGCGCGCCGGGTTGAACGTGCTCGTCTCCGGCGC |
| | | | | GACCCAAGGCGGGCAAGACGACGATGCTCAACGCG |
| | | | | CTCGCGGGCGCCGTGCCCGTGCGTGAGCGGGTCGTC |
| | | | | TCGTGCGAGGAGGTCTTCGAGCTGCGGCTCGCGGTC |
| | | | | CGGGACTGGGTCGCGATGCAGTGCCGTCAGCCCAAC |
| | | | | CTCGAGGGCACGGGGGAGA |
| MG178 | 7393 | MG178- | nucleo- | CTCGTGGGCGGTCAACATCCGCAAGTACGTCGTGCG |
| recombinases | | 7200 AttL | tide | GGCGGACCACCTCGAGGACCTCGTCGCGCTCGGCTC |
| attachment | | | | GTTGCCGACCGATGCCGCGGCCTTCCTCTCGGCGGC |
| sites | | | | CGTGCGCGCCGGGTTGAACGTGCTCGTCTCCGGCGC |
| | | | | GACCCAAGGCGGTAGTCTGCAAGCGCTTTACACAGT |
| | | | | ACGCTTGAGATCTCATGAACATGAGCGCCGGGCCCC |
| | | | | GAGCCGTCATCTACGTCCGCATCTCCGTTGCCCAGG |
| | | | | AGGCGTCGGTCTCCATCGAACGCCAGGTCGAGGCGG |
| | | | | CGGAACAGTACGCCGCTG |
| MG178 | 7394 | MG178- | nucleo- | GCGGGCTAGCTGATGAACAAGGAGACTAACAGCGG |
| recombinases | | 7200 AttP | tide | AGGTGAAAGCTTGTACAGAGATTAAGATCTAAATCC |
| attachment | | | | TGCAAGCTTCACCCGTTCGAGTGGTCGTCCCGAGTC |
| sites | | | | GATGAGAAGTGAGTAATACCTGGTTCACTACCGGCC |
| | | | | TACACGCAGGCGGTAGTCTGCAAGCGCTTTACACAG |
| | | | | TACGCTTGAGATCTCATGAACATGAGCGCCGGGCCC |
| | | | | CGAGCCGTCATCTACGTCCGCATCTCCGTTGCCCAG |
| | | | | GAGGCGTCGGTCTCCATCGAACGCCAGGTCGAGGCG |
| | | | | GCGGAACAGTACGCCGCTG |
| MG178 | 7395 | MG178- | nucleo- | GCGGGCTAGCTGATGAACAAGGAGACTAACAGCGG |
| recombinases | | 7200 AttR | tide | AGGTGAAAGCTTGTACAGAGATTAAGATCTAAATCC |
| attachment | | | | TGCAAGCTTCACCCGTTCGAGTGGTCGTCCCGAGTC |
| sites | | | | GATGAGAAGTGAGTAATACCTGGTTCACTACCGGCC |
| | | | | TACACGCAGGCGGGCAAGACGACGATGCTCAACGC |
| | | | | GCTCGCGGGCGCCGTGCCCGTGCGTGAGCGGGTCGT |
| | | | | CTCGTGCGAGGAGGTCTTCGAGCTGCGGCTCGCGGT |
| | | | | CCGGGACTGGGTCGCGATGCAGTGCCGTCAGCCCAA |
| | | | | CCTCGAGGGCACGGGGGAGA |
| MG178 | | MG178- | nucleo- | AGGCGG |
| conserved | | 7200 Core | tide | |
| core | | | | |
| MG178 | 7397 | MG178- | nucleo- | GCTTCAATAGCCTTAAAGTCATACTTGCTATTATGCT |
| recombinases | | 7203 AttB | tide | CCATAAACGTCCTCCTTCTGAATTATTATTGCCTATA |
| attachment | | | | AATAGCAAAAACTCTCATCCTGCTCAGGGACGAGAG |
| sites | | | | TATATTCCCGCGGTACCACCCTTATTGACAAATATAA |
| | | | | TAATGGTGGAGCTAGAGGGATTCGAACCCTCGACCT |
| | | | | CTTGAATGCCATTCAAGCGCGCTCCCAACTGCGCCA |
| | | | | TAGCCCCACATTTGTCCACTCTATTGATGATAACGGT |
| | | | | ATCTCCGTTACAGGCTTATCACCTGTAAAGCTTCCCG |
| | | | | GCGAGTTCGACATCTGCTGC |
| MG178 | 7398 | MG178- | nucleo- | GCTTCAATAGCCTTAAAGTCATACTTGCTATTATGCT |
| recombinases | | 7203 AttL | tide | CCATAAACGTCCTCCTTCTGAATTATTATTGCCTATA |
| attachment | | | | AATAGCAAAAACTCTCATCCTGCTCAGGGACGAGAG |
| sites | | | | TATATTCCCGCGGTACCACCCTTATTGACAAATATAA |
| | | | | TAATGGTGGAGCTAGACCGTCCCAGGAAGTATCCGC |
| | | | | ACAGTTACCATTCGCAGGCGCAGAGCAATTGATGGT |
| | | | | GGCACTCACCTTTGGCCGCCTCCAAGAGGCCAAGGC |
| | | | | GTTCGATATGCGTTAAACCCTCCGTCCATGCCACGCC |
| | | | | GAACGTGCCGTCCCTGTACTT |
| MG178 | 7399 | MG178- | nucleo- | TGAACCATGTTAGCGAGGCGCTTAAAGAAGCCAAAA |
| recombinases | | 7203 AttP | tide | GCCCGGCTGAGTACCGGGCCGCGATCCACCGCTTCA |
| attachment | | | | TCGACCGGATAGTGGTCGGCGAAAAAATGATCCAAA |
| sites | | | | TCCACTTCCTGGCCGACTTCGGCGGCGGTGTGTGGA |
| | | | | TAAAGTTGGTGGAGCTAGACCGTCCCAGGAAGTATC |
| | | | | CGCACAGTTACCATTCGCAGGCGCAGAGCAATTGAT |
| | | | | GGTGGCACTCACCTTTGGCCGCCTCCAAGAGGCCAA |
| | | | | GGCGTTCGATATGCGTTAAACCCTCCGTCCATGCCA |
| | | | | CGCCGAACGTGCCGTCCCTGTACTT |
| MG178 | 7400 | MG178- | nucleo- | TGAACCATGTTAGCGAGGCGCTTAAAGAAGCCAAAA |
| recombinases | | 7203 AttR | tide | GCCCGGCTGAGTACCGGGCCGCGATCCACCGCTTCA |
| attachment | | | | TCGACCGGATAGTGGTCGGCGAAAAAATGATCCAAA |
| sites | | | | TCCACTTCCTGGCCGACTTCGGCGGCGGTGTGTGGA |
| | | | | TAAAGTTGGTGGAGCTAGAGGGATTCGAACCCTCGA |
| | | | | CCTCTTGAATGCCATTCAAGCGCGCTCCCAACTGCG |
| | | | | CCATAGCCCCACATTTGTCCACTCTATTGATGATAAC |
| | | | | GGTATCTCCGTTACAGGCTTATCACCTGTAAAGCTTC |
| | | | | CCGGCGAGTTCGACATCTGCTGC |
| MG178 | 7401 | MG178- | nucleo- | TGGTGGAGCTAGA |
| conserved | | 7203 Core | tide | |
| core | | | | |
| MG178 | 7402 | MG178- | nucleo- | GCTGGCCAAACGCCTGCCCACCATATTACCACCACT |
| recombinases | | 7204 AttB | tide | TACTTTGCATGAAGCGCTTGAAACCACAAAGATTCA |
| attachment | | | | CAGTGTAGCAGGAAAACTACCCGAAAATGCCACATT |
| sites | | | | GATTTCAAAAAGACCTTTTCGCAGCCCGCACCATAC |
| | | | | CGTTTCGGATGCGGCTTTGGTTGGTGGCGGCAGCAC |
| | | | | CCCGCAACCGGGGGAAATTTCACTGGCACATAATGG |
| | | | | CGTATTATTTTTAGACGAATTGCCTGAATTCAAAAG |
| | | | | AACCGCGCTGGAAGTGATGCGCCAGCCCATGGAAG |
| | | | | AGAGAAAAGTAACTATCAG |
| MG178 | 7403 | MG178- | nucleo- | GCTGGCCAAACGCCTGCCCACCATATTACCACCACT |
| recombinases | | 7204 AttL | tide | TACTTTGCATGAAGCGCTTGAAACCACAAAGATTCA |
| attachment | | | | CAGTGTAGCAGGAAAACTACCCGAAAATGCCACATT |
| sites | | | | GATTTCAAAAAGACCTTTTCGCAGCCCGCACCATAC |
| | | | | CGTTTCGGATGCTATGATATTACAGTAGGCGGTCGT |
| | | | | ATATTGTGAAAAATAAGACTATTTTTCAATGAAACG |
| | | | | TATAGCCATCTACAGCCGCGTATCAACAGCAGATAA |
| | | | | ACAGGATTACACAAGGCAGGTTAACGAACTTAAGA |
| | | | | AGATTGGTTACGATAACGG |
| MG178 | 7404 | MG178- | nucleo- | CAGGCGTAAGAGATTTTACCATATTTCAAGGATTTT |
| recombinases | | 7204 AttP | tide | AGGTTTATGAACACCTAAATTTAAGAAAAACAGCCA |
| attachment | | | | AAATATTTTATTAGCTAAACCCTTATCTGTAGCGGGT |
| sites | | | | TTCAACGCCAGTTTCACCACCCCCCACTAAAATGCC |
| | | | | GCTGGGGATGCTATGATATTACAGTAGGCGGTCGTA |
| | | | | TATTGTGAAAAATAAGACTATTTTTCAATGAAACGT |
| | | | | ATAGCCATCTACAGCCGCGTATCAACAGCAGATAAA |
| | | | | CAGGATTACACAAGGCAGGTTAACGAACTTAAGAA |
| | | | | GATTGGTTACGATAACGG |
| MG178 | 7405 | MG178- | nucleo- | CAGGCGTAAGAGATTTTACCATATTTCAAGGATTTT |
| recombinases | | 7204 AttR | tide | AGGTTTATGAACACCTAAATTTAAGAAAAACAGCCA |
| attachment | | | | AAATATTTTATTAGCTAAACCCTTATCTGTAGCGGGT |
| sites | | | | TTCAACGCCAGTTTCACCACCCCCCACTAAAATGCC |
| | | | | GCTGGGGATGCGGCTTTGGTTGGTGGCGGCAGCACC |
| | | | | CCGCAACCGGGGGAAATTTCACTGGCACATAATGGC |
| | | | | GTATTATTTTTAGACGAATTGCCTGAATTCAAAAGA |
| | | | | ACCGCGCTGGAAGTGATGCGCCAGCCCATGGAAGA |
| | | | | GAGAAAAGTAACTATCAG |
| MG178 | | MG178- | nucleo- | GGATGC |
| conserved | | 7204 Core | tide | |
| core | | | | |
| Primer | 7407 | IVT | nucleo- | CCCTTCACCTTCTATCTCGAAC |
| | | Junction rev | tide | |
| Primer | 7408 | IVT 47 | nucleo- | ACTCGGCCTTGGCACT |
| | | junction fwd | tide | |
| Primer | 7409 | IVT 37 | nucleo- | GCCGAGAACCTTGTCTTCC |
| | | junction fwd | tide | |
| Primer | 7410 | IVT 36 | nucleo- | ACAGCCGTTTTGACTGGA |
| | | junction fwd | tide | |
| Primer | 7411 | IVT 20 | nucleo- | AGGTACACCTCCTGCAGC |
| | | junction fwd | tide | |
| MG178 | 7412 | Sumo Tag | protein | SDSEVNQEAKPEVKPEVKPETHINLKVSDGSSEIFFKIK |
| recombinases | | | | KTTPLRRLMEAFAKRQGKEMDSLRFLYDGIRIQADQTP |
| protein tag | | | | EDLDMEDNDIIEAHREQIGG |
| MG178 | 7413 | Hexahistadine | protein | HHHHHH |
| recombinases | | Tag | | |
| protein tag | | | | |
| MG178 | 7414 | SV40 NLS | protein | KKKRKV |
| recombinases | | | | |
| protein tag | | | | |
| MG178 | 7415 | HA | protein | YPYDVPDYA |
| recombinases | | | | |
| protein tag | | | | |
| Primer | 7416 | mcherry rev | nucleo- | AACTCCTTGATGATGGCC |
| | | | tide | |
| Primer | 7417 | pCMV | nucleo- | CGATGGATAGCGATTTTATTATC |
| | | mNeon fwd | tide | |
| MG178 | 7418 | PS protease | protein | LEVLFQGP |
| recombinases | | cleavage site | | |
| protein tag | | | | |

1. A gene editing system comprising:
a) a serine recombinase comprising at least about 80% sequence identity to any one of SEQ ID NOs: 21-7060, 7105-7142, and 7211-7214 or a nucleic acid encoding the serine recombinase; and
b) a nucleic acid comprising a donor polynucleotide and a first attachment site sequence.

2. The gene editing system of claim 1, wherein the first attachment site sequence is 5′ of the donor polynucleotide.

3. The gene editing system of any one of claims 1-2, wherein the nucleic acid encoding the serine recombinase further comprises a second attachment site sequence.

4. The gene editing system of claim 3, wherein the second attachment site sequence is 5′ of the serine recombinase.

5. The gene editing system of any one of claims 3-4, wherein the first attachment site sequence and the second attachment site sequence are capable of recombination.

6. The gene editing system of any one of claims 1-5, wherein the first attachment site sequence is a bacterial genomic recombination sequence (attB).

7. The gene editing system of any one of claims 1-5, wherein the first attachment site sequence is a phage genomic recombination sequence (attP).

8. The gene editing system of any one of claims 3-7, wherein the second attachment site sequence is a bacterial genomic recombination sequence (attB).

9. The gene editing system of any one of claims 3-7, wherein the second attachment site sequence is a phage genomic recombination sequence (attP).

10. The gene editing system of any one of claims 6-9, wherein the attB sequence comprises about 20 to about 500 nucleotides.

11. The gene editing system of any one of claims 7-10, wherein the attP sequence comprises about 20 to about 500 nucleotides.

12. The gene editing system of any one of claims 6-11, wherein the attB sequence comprises at least about 80% sequence identity to any one of SEQ ID NOs: 1, 2, 5, 6, 9, 10, 13, 14, 7151, 7155, 7159, 7163, 7167, 7171, 7175, 7179, 7188-7200, 7206-7210, 7215, 7220, 7225, 7226, 7233, 7238, 7243, 7248, 7253, 7258, 7263, 7264, 7271, 7277, 7282, 7287, 7292, 7297, 7302, 7307, 7312, 7317, 7322, 7327, 7332, 7337, 7342, 7347, 7352, 7357, 7362, 7367, 7372, 7377, 7382, 7387, 7392, 7397, and 7402.

13. The gene editing system of any one of claims 6-12, wherein the attB sequence comprises at least about 80% sequence identity to any one of SEQ ID NOs: 1, 5, 9, and 13.

14. The gene editing system of any one of claims 7-13, wherein the attP sequence comprises at least about 80% sequence identity to any one of SEQ ID NOs: 1, 2, 5, 6, 9, 10, 13, 14, 7152, 7156, 7160, 7164, 7168, 7172, 7176, 7180, 7183-7187, 7201-7205, 7217, 7222, 7228, 7229, 7235, 7240, 7245, 7250, 7255, 7260, 7266, 7267, 7273, 7279, 7284, 7289, 7294, 7299, 7304, 7309, 7314, 7319, 7324, 7329, 7334, 7339, 7344, 7349, 7354, 7359, 7364, 7369, 7374, 7379, 7384, 7389, 7394, 7399, and 7404.

15. The gene editing system of any one of claims 7-14, wherein the attP sequence comprises at least about 80% sequence identity to any one of SEQ ID NOs: 2, 6, 10, and 14.

16. The gene editing system of any one of claims 1-15, wherein the nucleic acid comprising the donor polynucleotide and the first attachment sequence is delivered using plasmid, a nanoplasmid, a phagemid, a phage derivative, a virus, a bacmid, a bacterial artificial chromosome (BAC), a minicircle, a doggybone, a yeast artificial chromosome (YAC), or a cosmid.

17. The gene editing system of any one of claims 1-16, wherein the nucleic acid encoding the serine recombinase is delivered using a plasmid, a nanoplasmid, a phagemid, a phage derivative, a virus, a bacmid, a bacterial artificial chromosome (BAC), a minicircle, a doggybone, a yeast artificial chromosome (YAC), or a cosmid.

18. The gene editing system of any one of claims 16-17, wherein the virus is an alphavirus, a parvovirus, an adenovirus, an AAV, a baculovirus, a Dengue virus, a lentivirus, a herpesvirus, a poxvirus, an anellovirus, a bocavirus, a vaccinia virus, or a retrovirus.

19. The gene editing system of claim 18, wherein the AAV is AAV1, AAV2, AAV3, AAV4, AAV5, AAV6, AAV7, AAV8, AAV9, AAV10, AAV11, AAV12, AAV13, AAV14, AAV15, AAV16, AAV-rh8, AAV-rh10, AAV-rh20, AAV-rh39, AAV-rh74, AAV-rhM4-1, AAV-hu37, AAV-Anc80, AAV-Anc80L65, AAV-7m8, AAV-PHP-B, AAV-PHP-EB, AAV-2.5, AAV-2tYF, AAV-3B, AAV-LK03, AAV-HSC1, AAV-HSC2, AAV-HSC3, AAV-HSC4, AAV-HSC5, AAV-HSC6, AAV-HSC7, AAV-HSC8, AAV-HSC9, AAV-HSC10, AAV-HSC11, AAV-HSC12, AAV-HSC13, AAV-HSC14, AAV-HSC15, AAV-TT, AAV-DJ/8, AAV-Myo, AAV-NP40, AAV-NP59, AAV-NP22, AAV-NP66, or AAV-HSC16, or a derivative thereof.

20. The gene editing system of claim 18, wherein the herpesvirus is HSV-1, HSV-2, VZV, EBV, CMV, HHV-6, HHV-7, or HHV-8.

21. The gene editing system of any one of claims 1-20, wherein the donor polynucleotide comprises a size of at least about 1 kilobase (kb), 2 kb, 3 kb, 4 kb, 5 kb, 6 kb, 7 kb, 8 kb, 9 kb, 10 kb, 20 kb, 30 kb, 40 kb, 50 kb, 60 kb, 70 kb, 80 kb, 90 kb, 100 kb, 110 kb, 120 kb, or more than 120 kb.

22. The gene editing system of any one of claims 1-21, wherein the donor polynucleotide encodes a therapeutic, a reporter, or a marker.

23. The gene editing system of claim 22, wherein the reporter comprises a fluorescent protein.

24. The gene editing system of claim 23, wherein the fluorescent protein is GFP, EBFP, EBFP2, Azurite, mKalamal, ECFP, Cerulean, CyPet, YFP, Citrine, Venus, YPet, RFP, CFP, or a derivative thereof.

25. The gene editing system of claim 22, wherein the reporter is acetohydroxyacid synthase (AHAS), alkaline phosphatase (AP), beta galactosidase (LacZ), beta glucuronidase (GUS), chloramphenicol acetyltransferase (CAT), horseradish peroxidase (HRP), luciferase (Luc), nopaline synthase (NOS), octopine synthase (OCS), luciferase, or a derivative thereof.

26. The gene editing system of any one of claims 22-25, wherein the marker is an antibiotic resistance marker.

27. The gene editing system of claim 26, wherein the antibiotic resistance marker is kanamycin, spectinomycin, streptomycin, ampicillin, carbenicillin, bleomycin, erythromycin, polymyxin B, tetracycline, chloramphenicol, neomycin, zeocin, or a derivative thereof.

28. The gene editing system of any one of claims 22-27, wherein the marker is a cell surface marker.

29. A eukaryotic genome comprising a donor polynucleotide sequence; and an attL sequence 5′ to the donor polynucleotide sequence, wherein the attL sequence comprises a sequence selected from the group consisting of: SEQ ID NOs: 3, 4, 7, 8, 11, 12, 15, 16, 7153, 7157, 7161, 7165, 7169, 7173, 7177, 7181, 7216, 7221, 7227, 7234, 7239, 7244, 7249, 7254, 7259, 7265, 7272, 7278, 7283, 7288, 7293, 7298, 7303, 7308, 7313, 7318, 7323, 7328, 7333, 7338, 7343, 7348, 7353, 7358, 7363, 7368, 7373, 7378, 7383, 7388, 7393, 7398, and 7403.

30. The eukaryotic genome of claim 29, further comprising an attR sequence 3′ to the donor polynucleotide sequence.

31. A eukaryotic genome comprising a donor polynucleotide sequence; and an attL sequence 3′ to the donor polynucleotide sequence, wherein the attL sequence comprises a sequence selected from the group consisting of: SEQ ID NOs: 3, 4, 7, 8, 11, 12, 15, 16, 7153, 7157, 7161, 7165, 7169, 7173, 7177, 7181, 7216, 7221, 7227, 7234, 7239, 7244, 7249, 7254, 7259, 7265, 7272, 7278, 7283, 7288, 7293, 7298, 7303, 7308, 7313, 7318, 7323, 7328, 7333, 7338, 7343, 7348, 7353, 7358, 7363, 7368, 7373, 7378, 7383, 7388, 7393, 7398, and 7403.

32. The eukaryotic genome of claim 31, further comprising an attR sequence 3′ to the donor polynucleotide sequence.

33. A eukaryotic genome comprising:
a donor polynucleotide sequence;
an attL sequence 5′ or 3′ to the donor polynucleotide sequence, wherein the attL sequence comprises a sequence selected from the group consisting of: SEQ ID NOs: 3, 4, 7, 8, 11, 12, 15, 16, 7153, 7157, 7161, 7165, 7169, 7173, 7177, 7181, 7216, 7221, 7227, 7234, 7239, 7244, 7249, 7254, 7259, 7265, 7272, 7278, 7283, 7288, 7293, 7298, 7303, 7308, 7313, 7318, 7323, 7328, 7333, 7338, 7343, 7348, 7353, 7358, 7363, 7368, 7373, 7378, 7383, 7388, 7393, 7398, and 7403; and
an attR sequence 5′ or 3′ to the donor polynucleotide sequence, wherein the attR sequence comprises a sequence selected from the group consisting of: SEQ ID NOs: 3, 4, 7, 8, 11, 12, 15, 16, 7154, 7158, 7162, 7166, 7170, 7174, 7178, 7182, 7218, 7223, 7230, 7236, 7241, 7246, 7251, 7256, 7261, 7268, 7274, 7280, 7285, 7290, 7295, 7300, 7305, 7310, 7315, 7320, 7325, 7330, 7335, 7340, 7345, 7350, 7355, 7360, 7365, 7370, 7375, 7380, 7385, 7390, 7395, 7400, and 7405.

34. The eukaryotic genome of any one of claim 30, 32, or 33, wherein the attL sequence and the attR sequence are the same.

35. The eukaryotic genome of any one of claims 29-34, wherein the attL sequence is a recombined sequence of a first attachment site sequence and a second attachment site sequence.

36. The eukaryotic genome of any one of claim 30 or 32-35, wherein the attR sequence is a recombined sequence of a first attachment site sequence and a second attachment site sequence.

37. The eukaryotic genome of any one of claims 35-36, wherein the first attachment site sequence is a bacterial genomic recombination sequence (attB).

38. The eukaryotic genome of any one of claims 35-36, wherein the first attachment site sequence is a phage genomic recombination sequence (attP).

39. The eukaryotic genome of any one of claims 35-38, wherein the second attachment site sequence is a bacterial genomic recombination sequence (attB).

40. The eukaryotic genome of any one of claims 35-38, wherein the second attachment site sequence is a phage genomic recombination sequence (attP).

41. The eukaryotic genome of any one of claims 37-40, wherein the attB sequence comprises about 20 to about 500 nucleotides.

42. The eukaryotic genome of any one of claims 38-41, wherein the attP sequence comprises about 20 to about 500 nucleotides.

43. The eukaryotic genome of any one of claims 37-42, wherein the attB sequence comprises at least about 80% sequence identity to any one of SEQ ID NOs: 1, 2, 5, 6, 9, 10, 13, 14, 7151, 7155, 7159, 7163, 7167, 7171, 7175, 7179, 7188-7200, 7206-7210, 7215, 7220, 7225, 7226, 7233, 7238, 7243, 7248, 7253, 7258, 7263, 7264, 7271, 7277, 7282, 7287, 7292, 7297, 7302, 7307, 7312, 7317, 7322, 7327, 7332, 7337, 7342, 7347, 7352, 7357, 7362, 7367, 7372, 7377, 7382, 7387, 7392, 7397, and 7402.

44. The eukaryotic genome of any one of claims 37-43, wherein the attB sequence comprises at least about 80% sequence identity to any one of SEQ ID NOs: 1, 5, 9, and 13.

45. The eukaryotic genome of any one of claims 38-44, wherein the attP sequence comprises at least about 80% sequence identity to any one of SEQ ID NOs: 1, 2, 5, 6, 9, 10, 13, 14, 7152, 7156, 7160, 7164, 7168, 7172, 7176, 7180, 7183-7187, 7201-7205, 7217, 7222, 7228, 7229, 7235, 7240, 7245, 7250, 7255, 7260, 7266, 7267, 7273, 7279, 7284, 7289, 7294, 7299, 7304, 7309, 7314, 7319, 7324, 7329, 7334, 7339, 7344, 7349, 7354, 7359, 7364, 7369, 7374, 7379, 7384, 7389, 7394, 7399, and 7404.

46. The eukaryotic genome of any one of claims 38-45, wherein the attP sequence comprises at least about 80% sequence identity to any one of SEQ ID NOs: 2, 6, 10, and 14.

47. The eukaryotic genome of any one of claims 29-46, wherein the attL sequence comprises at least about 80% sequence identity to any one of SEQ ID NOs: 3, 4, 7, 8, 11, 12, 15, 16, 7153, 7157, 7161, 7165, 7169, 7173, 7177, 7181, 7216, 7221, 7227, 7234, 7239, 7244, 7249, 7254, 7259, 7265, 7272, 7278, 7283, 7288, 7293, 7298, 7303, 7308, 7313, 7318, 7323, 7328, 7333, 7338, 7343, 7348, 7353, 7358, 7363, 7368, 7373, 7378, 7383, 7388, 7393, 7398, and 7403.

48. The eukaryotic genome of any one of claims 29-47, wherein the attR sequence comprises at least about 80% sequence identity to any one of SEQ ID NOs: 3, 4, 7, 8, 11, 12, 15, 16, 7154, 7158, 7162, 7166, 7170, 7174, 7178, 7182, 7218, 7223, 7230, 7236, 7241, 7246, 7251, 7256, 7261, 7268, 7274, 7280, 7285, 7290, 7295, 7300, 7305, 7310, 7315, 7320, 7325, 7330, 7335, 7340, 7345, 7350, 7355, 7360, 7365, 7370, 7375, 7380, 7385, 7390, 7395, 7400, and 7405.

49. A mammalian cell comprising the eukaryotic genome of any one of claims 29-48.

50. The mammalian cell of claim 49, wherein the mammalian cell is a human cell.

51. The mammalian cell of any one of claims 49-50, further comprising a serine recombinase.

52. The mammalian cell of claim 51, wherein the serine recombinase comprises at least about 80% sequence identity to any one of SEQ ID NOs: 21-7060, 7105-7142, and 7211-7214.

53. The mammalian cell of claim 51, wherein the serine recombinase comprises at least about 80% sequence identity to SEQ ID NO: 21.

54. The mammalian cell of claim 51, wherein the serine recombinase comprises at least about 80% sequence identity to SEQ ID NO: 22.

55. The mammalian cell of claim 51, wherein the serine recombinase comprises at least about 80% sequence identity to SEQ ID NO: 23.

56. The mammalian cell of claim 51, wherein the serine recombinase comprises at least about 80% sequence identity to SEQ ID NO: 24.

57. The mammalian cell of claim 51, wherein the serine recombinase comprises an integration efficiency of at least about 5%.

58. The mammalian cell of claim 51, wherein the serine recombinase comprises an integration efficiency of at least about 25%.

59. The mammalian cell of claim 51, wherein the serine recombinase comprises an integration efficiency of at least about 50%.

60. The mammalian cell of claim 51, wherein the serine recombinase is capable of targeting genes comprising a catalase domain or synthase domain.

61. The mammalian cell of claim 60, wherein the catalase is manganese catalase.

62. The mammalian cell of any one of claims 60-61, wherein the synthase is Queuosine synthase.

63. The mammalian cell of any one of claims 60-62, wherein the serine recombinase is capable of targeting genes comprising a DUF4244 Pfam domain.

64. A eukaryotic cell comprising a serine recombinase comprising at least about 80% sequence identity to any one of SEQ ID NOs: 21-7060, 7105-7142, and 7211-7214.

65. A eukaryotic cell comprising a serine recombinase comprising at least about 80% sequence identity to SEQ ID NO: 21.

66. A eukaryotic cell comprising a serine recombinase comprising at least about 80% sequence identity to SEQ ID NO: 22.

67. A eukaryotic cell comprising a serine recombinase comprising at least about 80% sequence identity to SEQ ID NO: 23.

68. A eukaryotic cell comprising a serine recombinase comprising at least about 80% sequence identity to SEQ ID NO: 24.

69. A eukaryotic cell comprising a serine recombinase comprising at least about 80% sequence identity to SEQ ID NO: 1848.

70. A eukaryotic cell comprising a serine recombinase comprising at least about 80% sequence identity to SEQ ID NO: 7111.

71. A eukaryotic cell comprising a serine recombinase comprising at least about 80% sequence identity to SEQ ID NO: 7115.

72. A eukaryotic cell comprising a serine recombinase comprising at least about 80% sequence identity to SEQ ID NO: 7131.

73. A eukaryotic cell comprising a serine recombinase comprising at least about 80% sequence identity to SEQ ID NO: 7136.

74. A eukaryotic cell comprising a serine recombinase comprising at least about 80% sequence identity to SEQ ID NO: 7139.

75. A eukaryotic cell comprising a serine recombinase comprising at least about 80% sequence identity to SEQ ID NO: 7140.

76. The eukaryotic cell of any one of claims 64-75, wherein the eukaryotic cell is a mammalian cell.

77. The eukaryotic cell of any one of claims 64-75, wherein the eukaryotic cell is a human cell.

78. A vector comprising:
a) a nucleic acid encoding serine recombinase comprising at least about 80% sequence identity to any one of SEQ ID NOs: 21-7060, 7105-7142, and 7211-7214; and
b) one or more regulatory elements.

79. The vector of claim 78, wherein the one or more regulatory elements comprises a promoter, an enhancer, an intron, a microRNA, a linker, a splicing element, or a polyA signal.

80. The vector of claim 79, wherein the promoter is selected from a constitutive promoter, an inducible promoter, a mini promoter, or a derivative thereof.

81. The vector of claim 79, wherein the promoter is selected from the group consisting of:
CMV, CBA, EF1a, CAG, PGK, TRE, U6, UAS, T7, Sp6, lac, araBad, trp, Ptac, p5, p19, p40, Synapsin, CaMKII, GRK1, polH, EM7, OpIE1, and a derivative thereof.

82. A vector comprising a nucleic acid encoding a serine recombinase comprising at least about 80% sequence identity to any one of SEQ ID NOs: 21-7060, 7105-7142, and 7211-7214, wherein the vector is selected from the group consisting of: a plasmid, a nanoplasmid, a phagemid, a phage derivative, a bacmid, a bacterial artificial chromosome (BAC), a minicircle, a doggybone, a yeast artificial chromosome (YAC), and a cosmid.

83. A method for gene editing, comprising:
a) providing or identifying a first attachment site sequence in a host genome;
b) providing a nucleic acid comprising a donor polynucleotide and a second attachment site sequence to a host cell; and
c) contacting the host cell with a serine recombinase comprising at least about 80% sequence identity to any one of SEQ ID NOs: 21-7060, 7105-7142, and 7211-7214 or a nucleic acid encoding the serine recombinase,
wherein the first attachment site sequence and the second attachment site sequence are capable of recombination.

84. The method of claim 83, wherein the first attachment site sequence is endogenous in the host genome.

85. The method of claim 83, wherein the first attachment site sequence is provided using viral delivery.

86. The method of claim 83, wherein the first attachment site sequence is provided using a transposase.

87. The method of claim 83, wherein the first attachment site sequence is provided using a nuclease.

88. The method of claim 87, wherein the nuclease is a double-strand nuclease.

89. The method of claim 87, wherein the nuclease is a Type II CRISPR endonuclease.

90. The method of claim 87, wherein the nuclease is a Type V CRISPR endonuclease.

91. The method of claim 87, wherein the nuclease is Cas9.

92. The method of claim 76, wherein the first attachment site sequence is provided using a reverse transcriptase.

93. The method of any one of claims 83-92, wherein the second attachment site sequence is 5′ of the donor polynucleotide.

94. The method of any one of claims 83-93, wherein the first attachment site sequence is a bacterial genomic recombination sequence (attB).

95. The method of any one of claims 83-94, wherein the first attachment site sequence is a phage genomic recombination sequence (attP).

96. The method of any one of claims 83-95, wherein the second attachment site sequence is a bacterial genomic recombination sequence (attB).

97. The method of any one of claims 83-96, wherein the second attachment site sequence is a phage genomic recombination sequence (attP).

98. The method of any one of claims 94-97, wherein the attB sequence comprises about 20 to about 500 nucleotides.

99. The method of any one of claims 95-98, wherein the attP sequence comprises about 20 to about 500 nucleotides.

100. The method of any one of claims 94-99, wherein the attB sequence comprises at least about 80% sequence identity to any one of SEQ ID NOs: 1, 2, 5, 6, 9, 10, 13, 14, 7151, 7155, 7159, 7163, 7167, 7171, 7175, 7179, 7188-7200, 7206-7210, 7215, 7220, 7225, 7226, 7233, 7238, 7243, 7248, 7253, 7258, 7263, 7264, 7271, 7277, 7282, 7287, 7292, 7297, 7302, 7307, 7312, 7317, 7322, 7327, 7332, 7337, 7342, 7347, 7352, 7357, 7362, 7367, 7372, 7377, 7382, 7387, 7392, 7397, and 7402.

101. The method of any one of claims 94-100, wherein the attB sequence comprises at least about 80% sequence identity to any one of SEQ ID NOs: 1, 5, 9, and 13.

102. The method of any one of claims 95-101, wherein the attP sequence comprises at least about 80% sequence identity to any one of SEQ ID NOs: 1, 2, 5, 6, 9, 10, 13, 14, 7152, 7156, 7160, 7164, 7168, 7172, 7176, 7180, 7183-7187, 7201-7205, 7217, 7222, 7228, 7229, 7235, 7240, 7245, 7250, 7255, 7260, 7266, 7267, 7273, 7279, 7284, 7289, 7294, 7299, 7304, 7309, 7314, 7319, 7324, 7329, 7334, 7339, 7344, 7349, 7354, 7359, 7364, 7369, 7374, 7379, 7384, 7389, 7394, 7399, and 7404.

103. The method of any one of claims 95-102, wherein the attP sequence comprises at least about 80% sequence identity to any one of SEQ ID NOs: 2, 6, 10, and 14.

104. The method of any one of claims 83-103, wherein the nucleic acid comprising the donor polynucleotide and the second attachment site sequence is delivered by a plasmid, a nanoplasmid, a phagemid, a phage derivative, a virus, a bacmid, a bacterial artificial chromosome (BAC), a minicircle, a doggybone, a yeast artificial chromosome (YAC), or a cosmid.

105. The method of any one of claims 83-106, wherein the nucleic acid encoding the serine recombinase is delivered by a plasmid, a nanoplasmid, a phagemid, a phage derivative, a virus, a bacmid, a bacterial artificial chromosome (BAC), a minicircle, a doggybone, a yeast artificial chromosome (YAC), or a cosmid.

106. The method of any one of claims 104-105, wherein the virus is an alphavirus, a parvovirus, an adenovirus, an AAV, a baculovirus, a Dengue virus, a lentivirus, a herpesvirus, a poxvirus, an anellovirus, a bocavirus, a vaccinia virus, or a retrovirus.

107. The method of claim 106, wherein the AAV is AAV1, AAV2, AAV3, AAV4, AAV5, AAV6, AAV7, AAV8, AAV9, AAV10, AAV11, AAV12, AAV13, AAV14, AAV15, AAV16, AAV-rh8, AAV-rh10, AAV-rh20, AAV-rh39, AAV-rh74, AAV-rhM4-1, AAV-hu37, AAV-Anc80, AAV-Anc80L65, AAV-7m8, AAV-PHP-B, AAV-PHP-EB, AAV-2.5, AAV-2tYF, AAV-3B, AAV-LK03, AAV-HSC1, AAV-HSC2, AAV-HSC3, AAV-HSC4, AAV-HSC5, AAV-HSC6, AAV-HSC7, AAV-HSC8, AAV-HSC9, AAV-HSC10, AAV-HSC11, AAV-HSC12, AAV-HSC13, AAV-HSC14, AAV-HSC15, AAV-TT, AAV-DJ/8, AAV-Myo, AAV-NP40, AAV-NP59, AAV-NP22, AAV-NP66, or AAV-HSC16, or a derivative thereof.

108. The method of claim 106, wherein the herpesvirus is HSV-1, HSV-2, VZV, EBV, CMV, HHV-6, HHV-7, or HHV-8.

109. The method of any one of claims 83-108, wherein the donor polynucleotide comprises a size of at least about 1 kilobase (kb), 2 kb, 3 kb, 4 kb, 5 kb, 6 kb, 7 kb, 8 kb, 9 kb, 10 kb, 20 kb, 30 kb, 40 kb, 50 kb, 60 kb, 70 kb, 80 kb, 90 kb, 100 kb, 110 kb, 120 kb, or more than 120 kb.

110. The method of any one of claims 83-109, wherein the donor polynucleotide encodes a therapeutic, a reporter, or a marker.

111. The method of claim 110, wherein the reporter comprises a fluorescent protein.

112. The method of claim 111, wherein the fluorescent protein is GFP, EBFP, EBFP2, Azurite, mKalamal, ECFP, Cerulean, CyPet, YFP, Citrine, Venus, YPet, RFP, CFP, or a derivative thereof.

113. The method of claim 110, wherein the reporter is acetohydroxyacid synthase (AHAS), alkaline phosphatase (AP), beta galactosidase (LacZ), beta glucuronidase (GUS), chloramphenicol acetyltransferase (CAT), horseradish peroxidase (HRP), luciferase (Luc), nopaline synthase (NOS), octopine synthase (OCS), luciferase, or a derivative thereof.

114. The method of any one of claims 110-113, wherein the marker is an antibiotic resistance marker.

115. The method of claim 114, wherein the antibiotic resistance marker is kanamycin, spectinomycin, streptomycin, ampicillin, carbenicillin, bleomycin, erythromycin, polymyxin B, tetracycline, chloramphenicol, neomycin, zeocin, or a derivative thereof.

116. The method of any one of claims 110-113, wherein the marker is a cell surface marker.

The application's sequence listing, which the Patent Office published only in electronic form, follows.

SEQUENCE LISTING (7449 sequences)

SEQ ID NO: 1 - DNA, 312 bp, synthetic construct
  source 1..312: mol_type = other DNA
tcctgtctgtatgattttattgtctgtgtcttcgcatcatcaattcataacatcgtttcataacactgttatgaaattagcaccaaaaaatccgggtgtcactattgacacccggggaaaatgggtagttgagaaaggttctcaacaaataaacatcgcatctccaaaactgaagaaccgataccgttctttcaccgcctcttcataggctgccagtacatgttcttttccggccagggcggataccagcatgatcagcgtggattccggcagatggaagttagtgatgaggcagtccagtattttaaactg

SEQ ID NO: 2 - DNA, 312 bp, synthetic construct
  source 1..312: mol_type = other DNA
taaacagatatcctcttcagagggctgaggaatgttttttataagctccacggcagcctcccccatttcctctgttgtcacacctatttctttcatttattgccccctttctttacacccaacaaatgttagatttgggtgttaaaccacaaacatcgcatcccacatgcttatgggttacaaccgaaatctaacatttgtttagtttattatttaataggaagatattccatatcttttatcaatgaaatggaagctgttcatctatctcatccgatactttcatgaacccatcattgtaagtaggaaatg

SEQ ID NO: 3 - DNA, 312 bp, synthetic construct
  source 1..312: mol_type = other DNA
tcctgtctgtatgattttattgtctgtgtcttcgcatcatcaattcataacatcgtttcataacactgttatgaaattagcaccaaaaaatccgggtgtcactattgacacccggggaaaatgggtagttgagaaaggttctcaacaaataaacatcgcatcccacatgcttatgggttacaaccgaaatctaacatttgtttagtttattatttaataggaagatattccatatcttttatcaatgaaatggaagctgttcatctatctcatccgatactttcatgaacccatcattgtaagtaggaaatg

SEQ ID NO: 4 - DNA, 312 bp, synthetic construct
  source 1..312: mol_type = other DNA
taaacagatatcctcttcagagggctgaggaatgttttttataagctccacggcagcctcccccatttcctctgttgtcacacctatttctttcatttattgccccctttctttacacccaacaaatgttagatttgggtgttaaaccacaaacatcgcatctccaaaactgaagaaccgataccgttctttcaccgcctcttcataggctgccagtacatgttcttttccggccagggcggataccagcatgatcagcgtggattccggcagatggaagttagtgatgaggcagtccagtattttaaactg

SEQ ID NO: 5 - DNA, 312 bp, synthetic construct
  source 1..312: mol_type = other DNA
accaaaccgaatgcaaagattgcacagtatatcctcagccagtacggtggcccggatggtgagattggggcatctatgaggtacctgtctcagaggtttaccatgccaaaccgcatggctgcggcagtgctgaatgatatcggcacagaggaactggcacatttagagatggtatctaccattgttcatcagcttacacgggatctctccatggaggaaattgaaaagtcaggttttggaccttactatattgatcatacagtgggagtatggcctcaggctgcaggaggaattccctttaatgcctgtgag

SEQ ID NO: 6 - DNA, 312 bp, synthetic construct
  source 1..312: mol_type = other DNA
aaacaaatgctaaagaaatggtcgataagctgaagaaggccggttttgatgcaataattaagaagaaataaaagtatatgattcaaaaagagctccaaagttacttggggctctttttgaaataatcaatgataacctttatgtgctgacgaactggcacatagaggttatcagtagttaattttcattgaattttcgggaatatatccaatgaaaaagtaatctcatcgcctttaagaaagtaattctttgactctttagtataattaactctctcaatcagttctctgagaagcttattccttgtctgag

SEQ ID NO: 7 - DNA, 312 bp, synthetic construct
  source 1..312: mol_type = other DNA
accaaaccgaatgcaaagattgcacagtatatcctcagccagtacggtggcccggatggtgagattggggcatctatgaggtacctgtctcagaggtttaccatgccaaaccgcatggctgcggcagtgctgaatgatatcggcacagaggaactggcacatagaggttatcagtagttaattttcattgaattttcgggaatatatccaatgaaaaagtaatctcatcgcctttaagaaagtaattctttgactctttagtataattaactctctcaatcagttctctgagaagcttattccttgtctgag

SEQ ID NO: 8 - DNA, 312 bp, synthetic construct
  source 1..312: mol_type = other DNA
aaacaaatgctaaagaaatggtcgataagctgaagaaggccggttttgatgcaataattaagaagaaataaaagtatatgattcaaaaagagctccaaagttacttggggctctttttgaaataatcaatgataacctttatgtgctgacgaactggcacatttagagatggtatctaccattgttcatcagcttacacgggatctctccatggaggaaattgaaaagtcaggttttggaccttactatattgatcatacagtgggagtatggcctcaggctgcaggaggaattccctttaatgcctgtgag

SEQ ID NO: 9 - DNA, 308 bp, synthetic construct
  source 1..308: mol_type = other DNA
tatctacctccagatccagccgtttgtgttttctcttttcttccatagtcaacttacccctgtctcctaaatttactgctaaaacatatatttattttattacacattctgtcattttacaagaaatagttacatcattttataaacattgcatccccaaaggaaaagaaccggtatttctcctgcaccgccagctcataggcatgcagcacatgctctcttcccgccagcgccgataccagcatcaccagcgtggactgtggcagatggaaattggtaatcagtgcatcgatcaccttgaactgata

SEQ ID NO: 10 - DNA, 308 bp, synthetic construct
  source 1..308: mol_type = other DNA
ccattctttcatatatcgggaataatgggataaaaagacccaggaaggttgattttcctgggtcttttatttgtctcaatattcagttcgaattacctattgggtaactttcttcacaaatgtaagaaattgtgtcaaagtatcaacatagcatcccctatgatgcgatttcgacacaaaatcttatatttgtaatcttgcatcacttcattttatcattcggagtttttgcagtcaattcttttcgacccttcctggctgcttttcatcagcttttcttccagggcttgcacgattgcctcagtctt

SEQ ID NO: 11 - DNA, 308 bp, synthetic construct
  source 1..308: mol_type = other DNA
tatctacctccagatccagccgtttgtgttttctcttttcttccatagtcaacttacccctgtctcctaaatttactgctaaaacatatatttattttattacacattctgtcattttacaagaaatagttacatcattttataaacattgcatcccctatgatgcgatttcgacacaaaatcttatatttgtaatcttgcatcacttcattttatcattcggagtttttgcagtcaattcttttcgacccttcctggctgcttttcatcagcttttcttccagggcttgcacgattgcctcagtctt

SEQ ID NO: 12 - DNA, 308 bp, synthetic construct
  source 1..308: mol_type = other DNA
ccattctttcatatatcgggaataatgggataaaaagacccaggaaggttgattttcctgggtcttttatttgtctcaatattcagttcgaattacctattgggtaactttcttcacaaatgtaagaaattgtgtcaaagtatcaacatagcatccccaaaggaaaagaaccggtatttctcctgcaccgccagctcataggcatgcagcacatgctctcttcccgccagcgccgataccagcatcaccagcgtggactgtggcagatggaaattggtaatcagtgcatcgatcaccttgaactgata

SEQ ID NO: 13 - DNA, 308 bp, synthetic construct
  source 1..308: mol_type = other DNA
ccaccggccgtggtgagagagcggcgctagctcggggtattcgagagggcgtcggtaatgatgccctcgatggcatcgaccaccccgccgccgttgatgaccatgtagagcaccccggcaagcgctgcggccgccagagatcccatggcatattcgatggtgctcatcccctcgtcattgcggatgagctggtaatacttattaagtgcgtgcatagttagtgtcctttcatgtgaggtttagagaagttgtgcgcccaaactgatgactacgggcgcaagtcctagaacgatgaatgctggcaggaa

SEQ ID NO: 14 - DNA, 308 bp, synthetic construct
  source 1..308: mol_type = other DNA
ttgtgggcctcggtgggggcggtgaacacgggggagctccccgcctatctccaaccgacaccacttccacaggggggattgtggcacctgtatgctcgcacaccctaagcagtctcgcatcttctagggtataaaagtttgacaatcgagtattcgatagactaagatttttaccatgatggataataaactgaaagcactggtagtagtacgtatttcccgcctaatggaggcctcttcttctccggagaggcaagagcaggagtgcagggaactgtgtcagcgaatgggctgggaagtggtcggtg

SEQ ID NO: 15 - DNA, 308 bp, synthetic construct
  source 1..308: mol_type = other DNA
ccaccggccgtggtgagagagcggcgctagctcggggtattcgagagggcgtcggtaatgatgccctcgatggcatcgaccaccccgccgccgttgatgaccatgtagagcaccccggcaagcgctgcggccgccagagatcccatggcatattcgatagactaagatttttaccatgatggataataaactgaaagcactggtagtagtacgtatttcccgcctaatggaggcctcttcttctccggagaggcaagagcaggagtgcagggaactgtgtcagcgaatgggctgggaagtggtcggtg

SEQ ID NO: 16 - DNA, 308 bp, synthetic construct
  source 1..308: mol_type = other DNA
ttgtgggcctcggtgggggcggtgaacacgggggagctccccgcctatctccaaccgacaccacttccacaggggggattgtggcacctgtatgctcgcacaccctaagcagtctcgcatcttctagggtataaaagtttgacaatcgagtattcgatggtgctcatcccctcgtcattgcggatgagctggtaatacttattaagtgcgtgcatagttagtgtcctttcatgtgaggtttagagaagttgtgcgcccaaactgatgactacgggcgcaagtcctagaacgatgaatgctggcaggaa

SEQ ID NO: 17 - DNA, 12 bp, synthetic construct
  source 1..12: mol_type = other DNA
aaacatcgcatc

SEQ ID NO: 18 - DNA, 12 bp, synthetic construct
  source 1..12: mol_type = other DNA
gaactggcacat

SEQ ID NO: 19-20 - skipped (2 entries)

SEQ ID NO: 21 - protein, 578 aa, unidentified
  source 1..578: note = uncultivated organism
MARKNNLKIIQNASTKQTKVAIYLRVSTSYQVDKDSLPMQRKDLIAYCNLILGTDNYEVFEDAGYSGKNTDRPAFQEMMKRIRNGEFTHVLVWKIDRISRNLIDFAEMYEELQSLRVTFVSKNEQFDTSTAIGEAMLKIILVFAELERNMTSERVTATMISRANNGLWNGGRIPFGYDYDPDSMTFSIREDEARVCLIIKDFYLNTRSLLKTSQMLNDKGLLTRSGISWSPTTVWKIVSSPFYAGIYRYNHYKGTENRTVNPEDEWVMIQEHHPAIFTLEEHEKMLSILKENARTRNTVGKQCKRINVHIFSGIAYCGKCGSRLTSTPGKRQADGYRPSNYSCPKRRSTNECDNPTINDTVLGEFVINYILNMLNAKKTFSKISTPEELEKRLLHGSTFSDVSRVEQDGLNDFFNLLSRYGSDSSFVFAIKKPRKKKAAVSPELTVLRREKEKQERALQRLQDLYLYSDNAMSEKDFILKKTNITKRLDDINAQLGMITRSADSVLSDEEFIRQASHLLIQKELQNKEYIYFKNLAANVSPEILKTYMDTLLDSVYIVDGRVSSIVFKNGLTHRFEYK

SEQ ID NO: 22 - protein, 522 aa, unidentified
  source 1..522: note = uncultivated organism
MNLENVCLYLRKSRADREAEARGEGETLARHERILLDLAKSRGYNVGAIYKEIVSGETISARPVMQQVLHEVEAGMWDGVLVVEVERLARGDTIDQGTVSRAFQYSDTKIITPSKTYDPNNEFDEEYFEFGLFMSRREYKTIKRRLNAGRISSVKEGKYCGNKPPYGYERVKLSGEKGYTLQPIPAQADIVRMIFSWYSGADGNQIGVAKIVRKLNDMGVKSALGKDWTPASVQSILVNPVYTGMIRWNGRKTVKSIQNGAVIRSRPRAKADDVLLFPGRHPAIISKDMYDTVQRIRKKNPPRPVQITNTIKNPLAGIVYCSKCGRAMVRRPYQKRGQEDSLLCPYTSCSTVSSKLSLVEKVLLDGIKNLVDEYKLSSDVPKLDIDNVITLKEKLIEEKEAELKKLDAQKLKQYDLLEQGVYTTDVFLERSKSTAASIEACIESIKGLREEIEHDKKLVEQQAVFIPKCENLLENYWEFDAQTRNKLLRELIERVNYTKESKNYFLKGDEITFSLDIFPKIQ

SEQ ID NO: 23 - protein, 572 aa, unidentified
  source 1..572: note = uncultivated organism
MFVANSDAKNVRVAIYVRVSTLYQVDKDSLPMQKNDLIAYTKLMLGTDDYVIFEDAGYSGKNTDRPKFQEMMSQMRNGAFTHLLVWKIDRISRNLLDFAAMYSELKDLGVTFVSKSEQFDTSTAMGEAMLKIILVFAELERNITSERVTATMISRASNGLWNGGRIPYGYDYNPDNMEFSFNDAEQPVVVLIHDKYEEIRSLVRLSRYLNEKGYQTRAGNEWNPVSLLIILRSVFYCGDYQYNRLKEGDRQKVKDKSEWVTVQDHHPAIVSREQKERIISILDANSRLCRSRNMYKSPKHTHVFASLCYCGNCGKPMGASPAAAKKDWRYSKYSCPTRRKSATACTGKSTSDPILGEFLFNYILNMLNAQKDFQNVSTPAELEKRLLNGDTFKDIDHIEQNGLNDLFNVLASGEVTGDIYGKNTKIKSKAPVDPEVAQLRQDKAKTERALDRLRNLYLYSEDAISEREYVVERTRLTEQLEEINSQIGIVTSDDWQQSVSDEEFIQRASEFVISQKLSGRNYINYKRLALSVDLEVLKNFVLSIIDSITVTDGRIQTVTFRNGLSHSFIYRE

SEQ ID NO: 24 - protein, 556 aa, unidentified
  source 1..556: note = uncultivated organism
MMDNKLKALVVVRISRLMEASSSPERQEQECRELCQRMGWEVVGVASDLNVSAGATTPFERPELGSWLGSGKDNDPGRSHEFDVIVFWRLDRLVRSMTQLSTLMGWCEQRDVYLKSATESHIDTTTDMGRIMAMLVGSFAEVELAAIRERTGADQHHRIISGKYRGAVPSWGYKPVQDSSGGWKVEPDPVQVKQVHKAAGLVLQGVSMNEIARQFNAAGELTPRALNDVRQGREPRKSQWRGNRLKSMITSKAMLGYAMIREPILDKSGKPKRNKSGQKIYESEAKVVVKDGAPVKRAEAILDRDTWERVCKELASREVDVSARSHSLLLNVLFCGVCGNPAYKMSPNNGRRPTYRCSTAQLGKHGKCSTKTLQVDEEYIEDTVTNSFLGLLGDSVRAVKVWDEGVDHSEELAELEAGIRELANELPRYRAGTTAFDAITSNIETMQERLDQLEGEGVRPAGWVWEPTGQTIRDWWEASSVVERNAYLRECGVKVTFEHRENRKRGEAPDVKISYENIPGVVSELEPGEGASRAMQVLEQIPEGQRLVVEAGAEEK

SEQ ID NO: 25 - protein, 595 aa, unidentified
  source 1..595: note = uncultivated organism
MKERKKIRIAIYSRKSKYSDKGDSVGNQIEIAKEYIKMHFPEEEYDVEIVIYEDEGFSGGSFDRPQFKMFLEDERRYPYNILICYRLDRISRNIADFSALMNELNDLETSFISIKEQFDTKTPMGRAMMYIASVFAQLEREVIAERIRDNLLELSKTGTWLGGEAPLGFKTERYKKVEVCEQENDYITKKSKVASKLVVNEDEMKIVLLIYSKFLELKSMSKLVTYLMNNDIKTRKGVYFGINAVRKILTNPVYAKNDKDTMEYFDSKNIYIYCENDDRSNYDGKYGFLTYNKTSGYGGKENPIQDWIIAVGLQPGTISGKEWVAVQMLIEKNADKKYRAALSKKTNTLATGILRCKHCNSLMRAKNMGRAYKDGSINYRYCCTLKEKSRGHKCQSLNVGNEIDNKILEILKTTFVPNTEIYEELKKMATIKAEDNTNNELEFLQNAYNKNLEETEKLIEKLQYIDIDLMDMVNSKLRELKEQKQNLEYQIANVKSRGKIKDTSEMQTAKDLLKIIDNSFNIFQTFDLKTKRDIVGLFIEKIYGDGENIEIYMLNTKLEDSKKKFFIPTISKVENSFDNCLSSDKVSKITKWYFV

SEQ ID NO: 26 - protein, 552 aa, unidentified
  source 1..552: note = uncultivated organism
MSNIKIYKAAIYVRLSKEDGDVSDASKAESNSISNQKELIRDFLKDKQDIVIVSERVDDGYSGVNFERPAFQLMLEDIKQGKVDCVVVKDLSRFGRNYIESGRYIEKIFPMLGVRFIAINDNYDSLTGKSQTDEIVIPFKNLINDAYCRDISIKIRSHLDVKRRKGEFIGSFTIYGYAKDEHDHNKIVIDEYAAGVVRDIYQWKISGMSQQRIADKLNDMGVLSPAEYKKSCGIKYSANLQTKKQAIWSAVAITRILTNESYTGTLIQGKVTTPNYKFKKTVNKDEEDWVVIPNAFEAIITKEQFDMVQEILKKDTRVAPDKKSVYLFSGIAVCGDCGRQMSRKVSTVAGKKYVYYMCSANKKEGVCSSHRIREDELEKAVVTYLNSYIDELENIQHFLEFIDKLPYQEVNVKRLNMRIVQLEEDAQKYEKLKVSVYEDLKDELISKEEYISMKQEFEKRRRAALDSIAQIKIEIETLASRNGKHHEWIESFIANKGIEKLERNVVVELIDYIKIYEDKRIEIVFRYADNYKEILNQIRYIQDNKNEMQEVS

SEQ ID NO: 27 - protein, 553 aa, unidentified
  source 1..553: note = uncultivated organism
MNEPPNNGAAKVRCAIYTRKSTSEGLDSDFNTLDAQREAAEYFIRAMAGEGWEALPHRYDDGGFTGANTDRPALKRLLADIEAGEVDCVVVYKVDRLSRSLMDFARLLALFDQKDVTFVSTTQNFNTTNSMGRLTLNILLSFAQFEREMIAERTRDKMAAARKRGKWLGSRPPYGYLGDRDKKQLVVCEEEAERVRTIFRMYLRLGSVNAVAKRINDLGWMKKGYRAKTGRVTPPRQYRDKDVHSILRNVTYLGKVEFNGELYEGEHEAIVSEELFARVQSVLTSKACGRGRRRGRNPEYLLQGIAWCGLCDKRITTTAGRGRNKEVYRYYVCSNRGRKGRDGCDHPRLGAEELEQLVVSRVKARCSDPLLREEIVARMQGGRVEAMAAITSERERIVADEAKLHAEGRKLMDAIGSETGTQGKLLAERIGEIEAQLDILSTERCSLDAQLRGLQNATEQVRATVNILEVFDAVWDEFEAAEKQDLVHLVVKRVVVNEPEGKLDLEFHDLAAPFEPLATEPEDEPDDKEPPDDEVPTVATSAPVSAPAMEASP

SEQ ID NO: 28 - protein, 574 aa, unidentified
  source 1..574: note = uncultivated organism
MKKVRCAIYTRKSSEEGLEQDFNSLHAQREACAAYVLSQASEGWSLVGAEYDDGGISGGTLERPALRRLLADIEARRIDIVVVYKVDRLTRSLLDFARLVETMDKAGVSFVSVTQSFNTTTSMGRLTLNMLLSFAQFEREVTAERIRDKIAASKARGMWMGGMPPLGYEPDGRSLKVVEEHAALMRDIFAHYLALGSVRLVHEQLIAKGVTTPSRTLTSGRTIGGKPFMRSQLYRMLSSPVYVGEVRHRGQVYQGKHEGIIERGLWDAVQRQLAENRQGEKRKTRASSPSLLTGLVFDETGEPLVASHTCKGTRRYRYYVSRALQHDSAATGGAIKGSGADSRLIIGLTEPQGIRIPARELEAAVAQRITEALSDPMTLAADAGLPLEAARLPTLMRTCGELATAINAHKHATTRALVSRVEVSPQDLQIELSGVALGLRLGFGPDDASAVILTSKVRLSRSGLALRLVHSDGRPLVRNTVNAGLVALLQRARNWWDRLAEGNIEIATIAREEQVNDSWVSRVVRLNFLAPPIVQAILNGTQPVSVTAASLRSADIPDAWDRQLAYFGMVPAGQ

SEQ ID NO: 29 - protein, 541 aa, unidentified
  source 1..541: note = uncultivated organism
MSKKVYRTAIYARLSRDDGDKAESNSIVSQKAMCEEYIKKAGDLELVETFVDDGYSGVDFQRPGFMKMEQAVREKRIDAIVCKDLSRFSRNYIEGGRYLERIFPQLGLRFIAINDGYDTLTGNPQSDSFIIPFKNLINDTYCKDISVKIRTNLDVKRRKGEYVGSYAPYGYAKSADDKNRLVVDEYAGGIVRKIFSLYKDGMSICRIAEHLNELGVLSPMEYKRSLGIRFETAFRTGNTAKWSYRAVKRILTNEAYIGVLVQGKRGTPNYKVHVIREREESEWIRVEDAHEALVGYEDFRAVQGMLKRDMRSVSEGSEENLFSGFLFCADCGQAMVRKVVPSGKKRYYYYVCSSAQRHEGCSPHSIPVKEVEKAVGGAVRTQVSAVLDLAETLEYIDKMPSASRRMLKFEEHIAGLEGEIERYRRMKLRLYEDLSDGVIDKKEYADFREQYTALIEEKSAALERVRREQKDAEVCGETQHAWVALFRQYENIEELTRRALMALVDKIYVYEKHVVEVSFKYRDEFCRMEEVVDQSAGVALE

SEQ ID NO: 30 - protein, 550 aa, unidentified
  source 1..550: note = uncultivated organism
MNQTILEAVTVWNTYGYVRLSHEDGDKEESNSVTGQKDLIRDYLSRHPELVECGMKVDDGYTGSNFDRPAFQEMMADVKAGKVNCIVVKDLSRFGREYLDAGEYIEKIFPFLGVRFIAINDNYDSLHRNAESDDLMIPFKNLINEAYCRDASIKIRSQLEIKRRRGDFIGSFAVYGYLKDPDDKHRLIVDDFAADVVRDLFKWKLEGISAGDIADKLNADGILSPMDYKKSQGLRFATPFRVNTQSRWSAAAVLRILKNPVYTGVLAQGKNTTPSYKVKRRIKKPSEEWAVVEGRHEAIIDRMSFESVQKVLALDTRTSPGNKAVELFSGMVFCGECGAAMIRKTVPSGGKKYVYYVCAAHKNEKTCFAHTLRDSALEEIVTEALKRHIHNVIDLSDLLKLTDAAALQQAGVRKLQARLDKKQEEIDRYQRLLRSLYESLTDGVIDREEYQALKKTYTASRAEAEGQVEALREEMGRTLELTVNNQGWMEQFRKRRNIVALDREIVVSLIERILIYKDRRVEIVHRWQDEFQYQTDLLLQAQALSVKEAV

SEQ ID NO: 31 - protein, 524 aa, unidentified
  source 1..524: note = uncultivated organism
MKRQKQEENALTAVIYARYSSHNQREVSIEQQVEECREYAQQNNYDVVAVYADKHTSGRSDRRPEFQRMMRDAEKHRFQLVISYKSNRISRNMMHALQYEERLSRLGIRVCYAKEEYGDTAAGRFALRTMMNVNQFYSESMAEDIRRGMMDNAQKCMVNSALPYGYMKGPDGKFAINPDTAPVAQEIFRRVAANETYKDIALDLNARGIRNSLGNRWGKSSFKRMLTNEAYIGVYQFAEVRVENGVPPLITKEVFETVQNRVKNQRHAKGRHQADGDYLLTGKLFCGHCKRPMTGISGTAKSGSLYYYYVCQGRRLNDGCDKTNVRREWLHEQVASALQQQMLSDKAIAWMADQAVAYGKHLRETNPSKETEKQLSDVKRAINNIMKAIEQGIFTETTKGRLEELEQEQKALSTRLNRELRKLPDISREKIIYRLESCRDGDIKDPKYQKFLFDTFLNAVYLYDDKMHLDFNYTGDGSSATVPLATDPPLDDIETLSQSSFKLCAGPPIWEAIIYMASPFCYIP

SEQ ID NO: 32 - protein, 564 aa, unidentified
  source 1..564: note = uncultivated organism
MTTPSRIRCAIYTRKSSEEGLDQSFNSLDAQREACEAYIVSQRHEGWQLIPSQYDDGGFSGGNMERPALKRLLEDIAAKRVDTVVVYKVDRLTRSLADFAKIVEQFDKQGISFVSVTQQFNTTTSMGRLTLNVLLSFAQFEREVTGERIRDKIAATKRKGMWMGGVVPLGYDLDDRHLVLNPAEAEQVQEIYQLYLKLGCVTKLQEYLEQRGILSKRRVSRTGRASGGACYSRGALYLIPHNRIYRGEIPHKGASYPGQHSAIIEQKLWDQVQQQFQRNLQAARKRPRSTEQSLLMGLLYAEKGNRFTPSHATKKGRRYRYYVSQAVIKNPRNRPHGPVRIPASEIEELVLSQLTLLLRSTQRMMEMLVGSDASAAEVQAVTEASREWNTAPTDKIQSLLQSTAQRVVAYNDRIEIQINKSLLRQIALGISDEQTSPSDNPNDLVTIEATAELKRCGGEVRLVVPLDSPGARPHEVRSLIRAISRAHEWVDRILQGEVVNQRSIAKETGLNERYISRVIPLAFLAPDLTEAILEGKQAAYLSLDTCLGNIPGDWSQQRIQLSGS

SEQ ID NO: 33 - protein, 561 aa, unidentified
  source 1..561: note = uncultivated organism
MAEVQIIKPCIDTEHIQNFSKKSRKKKVCAYCRVSTDMEDQRTSYYSQIDHYSTYIKKNKDWEFAGVYADDGITGTQIKKRDEFIRMLDDCKAGKIDIIIAKSISRFARNTVDTLETVRFLRDLDIDVYFEKENIHTLNMDSEMFLTLYSAFAQAESESTSMNVKLGYRAKMKRGEPCGSISCYGYNYDKNTKELTINEKEAKVVKKIFKYYLNGDGSTVIARKLTEEGIQAPAGGNKWHPGVIKDMLRNVKYVGDVCGQKFFVENPISHKLIRNRGQKPMYYAKGHHLGIIDRESFDKVQQIYQSRSTTIKEGKEYCEKFSLRYTFSSMIYCQHCGKTYVRRYTKYKNKDGVTHDHVYWACSSNVKKVDCGKAVTIRDEELKSLFVSLFNKFLNQSKNDDLIKKIKDVISKDNSEEKLQRLEKKISQVKDKMSKLIELNINQDINSEVFSSKNQELNTELISLSKEKEEVLNSKKYIQKEEKRLKTIEKELEKSSTIYRFDDEVFKKLISKIIIGDYDENNNYDPNVIKFVLNIKNITSNDSIKFLSLELDERFHKATSL

SEQ ID NO: 34 - protein, 565 aa, unidentified
  source 1..565: note = uncultivated organism
MPEEADSSSDSKAKRIAIYCRKSNDENLTNNVTSIDSQKMCCRSYIDIQKAKHWEEYPEVFDDPAESGKSLKRPAMQRLLKCVQEKKIDGVIVYKLDRLTRNSRDFHYLLELFERQNVAFVSATESIDTKSPQGRLMTAIMVQFAQYDRELDQERSRDFHLSRARKGLWTGGLAPLGYDLKDKMLVINPEEAELVNRVFNLYVEYRSTIRVAQELNQLGFRRKVYKKIEGNKKAYGGKAFDMDSVLRILQRKVYIGTVRNTRTEQEFQGKHEPIVDMALFEQVQKLIVEHNHRGGEVHYNANKHGFLFKGLVGCGECGSAIVPTYRKKKGKTYLYYKCLAQSKGLPNKCAITPLGARKFESFVVENIAAIGWDRPFLEKITLLAQKKAKENVGPLEKEHQILEGRLKNIKRELRRLVDLVKVGSASGEVAEEIQRLEETKKGLIGRMSAIEVLTAHNKKVVYDVDAIQGTLQRFAMFINRLPVELQVKMIRVLVEKIIVFKDKIVIKVPETPVGEIQKLLDTKLLFGGCLLRERWGANNNHKQNDHRIGVVELDKEWRPQRDSNP

SEQ ID NO: 35 - protein, 531 aa, unidentified
  source 1..531: note = uncultivated organism
MISEQAVVDPTKVAIYIRWSTEDQGEGTTLEVQSETCRAYLISQGWVVNDELIFIDDGYSGGSIDRPALGKLRASVASGEVHCVVVYKLDRLSRSVVDTVNLVCREWDGKCSIKSAREPIDTTTHAGKMFFYTLVNFAEWERSVIKERTFSGKMRRAHEGRNPGFKPPYGYVAGEGGAFALVPEEAAVVQRIYREYLSGSGIRQIVTRLNKEGIPPREAKMWGQSTVQRILANPAYMGQLEYGRRRQVGTSRVKRKAVVVVSSSLIPVIVSREDWEAVQALKESRPGFGKGQGSGRAAVSASLLTGLLKCSGCGHGFAGRSQSHPYHYYRCMGVHMKSSAYCDCGGIRQDLLDELVVGALRQLYGGEEAKDRLVRQATLHFERQLVEARGSLKSLAADVERLAAEEQRLKRMLRAGELTVVEYRELKADLEKEGLDLRWSEDRLRSLEKQALAGLNGQERLRETLAQVDEWDRLPHLSRKQLLRQFIQEIRAYRAMRSETVQCHIVWRWDSEHAGEPPIPTEQYVVAEQGR

SEQ ID NO: 36 - protein, 550 aa, unidentified
  source 1..550: note = uncultivated organism
MLNYLDKTYAAAIYLRLSKEDGDLSSASRKTESNSIANQRKLIQDYVKHHPEIASTVEFCDDGFTGANFNRPDFQRMIQEVRQQKINCIIVKDLSRFGRDYIESGRYIEKIFPALGVRFIAINDNYDSAEKEQVGNEIILPFKNLINDSYSRDISIKVRSNLDIKRRNGEFVGTHVVYGYMRSPENKNQLVIDKEAAAVVERIYRMKIDGYSPAHIADQLNEEGIPSPSEYKRLKGDRYKSVFQKSAHPLWSAVAIYRILREEMYTGTLVQGKSSSPNHKVKNRTTKDPSQWIRVPNAHDAIIPPVTFDLVQKLMKENTRSSEGEKQVNLFSGKVICADCHSPIVRSDMVYGYKHYIYLICSGHLKNPKTCCIHTVLEQTVYDTVLAVIQSQVALALELEKALKELGGVSWERREMERIARQILRQEEAIEYAKKMKANIYEDFKQEFITLEEYNILKADSDQKIADAKAAIAALNGSRNKVSSGLTGQQSWISQFKKYKNIKKLTRRVVVYFIDHIEINKDLQIHVFLNNADQFQAIQEFLQEQQEEHT

SEQ ID NO: 37 - protein, 551 aa, unidentified
  source 1..551: note = uncultivated organism
MENTNPTQYLASAYVRLSKEDMVSASGPRSESNSISNQKQLILDFLKDKTDIKLVSIREDDGYTGTDYDRPDFQRMMDDIRAGVVNCVIVKDLSRFGREYINAGKYIDRLFPYYGVRLISINDGIDTVTRSSSDDLSIMLKNLMNDNYCRDISIKIRSQLQVKRKNGDFIGAFAPYGYEKDGDNKNHLVIDPYAAGVVRDIFRWKLEGINQDRISQKLNAQGILSPMEYKRSQGLPYQTSFKTRSQAQWTPSAVRRILANPVYVGTLVQGVHSRPNYKIKKLMLNEKEKWVIYENAHEAIIEPRMFLLVQRLLELDTRTSPNEESVFPLAGLLSCGDCGGPIVRKTQASNGKRFYYYVCGNHKNTGVCSCHRISKKQLEETVLKLLQEHIQLLMELESVLRTISNAPMRRYSMRKAQERMLKVEADIERYRKLKIAAYEDMKDGLLTKEDYQDITAQYEARISKELLAKEQIHREMDLYLQNEASPQQWIQEFLAYRNVQTLTRIVAAQCIERIVIYEGKRIELTFRHMQDYQALVSQVQDYHQQIQEGAG

SEQ ID NO: 38 - protein, 513 aa, unidentified
  source 1..513: note = uncultivated organism
MKPQSSRRRCAIYTRKSTDEGLEQNFNSLDAQREACGAYISSQTHEGWEPIGELYDDGGYSGGSMERPGLQQLLEDVEAGKVDIIVVYKVDRLTRSLSDFARIVDVLDKHGASFVSVTQAFNTTNSMGRLTLNVLLSFAQFEREVTGERIRDKIAASKARGMWMGGTVPLGYEVKDRKLLVVPAEADKVRHIFDRYLALGSVYDLQAELAADEILTKSRVLKDGRNYGDKNFSRGGLYQMLRNRIYRGEITHRGKSYPGEHDGIIDADIFDRVGERLSGNQVKQKHAAHAEHPSLFAGIIWDGDGRRLTPNHANKSGVRYRYYISRKDKERLDLPIVRVPAGDIENLLIHQLQQHSDVSWDGPRPARELILATIRRVTIHRDRVVIEFIDRAEPVSIPATLIRCSGEKRIAAAPENYLHPRPDAALIKLIVRAHQANRALADPTNPTVEAAATAMAVSTPYFCSLLRLAHLAPDITTAILDGRQPAHLNRQFLARTNNLPIDWQGQREMLGFA

SEQ ID NO: 39 - protein, 549 aa, unidentified
  source 1..549: note = uncultivated organism
MKRVLCLYRVSTKGQVDEKDDIPRQRRECHDFIDKMEDWEFYDERLEKGVSGFKVATSKRDEIQEIRALAEKKKFDVLLVFMFDRLGRREDETPFLVQWFIEHGIEVWSTREGQQRLDNRVDKLLNFMRYWQAGGESEKTSMRVKAAHTQMTADGIWRGGTRPFGYKLTHNGRIGKKNRPLYDLSIDEVEGPIVKEVFDLIIHEGYGTLRAANYLNDKYASLGKIWTAQTIRSMLRNVIYTGRMHMNDTISAPNEALRIISDEDLEFAKYALSARIPRKYHSQRKAEDEALPEDAQTKTSVYGATLLSGLLYCAHCGHKLVGGYCTKQRSNRAYHRPIYRCYNGSVKAKGCGGQSVYSAMKIEAAVLEIVREYFHHISTTMESVWQEQARIQLRSKQKAHLKAAKADYAKLQAQQTKLQQEVLKSLMGESTFDTDLLKKMLSDNTAALAQAESIMESCEADKDAEEERIQYLSQQYRSITDWAEEFDASDNDNKKMILARIIEKITVDRNYHLNITFFVTEESFQEKVGIEQSAVMISEAERQIRQMAM

SEQ ID NO: 40 - protein, 536 aa, unidentified
  source 1..536: note = uncultivated organism
MYLEIEGAERYRAALYIRLSREDETDGPSESVSNQRAMLEDFARQRGVPVGGPPVGGGRGAYMGVPVAGLYVDDGWSGTSFDRPEFRRMLRDIEAGRVNMVITKDLSRLGRDYIMTGHYMERYFPEHRVRYISLLDGIDTGVDSSANEITPFRAIMNDMYAKDISKKISSVKRDKQRKGLFSGGKPVYGYQMHPAEKNKIVVDEGAAPVVRRIFRLALEGLSCRQIAAQLNAEGIPSPGCYAGLYPSGTGQWSGERISEMLQNETYIGNMVQGRRRKVSYKSKKCIRQLPEDWVVVEGTHEPLVTPETFERVGRLLASRRHTRSRTYEFPLKGLLFCHECGHPLAVLNRKNSRGEDVRYLVCRTYQRFTKTGGCTCHSIQEQTVTRAVVAKLREACGACLEPAALLPAARSAVAEAHGGENPTAEIRALRAKIGRLTTVLDRMYLDQLSGLLAEADFARLYRQAREERGALERRVTELERRESPEAGDKAGALVQRFLDEAGDNRELLVSLIERVELTEQRELIIHFRFCPPEALF

SEQ ID NO: 41 - protein, 544 aa, unidentified
  source 1..544: note = uncultivated organism
MPERIYRTGIYARLSREDNEHGESNSISSQKAICMEYISRHPDLELVEIYDEDDGYSGTNMERPGFQRMLQDMRSGKIDCAISKDLSRFSRNYIEAGNYLEKIFPSLGIRYIAVNDCYDSLAPGSASDAITLPFKNLVNDIYCRDISVKIRTNLEVKRRKGEYVGSFAPYGYQKSTEDKNRLVVDDDAAEIVTMIFGMFKDGFPILRIAQRLNQSGVPTPMEHKRQQGVRFQTAFRRRDVPQWEYNTIARILKNEVYLGNLTQGKRGTPNHKVHDIRLKDEADWIHAEATHEALISPDDFMVVSELLKRDMRAADDSGQHYLFSGFLYCGDCKQGMVRKTVTRSGKKYIYYVCGKHRKEKNCSPHSFSENRLREVVFHAIHDQIETVMHLDQVLTFIERLPLENRKSFNYEAQIVKVEEEIERYRKLKLRLYEDLADGVITKSEYTEFRNAYTARIEEKSETVERLKKEQAQAVTTGMTNRAWVQAFAQFQNISELDRRVLVALVDRIFIYENKAIEIQFKYRDEYELALRYVQEFEERPAAAG

SEQ ID NO: 42 - protein, 563 aa, unidentified
  source 1..563: note = uncultivated organism
MNQRIRCAIYTRKSTDEGLEQTFNSLDAQREAGEAYIKSQQHEGWQAIASHYDDGNYSGGNMERPALKQIMADIEAGKVGVVVVYKVDRLTRSLADFAKMIELFDKYKVSFVSVTQHFNTTTSMGRLTLNVLLSFAQFEREVTSERIRDKIAASKKKGMWMGGNVSLGYKVVDRKLLIQESEAVTVRRVFREFLRLGSVLRLEEWLRANDIRTRRGNYFLRGPLYTMLRNPLYLGLIRHKTAIYPGEHVDVIDRVTWDKAQSLLDQNTHGQRRKERSTQPSLFTGIIFDAGDNRYSPTHSNKNGCRYRYYTSRAAIHKTKRPDSPARIPAPSLEKAVTERILGFLNAPSELLAVLKDSLLDEENAPSIGFYAAIVERAAKMVKSWRLRPAPDRDHFLKAAIDRIVVQAEHIEIRLRWAAILHELLGSDPAGQGVQAAAKFLPIASVTCPFKHMDSGRALRLVIANDRVSNDRSRQLILRAIALARYWYQRIVDGEAKCLNDIIRRDGIDASHAKKIFPLAFLSPSCTQSILRFNTDFTLKALLANIPMEWSQQSVPLPLHSLE

SEQ ID NO: 43 - protein, 510 aa, unidentified
  source 1..510: note = uncultivated organism
MIREEAIYARQSVDKKDSVSIETQIDYCKNFAISKSPRIFKDKGFSGKNTERPSLKKLISEIQAGRISKVYVYKLDRISRNITDFYQLYEVMQKHDTEFVSANENFDTTSPMGRAMMGIVVVFAQMEREAIQQRVKDNYYYRIQDGRWAGGPAPYGFKNARTEKNVPTLERIETEIEVVQNVYALYNGTAHLSLNAIGTWLYDEGYRTRKGGRFTSTTLARMLQNPVYVTADQELYNFFRTRKIQFLNEPEEWDGTRSACIVAKKNGNQFIRKYEDMSEQTIYLSNIKPVVPSHLYIDIQDRLLKNEQFKRANSPSALEELAGKLKCAKCGHAIKAYSRSTTLRPYLSCHGKTVLRLCDLSFKDVDFYDLQENVGMEIQKYLDNTHLKKQQKLEENKVLSDQKNELENQLKNLIDIAAVGGVTAETLQKAIEERHFKIYEIELQMQKNSVAADYLHINLLNNSELNFYHGADGNIDYAMLTEEQKKEIVKILIDKILVQNNGEFEIIWNM

SEQ ID NO: 44 - protein, 567 aa, unidentified
  source 1..567: note = uncultivated organism
MRSDHKDLMCAVYTRKSSEEGLEQAFNSLDAQREACEAYIASQRHEGWRLVPKQYNDGGFSGGNMERPALEELMADIKAGKVSVVVVYKVDRLTRSLADFAKLVELFDAYGVSFVSVTQQFNTTTSMGRLTLNVLLSFAQFEREVTGERIRDKIAASKRKGMFMGGGYPLGYDLQDHQLVINEVEAEQVRTIFALYLELKCVRRMEAELIKRAIYSKRRVSGTGRATGGTRLGRGHLYYILKNRTYLGEIVHKGQIYEGRHSAIIARSTWDEVQALLNKNGNDRASGQKANHTSLLAGLLFDDRGNKLTPSHTQKGAVRYRYYVSWAVVQNQLDRLGSIKRVPAEEIESLVVDQVRDLCSSDENLRRELSRLELDLDAQQALIGDIRRYTAKFEGETAWTDLTRVIVQKVIVGPTQVKVTVDLQKAIAALESDTPTGLPGVSATRPLIVDLIVAVRVTRSGRQKSMITLDSDGAHRLINANLVLAVARATKWDREIRAGGALSELARRDGVSTTYATRIMPLAFLAPDIVQAIYEGRQPLGLKVKAASANLPLDWAAQRRVLGFPAR

SEQ ID NO: 45 - protein, 678 aa, unidentified
  source 1..678: note = uncultivated organism
MSKDAAQSDKAALSEILLEIGSLSRSDLQERWGHHFGLPAPAHLSRELMVLALSYAIQVKASDGLSADEWQALGMIAHGQTDSAHGTAQSSFEPKPSRAPPRPIRRNIKPGTRLLREWQGRTYEVIADIDGGLSGGSMNRPALQELLADIGARRVDVVVVYKVDRLTRSLADFAKLTDLLDACDASFVSVTQAFNTSTSMGRLTLNVLLSFAQFEREVAGERIRDKIAASKKRGMWMGGLPPLGYDIANKQLVVNETESKTIQTIFEAYVRLGTVAKLKQSMDAAGVVSKRRISKRKTNGVETGTLRKLGGKPISRSGYHAMLTCHTYRGMIHHKGQVYEGTHKAIISEELWEAAQAQLTANTADLGLSRIGQKGERVREMRKLTGHHMLTGILFNASGERLSPSHATKRTKDGGIRRYFYYVLASLVRGQATSEGIRVSAPDLDSLVVATVKDHLTDRQWLADQLRGSIGTNQSASHHTALHHDDGEPGDVHPSVSVQHLHRAFEAGQAWANAITPKTARALLERVVVDHRSITITLHGRALREALQLDTDCHLPDTISITRPTRIIRDGKGTRMIFGQVNIQVPHVDQNLINQLKTAHHWADALFSGKHPSIAALARAERVDPSEVSRTITLAFLAPSITRTILKGTQPPSLTLDALRRARPLPPSWNEQEAMLQA

SEQ ID NO: 46 - protein, 507 aa, unidentified
  source 1..507: note = uncultivated organism
MAEITVIPAKERTAEIVRTAAYARVSSDSQDQLNSFAAQIRYYTELLQNSSDTVFVDMYADQGITGTSATKRPEFQRLMSDCRKGKIDRVLTKSISRFGRNTPECLEAVRELKALGISVYFEKEDIDTAEVSTEMMLAIYSQFAQEESMSISRNCRTGVHKRMMDGTYKTASTPFGYDYIDGELQINPEKAEIVKQIFTWYVSGIGMNEIATRLNKLNVREEVWRRGTIHCILTNEKYIGDTLLQKTFTTDTLPYKGVINRREKEQYYVSGTHEPIIKKEMFDYVQKVLDKRYKSRGTVVEHSSFHSKIICGNCGSTFRRKGRKTCVYWVCRKHDESADNCKTRQIRETEFQSAFVRLWNKLQTHYKAILTPMLRQLETLSEREKSGNMQLANLRKEIAEIKQQIHMMTVLNSQGTLDGAYFKERTQELDRKLLTAQKQLRANLNDEESEQLDELRRLIGIFERAELIAEFNDIKFGQIVNKITVISETKIRFDLIGGIGFTKRIAR

SEQ ID NO: 47 - protein, 556 aa, unidentified
  source 1..556: note = uncultivated organism
MDCAIYTRVSTDNQAEKEYNSCEAQEEKTKAYIKSQEGLKLYKVYSDPGFSGASLERPALKEMLNDIIAGKIDCVLTYKIDRLTRSPKDFYTLIELFDKHGVAFISVTENFDTSSPSGRLLRNIMLTFAQFEREMTAERTRDKMKARAEKGMWNGGIVPYGYKNIDKKLVINEKEAECVREIFRIFIKTQSLAETRIQINQKYRTRAGKKFSKGSIDNILRNPIYYGKISYKGNLYDGIHKPIISEGIFLKAQSIRKVRVKPETKINHTYLLSGLLRCAECGSIMTPTYTKNWQRDGKSPRFTYYYRCTKTYKHDWSSCSIKSVNADKIEGFIIRKLKEVSQDEQAIKTLVKKINQEEEEKLSPLKQQEIKLEKEIKDVERRIRNLINFLSEGEGKKFPSIKKELENLENKKKVLEFDLEGVRLAIQKEGQVKFEAKIVLDTLKDFTQKIDQIDPPDRPHLFQYLIKSISYGKKEIGVDIFYLPKGYLPNWDTHRACHAGRADEGGEVPAGRRSSGERVRRAGKGEVDEHSSASSMCLKNRSEWLRRQDSNLQPSG

SEQ ID NO: 48 - protein, 503 aa, unidentified
  source 1..503: note = uncultivated organism
MFIAHGVGRTPDAGVAGPPHACPDKESPKGLFSERMPSSGRVIGPHRVFSSRSGWTAPTRFDRAASPLPGRAAPLNDGWEAIIKRCAIYTRKSSSEGLDRGFNSLDAQRQFCESYIASQAGEGWKALDTRYDDGGFSGGSLDRPAVRRLMADVAAGTIDTVVVYKIDRLSRSLIDFSSLIGRFEAHSVSFVAVTQAFNTTSSMGRLTLNVLLSFAQFERELASERLRDKAAASRARGLWQAGPRPFGYQVERGRLILDEREAEAIRYAYGRYPKVGAARLLAQELTAKGIFNKTGTPFTKKSITDLLKNRLYRGDLVHRGKSVPGTHTPIVTEKSWARAREAMADVYRVHRPLARPPVPNPLRGCLFGPLGWPLSHTFCHHRNRLFRYYLPTGIHRHGNGDHYRAADLDAAVLMAIEDFIPPEVRNWQGTSEPDILRRLVSRIDIGQNEMVIALRTGAVVRTSVAGRIEERGSSKSDAAEAPSPAPMPDPPQRDRRRSVGIPR

SEQ ID NO: 49 - protein, 558 aa, unidentified
  source 1..558: note = uncultivated organism
MNAKATPALASPGRAALYLRVSTGRQAEHDLSIPDQRRQLQAYCQAKGIAVVAEFVEPGASATDDRRPEFQRMMDAGAQKPAPFDFIIVHSFSRFFRDQFQLEFYVRRLAKNGIRLTSITQDLGDDPMSVMMRQIMALFDEYQSKENAKHTLRAMRENARQGYWNGSRPPFGYKIVAAEQRGARTKKKIEPDPAQVETVQLMFRLARIGTDDGPMGSRQIADYLNMRGIRTQTGGRWGVGAVHQILTRETYIGRHRFNVSGKRKGEQKSEDEIVDVTVEPIIDEEEFAEVQAVMRSRSPQLKAPRFVTAGTLLGGVCFCADCGGAMTLRTSGKGDQYRYYTCCTTARQGKTACRGRTIPMDELDTIVVSHLEERLLAPERLEELLAGLLKRREEHAGRLKGRIAELRKQAADAEAKLTRLYEAIENGLAEMDDSNLKGRIVELKRIRDSARADADRAENRGEGDDNRVTPELLRRFGIEARKKIRDREGGFRRHHLQALVQRVEVGADEIRIRGSKPRLLQTLVASGGNYGVETAAHGVRSFVPNWLPELDSNQRPSD

SEQ ID NO: 50 - protein, 523 aa, unidentified
  source 1..523: note = uncultivated organism
MPRTQDTDPPRWRAAVYTRLSRDDGDRPESDSIINQQKLLEQFLSARPDIEAAGFYADDGFTGTNFDRPDFCRMIRDIEEGRINCVLVKDLSRFGRDYIEAGRYLERWFPRHGVRFIAVTDGIDSERGYDMLLPVKNVFNEQYARDISKKVRSAIQSKQRGGKFIGAFAPYGYRKDLDDHNRLVIDPCAAAVVRRIFTLFEGGMGKQSIARQLNGEGLPCPSEYKRLNGERYRNGQKLDGTTYWTYATIHRMLRDPVYTGTMEQGRAPRQGMHGRARQLDRSQWAVVPGTHEAIIPPDQWERVQSLMARNVRIPRFQQDASLFAGFLRCGDCGRAMSKTARAGGVCYCCGSYKRYGPGVCTRHSITHRQLEAVILADLNRILTAADDLDGLVRQAAAQTSAPSSDALERCRAARQRICRLKQSSYEDYKDGIISRQDYLYYRADYDRQERQLTCQMEALQISGRAAAAQEQPWISALLREGRLSALDRATLAETVNQILVFEGGRIEITYTFSDDLGILGRED

SEQ ID NO: 51 - protein, 532 aa, unidentified
  source 1..532: note = uncultivated organism
MDSDSLDWTKMGKTDEKKQIRCAIYTRKSTNEGLEKDFTSLDAQRESAESYIRSQQHQGWKLLPEKYDDGGFTGATMDRPALQRLMDVIRQRKIDCLVVYKVDRLSRSLMDFVKLLQFFEEHQITFVSVTQHFNTNTSMGRLTLNILLSFAQFEREMISERTKDKMGAARIKGKWVGGRPPLGYDTDRNIRKLIVNPKEADLVRSVFRLYLEKKSLLDVAHTLNERGYRTKTLRSERKVTGGVPFKNTNIQIMLKNVTYIGKVSYGGKIYLGEHAAIVEEATFNKAQEIMKQNTRERGISKNQKFPGLLSGIFRCSCCNASMSHGYTQKKKSKYRYYICLNAIKRSRKDCPTKSLNAVLIEQKVTELLRRITTDETRWQNLVLEDQIEKIRSLVKLAEYDGRKGKLWITLQRDTQKQEFDLPLDQLKRMPTNGDKFFVEPPIRRQLLLAHQIQDMLDDGRVKDLNQLAAWLSISKARLEQIMNLLFLAPAIQEEIVCGDPLRLAKISERSLRPISIEICWKQQIGYWKRLVV

SEQ ID NO: 52 - protein, 521 aa, unidentified
  source 1..521: note = uncultivated organism
MTRRRAKETKPSIRCAIYTRKSSEEGLQQEFNSLDAQREAAEAYIASQKAEGWVCLPERYDDGGFTGGNLDRPALQRLMKDIGDGKIDCVVVYKVDRLSRSLMDFAKIVDAFEKHHVSFVSVTQHFNTTHSMGRLTLNILLSFAQFEREIIGERIRDKIAASRRKGKWTGGTPTLGYDVDRSNGSPRLVVNLVEASRVRQIFELYLELGSLLPVVDELERRGWRTKVWTTRGRQRRGGLPFDKCRLHSLLTNVLYVGKIKHKQEVFDSEHEAIVPEDLFQQVQARLQRNGRSGGAEARNRHGALLRGLLYCKACDRVMVHTFTSRGNRRYRYYTCSTAMKRGWRRCPTKSLPAAEIERAVVEQIRCIGQDSELLKETLSQARLQVETRIERLKDERRVIERGLKRCHSEIGRLATTSPATSAATARIADLHEQIRQAEQRLGEIDERLVEVERDLVDENDLALAFADFDNVWTALSPREQARVLQLLIHRVEFDPADSTIEMSFHAAGIRALSGGTLENAA

SEQ ID NO: 53 - protein, 517 aa, unidentified
  source 1..517: note = uncultivated organism
MAGRKPDTPTIRCAIYTRKSTEEGLEQEFNSLDAQREAGEACIASQKSEGWVCLPDRYDDGGYTGGNMERPALKRLMADIDDGRVDCVVVYKVDRMSRSLLDFTHIMEALENRGVSFVSVTQQFNTTSSMGRLTLNILLSFAQFEREIISERTRDKIAAARRKGKWSGGRPILGFDVDPKGGRLLVNEAEAAQVRTIYEIYLDRESLIATIAELDARGWTNKQWTNKKGRESGGSPFNKHSLYSLLTNVLYTGRLTYKDEIHAGEQPSIVDDETFRRVRQILKRNGSTGGAQVRNQFGAILKGLINCVPCGCAMVPTHTTKQDRRYRYYVCAKAQKRGWHNCPSKSIPAGEIEKFVVDQVRGIGRDPALLAETLGAARAEAKARIKELEAEKSGLDRELRRHNAQMRALAGLAGAGGTATDRMADLLDRIRGVEQRLAVTREELAALGRELVDEKEAVRAMAAFDPVWETLTLREQARVLRLLVQRVDYDGDKGTVAVTFHPAGIETLSREMAEENA

SEQ ID NO: 54 - protein, 563 aa, unidentified
  source 1..563: note = uncultivated organism
MRNPVPPRTKVFRCAIYTRKSSEEGLEQDFNSLHAQRESCEAYIKSQRHEGWTSLPALYDDGGYSGGSTDRPALKRLLADIQSHLIDVVVVYKVDRLTRSLADFAKIVEIFDAAGVSFVSVTQQFNTTTSMGRLTLNVLLSFAQFEREVTGERIRDKIAASKQKGMWMGGWVPIGYDRKDRTLTINETEAVTVRTIFDLFLRLKNVQLVQAELIRLNLTTKPYATPRGRAVGGLSFARGHLYKILSNPLYIGEIEHRGVRYPGQHPPLIESAIWDAVQAQLASNHHANRNRTNAKSKNLLAGLIYDDAGNRLVSSHATKNGKRYLYYVTSEGTGRSVAAAKTPRLWLPAALIDELVRTKLQNLLTDQTAISNLLRTVGCRPAEISSGVRIASELADSVTAGSARAQSVADLLARVTVSSTELQIAVKRRQLLALLTSQSNRQPANNSKDEFISLEVPFAAAPGGGASKLVFGGEDAKTRDPVVVKAIARASMWFEQLTTGKSQSMAEIAVREGITDNYVSNLIHLAWLSPDLVRQVLEGDSEATALARAAMLSRKSNVLWTPR

SEQ ID NO: 55 - protein, 533 aa, unidentified
  source 1..533: note = uncultivated organism
MPQAGPPAQASSPKPQASAIRCAIYTRKSTEEGLEQEFNSLDAQRESAEAYIASQRHEGWICLPTRYDDGGFTGGNMDRPALQRLLADIEDGKVDCIVVYKVDRLSRSLVDFAKIMDVLERHTVSFVSVTQQFNTGTSMGRLMLNVLLSFAQFEREIISERTRDKIAAARRKGKWVGGRPILGYDLASTAAGGRVTVNEDEAAQVRQIFELYLRHRSLIPTLREVDRRGWRTKRWTTKKGDVRGGRRFTKESLYRLLTSVAYIGKVRYRDEIYAGEHPGIVSEALWHRVQDAPRHNGRNGGTNSGLTRNKYGALLKGLLCCGPCGCGMMHTYTSKGNRRYRYYVCLNAQKRGWENCPTKSVPAAEIERFVVERIKAIGRDDEVLARTLAQARKQNQEGLEALQAERRRLARELARHGAEVRKLIDQAGVPGETPTAARLADLQERIRAAEQLATEVRERIIALSAKAVDEDKLARALSLFDPVWDSLSPGEQARVLHLLVERVTYDGGDGTLAITFRPTGIKALAEEREVAAC

SEQ ID NO: 56 - protein, 532 aa, unidentified
  source 1..532: note = uncultivated organism
MRALGVARVSTQEQAHGDRYSIPHQRQSIAAYCARRDWDLVDVVEYVQSGGSNYRELQSILREIQREHIQVVVVNELDRLARDMVSTLLFLEDLQKTGCRFAAVADDLDLTTPDGELKMMILSVFAHYFRRQLARKVKGGMLERAKQGKHHGGRPPYGYVFGADKLVPHPDQAPVVRQIFRWYTEEGIGGREIARRLNNQTIPTQTGRSAWASTEVLRLMRKPAYVGDLEHGALEFVHERTGVAHKIHHPDSLIVSQAHEAIVSRTTWNEAQRLMAERGQQSGRRGDSPYLLSGLVHCGLCGKTMVPVKTRKRTRYVCRGYQASGQCSATHAVYVDELEKMVTERLLSDLEQPNEVDMHTWVQRLADQETNQRDRRRERERIERRLADLPHMRQRAEEALLQGAFTIPQFQAIQTKMNEDEARWRIGLAELLHQPAVLIPEQEAVRIRVALAQIAATFRTLGALHERREVIRKYVARVDIVPDTVIIYYEGDPRTENRPDGPSEGATNPDVGSKQGTQRPQDPRGVRIRPPK

SEQ ID NO: 57 - protein, 570 aa, unidentified
  source 1..570: note = uncultivated organism
MARKSRFVAEIKEEKKTAMLLAGVYARLSIEDEDDEEQNSIGNQKKIVLDYLKDKDDITVAEYYSDNGYTGMNYSRPDFQRMMNDLRSGKINCVIVKDISRLGRHFVMTSEFVEKIFPMMGIRLICVNDDYDSSNENCDSSALLLPFKMVMNDSYVKDISKKIRSSINAKINSGEYLPSASSIPYGYVRNAEKNTFDIDEEVAPVIVRIFEMRANGIALNSIAKTLNEEGIPCPGKLRYIRGITKAEKYENASWIHGTLRKILMDQVYIGNRVHGRVKRDKVGMEKTRRSEEEWRVIENAHAPIISKELFGKVQAAMNEAVAKRNSGKKQEAPATDHRDTFREKVYCGDCGSMMRACKGLGRANENGERKAFVYYDCGKFLDSGRAICSPHYVRQESIMEVLRNVLDTQISAAVDLEQLLKEVQSMPKVIHYEISIQNQLMSVQSKRRNMEQRLEQLIVDLTEGLIDKNEYAYAKKRYNDEYENLLEEENRLFASSKKLDHIVATSSQWIQFVKEYRRIPEIDRKAVEYLIKRINIYPNKRIQIILNYEDPFRLVTEYLEEIPEVLEDAG

SEQ ID NO: 58 - protein, 570 aa, unidentified
  source 1..570: note = uncultivated organism
MARTAGRFNAVRTEFIPEAQAVQKTYHTALYARFSVDMNGSDKADGSIESQLQIMRDYAGQHPEFGVCREYVDKGYSGTNFDRPEFRRMMEDVRDGRINLILIKDLSRLGRDYLETGNYIESIFPFLGVRLISVNDHFDTDDTMNENKALEIALKNLVNDMYARDVSKRIVTVRKNEMERGKFTGSNAPYGYKVDEDDPLRHYVVDGDAAEVVRKIFAMADGDMSLRKIADTLEKEGYAIPGQYLKTGHLLVAEGAERKNWHIGSISNILKNQAYIGNLVQGKRRARLCDNEKRHFTDKEEWLIEENAHEPIISRELFERIRVKMEKKVSESPFSSERGKDVPVKDYKYKDVLYCGVCGKRMQQYSTLHEKDGRLYRRYLFHCPTQYKYEGQGCYVGITERKMDDILYHCLMEEVKLSVPDGNLLLRETKKLVYKSQEDSIKKIGSLEKKISIQEYEGSRYYEQYVTGTISREELLGKQKLLADKTAKLKAQIDLVQEKMDAREKLFKEKQKWLRSLLRLKEMDEPEIDRDIISALVKRIDVYPDKNMEITYTFDGAFQSSADKEEKPES

SEQ ID NO: 59 - protein, 572 aa, unidentified
  source 1..572: note = uncultivated organism
MKRVQDLEDNRQIAIYSRKSKFTGKGDSTGNQVEKCMETIRSHHKDIEDKDILIFEDEGYSGKNMDRPEFQSMMELCRKGRIKEIYSYKIDRMGRNVPAFLKIIEELNEYNIKFCSATEHLFDTVSPSGKVMMTILVALAQFERETLAERVHDNMVALARTGRWLGGTAPTGYRSQEVKINQDGENKVRKLYKLDLIKEEAKKVEIIRDKFLEAGSITKVETYLLLNGIKTKNEKEYTRYAIRGILENPVYMTADEKAWEFFEENGIEVHGGKEAFNGKYGVMAYNKTVQNKNGANRVNDMSEWIIAVGKHKPIMSSHDWIKIHKMLQQNKSKTYRKPRNNIALLSGLLRCGNCGSYMRPKQLRGKTENGEQRFYYLCELKEKSKRELCDSKNPTGNMLDEFVCNEIKKLSGNQSEFRIQLKNAKNDLRTDKQSGEDEIKQLRKAKEEKEKKIQTLVNRMADDDGDTVFRYVKDQINTLHEECNNIGRNIEEIKRQNELSNIYDSQFDIMQETLSNFGSAFDTMSLEQKRTALRLLIDEVVWDGENVHIYLFGARKDHVESDAATTGLQMNS

SEQ ID NO: 60 - protein, 530 aa, unidentified
  source 1..530: note = uncultivated organism
MPVESRGREARGAAVTSTAVRCAIYTRKSTEEGLEQSFNTLDAQREAAEAFIASQRHEGWTALPQKYDDGGYTGANMDRPALKRLLADIESGKVNCVVVYKVDRLTRSLLDFARIMEVLDQRGATFVSVTQQFNTTASLGRLTLNILLSFAQFEREMISERTRDKMRAARRKGKFVGGNLILGYDVAAQGGVLVVNEAEARRVREIFQLYLDYGALMPVVQELDRRGWTLKAWTTREGRATGGSVFTKTKLHNLLTNVGYTGKVDFDGHIYEGEHGRIVEDATFVRVQELLKRNGRRGGRNLRNKYTALLKGLVRCASCDAGMIHTYTKKDNRLYRYYVCVNAHQRGWNNCPTRSVSAPALESAVVEQIRWIGRNPTMLGEVMRQLAERTNAKLSELAREKELVGSALEKLSREMSGLAETVSAPGPEAKAATDRLAEIHQRAVELDGQFAELQQAEAAADLQGVNADDLQRALAQFSPLWEQMTTWEQEKLIRALVEEVRYDGAAGVVTVGFRSTGIKELCQNDAGQPA

SEQ ID NO: 61 - protein, 1215 aa, unidentified
  source 1..1215: note = uncultivated organism
MDKTDKTIWINKLWDPLEKMDGSPLHNQKNNIRVAAYCRVSSENLKVSRSLESQVSYYTHMINDKKNWTLVGIYFDNKITGRKASLRQGFTRMIRHCEEGKIDLILVKNVSRFSRNTKELIEVVERLKEINVTVYFETENIESTRSDTTYLLKTYASIAQGEIEATSKAVEWGHEKRILNGKAMIGIMFGYDRVKTEKGTEIRINEPQAKIVREIYEMYLQGMTYNGIAVELTKRNIRTLKGKELWGGQTIHSILTNLSYTGNVLARKTTRDLMTNKIRSSEGIRDQYLVADHHPAIISQELFDRVQERIPKNKGTNITKPQKANPLIKRVKCGNCDQSLRGNPTKTRVYYKCVSAITNKDLCVTPTIREDIMIQMMLQALTERFDVNGPKAIKALQRILIKLNQNDHFEFHRLRALTQIQLAKGLRGVQYTDDDIIKLEKDYLEFENHLEKIENDRQFRLEAIDWLEKVKTFDEFKNQATIRYLRAWVFEMVIYSKEDYKVTWIDGAETEIGRCIPTKPKREAPLRETTVKGSVVVEPEPDTEKDTFVEIISEEGGDDSNDEKEDSRMLAKANIEPTLMVKNIQKQLSSSVVMQTSVPVAKREKMRVAAYVRVSTEFEHQMISLKTQYSYYIYLILKDPRYTLVDIYMDDGKSGRSADGRPEFKRLMEDCQAGKVDLIITKSLSRFARNTVDTLTYLNMLKSLDPPTDVWFERENLRALDEKSSVLINLLSALSQEESVNIGEAIAWGKRSLAQRGIARPTRTGYGYYYGENKEWLINKDEAAVVQRIYNLYEDGKKIQEINDILTDEGIPTPGTQKRWCAATINRILTSENYRGNYIYQRYHTGLSLNSVRQVNKGELPMYYIENHHPAIIESEQWERVQQLVAERDKKRTEKIQRYPDDEYKNESFARKLYCGKCGNLVGYVRSIVRNQKDFEIRWWRCYRGLRGYCDVPHMNQKYIEENFSQLLMDIKTNPTFDEYIEALKDSLAIKPEEVQKIERLEQEKEALNQQLYEVVEAELGKQGKDAKRVDQLTEEILKIREKLMAYTDREEQLEAIEVEIKEIRKALEPYEAGQRDDLGYYATELLFLPEIFDSFIEKGTVAEDLHITYQFTSGFEWSTPINYKTYQEKERRRKAAERAQEKITFLDGPEVKDLIKYCKEPRSLTEMREFLPKYQTNVNFKKFIVTPLLGRGILKETLPDKPTSRLQRYYAVKE

SEQ ID NO: 62 - protein, 529 aa, unidentified
  source 1..529: note = uncultivated organism
MKRHPKKEASVLALIRCAIYTRKSTEEGLEQEFNSLDAQREAGEAFIKSQASEGWTCLPDRYDDGGFTGGNMERPALKRLIVDIEAGQIDCVVVYKVDRLSRSLLDFAAMMQMFEKHQVSFVSVTQQFNTATSMGRLILNVLLSFAQFEREIISERTRDKIAATRRKGKWAGGHPILGYDVDPQGFKLVVNEDEAERVRAIFKLYVQHESLLPVVQELERRGWRNKRWTTRKGHERGGKAFTKTSLYKLLTHVAYTGKVRYKDEVYDGEHAAIVDPAIWQRVQALLERNGRTGGAPVRNKFGALLKGIMRCVPCDCALTPSHTTRNGSKRYRYYVCSSAQKRGWHTCPSKSVPAAQIEQLVVNQIKGLGQDRALLQQVLEQARQQDAARAGELDAERARLEKDLTGWHWEIHDLSGRLRAGEDHGAVIGRLAELQERIGAASVQVRKLREQIHAIHHQLLEEDEAALALSIFDPVWGSLTPHEQVRAVQLLVERVDYDGSKGKVSITFRPTGIKTLARELSGQGKEQIA

SEQ ID NO: 63 - protein, 539 aa, unidentified
  source 1..539: note = uncultivated organism
MKVPPVKRVRCAIYTRVSTERGLDQEFNSLDAQHEAASAYIKSQAHAGWTLVGARYDDGGYSGGSTDRPDLQRLLDDIRARKIDVIVVYKVDRLTRSLADFAKLVELFDGHGVSFVSVTQQFNTTTSMGRLTLNVLLSFAQFEREVTSERIRDKIAASKRKGLWVGGNLPIGYEMKDRKIAVVEEEAARVRLIYRRYLELGGVRALERDLRERNFRTKTRLLMTGATRGGIPFGRGSLFYLLSNHFYVGEVKFKDEILPGEQPAIMERELFDAVQQKLRDQWSHRTVTRNASDHLLTGLLYDDIGNRMVPTHATKAGIRYRYYISSPHFDGNSKTAIVGSVSRVPAADLEDVIVKSLTEHLISGAPSRSSGALRADNRTVIREKVARIDVYAHRLSVGLKSPGNAEADESTAETCLSIPWQKPPSKSSRQILLPHGASRIEVRPERAERRAHLVRAIARGRHWLSELISGSITQADQIAAREQCSVRQVNLTISLAFLAPALIKAAIEGRLPRGIGIERLRDPSAEWALQFEALGLNPQ

SEQ ID NO: 64 - protein, 524 aa, unidentified
  source 1..524: note = uncultivated organism
MTTKVTVIPSTIDPLTQLPRNSKEKIKVAAYARVSTNSEEQNTSYEAQVNYYQNYIENKYEWAFVGVYADEGISGTNTKRRASFNRMIEDALDGKINLIITKSISRFARNTLDTIKFVRKLKDKGVEVFFEKENLWTLDSKSELILTIMASIAQEESRSISQNVTWGKRVSFQNGKVSFAYSRFLGYEKKDGKIVIVEEEAKVVRLIYRMFLVEGQTPIAIRNYLTEQGIKTAADATWRAHVILSILTNEKYKGDALLQKKYTENFLEQKMVKNTGQVPQYYVENSHPAIIDKDMWEMVQIEIKRRREMVGGFSSANLFAGKIKCADCGGYYGRKTWHSNSKYRRSIYRCNKKYEEGKDKCKTPHLSEEEIKEKFLNAYNITIKDRERVKSDLKEVLKLITSTKGIDKEIKEIDAELITLTESINKLIQDNSKTKSGIDEFDKRLKELRIRYDDLRARKEELANLKRENSAKSYRIKKFIANLEKSTDKLKDWNSELWMLTVESATVYRDKRIKFKFYDGIVNK

SEQ ID NO: 65 - protein, 547 aa, unidentified
  source 1..547: note = uncultivated organism
MKFAIYSRKSKATDKGESIGNQVEMCRNYINANAPGEEHEFLIYEDEGFSGKNTKRPEFLRMMQDAKKKRFQQVVVYRLDRISRNIVDFMTITEKLQSSGIGFISINERFDTTTPMGRAMMQIAAVFAQLERETIAERVQDNMLMLSYTGRWLGGKTPFGFSSERIFQNKELGIEKSYSRLVPNEDMKIVRLIFERYEAAGSFHAVQVYLHERQLMAQNASRTTDFFIRNLLSNPVYCAAYEAARSYFEERGSKVAGEAALWDGRHGIMPYNRHSEKRVGAFQREISEWVLAVGEHEGVIESERFVRIQQRIAANKERYNSFSSTTNDYALLSGLLYCAKCGKRMYTKPQNEKGRGASADSWFYVCEPQKKYTSKACSCKAVLGRRIDEAVLKAFDEAFVPETELSAQLENLRPNHLRKKEEGVEKARLEKRKMEIDKEQHTLYGVMGAMMMEKGDDCAEIQLYKQQVFELTDELLKINERLAALAEEMDQSQEQEKIYQTICNLWNGSFGEGFRKEPIPVQRDKIKQVLQRAEWDGEKLRLFLRGT

SEQ ID NO: 66 - protein, 521 aa, unidentified
  source 1..521: note = uncultivated organism
MTSRKPIPPRQTTRCAIYTRKSTEEGLQQDFNTLDAQRESAEAYILAHKHEGWTCLPDRYDDGGYTGGNLDRPAFKRLMADVEAGKVDAIVIYKIDRLSRSLMDFARVMETLERHNVALIAITQSLDTKTSMGRLTLNVLLSFAQFERELISERTRDKIAAARRKGKFAGGRPLLGFDILTAPGGSKLIVNKAEARRVREIFELFIEYGSLIPTVRELNKRGWHNKTWTSRANKAMGGRPFDKATLYRLLCNVVYLGKVTHGEHIYAGEHEAIVPQDLFDRVQSMLRRNKNIGGKHVRNKHNTLLKGLVRCSHCGCGMSHHFTTKNGTTRYRYYVCNNAQKRGWSSCPSASVPAPAIEGFVVDQLREVGRNSAVFRRVLHAAQEQITTAIDELKTQRGQAEDHVRAIHAEIREIAPLAGTMGETADRLATLQDDLRDAEQEVTRVGSEIINLERRLVNDEQIAQAIEKFDPVWDSLSPTEQASVIHLLVEQVNYDGKNETVSVVFRASGLRAPGGKNEEAA

SEQ ID NO: 67 - protein, 540 aa, unidentified
  source 1..540: note = uncultivated organism
MESIFLFNASAYARASKDDAESSTIENQIELINDYVKSMSDIRIVSDRSDNGYSGIDFSRPSFTEMMKDIETGKINCVIVKDLSRLGRNYIEVGELIDVIFPRYNVRLIAINDHYDSLNPRSDSDDIIIPFKNLINEQYLRDFSIKIRSNLNVKRKNGDFVAAFAPYGYKRDENDKHSLVIDEQAAEVVRDIFRLKIEGMSQQKISDRLNEIGEPSPAEYKKRDTNYTAQFQTHARASWSAVAVGRILRNPVYIGTLVQGTQTTPNYKVKKRVVKPEDEWNIAPDAHEPIISRNDYETVNGLLLQDTRTSPAKNTVYPLSGMMFCGDCGNNMVRKKAGKYHYYTCATNKAVKGCTAHYFRQSKFERSVMETIQYQITYVLDIEKSLDFIRSLPHHQRNAVKLNAQIADREREIQSCEKYKRSLYEDYSDGIITRADFTAFSNDYTEKIEVLKQAVIRLRQETELLFADNLPNHSWIEHFKQYRNVDELSRELAVNLIERIDVYEGKRISIRFRYQDRLETACEILNGYTVKKAGDMAWRE

SEQ ID NO: 68 - protein, 540 aa, unidentified
  source 1..540: note = uncultivated organism
MTKRVAVYARVSTTRQAENDISIPDQLAQARRYCQQRGWVVVREFVDAGASARDDKRPELQRLMDAACVDPSPFDVVLVHSQSRFFRDTAGYVTYKHKIQKHGVSLVSMTQDFGEGPSAEFAETIIAASDALHSAETAKHVTRTMLENARQGFWNGSRAPFGYRTVEVEKRGQRTKKHLEIDEREAALVRQIFDLSLDGDGTRGPLGVKEVVSWLNSHGFRHRGGKPFYTSMVHAILKRDAYSGTHYYNQHDSRTRRLRPRAEWVAIPVPAIIPEGRFKLAQKRLQARRPSVTPPRISTSDVLLTGLARCECCGGPLMLRTGTGSKGRTYRYYACAAARIKGRSVCERPAAVPESELDSLVVSGLADKLLTPERLSALLREAVRHRRTQSSDTATRRAALRKELKEIEAQIDRLYTAIAEGTITDSGLLRNKMDQLNARRDECLALEAGLGSEQPELRQALSNQQAASIAANLKQRLLDAPHALRKRYVHGLVSEIMVSRDKAVISGPSAAIAAAVSAPERMDVVRTFVREWRTRQDSNL

SEQ ID NO: 69 - protein, 536 aa, unidentified
  source 1..536: note = uncultivated organism
MPKINCAIYTRKSTEHGLDMEFNSLQNQEESCKAYILSQAFNGWEYVKTYSDGGISGGTMERPGLQALLDDIREGHIQVVVVYKVDRLSRSIIDFHKMMQEFDKYGCNFVSITQSFDTSNSMGKLTLNMLLSFAQFEREVSAERVRDKIAASKAKGLWMGGTPPLGYDLKDKQLIPNPQEAEVVNLIFNKYLELGNIQATADWMNQQGYRSKCWQTAAGDKRGGHLFRHGSIQRILGNPVYIGKIAHLALKKVYPGKHKGIISQDVFESVQAKLGADKEGMREHRRNIRADTLLGDVLVDELGRPYKLSSGRQGAKVFKYYVICDGAHLSVGQLDGLVLRAIQNADYADICPRTTAAELSKNEAKTYLERVVCQKVGKECYVAIYLKKQAFEAFLEKHIAENPPGGGVRAQIKGDSLILKDTFYIDNVTSTRLQNGSSNNILTVRQLNESLVRGLARAWQLKKLIEKGQTTREWEKASGMNKRTFARYLNLCYLSPKIVADILEYRNPRNMSLKELMTLASETVNFEKQEKIWRTE

SEQ ID NO: 70 - protein, 554 aa, unidentified
  source 1..554: note = uncultivated organism
MENINSIIYQAAIYLRLSREDGDVAEGSKLVSNSISNQKALIMDFLKSHTEIKVHSVYADDGYSGVNFDRPDFQRMLEDIRKGMVNCVIVKDLSRFGRNYIEAGRYIEKIFPMLGVRFIAITDNYDSMAAAGGYGSDMVVPFKNLINDAYCRDISIKIRSHLDMKRKRGEYIGAFAVYGYLKDERNKNHLVIDEYAAGVVRDIFAMKLCGLNQQAIADRLNNDGILSPMEYKKSIGINLETTFKKGTQAKWSYNAVLRILKNEVYTGVLAQGKQTTPNYKVKTRVMKPEDEWVKVENTHEPIVSRKDFNLVQELLKQDTRISPDKEALFPLAGMLYCGDCMEPMVRKTVPAGGKKYVYYVCSGNKKDKTSCSPHRISEADLTDSVLYLLQTHIESVLTLEAAMQVIEKAPKLKADVAKFDERIVRKRAELEKAEKRKLNLYEDLKDGIISKKEYLQLKAEYDRRISEAETAIGSYEREMKLILENKSRMHEWINEFKRHQNIQSLERSAAVVMIKRVMVYSADRIEITYNFEDEFARCSEYVAAYGEYGRKEAV

SEQ ID NO: 71 - protein, 681 aa, unidentified
  source 1..681: note = uncultivated organism
MAVAVYVRVSTEEQRERQSILTQREFAERYCQLHTLAVDRVYADDGVSGTVPLDQRPEGGQILKDAQLGKFDQLLVYKLDRLGRETRLILNAVADLEKLGVRIRSMTEEFDTGTATGRLMLTLLSGFASHEREVIRERSVAGTNRVAEAGGWLGGIVPYGYRKVGEKRDAHIVISEEPIPGLAMSEADVIREVFRMAAVERKSCRVIATRLNDLRIPCAYVRDDRLTIRGKRKQRTSGVWRAGRIRGLITNKTYMGIHEFGKRAVSQRPVISRAVPAIVTESTWKKAQKTLRDNFLFSRRSARNQYLLRGLIKCGLCGLTYIGVAANRPNGKREFYYRCNGAHSPSVYSKLGRCQAKAVRGDHLEQQVWSDVETLLRNPEPVLQQLHARLESDAKGSDQIRKQVTRLEGLLAQKAAERSRVVGLFRRGRLTDADVDAQMDEIGKEETALEAQVAELGGRIAGADSIGASLGSAQALLEQLRKRLDEPVSWELKRHLIEVLVGGIRVDTVEEGGVRQTKTTVTYRFSQPDQPMPLVLPQSYPGSLIRIPTQPQTVGDHIRRRRLGLKMLQKDVAAQIGVDKTSAFNWEANTAAPEIRYMPAIIRFLGYNPLPEGTTWGERLLRQRTTLGLSQKEAAGRLGADPSTLARWEKGDAEPVGTALRRAERFLAGEEQPAAAARLAG

SEQ ID NO: 72 - protein, 541 aa, unidentified
  source 1..541: note = uncultivated organism
MPAPKLRPAFYLRCSSEESKKTGHTIKAQFESLKKFAESQESLFNFKPQNYKCSPGKSLTYVDEAVSGITEHRPELDRLYRDAQQKKFDIVLVWRIDRFYRKTLLLLQGIDKLTELNIKFKSLNEPFDTSTPYGKLALTMLGAVAQMEREVIMERTQAGRMMAARKGIWLGGGNIPFGYSAQEKKLVINPKEAKIVKFIFKTFVQKQLTATKLADRLNALKLLIPSAMREKAKLNAKSKSTSNFWRIRSLTRILSNPVYTDEYLHDHSPQSSQKNVSQESANLLAAGKSADLIRVTCPQIIHPTLFQQAQRQLKRNSVLAGRRVCKDEDAMLRGLIVCGLDNHRFLAKVDLRNPKKQRVYYYCGGSNKHMNPQVCPAPRLDALVIEPLVWEKVCNVLLQPQRILTELNELITKKGSFREVQTEYNTLIQEIKRQQAQRTRTCELYEDGLQDLPTTKIKTTKIDEKLEELNERKLYLTEKLGTIQNSQTKAKIIETYAQKIKAGLKKKDKASPKFRREVCKAIIEKVLVKWQNLDIQFRFNY

SEQ ID NO: 73 - protein, 505 aa, unidentified
  source 1..505: note = uncultivated organism
MRANGRPKENGNGFTGRADVRCGIYTRKSTEEGLDQAFNTLDAQREAAESFISSQRPEGWVALPQKYDDGGYTGANMDRPALKRLLADVQAGNMNCVVVYKVDRLSRSLLDFARIMEILDKHGATFVSVTQQFNTTSSMGRLTLNILLSFAQFEREMISERTRDKMSAARRKGKWVGGNPVMGYDVAPQGGSLVVNPDEAQRVRDIFALYLELGSLIPLVEELDRRGWRMKTWTTREGRQAGGKPIVKNSVYNLLTNMIYVGKVEYGGQVYQGEHDRIIDDETWNKVQGALNRNGRRGGRSVGNKYAALLKGLVRCGSCDVGMIHTYASKKNRLYRYYVCVKAHQRGWTQCETRSVSAPALENAVVEQLRGIGRNPAMLREVLRQLAEQQRKDSAQLEHEKTDIEQELKGIAQEMKEAVSVAGNGGCSADTATRRLAELQDRVSHLSNRLPELRQRLAAIDAESVNAHDVEATLHEFDPLWEQLSTWEQERFPPRGVFPYRPTSQ

SEQ ID NO: 74 - protein, 534 aa, unidentified
  source 1..534: note = uncultivated organism
MDKKKVRCAIYTRKSSEEGLEQNFNSLDAQREACEAYIKSQMHEGWFLLDKQYNDGGFSGGTMERPAFKELLKDIENDKIDIVVVYKVDRLTRSLMDFSKIIDVFDRHETSFVSITQQFNTTTSMGRLTLNILLSFAQFEREVTGERIRDKIAASKKKGMWMGGKVPLGYLKEDKKLVVHNEDAQKVQMLFDKYLELKSVPKLMHYLKENKIKTKTDKYFSKGQLYHLLANKIYIGKITHKDKVYDGEHDAIICDETFEKVQKLLYENKVDKTCGVKSSSNSLLASLIYDDLGNKMTPSHSNNHGRRYRYYISRALKNNEETGSVSKIPAGEVEKFVIETTREFLQDKGQIQKLVKDFKVSKQNKLIYIAQNIQDYSEPKLIKTIIHKIIVSINLIEITYNEASIKNVLNALANNQEIVVPDKNEELTPIVISKNIKITQPSRNDNILILNAKEYDTPEPNPYLVNAIVKSFYYHKQIQSGKTIEDLQTEEGLKDSKYIRNIMNLKYISPELTEQILNGTQPEELSLQRLIVSL

SEQ ID NO: 75 - protein, 517 aa, unidentified
  source 1..517: note = uncultivated organism
MPPPIRDKEARRAAIYLRISLDRDGDGLAIDRQRKDCEAIVTDRGWTLVETYVDQSISASDKNVARPAYDRMIRDVDAGLIDAIVCWDLDRLTRQPRQLEDWIDRAEAASLTIVTASGEADLGTDSGRLFARVKASVARAEVERKSARQSRAQQQRAEQGRPPKGVRPIGYALDGSIIEHEAVVVRAIYDAVQAGWSLRDIVRALNGEEPARHGAGELPPVPKTPRHTHTLDLERNVRRRAEGKAEKPVTAPYPWIPTTLLSILRNPRYAGYSVYRKRTGKEQAKWADWRRHIVRDDDGAPIKARWKPIIDPEQWEAVQAILDDPKRTTNRTSSTARKHLGSSLFVCAECGKTVRTHGARYRCPDAHVLRSQRQIDAAVLATVRAYLARPDLADLIPAPDAPEIARIDQEISDRRARLHRAQQDYDAEIIEGADLKRIRDRERPAIEALERKKIDLSAGTDLGPVAAAPDPVAEFDALDLVGRRAVIDALCEVRLHRGVRGSRVFDPDSVSIVWRVD

SEQ ID NO: 76 - protein, 584 aa, unidentified
  source 1..584: note = uncultivated organism
MGMDVAKAARSTKRSNCYRCAIYTRKSSDEGLDQAFNSLDAQREGCASYILSQKHEGWTVLPTLYDDGGYSGGMLDRPALQRLLADISARKVDVVVVYKIDRLTRSLFDFAKIVEAFDAHDVSFVSITQQFNTTTSMRRLTLNVLLSFAQFEREVAGERIRDKIAASKKKGMWMGGLPPLGYDVQDRKLVINKKEARTVNHIFERYRELKSVRALQTELAAAGIRSKRRTLNDGTSYGGQKLSRGALYLMLQNRLYRGDITHKGNAYPGEQPAIVDEALWGEVQALLAKNRVARAAGAHAKQPSLLAGLVFEEHGARLTPTHANKNGTRYRYYVSTSLITQSNQNSSTGRRIPAADLESLVIGKIRDFLSDSNALLDVIRDAHADGVHQSGLIARANQIAEELPTMAPDQLRRLLASLLARVEVLAHGVEITLRRYFLLALLADVPFEPTTRTENADADFADVLTFTVEARLQRVGREMRMLVADQDHQSSADPGLLRIIARAHDLQERLMNNKVLTVQILASQERVSAGYVSRLLRLPSLAPDIITAILNGRTPPQLTAKKLMRLAPKIPVDWSEQREMLGFY

SEQ ID NO: 77 - protein, 578 aa, unidentified
  source 1..578: note = uncultivated organism
MKEEEAKRFVIYSRKSRFTGKGESIENQIELCRQYIASHYGGEKAEKALVYEDEGFSGGNLERPQFRKMMKDAQKTPFAAIVVYRLDRISRNIGDFAKLIEDLGSRKIDFISIREQFDTSSPMGRAMMYIASVFSQLERETIAERIRDNMRELSKTGRWLGGTTPTGYESESVSHVTVDGKVKKACKLKMIPDEIELVKTIFNRFIETGSLTKVDQYLLEKRCLTRRGKRFTRFAIRGILSNPVYMIADDAAYRYLSGSRVELFSDKSRFDGVHGIMAYNRTLQRPGKAHRIRPMEEWIVSVGGHKGVIPGETWVNVQNMLERNKSRSYRKPRSNAALLSGLLYCGRCGGYMRPKQSDRLTAAGEPAYTYLCATKEHSRGQCCGMKNASGNMLDGKIMEEIRHLGKDSGDHAGQIAQAKKIISGSLEDCDAQIHMLKEQMKENESAIKRLVESLTRAAGGTAEPYIMEQIDEMHKKSESLGRRLNELEAITARRELATAEFDAICRMLSTFGESIGSCGVEQKRAAIRAFIKKVVWDGENAHVYMVGSEDDRSFSEHPSESSGVVPDGGHVPLREDSK

SEQ ID NO: 78 - protein, 548 aa, unidentified
  source 1..548: note = uncultivated organism
MKRVRCAVYTRKSTEDGLEQEFNSLHAQREACEAYILSQKHEGWDLVPTHYDDGGFSGGSMQRPGLKALLADIDTGRVDVIVVYKVDRLTRSLADFAKIVERLDAKGASFVSVTQAFNTTTSMGRLTLNVLLSFAQFEREVTGERIRDKIAASKKKGLWMGGPVPLGYEVVERKLVPVPSEAEQVRHIMRRYVESTSANALIAQLEAEGVRTKVQRRTSGPHRGGIPFRRGSLFHLLKNPIYLGMIVHKGTTYSGEHDPIVDQALWDAVQARLAAKSPSRRRTTNDRQDALFEGLLTDPHSRPIVPSFTCKGTRRYRYYETRRDLVGSGKPAATRFALRSLDRHIVDELRRLLGDEHALGQWTRIEDAEGLQAVIAQAARLSHLLATESNWSEVIRTLISSIEVHADGLDLAIFSAALGLSGKADALVLKLTLPTRKPFGERKLRLSAGTSNASRSEKTHARTKLLREAHQVREQVLAAPGESLNILATRHSRCRKQMARLLRLSWLSPRIAEAIIEGTLPDRLDRKHLLEMALPTSWSEQHRLFGLA

SEQ ID NO: 79 - protein, 518 aa, unidentified
  source 1..518: note = uncultivated organism
MPQVEIILPTKSLEEARPTRIAAYCRVSSNSDDQLNSFYAQVKYYTTRISEFPNSELVDIYADEGVSGSTIHKRAEFQRMLTDCDKGKVDRIITKTVSRFARNTLDCLETVRSLKAKGVSVYFEEQNIDTEKMTDEMLITMYGNIAQNEAKSISRNLKMMNRKRMADGCYISRMAPYGYKYEDRTYIVCVTPALVVRRIFREYLKGLGAAAISNLLNDEEVPPPERAKRWYPNTIYGILKNEKYVGDTQFQKTFREDDLPFTKRINKGQLESYYVEHTHMPIVEREVFEQVQELMNSKSADYITGPTVDSVMRNVLICGNCGGRMKRKVVRGKAYWVCYHHNIRKEYCDMPPIAEADVEDAFVALFNKLKANSKYIIAPVIQNLTKLQNGLRKENARLVDIDQSLVQLNDKKLLLTKLHSKSIMDDATFLNETALIDKDISKLSDERRKMLSSDSDLEQVSQIKALQALLANTEYLRNFDATAFKNAVQSAVVKDKKNIEFKLFGDLCFPELLGRNVS

SEQ ID NO: 80 - protein, 579 aa, unidentified
  source 1..579: note = uncultivated organism
MVATRFARLRRARDRHGLDRQVAAQLGDVPGGLDVVLRATVDNMPKPLRAVVGARVSHLDDDKDTTRKVSHLAQTEEGERWAQARDYSVVGRFEDLGISAGKTTPFERPDLGQWLAPERLHEWDVLVFSKIDRAFRSTVDCIDFAKWTKANRKILAFAGDGVVLDYLHPKKDSLDQMMSEFFIYVGSFFAAIELSRFKTRATDRLDYLRMTDRVSHGVPPLGFRTVPHPSGQGKALQRDPEGYKLLHDIKRMLVGEHQSLTNIARQLNEQGRTTNVGKARGGGKWSVSTLKRVLTSQRTQGFRVMSVFEPAPTEANPDHKKRMGEKLVLDPEGQPIRMAEPTFSEEDWSRIQAALGGRTASGKARQMTPNPLAGIGYCVCGYSLALHRRKSSSGKLHTYARCGRSPDGCRGAVTLREAEDILEDRFLDAYGDREMQRMVFVPGADHSADLAQTEQSLERLRWESDNGLVDDEALYRSRLSALVARRAELTANTVVPARYEPVGTGRTYRELWSDEATDRRQVLRDAGIRLVLHCPPRGTTTQTRVIPWEIRIPEDWPEVESVELPTDPALEARIAAQRR

SEQ ID NO: 81 - protein, 501 aa, unidentified
  source 1..501: note = uncultivated organism
MKESTSHSRVVLPLHEQGIAIYSRKSRFTGKGESVGNQIELCRQYLRAHEPDAPEPEIFEDDGFSGGDLNRPAFRRMMRAAEAGRFRMLIVYRLDRISRSIGDFTALIERLVQLNVAFVSIREQFDTSTPMGRAMMYIASVFSQLERETIAERIRDNLRELAKTGRWLGGITPTGFASEAVQAVTVDGRTKRACRLRLLPEEAETVKAMYSLFARLGSLTAVVKGLQERGITTKNGNAFTRHAVRDILHNPVYARADADMLAWLRAAGTELSAAQEEFDGRHGVLAYHRTDQSRGRTAVALPPEAWIVAVGQHPGLIPGSQWAAVQERLRRTDCRTPRTEHETPALLAGLLQCRCGRPMYAKYRRAADGERFSYVCRAKSTGGREQCSCPNVPGTAADAAVRAMLCALPEDHATLAAALRGLRRGLPESSPAPPDRIPLALRDCLNLRTLSGGQECSSIPLALRDCLNTIRRTQRVLEALTEQLRWDGETLCVTLRRVDCK

SEQ ID NO: 82 - protein, 558 aa, unidentified
  source 1..558: note = uncultivated organism
MADILIRLRQRCAVYTRKSSEEGLEQEFNSLHAQREACEAFVASQKHEGWSVIPTAYDDGGFSGGTLERPALRQLLADVRDGKVDIVVVYKIDRLSRSLFDFAKIVEIFEAQKVSFVSVTQSFNTSTSMGRLTLNVLLSFAQFEREVTGERIRDKIAASKRKGMWMGGNVPLGYDVCDRKLVINAAEAETVRRIFRLYAELGYIQKLKQELDRVGIRTKARMPASGRASGGRVFWVGHLREMLRNPIYIGRIAHKGEVYEGEHAAILDQGEWDQVQAGLTNQAWERSAGTHADAPSLVPGKVFGPNGERMSPSQTRKKGKAFRYYISRTLIEGGKDGIRIPAGEIEGAVIAQLVRYLSDRPNLLDLICASGRSPPALELALARASELVERLAGDDTATKRLLLKDLIQRVDVRSSELKITMAASEIVQMLTGDNLPQREPVVVAVVAEFRRHAKKIKLVLQGETPKPEIDPALVKAVARANKWFGMLLSGEAKSVAELARLETLPRRYVSSLMPLAFLAPDLVKTILGGTQSTQVSLDKLLNPNSMALDWGEQCERLE

SEQ ID NO: 83 - protein, 515 aa, unidentified
  source 1..515: note = uncultivated organism
MAAKPDKLCRCAIYTRKSTDHGLELEFNSLDAQREACEAYIKSQASEGWRALPGRYDDPAYSGGNLDRPGVQKLMKDIEGGQVDVVVVYKIDRLTRSLADFAKLVEVFDAKRVSFVAITQQFNTTTSMGRLTLNVLLSFAQFERELASERVRDKIEASRKKGKWTGGSVPLGYDTKDKRLVVNPLEAATVRQIFDRYLALKSFQKVIDELNAQGIVSKRRPIKERIAGGVPFTYGPLAYMLKNRTYLGETGHGGKWFPGEHEPIIELATFGAVQELLRTNSEGRAGRRQQTDALLTGLIYDDRDNRMSPSYSVKNGIRYPFYVSLSLLKGRKDQSGSVARVSATAVEQAVLLALRNEAGNDISFTRLTPREFAERTVQRIVVRGDRITITLHPGLSTDFLEIPWSAGNRSGESTIEGGATDSGKPDEALVQAVARAHVWLDLLSAETHESIEDLATAAGVHPKVIRNRIRLAFLSPSLTLAILSGEQSANASLADLNGPISLSWHNQGHRSLGPG

SEQ ID NO: 84 - protein, 551 aa, unidentified
  source 1..551: note = uncultivated organism
MKPVRRLRCAIYTRVSTEHGLEQEFNSLDAQREAAEAYIKSQAHEGWLCLRDRFDDGGYSGGSMERPALQELLNAVRARRIDVIVVYKVDRLTRSLADFAKLVELFDAHEVSFVSVTQSFNTISSMGRLTLNVLLSFAQFEREVTGERIRDKIAASKKKGLWMGGIVPYGYRLENRKLLVDPPEADKVRKIFQLYLQLKSLPQLAQVMAEQGIISRPRSFASGQPVGGKPFRTGALSHLIGNRMYLGEINHREHSYPGEHEAIVAPELFAAVQQLLSQRKNRTHDATGRSQALLGGLIFDDHGNRMTPVHATKGTIRYRYYQSWVLGHGQKEKAGSVTRVSAGDVERIVIEGLVKRSPDLINTSQDTAEQSQFVRAMVSKVMIHPQHIAIEIKVPATMVQDSDEGTSHVQYRNGDIQSCDEVSHPDSSETITIPWVKPVQTRARQILAVSNAEQSPRPIKSEMRARILTNVAQGRSWFNQLTSGKVADIATLAQHNDRSEKSVRSLLSLAFLAPDIVDAAISNRLPRGLGITDLTDLPADWTEQRRQLGLS

SEQ ID NO: 85 - protein, 527 aa, unidentified
  source 1..527: note = uncultivated organism
MKPGTAKPVRCAIYTRVSTDAGLEQDFNSLNAQCDAAEAYIRSQAHAAWTLIRIPYNDGGYSGGSTDRPALQRLLADIRAKKVDVIVVYKVDRLTRSLADFAKLVELFDSHGVSFVSVTQQFNTTTSMGRLTLNVLLSFAQFEREVTSERIRDKIAASKRKGLWVGGMVPLGYEVKTRKVLVIKEEAERVRTIFQRYLELGSLSLLMADLRQQKILTKIRKLSTGKTVGGNPLTRGPLAHLLRNRFYIGEVTFKGEILPGEQPAILDRKLFEAVQRKLDEQRTNHTITRSSSESLLMGRIFDELGNRMTPSYARKDGKRYRYYLSSALSQGRTEHAGSVRRISAHEIENLVVAAVRKRLKESTPATDRDLIHANVGRIEIHASRIVIRLARKGDRQSNRKTDNAVLYVRWKKTDQKRRREIIAPAASSQDIRPIRSETRLTLVTSIACGRRWLDEIVTGAIPNVEQIAAREKCSVRQVNMTISLAFLSPTLVKAAIDGRLPRGIGVARLRDAPAEWSRQHALLGLAS

SEQ ID NO: 86 - protein, 540 aa, unidentified
  source 1..540: note = uncultivated organism
MSKTLRCAIYTRKSSEEGLEQSFNSLDAQREACAAYIASQRHEGWQLVPRDYDDGGFSGGSMDRPGLKQLLADVEAGEVDIIVVYKVDRLTRSLSDFARMVEVFDGQGVSFVSVTQQFNTTTSMGRLTLNVLLSFAQFEREVTGERIRDKFAASRRKGIFMGGTVPLGYDLGDRRLLVNPEEAELVRTIFHLYLELGTVAAMREEVHRRGYRSKRRVSKTGRASGGNLFTKGALHAILKNRIYLGEAVHKGQSYPGEHDAIIDRDLWDRVQSTLKEGISASRNGTRARAPSLLVGLLHDAAGNRLTPSHAVKNGKRYRYYTARDGQPPLRLPAHEIEELVTGQVRGLFNDAGRLLNITGNGLSVDQQHRLLESAVDLNGRWDSLSASDHRELLQTVLTRVEVAADRATFQLSVAGLLTRLGIEAKAAPEQVERFEVPFDSRRSGLGKRLVVTSGADEEDLRNPSLVKAVARAHLWYQQLVTGEVPDVRSLARQNGLPEGYLNQTLRLAFMEPSKVELILSGNQPADWTVEKLSRKVPVVW

SEQ ID NO: 87 - protein, 542 aa, unidentified
  source 1..542: note = uncultivated organism
MKPTERKVFRCAIYTRKSTEHNLDLEFNSLDAQREACEAYIKSQAHEGWRLVPDPYDDGGVSGASLDRPALQRLLADVRAGKITTVVVYKVDRLTRSLADFAKLVELFDQFGVSFVSITQSFNTTSSMGRLTLNVLLSFAQFEREVIGERVRDKIAASKRKGIWVGGPVPLGYRSIDKKLVVVPEEAEVVRTIFTRYLAVGSIGALIEDLDRRGIRTKANARPGGRQRGGMRFGTGSLGYLLKNRLTIGEVVYRGESHRGEHAPILDRELFEAVQAKLAANTVARQVRRRSTAAILTGRIFDDRGNRMSPSHSNKLGVRYRYYVSQAILQQRKAEVGSIARVPATEIEMLVLNGIRKHCAAIGEAEDPTTIADRDLIERYVDSVIVKPQALEVRLVLASETSAPTEEPSINDPDPGQLPTIMLAWTAPTFAAVKGIVHAPSAKPELKLESRDALLIAIAQARAWIDDIQLGRTASFAEIAKREAQGERYVRQLATLAFVSPRIIAAIVDGTAPADLTVTDLAKALPYSWAEQEQEQGIGLLQ

SEQ ID NO: 88 - protein, 510 aa, unidentified
  source 1..510: note = uncultivated organism
MICQADIKAEKNVVRCAIYCRVSTVDQAQGEFTSIDNQREMAEAYIKSQAGKNWVVIVEHFDDSGYSAGTTERPALQRLRERIKAAEVDVVVVYRLDRLSRSQLDFITLVEEFKAAGAAFVSVTESFNTDTAVGRLTMGLLATFAEFERASISQRTADKMGAARRRGRWTGGFPVLGYDVHRDGGRLVVNVPEAETVRRIFDLYLELGSLQATAAELNRRGWHTKAWATKTGQFHEGVPFNKNHLSRLFRNPLYIGRVWHRGQVYDGEQPAIVGEEVSERVQELLARNRVSGGAKAKNRYGHLLRGMLHCLACGCAMSPSVTRKNGRVFRYYVCGNATRRGWKACPHPSLPAKQIEDTIVERIRTMGSDPELAAETLAQVRSIRKSRTPELIAERKRLERALVRLQGRVIDTDSDREVKIEARLLEIAEELAVLEGPGIDKRKIAKALAIFDEVWSCLFPREQERVINLLVERIDFDAKRERVAITFKPTGICSLAEEVAAAEETNDGQN

SEQ ID NO: 89 - protein, 515 aa, unidentified
  source 1..515: note = uncultivated organism
MRAERDADRPALTRLMADIHAGKVSVVVVYKVDRLTRSLADFAKLVEQFDKFNVSFVSVTQQFNTTSSMGRLTLNVLLSFAQFEREVTGERIRDKVAASKKKGMWMGGTIPLGYDVRDRLLQINEAEAITVRTIFNQFLRLGNVTILRGWLRENDIRSKAGSHFFCGPLYQMLHNPLYIGLTRHKTNTYPGQHQAILDSETWDKVQALLAANRQGGKRKPRATKASLFTGLLFDAEGTRYTPTHATKNGRRYRYYTSQAIIKKTEKVETPTRIPAPDLESAVIERLLKLLREPGDLVTSIRDDFQEGASLSGDLFTRIVARATSTAATWQSLTGTDREHFLRAVIDRVIIHPTRVEIRIRVPQFIQQLLGNNTPTAENRAGNTTAPPQDHLQLVASIECPFRHIPQGRALRLIVGNTNITTEASRQAILKAIARARLWYEQLTTGEAGSISQLAGMHGLSQRFLHAQMKLVQLSPQSIESLMNRTGPLPLSLVDLLTEIPMNWREQAFNLSIKSA

SEQ ID NO: 90 - protein, 564 aa, unidentified
  source 1..564: note = uncultivated organism
MTKPSTKLVRCAIYTRVSTDNGLDQEFNSLDAQHEAASAYIKSQAHAGWSLVRFRYDDGGYSGGSTDRPALQKLLDDIRAHKVDIVVVYKVDRLTRSLADFAKLVELFDAHGVSFVSVTQQFNTTTSMGRLTLNVLLSFAQFEREVTSERIRDKIAASKRKGLWVGGPLPLGYELKAGKLTIIEEEAERVRAIFCCYLKAGSLKLTLADLMARDIRTKVRHLSTGRTIGGIHFTRGPLAYLLRNRFYVGEVPYKGEILPGEQPPILDKAVFDAVQGQLDCQRANSVRTRSPSGSWLAGLIFNDRGHPMTPTHAVKNGVRYRYYVSKPSTDGHPEQANTCRRVPAAEIEELVLANVRQHLGLEPPSAAGADCPGKTVMRIVNSGSEVELLNGQRTQSPALPVLHYIDRVQILDGRIKVHLSRKRRREAEVDDGVDPSTSDIIVIPWTKTSGRCARQILLPASRSSAQPPRPIRSETRTRLVKAIARARRWLTELTSGRVTDLAQIAARERCSVRQVQLTLSLAFLAPGLVEAALSGRLPHGIGLTTLRDPPAGWSLQMDQLGLAR

SEQ ID NO: 91 - protein, 518 aa, unidentified
  source 1..518: note = uncultivated organism
MNIGIYPRKSVYRDNSDSIDVQVNLCKEYAELVYRGQELNFIIYDGDEGFSGKNTNRPAFTRMMKDVRQGLLNAVIVYKLDRISRNVQDFSATFSILQEYDVAFVSVKESFDTSTPIGRTVMYILAAFAQLEREQISIRVADNMQALGAAGKWTGGMLPAGMTSIKKTMNGKQHSYLMVDPVKIKPVKKIYELFLSGYTLTGLERYCRDNGIHTQAGKFMSATQIYALLTNPIYAQNSEEMYDYLQEKGCSLPERGLFDGNKGLIAYGRTRNNATTQKRQKENKWIIAVGIHEYVIDSQKWIAVQKRMGINKQVRSNKYQVGLLKGVLKCKCGGSMINRVYQKNGLQFEYYVCTNRDRRGSGFCNAANVRINNIDELFLKQLKILSLDKEHIRLDSQIYAEEENDIERIREDMQSLQSKIKNLTIALQENMQSVASRYLVEQIEVLDKQYSSLSRKLLNANRVNAAKAAYQNNVDNVYQGICYLIHNFDILSYEEKNELIRRTVKKCVLDEGNLQIIF

SEQ ID NO: 92 - protein, 570 aa, unidentified
  source 1..570: note = uncultivated organism
MAGRGRKKQSKKIIIDKKWFAGIYGRRSFDDGDDNESYTITNQKALIESFLESKTDITITDYYIDDGYTGTNFERPGFKRLINDIKNGRINCIIIKDLSRLGRNHKEVGKYIEEIFPIYDVRVISINDNIDSYLNPESIKSLIISIKNLINENYSRDISKKVFSAYETMAKNGLFIAGTPPYGYKLMKDNKHKLEPDLEETKIIKFIFDMAYNNNGRIKICKYLNDNGILCRKELQRRKKANLSLNPKEVSSKYFWNPTTIGRILKNEVYIGNLVQLKTTKAGFGSQKIITKDENECIRCENTHEPIISKKIFYEVQKKIRCNDTGKKSSNPSSYSKYRGILKCADCGKAMTRQEDFRGNRNVSNYYCTSHLRASKSCTKHKIKTIDLENCVLNAIQIQVKLVIELEKSLKRLYFKNSQNFIENEYKNKVRTIEMKIENLKERKRISYENWKFNKINKNDFINESKQIEDEIQQFNDEIELYTSSYKETVRKIRKNDYWIGHYKRNRRIKSVSKDILEEIVDKIYVFEGGNIEIKFKYQDEYESLLNYLEEEGVKEVEKMVIRNVSKTFI

SEQ ID NO: 93 - protein, 518 aa, unidentified
  source 1..518: note = uncultivated organism
MSNKTPPRPKTIRCAIYTRKSTEEGLDQQFNSLDAQREAAEAYIRSQKCEGWEIVYDRYDDGGFSGGNIERPALKRLMEDIQAGKIDCVVVYKVDRLSRSLLDFARVMETFDKFNVSFVSVTQHFNTTHSMGRLTLNILLSFAQFEREIIGERIRDKLAAQCRRGQWTGGYPVLGYDVDRSERTPKLVINSEEAIQVRRIFSLYLEFKNLMPVVEELDKRGWKNKLWHSKKGLPKGGRQFDKGSVHALLTNPIYCGKIKHKTDLYPGQHQAIIDDETFQRVQAQLRDNSFNRGNRLPSKHGGLLKGLIRCPDCNVAMVHNMTKRNSVVYRYYTCVRAIKRGRQSCKHPSLPAGEIEAAVVDQVRAISRDTRLRDEIIRQAMEGIQQGKKELESQQTQLTRQLTRDHGEVQQLALEQRPNNSVVYRIADVQERIEEAEHQLAKVNRQLLDLEKQELTTQEIEEAFIDFDRIWDALTTREKSQLLALLVSKVEFDQSDCTIAITFHASGIETLEQQSQEV

SEQ ID NO: 94 - protein, 598 aa, unidentified
  source 1..598: note = uncultivated organism
MAKRIRNTKKDAEVQKSNNKDAPKSVRVAFYIRVSTQEQDLEGYSPEFQKESLEEQVERKGYKGWHTKKEWQFNDVKSGGNTVDRTELNKLMELVRAKKVDLVLVWRIDRMSRKLSDLLELFEEMDKHGVGFASVKEDLDFTGAIGKLIFQIFGALAEFERENIKMRTEEGKLMSAKHGNYVGGAIPYGYKGVTTKGTKGTKLKMVPEEQKWVKQIFTWFVQGKKTLSWIEGELNKRGVAKGVGNPETRGTQWYAETVKGMLQNDIYRGAYITNRWRLISKKPEVYEERPEEVWIYTEVEPCIDITIFYMAQERFTQEGGMRSETQGGGQNKYLLRGKLRERDTGKGFVGYLSEKKTKNYRRKKYTDTTGEVHSAISISAEKLEPFVLEHIERAILQPGAFLRIHKERSADGKKLKEIQEELEHQESILSKQNRRLEGANEKWIDEEMTDDEYHAAKEKYEGKRDKALEEAEKIKKEITRIGQYDAACIDLKSFSEQFRKNVGKLTHAQKQRLVHLLVERIEIYETETERRAKVWFRFDPKAIAGAIPTGRTDFALTEEKKHRTVRCQTHEVVGRVGIEPTAKRLRVSCSTTELPTHI

SEQ ID NO: 95 - protein, 550 aa, unidentified
  source 1..550: note = uncultivated organism
MAKQTIYNAGIYVRLSQEDMRAGESLSIEHQKLILTKYVREQGWNLVDTYVDDGFSGTDFNRPSVQRLLSDAQTGRINLIICKDLSRFGRNYIEVGQYIDYIFPLHNIRFIALNDNVDTANRDSNAMEMMPVINLFNEWHASSTSKKIKAVIEANAREGRYKSSYAAYGYTKADDEKHTPIIDPEAAEVVRRIFKLRSQGVTPRHIADQLNADSIPIPSDYFYQKQGKVNPKFTRHLWCQTTIRTILNNPIYLGNMAMNRTTTISYKNHKTVKKEQSDWIVTENNHEPIISQELWDRVREVEQSVSRGKRSKDGTLKPLSGLLYCCDCGFKMKSAGQNRKNRQGERYRKIFFNCDSYASFGKCACTSHYITQKEIEAIVLADIRSMASLVIADEDTARTAFLSKKEQQTSRQSKVDVKKLNDSRHRLAELDSLMQSVYEDKVMGKIPEHLCVNFLQKYEAEQQELRMIVDELEERLSAEKQDMEDVEEFIRRLKKYIDIQELTRELCLELIEYVTVDEYSADRPRVINIYYKFLDKPLKDKKSLYSDENS

SEQ ID NO: 96 - protein, 657 aa, unidentified
  source 1..657: note = uncultivated organism
MAKSSEGTPTRAAIYVRVSRDFTGEHRAVERQREDCELMCELKKWDIVNVYEDNSVSAYSGTSREAYDRMVSDYKKGMFDVIVAWKLDRLTRSVRGFAEMLDEVQGQGLRICTGDLGDIDLSSADARFTTNILVNVAEFESARKSERMKRANLQRARKGTMRPGSRCFGYGNHFEVIQDEAECVRRIYESYVSGASMSSIARSIAGDENDTLGLPRFEAPSIRFARERYESMSQAQRERLSAKQVAALPHDVIRSIPEEFLSRFTEEEREVIDNALARPQKGFDLAVVQTILNNPRYAGYVCYVPTVNGKTQTPNSHWTDYIVRDLETNEPVQAAWPAIVDRDTWWQAQRRREKNKYRSDGKRVDRNGGSKKHVGSGFYRCGVCGAPVKAGDGTYKCIGHVSRERPLVDRYVIGCARARLAMPDAVDMLLKATETADTSVVDKEISEQRGRLEQARSDYKKRYIDGPLYSEIKEEVEQRLADLEKQRAALIPETSGIKALLNAGTPVQAFDQMRDAGQISEVLDALMEVTLLKHKPGKRYTPESLVSDVAIKWKYLPSPDRFIVPDDPAEGFTLAWPIAQDPRTPVQAVERPQSEAERMLVAHITRKQDKKREDVVDRAIRLKMSFVNLLREAAEAEARGDEERITSLLKPHIKDGK

SEQ ID NO: 97 - protein, 520 aa, unidentified
  source 1..520: note = uncultivated organism
MKAIYARKSIYSDKSDSVETQINMCKEYILNKYGTDEDITVYYDEGYTGANTKRPGFTRLLKDINDGKINMLVCYKIDRISRNVLDFSEVYNTLQKKRIEFVSVKEQIDTSTPLGRAMMYICSVFAQMERETIEERVKDNMIELAKSGKWPGGRPPLGYKLNRVIINGKKHTVLEPNEETIPLLYEIFDTFLSGYSLTGLETYFRKKGVKSINGKYLSSAQLYNILKNPQYVANEPMIYDYFASKGCIMVNEREFYDGKHGLLVYGRTSDSKNDKHTVNPPEKWTVAIGMHPPLIPAEKWLYVQAKFGQNLIDKTSKYKIGLLKGILKCKCGHVMQVKRKVDKIYNKVYDSYICRYRIRGIEFCDMKSVPVTEVDTALLNILKDIKADKTLLNKYFAESLPQANIRKKEDILKDIATAKKKISNLIQTLQDNSDSVVAKYIVKEIENLDKMIIGYNYELREVSMLENEKAKKDADIDSRYNDICNYLLHFDTLDYDSKTEFLKKTIKECIWNGQDLILSF

SEQ ID NO: 98 - protein, 586 aa, unidentified
  source 1..586: note = uncultivated organism
MKQTKENTEQIAIYSRKSKFTGKGESIENQIELCKQYIRAHYLNCKNEDILIYEDEGFSGKNTERPEFKRMMAEARAKKFSAIVCYRLDRISRNIGDFAKLIEELDGLKVSFISIKEQFDTSSPMGRAMMYISSVFSQLERETIAERIRDNMHELSKTGRWLGGTSPTGYESESVEKITVEGKTKKACKLKLIPEEAEIIKQIYRVFLEKNSLTKTETYFIQNGYKTKNQKLFTRFALRNILTNPVYMIADEDAYNYLIENEVDLFAAKADFDSTHGVMAYNRTIQKSGKANQIRPMNEWIVAVGKHTGLIKGMEWIQVQEYLDQNRSKSFRKPRSNVALLSGLLFCTCGDYMRPKLSQRKDAQGEFIYSYLCAMKEKSRSHVCKMKNANGNMLDRVVCEEIKRLGADSSEFIRQLELGKKQLEGNREEYEDNLERLRGVLAENEKEIAGLVSSLSKAAGTSTEGYIIKEIDELHGKGEIMRSRIAEMESLTASHALSNIEFDIIRQMLTTFKDTIDDMSVEQKRAALRTFVKKVVWDGENVHVYLFGSDDSGGIDLPQDEFLSESGGGLTENEGNTAEPLCENSK

SEQ ID NO: 99 - protein, 548 aa, unidentified
  source 1..548: note = uncultivated organism
MIKRVAIYCRVSTVEQAEEGYSIDEQNLKIREYCEREGHEIYNLYEDRGISGKNITNRPGIKQLLQDATENKFDLVIVWKLNRISRKLLDILNIVELLNKHNIAFRSLTENFETETPSGKLQLNIMGAIGEFERETIAENIKLGMGAKARLGEWCGGVVLGYDIVEIPSDGKKRKSTKLQINEREANTVRRIFDLYSQGYGYKAVVNRVNKEGYKTKRNNEFAVATVKEILKNPVYIGKIRYNVRQDWSKKRRNNINPNPILSDGKHEPIIDMETWNKVQVILKERSKKHNKIYDSEFPLTGILKCPVCGAGMTISRSTSKRKDGTKKVLEYYSCGNWKNKGTAVCKSNSIRVEVADEYVLNKIMTLINNKSILKKVIDNINKNKSSKLQPTIDELDRITNEINKLNTKKSKNIELFEDGILDKNELSIRVKSINDDIDKLKYREQELIQEVQLAEGEPVPFEIIKEIMDRFKEVFLNMSTSQQRKQLIHLLVSQITMNEKREIDSIEIQINDDVITYLMKDELPKLKGDSSFLHLLGTNHINLKISI

SEQ ID NO: 100 - protein, 520 aa, unidentified
  source 1..520: note = uncultivated organism
MTVTKRAAVYLRISLDRSGEEAAVERQLEDCQAIIAQRGWTQAGDPYVDNSVSASKRNVRRPEYDRMVSDYEAGAFDAIVCYDLDRLTRQPRQLEDWIDAAEDRGLVIVTANGEADLSTDGGRMFARVKAAVARSEIERKGARHRRANQQRTEAGRPHGGRRRYGYELDGMTPREDEAVIVRRCFEEIASGASLRSVVAGLLRDNVPPGTGKGWGGSRVRYMLLNPTYGGFVHSGGVAVPSDQVRALVDPALAEEVRAILTDESRRVSPGPGRRHLCSGLLACGVEGCTNVLNVHSGYYVCQVRTLTRSGGRFLDDKPHVGVKVDLADRYIREQIALALLTVPSARLSGDDTPAAAPLVARLVRIERAVASTMADRDDDLISPQAARTRLLSLRDERREVEAALDAARAARTSSASLATLAQELLPGTDSIPAADFWPIRDEVVARLAAEPIDRQRDALRQLLAVTVAPGVGTRRIHVWHLVADHLNPSAPVESPAEGESRGPQGGTRRAPRANAGRKAA

SEQ ID NO: 101 - protein, 570 aa, unidentified
  source 1..570: note = uncultivated organism
MQENEDIIAIYSRKSKFTGKGESIGNQVELCKEYIRVHFGEAAVDRAAVYEDEGFSGGTLNRPDFKKMMDAARKRKFKAIIVYRLDRISRNINDFASLIEELARLDISFVSIKEQFDTSTPMGRAMMYIASVFSQLERETIAERIRDNMHELAKTGRWLGGTTPTGYASEAVQSITIDGKSKKACRLKLIPEEADIVRMIYDLYIETDSLTLTEAALMKQGIKTKNNHYFTRFSIKAILQNPVYMIADEDAYHFFIQNDTDLFSEKDAFDHEHGIMAYNRTNQEKGKATKYLPASEWIVSVGKHPGLVSGKVWVQIQESLERNKSKSFRKPRSNEALLSGLLFCSCGERMYPKMSKRKTADGKVIYTYVCKMKERSQRSVCNSKNADGNTLDMAVVGQIQMLAEDQDTFIAQLEQSRRFYTGNRMDYEQRLSDTQKEKVQTEKKINSLVDSLADVGDSPAKTHVTKRIEQLNQEYQSLERRIQELECLISQHALSDIEFDLLCQLLAVFKDSIDEMTVEQKRAAIRTIVRKVVWDGVNAHVILFGVRDEEIECQEITAALSGNTGTPQCS

SEQ ID NO: 102 - protein, 555 aa, unidentified
  source 1..555: note = uncultivated organism
MSDVEIKKIAIYTRKSNDENLNGAVTSIDSQKLACRNYIQIQKEKGWVEYPEPFDDPAESGKSLDRPAMKRLLQCISEGKIDGVIVYKLDRLTRNSRDFHYLLELFEKHNVAFISATESIDTKSPQGRLMTAIMIQFAQYDRELDQERSRDFILARARKGLWPTGIPPLGYDLKDKMLVINEPEADIVRLIFDLYLKHKSVIPVVKELNRLGYRRKLFKSKDGKLIGGKHFDIASVIRILKRKTYIGIIEHSATKQEFKGQHKPIISTEVFEKVQELLKSHVKRTDEQVLHTTNKHNFKLKGIIRCGECGSAICGYVRHKKNGKVYRYYKCLSKVNGVPVDCSFTSIGADKLEEFIIEQLAVLGWDREFLTLLVEKAKELVSNKIEPLKQEKHRLEGRLSNLKSSINNLIELAKQTPNQKISDELTNLDNTKREIELRLSEIQAELSYCGKVVFDVNVIEQTLRNFAKYIYKLPVELQIRTIQLIIKQVLVFKDRIRLELYEIPIDKINEIASGKYIEKGIKELTSSNHGESRGRKLNTNDFGTGVVAVDNNLRG

SEQ ID NO: 103 - protein, 520 aa, unidentified
  source 1..520: note = uncultivated organism
MNRNKKPKTPAVRCAIYTRKSCEEGLDLEFNSLDAQRESAEAFIASQQHEGWECLPEHYDDGGFSGGKMDRPALNRLMADIEAGKIDCVVVYKVDRLSRSLLDFSHIMETFDNNGVSFVSVTQQFNTTHSMGRLTLNILLSFAQFEREIIGERIRDKIAAQRRKGKWAGGVPVLGYDVDRSSASPKLVINAEEAVRVRRVFSLYLELGSLLPVVEEVTRRGWCNKQWKTKKGLSRGGRPFDRCSIYHLLTNPIYIGKIRHKGDVYDGEHEPIIDVSVFEKVQTRLQQNGRGRGNHLINKYGALLKGLLHCAACKRAMVHTFTGRGSKRYRYYTCTKAIKKGWKTCPTKSLPAGEIEAAVVDQIRCIASDAVLRDEVLRQARSASDDGLAELATQQRQLERQLSRDHAEIARLAVSPDPSSATTARIADLHERIARAELQLSDVKNRTAEIEQHRIDETDVAAAFADFDNVWTALSSREQAQVLALLVSRVEFDPADSTIAISFYPSAIKALAEGNIEDAA

SEQ ID NO: 104 - protein, 539 aa, unidentified
  source 1..539: note = uncultivated organism
MMNFGQGNYIAGCYCRLSRDDEHDGTSVSIETQRKVLEDFCHSHGWKIYDFYCDDGFTGTNFDRPAFQRMMADVETGTLNLIVVKDLSRLGRNYIETGRLIEETFPESGVRFIAIGDDVDTDRENMDLDLMLPMKNIFNQYYPADVSRKTRQAFKTKALHGEFIGSFAPYGYRKSAADKHILEPDEMTAPIVVEIFEMAAYKGYGYNKIANVLRLRKVLTPTAYRMKQEGAHYDGDLYDWNLTTVRKILENQVYLGHTANGKKKKISFKSKRVIYVPEEKWVVVQNTHEPLVTKHLWTDAQRKLNSRKRANRYGEVNMFAGLVKCDCCGKALTMAKSSTKKRYFSCSTYKSKGKDACTIHYILFDSLSDVILRDIQQKLKMIHRDEEGFAKRILKALGSTSTKKTERMREEITAIETRLKELEAKFDRLYDDRLEGIISDKKFKELAVKCETEQDGLNARHDELTALVGEQEDVELNVERFMETIQHYAEVTELNREILNRLIDKIVVGDKVKTDEGYTQKITIYYRFLGDLNGSFLLK

SEQ ID NO: 105 - protein, 513 aa, unidentified
  source 1..513: note = uncultivated organism
MKTETKNCAIYCRKSTEEGLDMDFNTLDAQRESCEAYITSQRAEGWKVVKTSYSDGGYSGGNMERPGLKKLLADIKKGKIQTVVVYKIDRLTRSLMDFSKLVEIFDEHGVTFVSVTQSFNTTTSMGRLTLNVLLSFAQFEREVSAERIRDKIAASKKKGIWMGGNPPIGYEIEDRKLLINKEEAKTARYLFDTYLTLGCVAKLKQKLDSDGIFSRERTSKRGNVVGGKPYSRGALYSILKNPIYIGKIRHKDKIHDGQHEAIIPENIWNAVQEKLKSQAATTNKRQKSRETNLLKGLLFDSDGTPYSPVHTNKKSGQMYRYYLSQNLIQYRDHPKGIMARIPAHEIERTVGNSIQQNIIDILELDKIEDHGTIEHIKNNSTPSENLVKSCINRINVDQDILEINVNIPALRQTLQDYLKLDIPVKSKKQSHILSVTFSIRRAHKGTIILKPENPKNARLDLQPVQLKNLVRGIVWRDQHFSGATLRDIAKQEKLSEAGVRKIIMGSFDTLMSL

SEQ ID NO: 106 - protein, 509 aa, unidentified
  source 1..509: note = uncultivated organism
MIQAAPKTIRCAIYTRKSTEENLGLDYNTLDAQRDACEAYIKSQKSLGWVCLPDQYDDGGYTGGNMDRPAFQQLMADVEDGKIDCIAIYKIDRLSRSLMDFAQIMEVLERKKVSLVSVTQQFNTTTSMGRLTLNILLSFAQFEREIISERTRDKIAASRRKGKWTGGHQVLGYDLQQKPGGNCLLVNQEESYQVQQIFKLYLESGSIMDTLRALREKGIMTKQYSTKTGNSRGGAPFDKTTLHRTLTNVTYLGKVRHKDQVYEGEHEAIIDADTFHQVQGMLKRNLRSGGKYSSNKYNALLKGLVRCKHCGSAMIHHFVQKPNKRYRYYVCLKAQKQGWDTCPSPALPAAELEQFIVDQIKVIGKDLAVLEDCIKKTQAHMQEQIERLKDARSEKQKLIQELSQQIGEAAAQVGFDGTAAGRIELCQQQIKDIQVEMASLNSEIVSIQRQMLNPDELVGNLESFEPLWDAMRPRQKEKLIHLLIKQIEWDSETDNIFIAFHQTNIEVLN

SEQ ID NO: 107 - protein, 543 aa, unidentified
  source 1..543: note = uncultivated organism
MHVALYARVSTTRQAENDLSIPDQLRQLHEWAKASGHLVVQEFVEPGASATDDKRPVFQQMINDALTKPPAFEAIIIHSLSRFFRDGIEFGVYERKLAKNKVKVISITQPTSDDAGGEMMRRIICLFDEHQSKEISKHVSRAMKENARQGYFNGSKPPFGYQAVVTGQAASRGRSKKKLEINESEAGIVRLAYSLYQHGFEGRIMGCKEIVKHLTAKNLLMRGGAWNVHKIHDLLSDSLYMGDYFFNVIDSKNKVKRPPEEWVKTTIPAIIDASTFEQVRAKREARAPNNAPPRRVSSPTLLTGLLKCGVCGHAMTLVTGKSGKYKYYKCTSRHSQGNHACTSGNFPMGTLDDLVLDKLAEQVFAPERLQTMMEELRIRVLSSKNGQEAHINDLNRQLKKNEEGKQRLLDAIINGTIEDDESTQRRSQQLKAAREALFIDLASVRRDTSIPAGDYLKASQVEIFGKVLREKLLAKGSPLAKSYLNALVDEIVVEDRTATIKGSYAGLAETMQAIKKGNLNNQVPSFIPNWCARSDSNARPLGS

SEQ ID NO: 108 - protein, 506 aa, unidentified
  source 1..506: note = uncultivated organism
MKAVIYARYSSDNQREASIEGQLRECMEFATYNDIQVIDNYIDRAMSAKTDHRPEFQRMIKDSYKHAFDCIIVWKLDRFARNRYDSAHYKTILKKNGVKVISAKETIAEGSEGILLESVLEGMAEYYSAELAEKVTRGLKENALKGLYNGGSVPFGYTINSERKLEIDPKAAPIVADIFKMSYDGKTVKQIYNELAEKNITRSNGKPLRYNAVRYILSNRVYIGEYNHMGVKIENGVPAIIDKELFDGVQLELAKNSKAPARHTADDDYLLTTKLFCGRCGAMMVAQAGTSATKGVVYRYYACVRQKKHLCDKKMIGKTKLENFIVYKTMQMLQSEEIIETLAEKLYELQFSESTLLPKLQEQLKQKDKEIENIVNAVQKGFATDTLLKRLGELETEKKNIEESIAKEQLTTSIFTKDHFIMAFHNFRKIDITKQDGKRKIIDTFINSIYLYDDYMKIVYNTNGKEEVVALEDLESSTLFSCGAPSQYNPNRVLVTSERFGFVFML

SEQ ID NO: 109 - protein, 512 aa, unidentified
  source 1..512: note = uncultivated organism
MAEVTLINRNTMQSSEPLRVCAYCRVSRSTADQLNSYARQIHVYTQMIQNHSDWTMVEIFADEGITGTSAYKRPEFQRMIRMCEMHQIDLIITKSVSRFGRNVKETLEFVRKLKILGVAVQFEKEGINTLSMGDEMLLNTFAAIAEEESVEIAIRLRNANKKRMADGDFIDGNAPYGFRLVDRKLVEYEPEANVVRAIFSAYLDGMSTFEIAKDLNRQGIPSKENTLWQATAIKYILKNEKYKGDFLCQKTYHTDVLPFRQRRNHGEEDQFYVEGAHDPIVDPETFDRANELLTARREKIKTDAEPQTYLFTGMIRCSECGAAYNRKKSNGGIYWVCVRHLEARELCDSHYIREERIQEAFTVMVNRLRFAESRILKTMIRSLENAIDTVRRNNEEAYNLSVQISDINSKLLMLEQLNSKGYLAAEIYHAQAQELTNQLAKLKESRTQSLGTALTDKLKGVSEVCDVIDGIEKPLETFNPELFTAIVEHMEIDRKDTVTFTLHGGMRFTEVL

SEQ ID NO: 110 - protein, 508 aa, unidentified
  source 1..508: note = uncultivated organism
MIVLYARQSVERENSISCETQLEYCKAMIKPDERDEKVISIVDNGFSGGNVDRDGFQKMMKLVRRGKVTKVIVYKLDRISRSLADFVNILQEFKEHGVMFTSSQESFDTSSPYGEMLVKLLMVFAEFERTSIINRVTQAYAHRSEMGFYMGGRQPYGFELVPTEIHNIKTKKLSPIPSEIEQVRYIFEVYAQENVSLRRLLDILVAEGKTPLSGSDWSTAKLSALLKNPIYVKADSDIYDYYERRGVQMITDLSMFKGEFGAQLYGRTKHKPDDPDWSDMKLVLLTHQGVIDSDIWLKCQRKLEKNRQITNSYSSTTSWLAGKVVCEKCGHTMTTVKGKPNKDGEMRRYFNCTGKSHMKICSGPRVSIYAEDLENMVYDCIAEKLKDLKTATRSEKRADSSEINDLKLKIKAVERAEQQLLDNMLNGGFNDDLLALANQKATRLKKDKQALYERLEELNSRSDKTDNVVNLARSWQNADYERKKAVAMIMIHSIEIAEDGGTKIIWNI

SEQ ID NO: 111 - protein, 565 aa, unidentified
  source 1..565: note = uncultivated organism
MARIRRTSIPQETGKKYTLWRIAVYIRLSRDDGNDESLSVTNQRKIILEFIADKFDEEEYKLIDFYVDDGRSGTTEETRPEFQRMVSDIEAGRVNCVICKTLSRCFRNYSDQGRFLEQFLPAHHCRFIATSNPYVDTYADPDCTQNMEIPINGLMNDRYAAKTSADVRRTFNTKRRRGEFIGAFAPYGYQKDPENKNALIIDEDAAPVVQDIYRWFVLGGINMRSIARRLNELGIPNPTAYKQQKGLTYQSVCGQANDGLWNQKTIGDILRHPVYVGTMVQGRQAIISYKVHKRYNTDPADWYTVENTHKAIIDRDLFDKAQALLQRDTRTAPGKRNVYLFSGFLRCADCGKAMVRNTSKNFAYYYCRTYREKSTEKCSKHAIRADILEQAVLVTVQKQIELVSSLAEMIEEINAAPVVSTQSARLNAMKKQKTRELEQTNSLLDGLYMDLKAGDLSREQYRRMKEKLGTQARQLQSELAHIQEEQDVKAQGVTTGDPYLHTFLQYRNIQSLSRGLLVELVKYIYIHEDGSIDIEFNYADQYRRIVEFIENNQKEFHVISGKAAS

SEQ ID NO: 112 - protein, 517 aa, unidentified
  source 1..517: note = uncultivated organism
MSRATNNVPTFRCAVYTRKSTEDGLEQEFNSLDAQRDAGEAYIASQKSEGWVCLPDKYDDGGFTGGNMDRPALQRLLADIEAGKVDCIVVYKVDRLSRSLIDFSKIMDVLERHHVSFVSVTQQFNTSTSMGRLMLNVLLSFAQFEREMISERTRDKIAATRRKGKWSGGMPMLGYDVDPHATRLLVNKPEAARVREIFELYLDRQSLIAVSAILNERGWTTKRWISHKGREMGGKPWGKNSLFKLLTNPLYLGKITYKDEIHQGEHPAIVDAEIFERVQRLLKRNGRTGGAHVKNRHGALLKGLVRCVTCDCGMVPTHTVKNGTKVYRYYCCNNAQQRGWHVCPTPSVPAPELERFVVEQVKTLGKDTDLLAETLAESRRQREEAIGRLEVEKRTLERELHRHNADLRKLAGKDGLATDRMADIQDRIRTAEQRATEVRQRIIALSRELVDAREVGEACSMFDPLWETLSAREQARILHLLIERVDYDGPNGKVSITFHPTGIKTLADELNRQEVTA

SEQ ID NO: 113 - protein, 536 aa, unidentified
  source 1..536: note = uncultivated organism
MNVVLYTRYSSDKQSETSTEQQLKVCRDYCDRNSFTIVAEYKDEAISGRTDVRPQFQKMIGDSKSKSFEGVIVYSIDRFGRNLYQSADYANKLEKNGVALLSATEPISDGTPASSLTQNILMAFAQYYSEELGQKISRGMEYNAEFGFVNGAQLPLGYKAELATGTNGKKRYAINETTAPIVRRIFEMYADEDKTTAEICRHFNEQGIRTARGGEFNKNSLRVMLRNKKYIGINTYKGIEFSGVIPQIIDDDLFERVQQALNKNKKATGRKKAVGKEEYLLSGKLFCGHCKVKMVGWSGKSKTGKKHQYYKCNNSLKKLCGKKNVRKQLVEDFVIAHCRAILTDENIAKIANEVVAYNEAEQRNNEIVKSLKKEIANNQKQQKNLMDTLKLCEDNSQRSMILSELSAMEKERSELQIQLDSEESHKITITRKEIRFFLMDLRNGDASDLKHRKALIKALIHKIYLYDDGKLTIICNNGDTTTEINTSLIDDIESDMLAKSHSESYYLGDSRPPVNSNPNHQPIFAIGDAFGFVIHF

SEQ ID NO: 114 - protein, 549 aa, unidentified
  source 1..549: note = uncultivated organism
MKKAAIYARVSTGKQAAGELSLPDQKRQCAKFAEKKGYEIAAEFIDAGVSARTDKRPEFQRMINLACAPHRPFDAILVHSQSRFARNTRDLLVYAAKLEANGVQILSITQDLGEGETADVLRTMVGALDEYQSKETAKHVARSMIENARQGYWNGAQAPFGYRTFAAETRGARIKKKIEIEPQEAETIRLIFRLYVFGDGGSGPLGVKQIATTLNARGFRPRNDRPFRVQFVDTVLRNTAYIGEHYFNRNDSRRGKQRPREEWVPFPVPRIVEDSLFYAAQEKLDRQHPLKTPPRIVRSEVLLTAVAKCGECGAPLRKLSGKGRTYHYYRCSKKFESGVAACKGVSIPMGELDEIVLGALEETVLEPKRLRKMTEALVSRASERNEAFAARQKQLDGERSKTKAQVMNLYRLLGTGELTTDPTLTAHIRELQEKVETLNRQIAHLDRERSLPVERIGAEAVEGFGRAVSAALRSLDNRAFARAYVQALITDVTVSDREVKISGPKAALLHQTALFAAKGELVPSFAQEWRTREDSNLWPLPSEGNALSS

SEQ ID NO: 115 - protein, 553 aa, unidentified
  source 1..553: note = uncultivated organism
MTKVEIIKANNLITEEINTEKKLKKVCAYARVSTDSEEQLTSYSSQIKYYTEKINSNHDWKFVGIYADEGISGTQVKHRTEFQRMVNDALNGKIDIIITKSISRFARNVVDTLNNVRELREHNVDVYFEKENIHTIDTESEMFLGLCSMFAQAESESISQNVKLGLKSKMKRGEFVGNVKCYGYNWNKQTKELEINEEQAEVVRKIFNWYADGLGTRIIANKLRELGCKTEKGNDFLPNQVGNIIKNEKYVGDYLGQKTYIVSPLTHKRNINYGEKEKYYVKDHHIPIIPRELWNKCQELLNKRRNELSGKSQHSKHYCYRYTFSSKIECGICGSNYVHRTSGNKKEKQYFYWSCYNKVSLKENCSESLTIREEVLKELFVKVYNLIIEKKHKTKDKLINAIKETITDEDNKKEINKLYGEVQTLQKRLSNLIDLKLDNIENKDIYNEKEKEINDKIKILNSQIEQLEYNETQNKDLSKQLKSIEKIIYEEEQPIEEFDDVKFDNLVEKIIIGEKDKDGNVNNNVIRFILKIGTEYKFNNLSFVSNKKCCKQC

SEQ ID NO: 116 - protein, 538 aa, unidentified
  source 1..538: note = uncultivated organism
MTSQLPPVTTCAIYTRKSTQIGLDRDFTSLDNQHAVCSAYIASQQHKGWSPVSTRYDDAGFSGGTADRPALQRLLRDIEHGHVKTIVIYKIDRLTRSLADFVRMMEVFERHQVSFVSVTQAFDTSDSMGRLVLNILLTFAQFEREMLADRIRDKIAAMRRRGMHIGGPPPYGYDVVNGRLVVNEVEAAKVRSIFERHLALGSYQRLREELRDEGMLTKVWRTRKGTLRGGTPVSSGMIYRLLRNPVYWGKVVYRGTLYDGEHEAIVSDESWAAVNALCDLRVRRRSRRGPSPNLLLGLLIDWYGRRMIMRVQRRGQRRFRYYTSEPPAQSHKARVRTVRTPAEELEQLVQAAIRDFLRDPRRVREAILATGRPSETLEALVARGPAAAGLLEGADLAQRRDLLVALIAHGRIAQDKVTLAVRCHEVARLLEWDGRDRFDARSCRWQPEDPAVTVELRVRVADGRQILVLPLEARRGPASPVNPALVRLIHQARKARGMVDAEREVPLAELGRRFHWQSGYFARVLRQLPSAGHHCSNS

SEQ ID NO: 117 - protein, 533 aa, unidentified
  source 1..533: note = uncultivated organism
MNAVIYARYSSYRQDERSIEGQIEDCTRFAEQNEYKIVGEYIDRARSGTNAEHRTEFQRMIKDSEKRAFDVILVYKLDRFARNRYDSAMYKAKLKKNGVRIVSVTEAISEEPEGVILESLLEGLAEYYSKNLAQNVTRGMRVARQHGFFTGGAIPYGYRVEEKKLVPDEKEARVVQKVFEMYADRVPMSEIIAEINRLGFKPRKGQKFAINSFYRMLRSPKYIGEYTFDGVEYPDIYPALVDRDLWDRVQTNLKCNLPTRTRVKPEVVNYQLAGKLFCGMCGSTMIGESGHGKGGAVYHYYTCRNRKRNHDCKKKNEKKDFIEWYVVEQTMQYVLTPERIDLIAEKLHAQYEKDCSDKKISDLEKLSKQLDVEMDKCVTRLIDEDNKTIQARIKEQFEKLSEQKEDVDIDIAQLKLVAKKTFTVDQYKQWLGTFANGDPLDETFRQKVIDTFVNSVYLFDDKIVIYYNIKGGKQISYMEMCDDMENLEPIDDITLGSRCSDSTLNGSPSGTPVEHLFIINERLFALVITIDRD

SEQ ID NO: 118 - protein, 559 aa, unidentified
  source 1..559: note = uncultivated organism
MQKQRCYMYTRVSTAMQVEGFSLDAQKEKLRKYAEFQDLFISGEYTDEGKSGKNIDGRPEFQRMLEDIESGKDNVSYVLVYKLSRFGRNAADSLNALQRMEDYGVNLICVEEGIDSSKDSGKLMISVLSAVAEIERENILVQTMEGRKQKAREGKWNGGFAPYGYRLENGELKIAEDEAEMIRLIYDKFIHTNMGAATIARYMSQHGYVKKKRQNGTLDTFSAHFIKLVLDNPIYCGKLAYGRRKSEKIPGTRNKYHIVKQSEYPVYEGAHEAIISEEDWLLAQAKRKKTGVKNEKIYSLNHQHILSGIVCCPECGAPLYGSVNRKRKKDGTFYKDYWYYACKHRLEYDGHKCTFKKQIHQDKLNAAVEEIIKRIVKNSQFDSAIKVKLDKSIDIDSLEVEAGMIRKHIRQLTVAKEKLGAQMDRLDYSDRHYEDKMTDMQRRLDSLYDDIAEANASLEEITLRITNIKEQRMTGQKVYDFLDLFDIMYDKFTDAEKKEFLQSFVKKVEIYPEPMENGQILKSIQFRFPVFFQGNEADTFFPNSKTTAETVVLMSREKE

SEQ ID NO: 119 - protein, 559 aa, unidentified
  source 1..559: note = uncultivated organism
MKPAVRRCAIYTRKSSEEGLEQDFNSLHAQREACEAFIKSQKSEGWRLIETGYDDGGLSGGSMDRPALQRLLADIANRQVDTVVVYKVDRLTRSLADFAKMVELFDRHEVSFVAVTQQFNTTTSMGRLTLNILLSFAQFEREVTGERIRDKIAASKRRGMWMGGNLPLGYDAQDRKLVINAREAKTVRLIYELYRELGSVRRLKEELDSRGIRSKPRVAGEGNRSGGQPFSRGALYTLLGNPVYVGEIRHKSLSYPGQHEPILDRALWDSVQQRLRTQAPERRVGQGRAQSSFLKGKLFDESGGRLTPSHAVKDGRRYRYYVSQPLITGTASAAPKGWRLPALEIERIVVEEVGRALGDRNAIAGALTEAGLPAAHIPAALEAGRALLERMSADAQPGETLTPVIHRVELRETSVCLTLCLAPLLSKEVKSSHPAPAPSLGRELPIRLRRRGVEMRLVIHSSGSSPSRPDPVLLKAVSRAFRWFEALATGQAASVAELAARDGVNERYIRSLMHLAFIAPEAVKTIAQGSQPAELTTKALLTRIDLPFDWQAQMRALGI

SEQ ID NO: 120 - protein, 509 aa, unidentified
  source 1..509: note = uncultivated organism
MAAAFGTPDGKHVGIWIRVSTEDQARGESPEHHEARARMYADSRGWTVVEVYNLAGVSGKSVMDHPETKRMLRDLRDGRITALIFSKLARLARNTRELLDFADIFKAGGADLVSLQEAIDTSTPAGRLFYTMLAAMATWEREEIGSRVAASVSVRAKLGKKLGGAAPFGYRYEGNELLPDPKEAPVVRRIYELFAEHGRIRTVAGLLNDAGHRMRKGAKFGYTTVNRLLTDSTPAGRHRVNYARSLGDKKRWVTKPESEWMFHPVPPIVSDDLWNRVNAMLTERRANRKAPAKKAKQLFAGVVYCDCGGKMYVPANTPKYVCFSCKKSPKNKIPVNDLENVFHSQLRDFFFSPEQIAEHLQSADTTLKEKTELLASIEAEQAKLTTEAEKLYQLYLADELSKDSFGKRHRPIEERLKQLGDEIPRLQGEIDFLKITYLSSSEIVSEAQGLYSRWPSLPFEEKRRVIENITEKIVVGDGDISLELCYLPSSAELLSKEHRNLRGSRRRRG

SEQ ID NO: 121 - protein, 531 aa, unidentified
  source 1..531: note = uncultivated organism
MRFCIYSRKSVSTGRGESVENQVELCRRYILEHYPGAREEDMAVYEDEGFSGKNLERPEFRRLMRDLEAGRGACLVCYRLDRVSRNVGDFARLIETLNARGVDFVCIREQFDTATPMGKAMLYIASVFAQLERETIAQRVRDNMLLLARTGRWLGGTPPTGYAAEQVQEVILEGKRRTACRLRTNPEESAAVDAVFGAFLELGSLNGVHKYLHRRGIVSRTGRDFSLPGLREILRNPVYCIAGEEAHTYFSARGADVCFTPEQCGGGRGLLAYNKRDYTRGRSPRNPVDKWIVALGQHRGRVAGADWVKVQGLLDRTSGPEGARNGYALLSGLLRCGVCGGPMLAKRRQGGRGFDYICQTKLHFGRTACAGPNLGGAAADALVWNALLPWVRPRPEAVRAGLVRALAAEGAPEREGRRAEIRRELERLAAALGRGGAGGAFIRAVEERAAALERELRELEAEEGGLSPEEMEGLLNLDGAAERLTLGERRELVRLLVAGCRWEGGRLYLERCHLESNVAPALEGDSRPSSP

SEQ ID NO: 122 - protein, 520 aa, unidentified
  source 1..520: note = uncultivated organism
MKAVIYARYSSSAQREASIEQQVEVCENYARNNDYQVVKVYSDKAKTGRTDDRPGLKKLLSDCSKNIFDVVLIYAMDRFSRDTRLALENLYKIEIKNNKKVISVTQPLDDSPWGRFYRVVQMADAQKYSEELAEKVKRGMKYNADKCLYNGGSVPLGFKIVDKRYEINPDTAPIVKMIFEWYADGVTVADIAKKLNAQGAKTSFGRPFNKNSLHTLLKNKKYLGYYTFDGLEIPDAIPQIISDELFDKVAKRMATNKQAPARAKAKVEYILTTKLFCGHCKGMMTGFSATGHLKKTYRYYVCNKTKEVPKICNKKAVHKEYIEDLVIERCRKLLTTKNIQRITKELVATAEREKDTINLKALRKALKDNERKHENAINAIMESDIESVRKALGTKIPVLEAEHEEIKKQIEAEERLFASISESDILFFLTSLKKGNINDIKYRKLLVNVFVNKIYLYDDKVTITFNSGDEPVTITDKLLSELDEHSKPSKGLSSKKDGPPNEYWTNTYFFCGGFAVRVSI

SEQ ID NO: 123 - protein, 538 aa, unidentified
  source 1..538: note = uncultivated organism
MIVKQQSYNAAGYCRLSSEDDLSGESSSIATQRELITQYCKEHGVNLFDCYVDDGFSGTNFQRPNFERMLGDIDSGRVNLVITKDLSRFGRDYIQSGYYIERVFARKNVRYVAVDDGIDTLQNSNDILMPIKNVLNDMYARDISRKTRAAFNAKAKSGQFIASRAPFGYRKSPEDKHKLIVDEPAAEVVRKIFDLAVQGYGYNRIAKALRAENILNPQAWFNQKNPDFYQSDYWKQPFDWHTTSVRALLNNMAYLGHIVFGKERITTINAKNGTKMPEDEWIIVRDTHEAIISQEQWDAAHEMLRSRKRESSNGEVQMFAGLLYCPDCGSALSYHGRKANNGEYSCLKYKTHGKAHCSSHYIRYDALYQIVLTEIRRQARQAAHCEAQFRKRLQEIDGEKSKAQMAKARRQLEANEARAGNLDRIMSSLYEDKALGRLTQERFDSMTGKYEAEQKALLEQVNALREGIARAEEQRDNTARFVEYIRQYTDLQALNAPILNQLIQRIEVYDAEKEPGTGKQAEGLHPIQIVGIFGVITI

SEQ ID NO: 124 - protein, 550 aa, unidentified
  source 1..550: note = uncultivated organism
MEFFYCYGYGRLSREDYQRTGVRDESNSIKNQRDLIHKFVSDRPELQLVMEGYDDGYTGTNFDRPHFQEMIEAIKAKKINCVIVKDLSRFGRESIEGGRYMEKMFPAMGVRLISIVENIDTLHTDAATSFIIPVKNLINDTYCRDTSIKVRSHFDVKRRNGEFIGSWAAYGYRKDPENKNHLVVDEEAAGHVRDIFAWRIAGQSCQSIADRLNSLGVLSPMEYKRACGIKYGSGYQVHAKPLWSAVAVRRILQNAVYLGIMEQGKRTTPNYKVKTVIHRPPEEWMRVEGTHEAIISRTDYELVQRLMLTDTRCAPGESTVYPLAGLLCCGDCLSTMARRTSRGEGKNAKRYIYYACIANRDNKDVCSSHSISEAKLEAAVLAGINVHVASVMQVREALAAIARRPLQKITAERLDRRLNTLRAELAKSMEVRDSLYRRYALGELSTEDFEAFKRIFTADCEQAERAIETQQRELEQMLSCSDPDSPWITHFQQYGNFQTLDRTTAVRLIDRILVYEGGRIEIVFRYQDEYLAAMKYLALHQESDSFREAV

SEQ ID NO: 125 - protein, 543 aa, unidentified
  source 1..543: note = uncultivated organism
MPAHSPMRVAVYARVSTVRQAEADLSIPDQLRQAAAWCAQNGHTIVREYVEPGASGTDENRPVFQEMLADAKTKPRPFDFVLVHSFSRFSRDNFIHTTATRTLKKAGITLHSLSQPLTDDSTGDLARDILANFDAYQSRENGKHTSRAMKENARQGFWNGSVPPFGYQTAEAERRGDKVKKKLAILDEEAAIVRPIHAMYLGMEGRQLGTKAILAQLNSEGVRFRGKLFSNSCMHRILTNETYTGTHHFNVREAKTGRMRPRSEWVAMQVPAIIERHLFERVQAMLADSNPRKTPPRVVSGPILLTGLAVCASCGAGMTLRTGKSGRYRYYTCARRALKGTEQCDGCAVPMDQLDSVVIEALAERVFAPDRLTDLLEAHLDRSRTAEQERRQHLGRLKRDLTETKASIDRLLELVEKGRMDMDDPVFAERLDRHKTNRIRLIDEITLAEATQPSGYRPLTSARLDRLSDAMRKGLREGPIELRRAYIRMVVSRIVVSHREVRISGPRAALAKAASDDVHPGISVPSFARAWRPRRDSNPRPQD

SEQ ID NO: 126 - protein, 569 aa, unidentified
  source 1..569: note = uncultivated organism
MIRKRCAIYTRKSTEEGLDQTFNSLDAQREACEAFIISQRHEGWQLVRKAYDDGGFSGGSMERPALRALMQDVCSGLVDVIVVYKIDRLTRSLADFAKMVEVFDAKEVSFVSVTQQFNTTTSMGRLTLNVLLSFAQYEREVTAERIRDKIAASRKKGIWMGGPPPVGYDVRDKKLVVNEAEAKTVRRLFEAYEELGSTRALTAWAKANGITTKVRLGPDGAIRGGGRPFSRGNLHALLSYRTYIGEVTHNGNTYPGQQEPIVPRVLWDRVQARLSDRKAGCGTVATAGETSLLTGLLYDDTGDRLTPSHASKKGRRYRYYISSRLAERGTGDPTGWRLPALQIEGAVLAALEAWLKSPQELLAMIGNHNLAAPNLNQSLSAAGQLADSIRHSPPPKGHSPIGTIVSRITIASQSLTVTIRRGKLLQAIGITEAQASDLDETGDEHELSVPFSLRRRGVEARLIVGDGRHNNSFNPVLVTTIAKAYGWFRQLASGNAISINHIAQQQNVPASEISRLLPLAFFAPDIVEAILAGRQPTELTAKHLTRMDLLPLDWVTQRKVLGFPAVPHL

SEQ ID NO: 127 - protein, 620 aa, unidentified
  source 1..620: note = uncultivated organism
MVSNTETSKNQKIAGIYIRVSTEDQAREGFSLGEQQEKLEQLCKYKDYKIYKVYKDAGISAKDMQHRPSFQKMLQDMREGKINYIVAYKLDRVTRSVRDLEVLISELEKHHCFLVCDRDDVNTSTANGRFFVRMLTVLSQLEIEIVSERTKFGMTGAIKAGHIAGPCPIGYYRDKDKVCRIDNSTKDIVLRIFNLYLQGKSYWQIAQIFNNEKVLYPEKKKWTDTMISRIINNRIYIGDFERYKYREDLETEVYENVVEPIITREMWEEVQKQKERNKATYCRDRVYIFFQKLKCPTCGNILTCKGSGGEKKKYMYYNCQHCRVYYREDLIEDSLIEYILDLVEYDYNVRKYFYPLISENKTDKSKSILEEINKFKAQKDRLIKAYKEGIIEMEDIKEDIKLIDDKLAILDNKKLDTSLINEESFNPGHILAKRDIERMELINANMYKDVILKIWTMKTKEEKQEFISKFIDTATLIKNKDGSYEIEKIEFRSTFTEQMDKLHEKGVIDIPTEIERDGKIEDINQTINLNTKQLNDYLGELKKELNIDYLDLGEYHFIDNKVDLNYNNKSQITTIKGRTIEFKLKKNQNVVRMLAVKEMKNYLAKPEKKLRLGLVTYNTK

SEQ ID NO: 128 - protein, 503 aa, unidentified
  source 1..503: note = uncultivated organism
MSTRINAIYGRQSIDRPDSISIESQVEFCVAELHGEPYQTYLDKGYSGKNTDRPAFQEMMADIKNGKIQKVIVYKLDRISRSILDFSTMMGQFQNYHVEFVSSTEKFDTSTPMGRAMLNICIVFAQLERETIQKRITDAYYSRSQRGFRMGGKAPYGFHYESTKIGGVNTKMLVANQDEISNVQRMYEMYAKPQTSYGDIVRYFEEHRIQIFGKSLHRSTLSKMLSNPVYVRADLDIYRFFKSQGTEIVNDVMDFTGTNGCYLYKARDVETYKYQDFEGRMLVLAPHAGVISSDLWLTCRKKQRNNDSIQTARKATHTWTAGKIKCGNCGFALMSVTNPSGVDFLRCTKRLDNKSCPGCGKIRTADLESAVLQSMKEQLAKRRVHGRHRNPAHLTPEITKMQLELVQIENEIQKLIDSLTGANSLLISYANNKITELDEKKRTLQQKLADLTATSISPEQYELLVVSLANWDTIDFDDKRNVVDMMIRTISATHDTLNIDWKF

SEQ ID NO: 129 - protein, 537 aa, unidentified
  source 1..537: note = uncultivated organism
MSKRVAVYARVSTTRQAENDISIPDQLVHARRYCAERGWHVVREFVDPGASARDDKRPEFQQMMDSACIDPSPFDVVLVHSQSRFFRDTAGYVLSKRRLQKHAVSLVSMTQDFGEGAAADFAETVIAASDALNSAETAKHVTRTMLENARQGFWNGALPPFGYRTVEAERRGQRIKKHLQIEPREAELVRQIFRLFLEGDGMRGPMGVKDIVSWLNARGFRNSRSNPFYTGTVHLILTRESYTGTHHYNCTDSRTRRARPKEEWVAISIPQIIPVEQFQLVQQRLHSRRPRVTPPRITNSPVLLTGIARCQSCGGALMLRTGKNPKYRYYTCANRRLKGRTACADPITVAMAEFDRLVIGALTDQLLNPERLPVLLREAHKHRRALTSGNLHRRSALRRQLKETDAQIRRLYTALAEGIAGDTALFREALHGLEAKRDESIRLLSLLDVETPPVRHALSKAQAQAVAATLKRRLIEAPPPMQRRYIHGLVSEIVVDREKAVISGPRAAIAAAITAGTHNSEVRSFVREWRTRQDSNL

SEQ ID NO: 130 - protein, 547 aa, unidentified
  source 1..547: note = uncultivated organism
MRIATYTRISTDEVNQPYSLGAQSERLAAYVTSQEDWELVGTFTDQMSGAKLDRPGLTSALRAAKAGRFDLLLVHRVDRLARSVRGLAEVLETLDAAGVGFRSATEPFDTTSPAGRMMVQMLGVFAEFERATIIDRVIAGMERKSAQGGWCGGHEPFGYRAVKGEGRLDVDEAEAPLIPVIFDLYANKRLGAHAIANWLSAAGLSTRAGKPWSFKAVLTVLRNRTYLGQVHFRGTWSEASHPPLVEEGLFDAVGAILSERGEDVSKRASNSSDYLLTGLVVCGGCGRHFTGTRATGRNSTYRYYTCGGRQRYGSKTCGADRLPADALDDAVVRSLLAAYEDTDLFTAAVAEAQGRAHLGRARHQGAQAAIDAELAKVEAGIDRYLRAFETGAMPETICGERVKELGNRATALRTHRQDLADQMDEADLTAPTPEDLRVLRERVTEAVAAGGPAAVKVLLQALIQEIRVDSRDAIHPIFRVPMGGDHHENGAVRAPSQSVEVKGLEPSASTLRMCGSQCFDQVLSEDLPGSGVAIPSGSLTIPPLPSR

SEQ ID NO: 131 - protein, 518 aa, unidentified
  source 1..518: note = uncultivated organism
MTTAAVYCRVSTDSQEAEGTSLQTQLEACRNYCHDRGYEVAYRFSEAYSGLTLERPKLNELRELVRNEQVDIVVVYYLDRLSRDPTHGVILTQELEKHGVKLEAVTETVDSTELGKLITYIRGFASKLEAEKIKERTGRGKRARAKEGKVTGGFHNTYGYDYIQVAQKNGGRRIINESESRWVKQIYQWLINDGLTSGTIRDKLIAANAPTKHGKRWCKATVIAILKNPCYAGRTYAFTCIRGKPRSKPQADWIELSSDITPAIITPELFEAAQKQLQANRDKAMRNTRREYLLRGHIRCRQCNHAYVGDITRSGKVDGSYKRLYRCLGRWKDYAPTERCHNKAWGADKLEALVWQQIEGVLANPEIIATELEKQRQDADQLGVFETELQQVERQLKSLDREQEQLLQWALKGFPESQVIAENKRLNTRRESLKAQEAELEAQIKASQEAVISIPKLERFVELLRQRLTTLGFETKRMAIESLDLKVWLDGDSVEITGIIPTEADVIVTTQTRGLTPP

SEQ ID NO: 132 - protein, 535 aa, unidentified
  source 1..535: note = uncultivated organism
MEPQTNIKQVRCAIYTRKSTTDGADRDFTSLDAQRESAESYIQSQKSLGWVILPEKYDDYGFTGANMDRPALKRLIDDINEGKLDCVIVYKVDRLSRSLLDFTKLLELFDSKGITFVSVTQHFNTNNSMGRLTLNILLSFAQFEREIISERTKDKMTAAKKKGKFIGGRPPLGYDLDKPNHKLVVNPEEAKIICELFTLYVKQRSLLRVAVTANEKGYRTKKCLRKGQPAGERQFSQSNLQLIFRNVAYIGKIKYNDELFPAQHNPIVSEELFNSVQQILTENREKRPVKAGRDSYIGLLSKIFHCASCKTAMIRSYTIKRHKFKYTFYVCSNAIKRGYKNCPVKTVNAKRTENTVVNYLRDLVDNPNLKPNVWDEMAFAEQKRIIKGLIKSVEYDGKNKKLFITLLPDNTRHEFSVDLKVNPLQKHMTKEELIAQETSIRRQLLLAHHMKQLLDSGKAKNLQGIAAWLNISQPRTHQIFSLLFLSPWIQETILLSDDPNLFAIPEYKVIEIAQETIWETQSALWQNLLQTHLQS

SEQ ID NO: 133 - protein, 539 aa, unidentified
  source 1..539: note = uncultivated organism
MSIIAALYARVSTTAQEEEATIDSQVAAIEGYMNQKGYELPAEFYFLDKAVSGARLERPALDRLRHLATERVLTVVVCYSPDRLARNYPHQWVVMDELQRQGVRVEFVNQPDFGDNPQAHLLLGVQGLFAEYERAMIKERLRLGRLYKIKTGQMMHNTPPYGYRYVFVSEAGGGQWVIDEQEAEIVRLIFDWYTGLEHWPIARILDKLNQGFTHVLRRSVRWEFSSVHGILTQTAYIGQAYYNRKRILPETLGTPRQTGRGKRKAAQFELRPEEEWIELKVPPLVEFNVWQRAQEQLKMNQKFSQRNNKSNFYLLRGLVVCGECGYTMQGRTQNGRVYYSCRSNQKHPDLPKHSCNVAGKVLEPIVWEAITGLLQNPEQIAAAWEAETEEYDTMPDELGRLQARQRKLEKQWVRLLDAFQDSLIDKDELGQRKENLDKERHNIAARIKQMQRQQEKRSDKAEIMAHFADFCAVAQKSTENATREVKQEVLRLLVESIVLEDETVTIKHIIPTDEKCRLLSSDVARIYPDKALMPQLAPV

SEQ ID NO: 134 - protein, 539 aa, unidentified
  source 1..539: note = uncultivated organism
MEINNTAAVEEQKKTVAVAIYTRKSGDENLVGVVTSIDAQKAACRNYIQIQKEKGWQEYQEAFDDPAFSGKDLERPAMRRLLRAVEERRVQAVIVYKLDRLTRNGRDFQDLLELFEKHNVGFVSATESLDTKSPQGRLMVSIMAQFAQYDRELDQERAKDFHLARARKGLWCGGLAPLGYDSKDKKFTVNEEGAKLVRRVFDLYLKFRSPSRVAEELSRLDFRRQTYKTKKGKLFGGQPFDEDSVSRILQQKIYVGKIVNNRTGLEFSSQYPAIIELEVFDKVQTLMEEHARHERAEYCTNKHGFLLKGLPRCGKCGSALVGYVRPKKNKVYRYYRCMANVDGTPVSCDFKSITADQLEVMVLRKLEETGLDRGLLERAVREAERHSGAKIAELEAERKDFDANLRRVRQELGTFRPFAETCGDIESIQKELVRMEAAEKELASCVAKLDTQVAGLKTAGYSLDSAQKAFRKLTLRMKGLPVHRQVGIVRTLVKRLKVWKDRVELDLNELSEADLKQCLVQIWNPAGQYMETILPLVGK

SEQ ID NO: 135 - protein, 539 aa, unidentified
  source 1..539: note = uncultivated organism
MEKEKIYQAAMYVRLSREDEDVASAKKTESESIQNQKRLIRDFVSQHSDIEIAGEYEDDGYTGSDFNRPGFQAMLEDIRKGIIDCVIVKDLSRFGREYIDSGRYIERLFPSLGIRFIAITDHIDRRKGGDDDIVIPFKNLMNDAYCRDISIKIRSNLEAKRRDGKCVSAFVPYGYLKDKTDRNKLIIDPYAGSVVRDIFRMKLSGMSQKAIAEYLDAHGILSPLEYKHSIGINIQSNFKKYEKATWDSTSVRRILENEVYTGTLTQGRFARINHKIKKTVEKPQDEWIRIEDSHEPIISKREFEICQRLMRMDTRVPIGEDCVYPLAGVAVCGSCGAQMIKKEVPAGGKIYEYYLCGSYIGHTGCSPHRIPKKKLEDVTFELLKGHIESIIHLEEVLDFANKVPFKDLEVKRLSDRKEVLEKDVEKWRSLRDNLYEDMKEGIVTKEEYIELRASFSEKRNGAEAEIHRIDNEIADILDDKSDKFRWLKYFIDHKNLESLTRGAVIQLIDKVIVHDKKNVEVVFNFDDCYQELLAMMEEV

SEQ ID NO: 136 - protein, 684 aa, unidentified
  source 1..684: note = uncultivated organism
MSWGREGWPSQRLIMAVAIYCRVSTEEQRERQSILTQREFGDRYTALHSLHVFKSYSDDGISGTVPLEQRPEGAQILHDARVGRFDQLLVYRLDRLGRDTRLILNAVAELEKLGVRVRSMTEEFDTASATGRLMLTMLSGFATHEREVIRERSVAGTRRVAEAGSWLGGIVPYGYRKTGEKRHARIVASDELIPHLDMSEADVVRMIFHMAGVEKKSCRQIAEHLNALRIPCAYARDERLVLRNKRKERTRGIWMGPRVNRILASTTYYGVHAWGKRTASKRQPVARAVPAIVTEEISKKAQATIKSHLLFSVRGARHKFLLRGLIKCKLCGLTYIGMKADRKRGKGEFYYRCNGANTPRLLAAKCTAKNIRGDDLERQVWVDIESFLRNPGPVLAQLQAKMEAEVQDTGKVRERLKRLEAALEEKAAERNRVVALYRRGRLSDAGLDAQVDDIAKEEGALHAQIGELGSQLRGIDSVAKAVDSAEALLTKLRTRLDQPVSWELKRQLIEILVAGIQVETVETCGVKQARTTVTYRFGLASLPTSYVGGRVVRIPAEPKTIGDHIRRKRLAMKLRQKDLAKQLCVTASSVYNWEANQSVPELRFVPAIINFVGYNPLPVATTIADQLVRRRTELGMSQKEAAQQMGVDPSTLAQWERSEREPNGTLGKRIARFLAEPTRLRRAS

SEQ ID NO: 137 - protein, 537 aa, unidentified
  source 1..537: note = uncultivated organism
MKRVLCLYRVSTLKQVDNQDDIPMQRRECLNFIERMEDWEFIGERMEKGVSGYKVSANNRDVIVEIREMAEHKEFDVLLVFMFDRLGRKEDETPFLVKWFIDRGIEVWSTREGQQRLDNQVDRLMNYMRFWAASGESEKTSIRVKAAHTQMTQDGVWRGGNCPYGYKLVHKGRVGKKNRQLYDLEIDEKQASIVREIFELLIVKGLGTLKIANFLNEKYPDPKKIWSPRTIRSMICNPIYTGRMHMNNVLSEPIENLRIISDDELEFGTTAIAKRIPKKYFEQKEAKALGVAPNTTKVSVYGASLLSGLLYCGHCGKKLVGGYHVKHRVAHDYYRPIYRCYNGAVNAHECDGPRTYSGAKLDEAVMSVVYSYFSTIREESVKVWREKAQLEYRKNAQDKMNKAKMKLDRLQKNMDGLKRELLNFVSGVGAFDRETLSELINENKAEREKAETEYRESQKLFEQEEERINYLSRFIKEILDWSDRFDKLPTEEKRMILVHLIDRIDVFRDYHLTIRFHVSLEDFFGEEHPEEDKGQAS

SEQ ID NO: 138 - protein, 521 aa, unidentified
  source 1..521: note = uncultivated organism
MRFATYGRKSVYSDKSDSVDNQQRMCREFVDFKFPSAVDSFEHYQDEGFTGANTNRPGLKRLLADISDGLVDALVVYQLDRLSRDVRDFANIYGQLCEHNVMFISIKENIDTATPIGRAMMFVSMTFAQMERETIAARVTDNMIGLARKGLWTGGNPPYGYCRERIEVNGKKHCTIVPVPEAAEYVLGIYNEFLEGGYSLQGMETEFKRQGRRTVNGAFFSTTQLHKILTMPYCVPASPEVWDYYNSLGCQMADERDAWDGKCGVMVYGRSTEKNKKHQIQPRSEWVVAEGIHEPFVPVNTWLAVQDRFRQNIFQKKQKYDIPLLKGTLRCAKCGGLMQVARKKLAHGRICSSYYCLKRMRQGVDACDMSMIKCSALDNRLLSVFSEIEADPSVIRKYSKVETKQDDGSVLRDLERKAQVIRSRIVRLTESLAEGSAASKYIVAQIEAEDLSLAAVSREIEIVKTEARRSASAERTSAERSEDIARMMRSLSGLSVDEKNAIVREVVQECTWDGETLFLRL

SEQ ID NO: 139 - protein, 542 aa, unidentified
  source 1..542: note = uncultivated organism
MANRRIDPPPEPEKPKILSCAIYTRKSTDENLNTNFNSLDSQREYCQAFIKSREPEGWSVCLEEYSDPGFTGGNMDRPALKRLISDARQGKFHVVVCYKYDRLSRNTRDFLHILDTFEKNGVAFVSVTQPIDTTSSVGRLMRSILMDFAQFEREMISERTRDKMAAMARKGKWVGGHPIIGYEYDKKNKILLVNPDEAKLVREIFDTYIRTTSLLATAKWATDKGYTMKGWTTEKGQQRGGRTFNKANLSYLINNPVFTGKIAYKREIFKGEHPAIIPDDVFEQAHRILRANWKGKSHKHFEDRKHNYLLGGLVRCAFCNSTMTPTTSRPRKGERYFYYHCISVNKMDRTACDVRRVPAKALEGFVLKRLELLSKSKDVVETVIKGTIDDSDRVLPGKRDEKSRLSAELGRVEGDVRNLVNVLAQEGADSPRYRVIMDRLDESQAKKDAVRTRLFALDKEIMEYEGREVDAEIVRQNLEHFLRLFGQCSYDEQKELLKLLIRDVYYDGKNSRVKIALRPVSGAWGDVAHLEGLFDDSQKWGG

SEQ ID NO: 140 - protein, 522 aa, unidentified
  source 1..522: note = uncultivated organism
MQNFKQNEQINAVGYARYSTDHQTENSIEYQTAAIEKYCGENGIALLKIFKDEAFSGTNTDRPGFQSMLQAAKTGLFNAVVIYDISRGSRDVADWFEFRKHMTQLGIRVISTTQPLGDSTDPNNFLLELLNVGMGQHMVLDTRKKSIAGKTAAAKHGTFQGGTPPLGYDIVNQQYVINQREAQIVRKIFDMYANGHSYNDIIDALKGEKTKSGAAFGRNSFTSLLRNERYIGVYTWNKEVERIFRKWAGRRPNPNMVRIENAIPPIIDKETWDRVQARLKDHKGRARNKAKREYLLSGLIQCAECGTTYVGHTSTNTRGVSTRYYTCGRKYRTRDCKVKNINAEFIETFAINAVKNFIQTTDFTAAAEAVIEEYNKYKPDLSVERAELQQVKKELQNGVKSVLSGLDFPELRSEIDRLQARKDELDKIIAEKMSYTPAPLSVETIIETMTQSIHAMNNNDIKLLIKKHIQKINAYSDGSFSVIVSVYTNGSSSWARTSDIMINSHALCQLSYRGISGKIYHF

SEQ ID NO: 141 - protein, 562 aa, unidentified
  source 1..562: note = uncultivated organism
MNNDKFVAFYIRVSTDRQAQEGYSLDAQKEENLALAKRIFGPDVRWVIYADEGKSGKNTDKRPNLQRMMQDIKAGKIQAVITYKVSRLSRSLSDSLNLVEQIHRAKVRFISVKEGEYGTPHGNLQFNILAAVAQYQREDLAENVQSGMTQRAKEGYWNGGQVLGYQSVDKQLVVVPEEAEIVKLIFHKFVNEGWGTKRIANYLNSCGYKTKKGKPFSITSVTTILRNPIYKGYVRFNQVINWETDRRKGKNDNYIVAKGHHEPIVDEELWEKAQVIANSRATGIPRRYTGSFPLTGLVKCPQCGSFMTSLLGARNKDGKRKRYYVCGAYHNHGKAICKPNLIPADWLEEAVYERLEKTLQSEDILQEITNQLNALIYHNQQEHETEVEILENKLADLEARKKKIQEEFEKGSGLYTESEAYERMAEIRKSIEEIKNALASIQHSNRSVEPWQKKTVTVDQVRSQLSDFLELSHKLEPMEFRQLLQASIEKIEASKYHLKYVHFSFIVYMPEDPTDPQDPLLHIHDKPSILLRAIYFKHTHHLFVVRFPSVNPKSPIDLLQQY

SEQ ID NO: 142 - protein, 577 aa, unidentified
  source 1..577: note = uncultivated organism
MSDARTTRKRCAIYTRKSSEEGLEQSFNSLDAQRDACAAFIESQRHEGWHLIRTLYDDGGYSGGNLDRPALKQLLTDIRDRKIDVVVVYKVDRLTRSLSDFAKIVDTFDGHQVSFVSVTQAFNTTSSMGRLTLNVLLSFAQFEREVTGERIRDKIAASKKKGLWMGGAVPLGYRVRNRQLLVISAEADRVRHIFKRYLELGSVLMLKAELDHAAKKSHPRNRLARSKRGALLARGALYTILNNPIYVGRIRHKEQSYPGHHAPIIEQSLWEQVQRQLSTHRKNRRQRTTEGSLLTGVLFDEHGRCLTPTHTIKENRRYRYYASSPQRDDQLNSYASVRVPAHEIESLVARTINGFLSNPKAISSAVAKQSGIPSKPTDGLNAAIRMSARWKSQSVDQQRQIIKSVTARITIAVGLVTIGVRILRLEGLLGGTNSKIAADKLTETKSAVEPIHILTVAASLVRAHGATQLVVVPESHNDPEGRPNKVLIRAIVRAHRWYEELISGHISSISAIAKREQLPERYVGRILQYRFMAPDVIESILDGRQPPTLLLASLQKKLPQAWDAQRALVDFAKRHHE

SEQ ID NO: 143 - protein, 512 aa, unidentified
  source 1..512: note = uncultivated organism
MAKQVQVIRATKNLDEADIIRVAAYCRVSTDSKDQINSFLAQVQYYNDYIRGNDKMRLVDIYADEGITGTEMKKRDEFLRMIKDAKTGKIDRVLVKSVLRFARNSLDCIETIRTLKENGVSVYFENDNLDTDKMNSEMMLYIKSAFSQSESLNHSRRMATSVRMRMENGTYLGGSVPYGYRLYEGKIEIVPEEAERVRTVFKMYLSGIGRYAIAKYMRETESSDMIWSIGRITYMLENERYKGDYLMHKFFTPNQLPLRRRRNKGEEEKYYWENAHEPIISKEDFENVQKIKREKSSRFSGESETKAFFSQKIRCRKCGWSFHKLKGSDQECWVCSRKGLSVEICRSPKLSRGDLESAFVRMFNSLQENKKKVVDDTISLLQSLKVKCNMGNSDIAEIDAELATLATQNKAYADMFSMGILDQVTYLEKADRTKRKIAELRSRRLKVLNADEEERCIEGLRELKRKLELLPNSISKFEEVLFTEIVDVMFVEQDGAIVFKVKGDLELKVRRY

SEQ ID NO: 144 - protein, 536 aa, unidentified
  source 1..536: note = uncultivated organism
MQAKLVTKIDANPLLSKQNKQNAILRVAAYCRVSTDSEDQLESYKAQVAHYTDAISKNPRWRFVEIYADEGITGTLAKKRPNFMRMIRDCKRGKIDLILTKSVARFARNTVDSLNYVRQLKALGVGVFFEEQNLDSMKTDSEMFIGLHSVLAQAESENISANVRWGIQQRMRSGTFAFRYNILGYRKGQDGAPEIVPEEAECIRSIYTMYLNGNSLDQIKVSLERRGVMTKQGKNEWSKAQIKNILTNERYCGDMLLQKTYTENCITKKVKKNRGEMAKYLITDNHPAIIERQVFKAVQVEMARRNSRQRTSDKTASVLGKHSGKYALTDLLVCGECGRPYRRKTWSRGGKKKYVWRCLSRIEHGTQFCKHSPSVEEDRLHRAICRGMDRIIEDRRDVMEMLLADVSYGVTGDDGAMELYAIEEQIKTLEKELDDTIRLSQESGGNSKRFAEMVGEIGKRLAILREQLAFTMDKLLSNESHKFELERVRGIVLRQEVAFHEYDDTTVRLLVEYIKVMPEGKIVIVFKGGGEVEEVL

SEQ ID NO: 145 - protein, 540 aa, unidentified
  source 1..540: note = uncultivated organism
MKFFIYSRKSVYTGKGESIENQIEMCKQYISAKFPDDINKDITVYEDEGFSAKNTDRPQFKQMLSDIKLKKPNYVVCYRLDRISRNVSDFSSLIEELNDRSISFICIKEEFDTSKPMGKAMMYIASVFAQLERETIAERVRDNMLMLARTGRWLGGTTPTGYTSEKTQEIILDGKIKTSCQLKDIPEELLIVDMMFEKYLELKSVSGVSKYLIKNNIKSRSGKYYSLLGIKEILQNPVYCIADKDSMNYFIENNSDVCFEEKDCKNNYGLLSYNKRDYKKKHAPRLTKDKWIIAIGKHKGRIPGKQWVAVQNIIESNIPTGKKPAKMHNDYSLLSGMIYCHKCGNRMFAKNRTGRGANKETFDYICSNKLRGNVQLCDCQNINGLLADDLVCEYLMSYTNVNSEIYKILDKRKNKMKENSNNPITALEEKIKKLNTEMDNLINTLSANNLGEVFIQRINLRITELDKEINELSNKKKYLEKDLNILNNQELQYDIIINLLSSFKNNFKSLSIYDKRTLIKILVQKIVWDGQDLHIFIYGG

SEQ ID NO: 146 - protein, 546 aa, unidentified
  source 1..546: note = uncultivated organism
MKVAVYVRVSTEDQAREGYSLEVQREYLLNYAKHNGFEVHDIYQDDGIKGCSSGYTLDRPAFRKMMFEAKLKMFDLVIVYKIDRFSRKLKDMLNVIDELESLSIAFKSATEPFDTTTSAGKLMCQQLGSFAEFERNRIIERVFPGMIKGVLKGNWQGASQPPYGYHYNKEKKLLETVPEEAKIVKLIYTMYLCKKSSIQIGRYLFQNGYRSRCGNPFTGHHILCILKNPVYTGKILWNVRHYYRTPKGWRYTLNPPEKRIIGQGRHEVLIVSEDFEKVQRMLKENRKNFPHRVNPSTYALTGVLVCAKCGLGYTGSSYMTNHRTKQRKPWYCCSARYKFRDKCSNPAVRAEILEAQVLDIIERLTDKEGNLAKRIDNVIKAQIEPDGVIQQQIDLVKKELEKLSIKQSKLTEVYLDNEISIDIYKNKNAVLKEEEQKLKRQLNLLGIKLIEKERSQQYLLSLQEVLSNFKETKRSLDPQDRKDLVRLIFRWIKVDNFKVVDYELYEPFKSYLKEKEKGRDKCHLEEIQVVPRKRSQSCISELLVAK

SEQ ID NO: 147 - protein, 535 aa, unidentified
  source 1..535: note = uncultivated organism
MEIKKDSEKKTLRCAIYTRVSTNDNLEKDFTSLDSQRESAESYIASQKSEGWVAVDNKYDDAGFTGANTERPALQKLISDIKMGNVDCVVVYKVDRLSRSLLDFTQLLEFFEENKVAFVSVTQHFNTNTSMGRLTLNILLSFAQFEREIISERTRDKMGAAKKKGKWIGGIVPLGYDLDRENHRLIINPEEAELVKTIFDRYLKAKSVLKVAQFLNDSGYVTKRRSSIKGNTRGGIPFTGNSIALIIKNVTYTGKVHYQGQVYPGEQRAVIDDDTYNKAQEVISLNTPKQVPRRSNRKDALLNGIMRCKACDSAMYLACCVKAGKLRYNYYVCSKAQKRGRKYCPTRTVNAGLLELKVIELLRSITKDEQFSKEQWETKTMEQKIPLIHSFVRTISYDARSSRLEITLANGRMRSFDVPVSMLKTINIPPKEQTIKREPQLRQNLILAHQAQQILDEGKAKSLKELSGWLNLSQQRLNQVVNMILLCPKIQEEILLGNHKVISAIPEYKLRPITEEISWEKQSSLWQSLINSLSK

SEQ ID NO: 148 - protein, 536 aa, unidentified
  source 1..536: note = uncultivated organism
MSVDQADRRQNEGGESVLCAIYCRLSKEDEDKQQPESESIQNQKSMLVKYAVERGWDIYNLYCDEDFSGADAHRPDFSRMLRDAEAGRFQIILCKSQSRFTRDMELVEKYIHGRFPQWGIRFVALADHVDTDVKGSKKARQINGLINEWYLEDLSENIRMVFDFKRRQGQYIGGFPLYGYRKDPADKNKLVVDETAAPVVRQIYRWSLEGCGAQRIAALLNRRGIDNPTRHKQKLGMNYVNGSGAGGGCWNKTAVSRILHNEMYAGVMVQGRKKKVSYKSKRTADVPEEQWYRVPGTHEAIIDPETFRQVQELLRPRRKADGRGEVHVLAGLVKCAECGSTMARTSNGQPGEKRVSYLRCSRSAAGGGRALCSRHSIRLDDLVELVSERLRTYLAGCWEPGDLQRFSPREQAADRVTALQKDLRTLEGQIEARAAALKTLYLDRVSGLLGEEEFCSMNREFQKERAHMIRHREELRREVERVNGAEDGGGAAERVRELLRLDPVPRELFVLAVEKVEVGEKDPETGRQEVRIHWKF

SEQ ID NO: 149 - protein, 531 aa, unidentified
  source 1..531: note = uncultivated organism
MLPQAGPALRAIIYARQSKESEDGIDRQLEKCMRLLADRGWELVHAPFCDNDVSATKRKKRRQYDLAMAMVNAKKTDILVVAHMDRLYRRAAELETIIPIVEATGVLVVSTDGAYDLSTANGRMVARMLCAASQGEVETKARRNKDANIQSAASGRRNKSGCRPFGYCADRFSPMDPGVSLALVHGNASHPSPAMDGPGWPSTEPWRQATVRVPETVYDADGRVVATQSEADAIRDALSSVLRGGSLTGIERKWHALGFRPPLAPFGPLPEGNPWNGHTVRRILRNPAIAGWREYRGEIVAAGNWPALVGVSDWEAAQVILRDPARRKTHGGGTLSLLGGIAECRCGFAVKRARRRGYPTYRCGSYDEGPAAVTGKTGPHFAGRSDVIDTYVSDVLIETLGMPDAAVTFAGDTGEIDIPALRERLIVLDKALAKLSMQNSMDLITDAVFAVNAAEIGAERERITAQIAEAGQVNAAAVLVASPDVRATWEAMDISEQRAVVRSVARITLKPPGCGCRKPDLDQLVRISWRA

SEQ ID NO: 150 - protein, 504 aa, unidentified
  source 1..504: note = uncultivated organism
MTRVCLYTRISTDEENQPTSLASQHERLEAFCKVQEDWRIVARHDDRSTGTKLDRPGLQAALDLARQGRIDQLLVYRIDRLSRKVRQLAQLAEELDACGVVLRSATEPFDTGSPAGRMMLQMLGVFAEFEHATIVDRITAGIERRAKEGRWYSGRPPFGYNLKDGRLAPDPITAPVVRRIYRLYVQDRLGTIAIAQQLRAEHAPAPSAGWGHPAVHRVLTNPTYLGRIRWRNQDFASEHEPLIAPDTFQQAQTILTERGEDASRRRGNSSDFLLSGVIRCGHCGRAYIGMSARGKGGTYHYYACTARQKYGPKACQGERVSREKLETAVLRQLTGIYRDSPLIHDALAAAQEQAQRERPALDEQRRAITAEITRVERSTERYFEAFEQGRLSPERCEQRVSRLNTRLDDLRAQQDELADDGVDEAAHAPTAADLAATASQLESVIADGEPEQAKALLRILIAELRVNGKTDIQPTYRIITPDRAITAGVCATSEKVATTGIEPV

SEQ ID NO: 151 - protein, 526 aa, unidentified
  source 1..526: note = uncultivated organism
MTTASGNGKAPRVVRCAIYTRKSTSEGLDMDFNTLDAQREASEHYIQSQAAQGWTALPAHYDDGGFTGGNLERPALQRLLDDIERGEVDIVVVYKVDRLSRSLLDFARLMEKFEKKSIGFVSITQHFDTSSSMGRLVLNVLLSFAQFERELISERTRDKIAAARRRGKWTGGPPVLGYRIDTDRRALAVVPEEAEIVRLAFELYLKTRSIGAVAARLNALGHTQKRHTTQGGKVVGGKPWDKDAVHRLIRNPLYVGKVKQKDELYAGEQPPLVGTEVFERVQKSLADRSTGRGVRRTRRPEYLLTGLLRCQPCDAAMTSSVGRGRNGKGYRYYRCCKEAKEGTRCPTGLLVADEVETAVVAQVRAAAKKGDLQRQVLAELSEDDGSRAEAQAQRERLTARLAELNAEAHRLLAAFSNEGAGSKLLVERLGELEADMDRVRLDLGEVEARLRTAEGAHHEIERVAEFLDGFDDLWDALVPAERRDYLHLLIRGVSVDSATRQLHVQLFDLDGCSPTSADGLAAQATP

SEQ ID NO: 152 - protein, 540 aa, unidentified
  source 1..540: note = uncultivated organism
MPKFQATAYLRLSYTENRENESDSIANQKKLIADYLKGHPDIELVSEKVDDGYSGILFDRPAFQEMMQDIMEGKVNCVIVKDLSRLGREYIETGRYLRRIFPAYGVRFIAVNDSIDTAHEHAGDDLNISMKNIINDAYCHDISVKTRSALAVKRKNGDYVGACPVYGYRKSEKNRNQLVVDEYAARVVRDIFRAKIDGRSAKRIADELNALGVLSPLAYKVNRGLPHPKGGFADRPDPKWSAVTVIRILQDEIYTGTLAQGRQGTYNHKIKNVIQKPPEEWVRVENAHEPIIRKADFDLVQHIMGLDTRTSPNGEKVYLFSGLLVCGCCGGPMTRKITTSGGKKYIYYHCPTGKKHGCTHPVRLREDDLIQCVLASVQAHVKNVVSVDELLNSISEESINRELVTGCKAQIAENKAQLEQIGVFKASLYENFINGLLDKAEYKTLRDGYAQRMEELRSAIERLRQEMESVTDRTSERQKWIRQFQEFSNMTELDRRTVVTLIQSIRVISKTELKITFRYQMEYDAALQKLSQARLEQEAI

SEQ ID NO: 153 - protein, 526 aa, unidentified
  source 1..526: note = uncultivated organism
MKITEITAEKKENKIQRLAAYCRVSSDSADQLHSFAAQLRYYSNYEKQHPEFELVGIYADEGLSGTSMKKRAEMNRLIQDCEQGKIDRVIVKSISRFARNTHDLLQTLRLLKSYGVTVFFEEQGIDTSQLNSEMFLTFPGMIAQQESESISGNMRWSYKKRMESGEFNCCTPAYGFDLENGKLVINDAEAKIVKRIYDMYLRGVGKQRIADTLNEESVPKKYGEKKWHHSMISYILSNERYIGDALLQKNYTTDTVPFRKRLNKGQKPQYYVENANPAIISKETFEAAQQFSKKRMSSRNQNVNHALTQMLFCPKCGKAYRQIKNSGKLYWIMSVVEKSNCSCQYYRLKEWGIFEAFSLLTFKLKENRETIIGRLTTRLEQLQLRSGECGDRIGEIDKQIAQLSAQNHVLAKLKNNGILGTAEYAEQSSEIENKIASLRTERRRRLSQSQDDEMLDELKTLNQIIDEYQPKAGFDKTLFEIIVKRIEVIDSTAIKFLLLGDIELTEEISKKARCAQREQKNDPIRL

SEQ ID NO: 154 - protein, 532 aa, unidentified
  source 1..532: note = uncultivated organism
MARALRSSGGAVAAVATAPVRCAIYTRKSTDEGLDRDFNSLDNQREAAENYIKSQREAAWEALPDRYDDGGFSGGNTARPALQRLLTDIEAGRVDRVVVYKIDRLSRSLLDFARLADFFEQHECSIVSVTQQLDTSTSMGRLTMNMLLSFAQFEREMVSDRTRDKMRAARKRGKWTGGMPPLGYDTVAEGGKLVVNKDEAAQVRTIFDLYLEKRSLMATVQELSRRGSRRKSWRTKEGRWREGKPWDIANLRRMLKDPLYAGMAKLGGQTFPGEHEAIITKAVFAAVQEAMNENRRTGGAALRNSHGALLRGLLRCAACDAAMIHTWARKDGRLYRYYACSGAQKRGRDTCPTKSIPADKVEHFVVEQIRTIGSDQRLQRETFRQALAQVSTQRRTLKTEDKRLGDEVPRVRAEVDRLVKAVAAADGQAADALHVALAGGQERLVALEARLREVRTQADDLARLQVDEADLGRALQSFTPIWDVLHAPERERILRVLIETISYDGRSEAMTFAFRLAGLGALAEDARPEGRT

SEQ ID NO: 155 - protein, 545 aa, unidentified
  source 1..545: note = uncultivated organism
MKKQQRYNAALYCRLSVDDGNYGGSVSIETQKILLEQYCKDHKITNYNFYCDDGCSGTNFDRPSFQKMLSDIDEGKIDLVIVKDLSRFGRNYVETGMYVQRFTERNIRFIAADDNYDSLTNGDDLFFPIKNVVNEMYARDVSKKTKAAKKAKAKAGQFIGSKAPFGYKTDPDDRHHLIVDEPAAEVVRRIFRLASEGIGYNKMTKIFREEKVLTPIAYFNLNNPDYFKSDYWRKEFDWHVTSIRAILNNEVYLGKLVYGKKRNKSMKSKEKVSNPKEDWIVAENCHEPIITQELWNTVHKILNSKHRPAKTGEIQMFAGLLYCSDCGHALTYSQKQRKDGSYHGAYSCWMYKTHGKEYCASHYITFDTIYNLVLIDIQRNLFSYRNNKKQFRDMLSNKYIAVSQKEAANIQSEYDKKVKRCEELDKIICKLYEDNVLGKISDVRYEAMSGGYEDEQEEIRKALPQLKSRLEELERQTDSADKFINVIRKYTIIDKLDAAILNELIDKIVVHHKEKTADGHVFQQIEIFYRFVGKLDSGKAGTKVA

SEQ ID NO: 156 - protein, 555 aa, unidentified
  source 1..555: note = uncultivated organism
MNSRIRCAIYTRKSSEEGLEQSFNSLDAQREACEAYVKSQRHEGWQLIATHYDDGGFSGGNMDRPALNHLMADIHAGKVSVVVVYKVDRLTRSLADFAKLVEQFDKFGVSFVSVTQQFNTTTSMGRLTLNVLLSFAQFEREVTGERIRDKIAASKKKGMWMGGTVPLGYTAQDRKLIVNEPEAVTVRTIFNEFLRLGSVHSLEDWLRENNILSRRDHHFFRGPLYTVLRNPHYLGLIKHKKESYPGEHPAIIDRATWDKVQALLDANIQGKRRKVRATKESLFTGILFDATGTLYTPTHANKNGRRYRYYTSQAVIKKTEKSNAPARIPAPDVENAVVDRILNWLQTPADLLAALRNEITAPPPEGFFDRIIAQAAATAQNWRERIAADRTQFLKTVIDRVVIQQSHVEVRLRVTALVNEILGGDQPGRDFPPFALVECPFRHVQQGRALRLIIGNTSITTDASRQAILKAIARARRWYEQITTGKATNIAQLAGIDGVSPRFIRTQMKLVQLSPRSIESLMTRPESLPLSLDNLLAAIPMDWREQSLGLPAKSA

SEQ ID NO: 157 - protein, 534 aa, unidentified
  source 1..534: note = uncultivated organism
MRPEKRQKENGNGTGGHPSVRCAIYTRKSTEEGLEQAFNTLDAQRDAGEAFINSQRHEGWVTLPQKYDDGGYTGANMDRPALKRLLADVESGVANCVVVYKVDRLTRSLLDFSRIIEILDKNNATFVSVTQQFNTTTSLGRLTLNILLSFAQFEREMISERTHDKMAAARRKGKWVGGNPVLGYDVAPKGGSLVVNEAEAQRVREIFALYLELGSLIPVVEELERRGSRMKEWTTRDGRIAGGKPIAKNNLYNLLTNMIYLGKVKYGGEVYEGEHARIVDDEIWNQVQTTLTRNGRHGGRNIGNKHGALLKSLVRCATCDVGMIHTYVQKNTRVYRYYVCVRAHQRGWAQCETRCVSAPALESAVLQQLRGIGANPTIMRNVLRQIEEHRRQDALAASKEKADVARELQKVGDEIGGAGSVGDGGSVTRPPADLEQRANRLRARLSELQQQLEGVSAEPTDPRDLETALHAFDPLWEQLSTWEQERFIHTLVEQVRYDGKTGTVTLGFRSSGIKDLCSWAPAIKEKYEHAQKRG

SEQ ID NO: 158 - protein, 515 aa, unidentified
  source 1..515: note = uncultivated organism
MSAAIKVAGYCRVSTEQEDQRNSLAAQQRYFKELIEGREDWELYQIYADKGITGTSTKKREQFKRMISDAHEGKFQLIVTKEVSRFSRNILDTIAYTRELKALGVGVLFMNDGISTLDPDAELRLSIMASVAQEESRKTSSRVKWGQARQMERGVVFGRSLLGYQVKDGKIRVQPEEAELVRLIFHKYGLEKKGTTVIARELREAGYCNPSGTAEWRGSYLLKLLKNEKYVGDLVQKKTITPDYLTHARKYNHGQEELIVIKNHHQPIVERHLWDAVQAEMKRRDRHNRQNTGHSARYTFSGKIRCGICGANFTARRKKRKDGGSTLYWACLTAVKEGGQHTDHMGHQKGCNIGRLISNESATEMFHQALQSLRFNRQQLSGYLAQLAAEAVSETEQAEEEKMMREIERVTKKKEGVLDAFVSDEIGVEEMNALNRRCDRQLEALNERLAQLRQLAGQSVSATEAGMREHLEAILTGRVTSELFCKTILDNILICPDKTAELSLQCLSLRWRFSL

SEQ ID NO: 159 - protein, 531 aa, unidentified
  source 1..531: note = uncultivated organism
MIIIKKVGGYLRLSDEDRFKLKETDDSESIRNQRDLLVEFVGNNPEWEIFDIYVDDDVSGASNNRPAFKQLLKDCEEGKIDIVICKSQSRFTRTMEEVESILHNKFIEWGIRFIGIVDHADTEVKGNKKARQINGLVNEWYLEDGSENIRSALDIKRKNGKFTGSFAPYGYLIDPNDKNHLIPDPVASLVVKEIFDKYVDGFGYYKICKYLNDKKIPSPYQHKLLLGSKFVCGNAKDKMTYWNNDTIAMIVRNEVYLGKLLQKKRISLSYKNKKKHLQSRDKWIIVDNTHEAIIDRSIWNAVQSRLSQHHRVKSDGIIHKFSRKVYCETCGKIYTKCNYHVASGKKAYLRCGSRRKGGINCTNNSISYDLLEEIVLNSFKEKVKTYLESSELNANLTELIKLEDYNNKKESLQIERKNIEKELDKQHYYYKGLYEDKRDGIITIEEFMRLKKDYNSEIEKMNSRLVIISSEMEKYQTIKDNMINAGTLIKKYKDIKALSREVIELFIVKILVGEIDKETGKRNVTIEWNFF

SEQ ID NO: 160 - protein, 501 aa, unidentified
  source 1..501: note = uncultivated organism
MTGGKSKGVTPKVRCAIYTRKSTEEGLEQEFNTLHAQREAAEAYIVSQKSEGWVVLPDRYDDGGYSGGNMDRPAFKRLMQDIEEGLIDCVVVYKVDRLSRALLDFTKIIETFERQGVTFVSVTQAFNTTTSMGRLTLNILLSFAQFEREIIGERIRDKIAAAKRKGKYTGGMPILGYDVDRPSKKLVVNPEEARLVRHIFKRFVQFGSATILSQELNAQGHTTKSWTTMKGITRPGQPWNKMHLYRLFNNRIYIGEIVHKENRYKGEHEAIVPRELFNKVQVILEENCKVRGNNTRSKTPALLKGLIRCGHCDCSMGPSFTKKDGKTYRYYVCIQATKRGWDSCPVKNVASGEIEGAVMAQLRVMLQSPELVAETYRIARSKEEAELKRLKHERADLELELPGLESPIHEQDIRERMADIDAIVAGLESNPLTEQMVSGALGNLDQVWDELFPAEQSRVVRLLVDKVIVHEDGAEILMRSDGLHSLVDVLDSREERNSVDG

SEQ ID NO: 161 - protein, 531 aa, unidentified
  source 1..531: note = uncultivated organism
MKTISPKKHVRCAVYTRVSTDQGLEQDFNSLDAQYDASQAYIRSQAHAGWMLLRTKYDDGGFSGGNTDRPALQRLLADVQSGKVDVIVVYKVDRLTRSLADFAKLVELFDKHNAYFVSVTQQFNTTTSMGRLTLNVLLSFAQFEREVTSERIRDKIAASKRKGLWVGGMVSLGYDTKDRKITVNEGEAEAVRTIFRLYLKLGSLNLLMAELRNRGIVSKIRTLKSGKTVGGIPFTRGPLAHLLRNRFYIGEVAFKGEVLKGEQSAIVDRNLFEAVQAKLDDQANNHRQTRTRSEALLIGRIFDDAGNRMSPSHARKAGIKYRYYLSSALLNGAPERVGSVARVSAGEIEAVVVKSVREHVKPQPALDDRTLIETQVERVEIHSNRLIIHLTQAPENDEQTPRPAKVLSVSWQKAASTRRREILIPEGTPPQQVRRIRSENRATLVASIARARRWLTELITAPTANPEGIAKREQCSVRKVNLTLSLTFLAPDLVKAAIDGALPHGMGVARLADLPAEWSRQRRILGLGSSL

SEQ ID NO: 162 - protein, 501 aa, unidentified
  source 1..501: note = uncultivated organism
MSAHSKRQAAPKRFDALYCRVSTDEQAREGISLEEQQERLKAYCRAMGWNGEIRIFVDDGYSAKNLDRPELKRLIAAVRHGQVSRILVTKLDRLSRRLIDLLQLIDLFSDYEVSFVSVSESFDTNTPSGRLTLQVLGAVAEFERERIRERVFENMLHAASTGKWLTQSPYGYELIDKTLVVNEKEAETVRNVFEWYVNEGYGFYAIARRLNEAGIPSRHGKEWSIRSVKLMLSNPAYKGTLVWNRKDSSKAQRKEKDHSELVIVEDCLPVIIEKTLWEQAQQKMGQTALAPRAKSSPHLLGGLLKCGNCGSGMSIGFSGSPKNRYRVYRCSANKNKGTCTSKQYRADETEKRFKEALRLLLQQAGLSGTVTIQAAETFRRSERERLEQKVGTARARYKRKIEAYTAGLIGLEDLNEEKKRLEQAEHELELQIEESGTGGGEPVDLEALQLEMNEQIGDIAYAIELLPAEQAKGILQTWIADVTLHGEDEMEIGLIYVAPYC

SEQ ID NO: 163 - protein, 500 aa, unidentified
  source 1..500: note = uncultivated organism
MKTAVIYARYSCDNQTEQSIEGQLRVCEQYAQNNDILILNTYIDRAMTGTNDNRPDFQRMIKDSNKKEFEFVLVYKIDRFSRNKYETAKYKKILKDNGVKLLSAMENIPDTPEGIILESLLEGMAEYYSAELAQKVKRGMHETRLKGYFQGGTLPYGYKLNGRKIEVDEDKREIVKYIFNQYATGKYVSQIIQELTSRNIFNNKGKPFLANAIYGILNNQKYTGVYIKDKETYTNMFPRIITDEVYEKVRSKRKQNVYGKRSIQTTYLLRNKLVCGYCGKPISAETGTSRLGKKINYYKCIGIKKYHNGCIKETIKQEVLEEFILDAIIKALNTPKNIDTIVKGILDAQNNKNKLQSSLNVLMRNKKQLETTLQNILRAIEQGVVNKTTNSRMQELEKQIDLIDRQILIEKSKMSIKITEEEIRKFYNEALQKEPLTLINYLVKEIKLYNDKVEITFNSPILKSPDNQGFSFLSETLKMKKLIQNKPIPEMVDMLVKFYI

SEQ ID NO: 164 - protein, 541 aa, unidentified
  source 1..541: note = uncultivated organism
MQDIKGKKVVIYARVSTVRQADNEVSIHDQIDRVEQFVTARGGVVVDKRIEPGASATNTARPEYQRMIADALDGKFEVIAAFSLSRLFRNALDYLQARAQLRAAGIKLVSVTQDFADDPTGELALSMVALFDEYQSAENAKHVKRTMLANAKAGYWNGQTPPIGYKTVSVPQPKGKDRKKLVIDEATAHLPRLIFETYVNGTLDGPIGIVRLAAFLNGRGETLRGRKFHVSNVHAILSNTAYVGCAFFNKRCSKTRAARPSEEWVPISVPQLIPEDLFYQAQAQMAARDPKMGRHAHKTNTNLLTSKVLCGTNSSNGCGGGMTTATGKSGLHSYYSCNTRRTSGKHFCKGRWVRMDDLDDLVVDKVIEQVLQPDRLKGLLSSWLDQNSVAEGLDRNELKSLRSRLTMLDGESANVIGLVRKGLLTADDPQIERELAQIASQKRAINADIELLERKLADPSRKITPDILRRFGELVSGSLRERGNPLRKGYVDLLVDKVEVGDDLIRISGDRTRLARAASGTPPHMVPKAIREWRTRQDSNL

SEQ ID NO: 165 - protein, 524 aa, unidentified
  source 1..524: note = uncultivated organism
MIFASYGRKSIYSDTSDSIKNQHRMNREYADFHFFGKVDSFLLYEDEGMTGANTNRPDLKRLMKDIESGIINILIVYQLDRLSRDVRDFSNIYAFLEEHKVQFVSVKENIDTSTPIGKAMMYVSVVFAQMERETTSNRVYDNMIGLAGNGWWVGGNPPKPYHRKRITTADGKHHVTIEADESEAEDLRSMYRMFVDHSFSLQGFESYLKRQGVKTSTGKFFSTVQLHKILTMPYCVPATPEIYDFYNDKGCIMTVPRDQWDGSTGVMIYGRTTERSKKHVLQPPEKWQVCPGRHKPCMDADLWLSVQRQFGHNIFDKSIRHEPSLLKGVLRCSCGRLMGVSRKKRVDGSMSTWYACPKRRRQGPEYCNMSQIKSHLLDQKVIDIFKNIKSDPAAIKNYIGHTPNSKNAKNEIRSVNNQISAIQSKIDNLTATLAESQDSTAVKYIVQSIEKYDKEIQALNRSIAELQAEERMNKESEMNLEEKYSYISELIDNIDSFSPEEKNAIIKDVLKKCVWDGESLFILL

SEQ ID NO: 166 - protein, 511 aa, unidentified
  source 1..511: note = uncultivated organism
MVVSNKVVAVYCRQSVEKVDSISIETQIEKCKCRIAQDEKFEVYQDKGYSGSNIDRPEFQRLMQDIDSGKISKVVVYKLDRISRSLLDFSKIVKKFDDNGVAFASATEDISISGAMNRAMLNIIMVFAQLERETIQARVTDNFYARAKLGIFLAGRAPFGFKKIPHKIGDINTHILEENPIESVVVRYVYDEYLNGKSINSIVRELNDTSNKYNLGRKYTSVFIGRMLRNPVYVQSDADVYNYFKSKNAILHNDIQDFNGNGCTVYGNRKNKTRGKFIDLSGENIQLNLHKGLIEPDKWLIVQRMLSDNKALKNSGKGHNSWLSGLTKCKYCGLAITVVNGQPKGKRYINCGGHKAGYCNSRTVHYTFDDIEYEVEIKLHEYLKDFEFVQMKKTNEYEQQIAAIQKDIAVKNEEVQNYLNAIGKSGDAKAIDWLNENASKISKELTELNIKRSELERKHSNPIDVDLASSVLSKWNDMPLEEKKDIAHLFISKVIISNEGIEVVFKIKEQD

SEQ ID NO: 167 - protein, 540 aa, unidentified
  source 1..540: note = uncultivated organism
MKIAIYSRKSKTSDKGESIDNQIHMCKEYANTHFDAPEFSIFVDEGFSGGTTNRPQFKILIDELKKGLYDVLICYRLDRISRNVSDFASTLDILTQHAIGFVSIKENFDTTTPMGRAMIHISSVFAQLERETIAERVTDNLLELAKLGRWLGGTSPLGYKGKKVAYQSNGKTKHYSVLEQDLETAPTVKLIFDKYLELGSISKVETYLMQNGIKTSNQAHFRSNVIRNILINPVYATADASIYEYFHKLKCILPKPKEEFDGSYGLMPYNRNKKGKGNLQNPPDKWIISLGTHQPIISSLDWIKVQKQLKANSDLAYSNASASPALLSGLIYCKHCGAPMQVSGKGVLVNGTVCYNYRCTTKTKSRGKLCSIANISKGYAIDTLVIKRIRAMLENETDLIKELKKHKQDLTFKIDTVEKEKVRIKEELQSNTTTISSLIKKLALFDDSTMEHYIQDEVKALHSKNSVLKKQLDELQNLSVNQDYSLTNIELILHSLKEFNELIDYATLHQKKTLMHNLIKRIEWDGENIDIFFYFLQSPL

SEQ ID NO: 168 - protein, 520 aa, unidentified
  source 1..520: note = uncultivated organism
MSSRTNRNQPPTIRCAIYTRKSTDEGLDQEFNSLDAQRESGEAYIASMKHEGWVCLPTRYDDGGFTGGNMDRPAVQRLMQDIEAGRVDCVVVYKVDRLSRSLLDFARMMETFEKHQVSFVSVTQQFNTTSSMGRLTLNILLSFAQFEREIISERTRDKMAAARRKGKYVGGAPILGYDIDRDRSCLEVNEQEAARVRQIFELYLEQQSLVSTIAELDRRGWATKSWTTKKGKRRGGRPFNKNNLYGLLMNATYIGKICYKDEVYEGQHQAIVDPEIFERVQRLLHLNHRTGGARVRNTFGALLKGLLHCASCRCSMTHSHTTKNGSKRYRYYVCVNAQKRGWHNCPSRSIPAAEIEGFVVDQIRAVARDPKIVAATLVEASNQIHESLDRMEAERRDIKRDLARANAEMRALALEAIGDADGSRACRQLADAQERIRLGEVRLTEIREETIRLRAEAICEDEVVAALGDFDAMWGALSLREQARVVQLLIERVEYDGDGGTVSVTFRPSGIKALAEDVPA

SEQ ID NO: 169 - protein, 513 aa, unidentified
  source 1..513: note = uncultivated organism
MANVTYIAPVKAESMIHKIRCAAYCRVSSSSEDQLHSYAAQVRFYSEKFNGSETEELVDIYADEGITGTSAEKRTEFQRLIRDCKRGKIDRIYAKSLSRFARNTKDCLNTVRLLRELGITIFFEKENIDTAKTSDELMITVMGSLAQEESTSISQNMRWSVRKRMENGTYKTPSIPYGYIMKNGTLEIDPPKAEIVKMIFNNYLSGLGAQGIVNELNKAKIPPIHGGSKWYLYNVQYILTNERYIGNMLFQKTYGTDTLPVKRIINKGERDKFLLTDSHEAIISPEMFYKVQELQKMNGKQYYKSKGETNIYTSRIQCGKCGAACKHKKNRDKYYWVCREHDISAELCDSVVIPDDALKSCFIRMCNKLIKHYREILLPLHRSLQELNMRRFSGNTILLEIHKNIAEIKEQRHVLSRLRKKGFMDEKKYNEKLTELESQLARQERELKKTAKADNEDDTLEQLDILIDSIEKQSHIITEFDEELFGVIVERIIVRDKSLEFILISGLSLKEDI

SEQ ID NO: 170 - protein, 575 aa, unidentified
  source 1..575: note = uncultivated organism
MEQINQNKNRMVLLLRNSTKKQTEKKINESGKMEYDIPLQRDILTPWAERLGYEIVKEFVEGGVSGFKISAAKRDAVVEIKEMANRGEFDVLGIYMSDRLGRIADETPLIVSYLNARGIRVLSYTDGEISSKTHDEKLMTYIRYWQAEGESIKTSKRIKDAHEMAVEQGKWRGGKPPYGYKTVSRGTLNGKGRPIFDIEVDPAEAAVVKTIFRLYKEHYAFKGIAKYLNDNKIPTSTGGLWSWTQVQDILHNKLYIGIYELGRKNKNIRATSPVMENFIIISEEDFNEVQELIKKNTKRKNFKRATIRGSKLLTGLLFCECGKKYTSQTNKSNCKRADGTYHSYERTTYRCASYRNPQIGQCTKPPVKADTIDELVVRDAKNFLLQTDFTKLMQSDNDCIKEKETALCEQSKKLTREKLQLEKELQKLGDEVCKVIMGESQWSQAVLTKLIDTKEQELAAIKKKQEEVEAKIKDLADYLLAKKSDCSDLDNWGDRFDLQDTAAKKTMLINLIDRITMYDDKLTVKYKVCCDYLTGGSKYDVNNEISADAVPPGAFPALGVQSMCQPKKSQSRQRI

SEQ ID NO: 171 - protein, 519 aa, unidentified
  source 1..519: note = uncultivated organism
MNILGYVRVSTDEQADKGFSIEYQKKYIQEHCRIKKNNLVAIYDDDCSAKNFNRPNFKAMKIHAFKKSNHIDMVLVTRWDRFARNLTQALVQIEKFREHGVEVNSIEQYIDYNQPDYIVMLSMYLSTSHSERLKISRRVRECNYAARKHGKYTNGNPAKGYYWKKHVKGEESELLVDTPIANKVHESFELFATGLYSADRVRQMMAETGFVMKKQSFLNMLRNRLYIGEVHVPSYNGSKDEWVKGIHEPIIERPLFEHVQELLDGRKRNHPKAKSKVVPALFLRNFLTCPICGANMTGSFSKSRNGSRYPYYHCNHSGHQRISADTANQKFVQLLNSFVPDENVLELFSLVVDDLKHVAKHDITKQLKAIDEEIAGLNKKIDEADDMLMSKEIDKDTHKRIVSRHSQCISELMDKQKFLKDSDMKAIQEKMNFTKNILTNLGDYFDEADTETKIKLVGSIITQKMQFLENTYRTAGVNEVLAKIALIPNELQSMEKEKASVSAGLSTLALPLGLEPRTL

SEQ ID NO: 172 - protein, 554 aa, unidentified
  source 1..554: note = uncultivated organism
MTYRCAVYTRKSHEEGLDQDFNSLDAQYEACSAYIASQAGLGWTLRDKRYDDGGISGGHINRPALQELIGDIKAGLVDVIVVYKVDRLTRSLTDFAKLVDVFDAHDVSFVSVTQAFNTTTSMGRLTLNVLLSFAQFEREVTAERIRDKFAASKAKGIWMGGTCPIGYRHQDRKLYIREDEAAIVRTLFQLYLGHRNVTKVKAEADRLGFLSRQRTQRCGKIAGGKPLSRGLIYRILKNPIYIGKIQHKDKLYEGQHEAIIELNIWDAVQAQLNKHTSKRKAYHNSKSPALLSGLLFDDAGNKLVTHSTRNHGRTYHYYVAQKLRTGDEDSGWRIPIKTIDPILINELKSILSSKEALLELLGIQTPSAHLLQTLVNQGQELSITIKGADHQYLKDLLNKLIDKIILTPNCLNITFKPQGLAKHFDIELPEKSNITISKPMTIRRRGQEMKMVIGGLESKPSNPDNALIKLIAKAHLLKAELEDGTIDSIKTFAAKHKIDHGDAKNLIPLSYLAPSIVEDILSGHQPTDLTARRLKYLSNLPTGWADQRQFLGFN

SEQ ID NO: 173 - protein, 578 aa, unidentified
  source 1..578: note = uncultivated organism
MLIAIYSRKSKWTGKGESVENQIIMCREYIAMFIEEGDKAQIIEYEDEGFSGKNTKRPMFQKMMRDMQERHFDYLVCYKLDRLGRNLADLANLMEDLNRRGTSFISIKEKFDTTTPIGKAMLYFSGVLAQMEREQIAERVKDNMIMLARSGRWLGGTTPFGYSSVKVEKEVGALKKKSMFCLIQNPAEIDLARFIFTYFMEKRSLTKVLEYLLAAGIRTRSGKEFYISGIRDILVNPVYCIADEEGYQYFYDLGCQVCIDPEELDHTSGLMGYAKTTSTVYRNQGTPCESWIISMGRHKGIVTGKEFVSVQQLLASNRSKGDNFRDSRNSTALLSGLLYCTCGHRMRPKNYPASRVTEKGERTFSYRCPYKDLTHRENCDNQNVHGNTLDAAVCREVTGLAKPDAGILPMLEALRKQIEDSDIKVMSEKELISQEYEKKKDEIRKLVASLRQLEPDSVSVRYINEEIRRLDEECTALWKRMETGQDQQHEKKETADSYIGMEAGGEVMESRKNWDIEKGSEIKKNKEIKEITEKLADFSSVFEELPILQKRDFLREVIERVVWDGETAHIYLGNMKSI

SEQ ID NO: 174 - protein, 533 aa, unidentified
  source 1..533: note = uncultivated organism
MDKAALYLRLSKEDIDKINKGDDSESIVNQRLLLMDYAINHEMQVVDVYSDDDYSGLYDDRPEFDRLIRDGKLGKFNIVIAKTQSRFTRNMEHMEKYLHHDFPLLGIRFIGVVDGVDTQNTANKKSRQINGLVNEWYCEDLSNNIRAVFHQKMRAGQFLGAFAPYGYLKDPKDKYKFIIDEFAAGVVRKIYSLFLEGYSTKAICAILQDDGILNPTLYKKQQGFNYKNVKSDEFGVRYNLWSETTVKRILSNETYIGKLIQGTCKKVSYKDKKVIAVPKDQWYIVDHHHEPIIDEETFYKVAKLRAKRRICKDNQCGEKKAHIFAGKLRCADCGHTMIKTGGASSNGDYYLRCQLSNKSRNKECTNHGVRFATVENIVLERIQQVVDNVLQEGDHVSELEKCAKDSNSNNLEHEEKKRIKEIDLRKEKISQSMKTLYSDRVSGIISYDMFCQLKDEFDTELCKLNERRKKLTEEIELRETEKKAQKSASEIVKRYTDYSKLTHSVVNDFIDYIEIGEKNKTTGQQEITIHWNF

SEQ ID NO: 175 - protein, 509 aa, unidentified
  source 1..509: note = uncultivated organism
MAIILYARKSIERENSISCETQLEYCKSAIKPDEKDEKVLTFIDNGFSGANINRDGFQQMMKLVRQDKVSKVIVYKLDRISRSLSDFVNILQEFKTHKVEFVSSQESFDTSSPYGEMIVKILMIFAEFERTSIINRITQAYAHRSEMGFYMGGRKPYGFELVPTVIHNIQTKKLSPIPSEIEQIRYIYEIYAQENVSLQRLLNILDAENKMPLNESNWSTAKLSTILKNPIYVKADSDIYDYYERHGVQMITDVSMFTGEYGAQLYGHSKHKPDSPDWSDMKLVLLTHNGIIDSDIWLKCQRKLEKNKQITNSYSNQTSWLSGKVICEKCGHTMTTIKGKVNKNGEMRRYFNCTGKTHKKICTGTKVTIYAEDLENMVYDCINEKLSDLKEAKHVTTKDHSAEVNDLKLKIKAIEKSEKQLMDTMLSGGFNEDLLSLANQKATQLKKDRLALYERIDELKDMDNETDVVVNLAKSWKTADYNRKKEVAMIMIHQIIISEDGSTKIIWNI

SEQ ID NO: 176 - protein, 526 aa, unidentified
  source 1..526: note = uncultivated organism
MRKPRPRPTTPTIRCAICTRKSTEEGLDLDFNSLDAQRESGEAYIKSQANEGWVCLPDRYDDGGFTGGNMDRPALRRLLSDIEAGKVDCVVVYKVDRLSRSLLNFSKIMETFDSQKVSFVSVTQLINSSNSMGRLMLNVLLSFAQFEREIISERTRDKIAAARRKGKWSGGPPILGYDVAPEGRRLVVNDLEAVQVRQIFELYLERKSILATVAELDARGWKNKRYVTKKGETKGGLPFTKASLHALLTNVLYLGKLRHRDEVFEGEHERIVDPEIWRRVQVLLSRNGKAGGSAAKNKFGALLKGLLRCTPCDCSMVASHTTRPGGKRYRYYTCSKAQKRGWKSCPSPSVPAGEIERFMVEQIRAIGRDPNLLGETPDRARTQTKERMAVLEAERTALSRELAKRHAEVDRIVQDAPDANVGGHATARLADLQDPIRGTENRLVEIRQEHAGLGKELLDRRSVEQALAAFDPVWEALSTKEQARVLNLLIETIDYDGGSGKVAITYRPSGIETFAAKYAQETTCTA

SEQ ID NO: 177 - protein, 536 aa, unidentified
  source 1..536: note = uncultivated organism
MSIEKMIAIYSRKSKYTGKGESIENQAELCKEYIKIHFGYEALKRVKIYEDEGFSGGNLNRPDFKRMMRDVESMKIEAIIVYRLDRISRNISDFSGLINRLSQLSINFISIKEQFDTNNPMGRAMMYISSVFSQLERETIAERIKDNMHELAKSGVWLGGITPTGYKSVKMQKTDSIGKSKSFFALELIPNEAVIIKLIFDKYLEFNSLTKVENELIKMNIKTKNSKLFTRFSIKSILTNPVYAVADKATYEYFESKSAFIATDKVFFDSQHGIMPFNRTHQEKGKAPVLMPVNEWIISVGLHKGIISGKDWICVQQTLNKKKSRKSSIKNKALLTGILFCKCSSRMYPKLTKNLNQNGERKFSYICSLKDKSKKCLCKSKNINGNILDEAILENVSLIYEDNSIFINELYKSLSLFPDEFNIDIFYKNQIENNKLKIKRLLEALIDAQSNNVKLEIEKEIEFLNIKNKEISNSVKKLQSKSTGNTLESIESVANSLLNFKSAFGRSPLNYKRKIIKDLIKNITWNNDVAEVTYNI

SEQ ID NO: 178 - protein, 542 aa, unidentified
  source 1..542: note = uncultivated organism
MREQQNYTAGIYCRLSSEDSAEHESMSIGNQKAMLSDYVKRQGWEVGDIYIDDGYSGTNFERPDFKRMIGDIENGKINMVVVKDLSRLGRNYIMCGQYTEIYFPEKGVRFIAVNDNVDTINNTGSMDITPFKHILNDMYAKDISTKIKSSLHMKAMRGEYLGALDPYGYVRDPKDKHKLLVNEETAPIVKRIFEMCAGGMGSRSIATTLNNEGVLSPAEYNRFKNHDPEKDGAFVRKRYWCQTYIRTMLQNEMFIGSMVQGRQYTPSYRTKKRVKNDREDWIVVKGMHEPIISEELFEQAQKALHSRKIQPRKDSPHHVDPDVFSGLFRCEACGTAMRKHRTHNGKYIYYVCGRHHQQGKFACSSHYINCDVITRLVREDIKRNAVLFTEDTERAVRELTEKKCSDDQKKMSQMKSELTASRNQLAGLDAKLRRAYEDNLSGKLPDHIFTMLIGNYDEEKETLQRTIRELEKRIDASNAARSDVERFSKLIQKYTSFEELDSFMLHELIEKITIYETPNMGRYRKGKEKIVTIYYKFVGALE

SEQ ID NO: 179 - protein, 556 aa, unidentified
  source 1..556: note = uncultivated organism
MDFLKESKTYNAAIYVRLSRDDGDKEESYSISNQKELIRENLKIKSNITIVSVHVDDGYSGVDFNRPAFIKMMEEIKSGQINCVVVKDLSRFGRNYIESGKYIQKIFPFLGVRFIAINDSYDSAEGSNINDNILIPFKNLINDSYCRDSSIKIRSQLEIKRKKGDFIGSFASYGYKKSKNDKHKLEIDEYAAQIVRDIFKWKLEGMSHQGIGNRLNEMGILSPMEYKRSLGERYKTTFKVKQQALWSAVSIRRILENELFIGVLEQGKRTTPNYKIKTRIERPKEEWVRVENAHDPIISKEIFFTIKGLLIQDTRIAPTEETVYLFSGIIICGDCKENMIRKTVPANGKKYYYYTCSTNRHDKNSCTTHNISEKVFEEAVLATLNVQICSILDIERILTYIDTLPYKQDEILKLDAQMLKTQEEIDKNQKYKLTSYEHFADKVITKEEYRNHISRYTAKIQKAEKLLLKRKQEINDIAGNKTSTNLWIEYFKQYHNIEQLTRKVVVSLILKVYVYDNGKIDIHFKHQEEYESALRFIESATKSDSFDSSVAFKEAI

SEQ ID NO: 180 - protein, 526 aa, unidentified
  source 1..526: note = uncultivated organism
MRNGRSRQPAVEPAAVAAQIRCAIYTRKSTEEGLSQEFNSLDAQREAGEAYISSQRHEGWVALPDRYDDGGFTGGNMERPALKRLLADIEAGRIDCVVVYKVDRLSRSLLDFARLMALFEKHGASFISVTQTFNSATSMGRLTLNILLSFAEFERQIIAERTRDKISAARRKGKWTGGSPVLGYDVDPGGGRLIVNQDEAARVRAIFDMYLEQHSLVAVAREVNGRGWTTKRWTTQDGREHRGRPMGKGDLYRILTNVIFTGRVNHKGTIYPGEHPAIIDPAVFQKVDERLRHNGLTGGKEVRNKYGALLHGLLHCDACGTAMLHTYTVKNARRYRYYVCSTAQQRGWDACPSKSLAAQQIEDSVVERVRGLAQNPQIVTETVRQARQLADTNSCELRAELQVGERELRRLNVDLVKVAATTGNGMRVDRLADLQERIGSTERRMSEIRTELGTLEREAVSEEEVAEALATFDPVWKLLNTNEQTRIVRALIERVGYDGRTGKVAVTFRSAGFKDLCEGRDHHGER

SEQ ID NO: 181 - protein, 514 aa, unidentified
  source 1..514: note = uncultivated organism
MRIRTYTRISTDEDHQPYSLEAQDQRLGAYIQSQEDWVLTGRYTDRMSGSTLDRPDLQRALADARLRRYDLLLVYRVDRVARSVRGLSQILEELDRAQVVFRSATEPFDTATPAGRMMVQLLGIFAEFERATLIDRVINGMERKAARGGFLGGPVPFGYRVQPKTGLLIVDETERPVVELIFAQYVEKRLGTRSVAKWLNERGHRTRAGRHWSHVTVFNVLRHPVYAGRIAFRGNTYDAMHKPLVNLPTFEAAQRLLDERGEDFSKRRTNNTDYMLSGLVSCARCGNHYVGAAAHGRSARYRYYVCFSRQRYGEHGCQADRLPADELDEAILQTMLATYADESRMARAVADACQRAEEDLPQHRHELATVEAVIAKTERAVERYFAAFEGETLSAKRLAGRVAELDERLNELNTRRQELLDAIDHERWTGPTETDLGDLKETIEEAIRAGTPAQRKALLRMLVASITVESREAIHPVFRLPAEPPVRLMSTMVDPVVQHANRFARIEAFPICLP

SEQ ID NO: 182 - protein, 567 aa, unidentified
  source 1..567: note = uncultivated organism
MTHIERAAGYIRVSTSGQATEDKLSLENQENKIRHYCRDEFRLVEPIYEDRISGAKDDRPGLQKLLAAARRKEFQHVVVNDLTRFGRSAKDLLTNTEELEQLGIHFHSVKDKIDCSTKHGKLFFTLLSAIAEFELETIRVRMAEVKLAKWKAGKVLLGSAPYGYEFNEDRSAYIENDEESKIYKRMVEQYLKLEYNLDDIVISLQKDHILSRSGGYWFASTISDIFKNPIYTGYAVQNVTKKNKAGKVLGQKPEQDHVSVTAPHLITKTDWDELQAKIKKAKENKVGRPMRGADKFWLRDYITCGICGRKVVPQVMKKGELRYYACYWHSASTKKLASHPDMKKCSLPYIRAEWIEDFVSTWFNSQFEPHSFASAQEDKQFEKRIATLQERIRNLENDLAGKERALGIHVKMMENPKCDPEGMIELRNNLLAQKRDLKEQIQKENKELANQLQLREDAEKFDEFRKTKFEVLQEMYQKLIELPNDKKRRLITASLRENIRITPPEGETNPKGDTFMALTGWIKCFFRYNPLIVQEVFSSIALGQNGRLSVNRSFRRLPLRQRQAKGR

SEQ ID NO: 183 - protein, 554 aa, unidentified
  source 1..554: note = uncultivated organism
MNNPQKRAVIYTRVSSERQVENMSLPEQLKSCEMYCMSNDLVVDSIFTDEGASAKTTARPKFQEMLEYCRKNKHDIDVVVVYKLDRFARKVEDHAAVTAILKKMDILLLSATEMISETTTGKLMEHMLSSFAEFDNSVRSERCSKGMKARAMSGAWVASPPIGYAIARDAYNSPTLKLSDDGNAKRIALFFETFAKGNHRQSDAIQLADKLGIRTSKGNPLCKNGVIGMLHNIAYTGYIKSELTDNKRIKALHPQIISYDLFLAVQAVLNGRTRKNTPEKRLNSDFPMRRYLKCGLCGHPMTASRNRGRKGIYYPAYSCSRCKKKDIGKTVRIPIEQAHEAFEKLLTLLQPAPWICDAFKEIVIRRWNYEFREVQTQRRRIDNEIAILENRKNTLVDKLLDGHIIDTVYEVQEQRIFSQRLDLDREREELKSTEQNKESIVDEAIRFISNANALWVNSPLEDKQRFQNLVFQQGIFINADRSFGTTKLSPVFEAITDIENFFIENKITEKSKKSIWYTRQDLNLRPLGSKPSTLSTELRVHNRGNYTICVSLKL

SEQ ID NO: 184 - protein, 535 aa, unidentified
  source 1..535: note = uncultivated organism
MSVPAAPAPRRCAIYTRKSSEEGLEQGFNSLHAQREACEAYVLSQAGEGWTPLTSIYDDGGFSGGSMERPGLKALLADIARGLIDIVVVYKVDRLTRALSDFAKMVDLFDKHEVSFVSVTQAFNTTTSMGRLTLNVLLSFAQFEREVTGERIRDKIAQSKAKGMWMGGRPPLGYDAVDHKLIINAEEAAVVRGVFTRYLELGSVMALKPDLEARGVRSKRWTTKAGELVGGADFSRGALYHLLANPVYRGAIRHRERLYRDAHPAIIDEALWSQAQAKLAANCPDHPETPHLAADVLLHNLLFDDRGEAMRPLHTKRRGKRYRYYASAALKDGARPAGSLPRIAMGVLDAFVLERIEPLLSRGWRPDAPLELRVHDALVRLELGQDHVTMMVRNEAAASDPRVAEGDLKTTDLGVALAIGIRLKHRQGAVLIEAVGGQQQAGRVDRTLVRAICLARGWAKSLAAGEIASTKELARQSGLCNHYAARMMPLAWLAPDLVTAIMEGRQPRAICLGALVKHPLPMDWDEQRRLFETIG

SEQ ID NO: 185 - protein, 528 aa, unidentified
  source 1..528: note = uncultivated organism
MAEKKRCAIYTRKSTEEGLEQDFNSLDAQREACAAYILSQAAEGWEQVREHYDDGGWSGGNMDRPALRQLLADIEAGKVDIIVVYKVDRLTRSLADFAKIVEILDEKGASFVSVTQAFNTTNSMGRLTLNVLLSFAQFEREVTGERIRDKIAASKQKGMWMGGPVPLGYRLENRKLVIEPSEAETARMIFERYIQLRSMPKLVEDLAAKGVRTKQRTYKSGKVVGGIPFGKGMLGNFLKNPLYTGRVKHNDHIYDGEHEAIISVELFEQVQQIFKENGQELRLGKKARNPSLLTSILTDPDGRPMTPEHSAKGSRRYRYYVTRYKPGEKTGTPWRVPAGDLDRAAIRLFAQWLRSAKNDEADDIVARNTLADRLGDQTIFEQRQALLDFEVRFKLGAETLSLLEDNDPEGEAVFSLPARLVTHGREKRLAIPPDGSNASSEPDPALMRLVAQAMAAQRMVLKGIEDPSVACYGKRYLWQLLRISWLAPDIISAIVEGRHPAGLTGRRLLRAAQLPLEWSRQREFLGFS

SEQ ID NO: 186 - protein, 503 aa, unidentified
  source 1..503: note = uncultivated organism
MAKTVKKILLEPVNTLPTQAAGKLKVAAYCRVSTDRNEQKTSFDGQVKTYSAMIKANPEWEYVGIYADEGVTGTSAEKRPDFMRMISDCEEGKVNLIITKSISRFARNTLECITYVRHLNNLGVHLIFENNSIDTRTKFSEMVLTILAAFAQEESRSISENTIWGIRKRYEEGEVRWNPLYGYEKNEQGEYQIVPDEAAVVQLVYNLYEHGSTIGEIRKELAARKIRSPKGAETWTQAAVQCMLVNERYAGDIRLQKYYVEDFRTHKPVKNNCTTIPSYYVGDHHRPIVSKKQFQRVQAILGMRKGKTTQGDEENGACNQYPLADKLRCPFCGSPLYQRTVNVQTKHSAGWHCERGDNPCGGFVIRSAFVETALLGAYNSLDTAAVESRLNNPSLSKAAKTMLAMKKQNPSFARVDYWWVDELVDHIEFGNHTVLPTEAMRMKASGREFEDDRTMKVFWKCGMVSAVASGIVRDCDQPQYVAALVNEQNERKTARMVKEAVAV

SEQ ID NO: 187 - protein, 507 aa, unidentified
  source 1..507: note = uncultivated organism
MIPVASYCRVSTDRDDQANSFAAQQRYFKEYIDRQPDWELYEVYADEGITGTSTMKRTHFNRMIHDAHMGKFKLIITKEVSRFSRNILDTISFTRELKSLGVGVLFMNDGISTLEPDAELRLSIMGSIAQEESRKTSTRVKWGQTRQMERGVVFGTSMLGYDVRDGTLSVNPEGAEIARLIFHKYAVEKKGTTVIARELREAGYKTYHGSTNWSNSHIVKILKNEKYVGDLTQKKTFTPDYLTHAKKYNHGEEEKITITDHHEPIISREIWNITQTELQKRNRHGEPDAGHSNRSVFSGKIKCGDCGSSFVSRCKKRKDGTRYRKWGCLAATDHHMGRVDAEGNPVGCSIGRMLRDEAAMDILRQGIQSLRMNRDWIIRNVSALALEAIREGESESADSADHVRQKVKAIVYGETDSEVFYKNILDHMTVYRGGRVELHLNLLPQKWVFVLDRLHDFRQKTGPPQFDPDVSPKNAVEKSEESQGFPVSMSLSEPTVPISVSSPFSSS

SEQ ID NO: 188 - protein, 541 aa, unidentified
  source 1..541: note = uncultivated organism
MTKAKTRFRCAIYTRKSSEEGLEQQFNSLDAQRAACEAYILSQAGEGWECLPDLYDDGGWSGGNMDRPAIKRLLDDITKGRIDIVVVYKVDRLTRSLMDFARIVETFDSNDTSFVSVTQAFNTTNSMGRLTLNVLLSFAQFEREVTGERIRDKIAASRARGIWMGGNIPLGYDLGDRRLLINEAEAETVRHIYRRYLELGSIPAVAKDLDRAGIRSKFRTARNGNDHGGVRFNCGAVAHILKNRVYLGEAVHKGVAYAGEHEAIMDTALFDAVEARLAGNRHRRVTRKTRAATCPLTGKLFDADGQPMRTSFSYGRGKKVYRYYVSETLLPNGQIGNTSNMSGTRLSAERIERLMLDCLACLLPTGTIADDLFPMITRVDHRDNRLHLQIEVAALADGTTCDDVLVSRAQQINTGARIVGDQLHLTLDARPTRRGKTVRAKIHLLDNAEQRQVLADLVRASHRKLAALNASPLASDRHQHMDAPGNGWGRDRIAIGLLAPDIQKALLQGTAPADLDPDRLLSRDMPLDWGEQRRFLGISAG

SEQ ID NO: 189 - protein, 576 aa, unidentified
  source 1..576: note = uncultivated organism
MPTDSKTVIRCAIYTRKSSEEGLDQSFNSLEAQREACEAYITSQKHERWRGITTHYDDGGYSGGSMDRPALRQLLADIDAGKVDTVVVYKVDRLTRSLADFAKIIERFDAGQVSFVSVTQQFNTTTSMGRLTLNVLLSFAQFEREVTGERIRDKIAASKRKGMWMGGIVPVGYDVRDRKLIVNADEAAQVRKLFRLYLELGCVAKLKAQLDRDGVKSKARLSPSGMTSGGTSYSRGSLYCLLQNPIYLGKIQHRGATYAGEHDAIIPQELWDKVQDRLRANNKVRRSGSNSKSPSLLVGLLYDEQGNRFTPSHAVKRGKRYRYYVSQAVIHHRATAKVGPTRIPAQELEGVICRKLQALLSSAEQLLQAVGVESEDAAISKALIIAGKQSAKVWLDKPPIEQREFLSSVIGRIVVRETSLEIVVLQSTLRGVLLGNPSMRPTDNEPGVKKGIGDVFKLTIDSRVKRCGAEVRLLVPTHSTSESPARPIPSLIKAVARAHRWPEQIIHGELKGRRSIARLTGLDERYAGRILDCAFLAPDIVEAILDGCQPVDLGIQKLLKDLPLDWIAQRQTLGFL

SEQ ID NO: 190 - protein, 510 aa, unidentified
  source 1..510: note = uncultivated organism
MNRPRIRCAIYTRKSTEEGLEQEFNSLDAQREAGEAYIASQKAEGWVCLEQRYDDGGFTGGNLERPAMRRLLADIEAGKVDCVVVYKVDRLSRSLLDFSRIMEIFEKQNISFVSVTQQFNTTHSMGRLTLNILLSFAQFEREIISERTRDKIAAARRRGKWSGGKPILGYDLDRAPSGSKLKVNPEEARQVREIFTLYLSTASLIQTAQELNRRGWRSKAWVSQKGRSLGGKPFDKSNLLRLLTNVAYVGKVKYKVETHEGEQEAIVDQQVFEQVQAVLRANRSSGGAHVRNKYAALLKGLVRCGSCGRAMTHHFTSRKEKRYRYYVCQTAQKQGWASCPTASVPAGELERFVVEQIRLAGRDSSVIQDALAATQREQEAKLEGLTQERHALGRRLQRITSRLRQLVGKTGAADVLADLQDELRQAEQQASHLDDQIARGKSKLIDDQQTQAAMEQFQPVWASLSPSEQARVIHLLVQRVEFDGEQGRVSITFRANGIKTLAQQPKEQVA

SEQ ID NO: 191 - protein, 547 aa, unidentified
  source 1..547: note = uncultivated organism
MPDKIWNAASYTRLSRDDGDKAESNSITSQKEMIRDFIQRRDDLVIVHEYVDDGYSGVNFDRPGFKQMMEDIKAKKINCIICKDLSRFARNYIDSGRYLEKIFPFMGVRFIAINDNYDSSGEKSQSDSLIVPFKNLINDAYCRDISIKIRSQLDIKRKMGDFIGAFTTFGYKKDPNDKNKLLVDEPAAQVVELIFRLRLQGMCNTRIADKLNDMGVLSPMEYKQSLGQRYSTGFRTNERATWNAMNIMRVLTNEIYIGTLSQHKRGTPNHKVKKEVDYDREDWIVVTENHEPIVNEIDFQTVQLLLQRDVRTAPGGDTVPLFSGFVFCGDCGRCMVRKTVPSGNKKYYYLVCSTNKARKGCSAHTFSEDKLTKIVFRLVSDHIQQICEVEKVLDYISAMPEQQRRIFNYDAQLTKLSEEIQRFQDLKLNLYSDMSDGVISKEEYLEFRSGYDRKIADKQKSIAGLREEREQAVDSNDRHIRWIELFKQYENITELERTVIVNLIERIVIYDTKHIEIVFRYQDQLNTALQYIERFSDAVPEEIQEGA

SEQ ID NO: 192 - protein, 552 aa, unidentified
  source 1..552: note = uncultivated organism
MGAKKIAIYSRKSRYTGKGESIENQIELCRQYIKTHRESTTDDDIIVYEDEGFSGGNINRPQFTEMMGAARAGQISKIVCYRLDRISRNIGDFAKLVEEFSNLEISFVSIKEQFETSSPMGRAMMYIASVFSQLERETIAERIRDNMLELAKTGRWLGGITPTGYRSEQVVKHTIDGKARKLFKLAVVENEAETIKLIYKKFFETGSLTKTETYLLQNYIKSKNNRPYNRFSIRTILSNPVYAAADCAAFEYFNGTDAEIYADKCEFDGKNGIMAYNKTKQVQGKSNKTRNLREWIVSVGKHKPLVSGEEWVSVQKLLDINRGKGYRKPKSNVALLSGLLHCGNCGAYLRPKLSKSINAQGEGIYSYLCETKEKSKSHNCQIKNPGGNILDKLVCEEIKKISLDSSVVMKNLEDAKKTISLNTKEHDAAITKLKKERHSVDGEIRSLVMSLMRTEGSAAHGYIEERVNALHEQKKLLSERIDEMENITKGHSLSDIEFDIIKGLLQSFSGVFDAMPVEQKRKALRTVVRKIVWDGENAHMILFGAPENHVIF

SEQ ID NO: 193 - protein, 620 aa, unidentified
  source 1..620: note = uncultivated organism
MKKHILIFIYSRKSKYTNKGDSIGNQIELAKEYIDLHYPNNEYDVEIRIYEDEGFSGGNIDRPNFQRMMKDELKYHADILVCYRLDRISRNISDFSSLMEELKKYNTDFVSIKEQFDTKTPMGRAMMYIASVFAQLEREVIAERIRDNMHELAKTGRWLGGLTPTGFTAERYDLVQVLEKNKDNQLEKKVKKACKLIEDEKEKQIIIDMGNTFLTKKSLAGTETELMNRNILSRTGAYFSTGRIRTILTNPVYATYDEVTEQYFKENNIELFVSEEKKGKYGEYGLISYNKTDNGTLKDKSEWIVAVGEHKGFFTGLEWVKIQDIINKNKEKRYRASNRTNKALLSGLLRCDCCGSFMRPKATGNQPKNANYRRYYYTCELKDRSKGNKCNSKNVNGIVLDTEIIKKLKEIFVPNSEIYNELKAMSISKKENIQNKCDKIESLNKKYKKNNTEIHNLVEKLKYIDVSIINIVNDEIKKLQEENDSIQKQITSLQKDNEDNIAEGNFEKVSSQLVLDIIDNYLNIFDKLDIKLKKDILKILIKDVKGNGENITVNLLNTNIDEEKKSLFFDSFTKIEDASSSPTEYVSNCDSMVTANSVSSPTKYESSCNCNYEQSTGCRR

SEQ ID NO: 194 - protein, 534 aa, unidentified
  source 1..534: note = uncultivated organism
MMEAGTAKPGAFDIVVVHSFSRFFRDHFELEFYVRKLAKNGVKLLSMTQELGDDPMHVMMRQIMALFDEYQSKENAKHTRRALKENARQGFWNGSLPPVGYRVVDAEKRGAKVKKVLEIDPLHAETVRLMFKLASVGDGESGRMGVKSIAKYLNERKLYTRTGGRWGVGAVHRILTRRTYIGEHQWGKSYKDGTPDKEAETITVPVPPLIDNELFDAVQASLKKRQPMVTPTRVTSGPTLLTGICFCAKCGGAMTLRTSGKAKHYRYYTCSIAARQGKTGCEGQSIRMDRLDHLVADHLADRLLDPKRLEAMLASHLDRREEQDGRRRQVMAEMNKKAAEADARLKRLYEAIENSVADLNDPSLKERVAELKAARDQAGVDAERAAAAIKHVGQHLTPSAIQKFANATRRRMRGLDGKFRRAHLRALAQRVEVSPEEVRIMGSTNELARVLTSGSGLESAANGVRTSVPKWRRRRDSNPRDGSPSTPLAGERLRPLGHVSKFMSMVVISRKQVQILPQLNMSCFKCHSVDINQT

SEQ ID NO: 195 - protein, 509 aa, unidentified
  source 1..509: note = uncultivated organism
MSPSEAAPDKVAVYIRWSTDDQGEGTTLAVQAERCQHFLASQGWVYRPDLLYVDEGWSGGTLDRPALRRLRDDVDRGLVHCVVVYKIDRLSRSVVDIVQLVLREWDGRCFVKSTTEDVNTLTPAGKVFFYILVSFAEYERSVIRERTMGGKIKRAEQGLNPGFRPPYGLTRGPSPGTFAVVEHEANVVRRLFDLYRLGYGAHQIARMLDTAQPLHRGRVWAPLTVRRMLANPAYAGILAYGRTVRTGRKPAVQRLATPRYCEVPGALPPIVAEGLWKEVQERLQAGRRRRSPPRAEAAPAATGAFLLAGLAVCRCGAPVHGKRVGRYRYYYCSARKRRGQTACAAGHVQAEPAEAALERQVRDVLSAALDGAMWQKAMCAALERETREATAGLAQARSEREALTERTRRLERDYRSGGLPADLYTSELAALEQASQGLEHRMTALAVRLEQCSAVLPEIAGSPAPGEAWDELAGVERQELLNKLAVSVEVFRQAGTPDPPEMRVQWVRL

SEQ ID NO: 196 - protein, 615 aa, unidentified
  source 1..615: note = uncultivated organism
MDNERKIAGIYIRVSTEDQAREGFSLGEQEEKLKDLCKFKEYEVFKVYKDAGISAKDMEHRPAFQEMLSDIRNGKINYIVAYKLDRVTRSVRDLEELISELEKYNCYLVCDRDDVNTSTANGRFFVRMLTVLSQLEIEIVSERTKFGLNGAIKSSHLPGIVPLGYKKDGNKKTIVDETTKSIIERIFKMYLEGKSYFQISNILNDEKLLSPKHWKDTTIQKIIDNKIYMGDYEQFKRIAKKENIEPVIYMNVVEPIISHAMWEECQRQKEVNQRTYTRDRVYLFFQKIKCPTCGRIMKCKGSGGKKKKYMYYNCEHCHLNYREDKIEECLMNFIYDLVEYDMAVKKYFLPVLADHKPTKTEDIDSDIKTLIKQRERIKKAYTSGIVELEDFAEDYKLIEEKLEILEQKKQEILNLDNITFTPQQLMADRDIEREEMLRLDTLVPTVKSNWESKTKDEKQEFISKFIESVILIKNKNNELIIDRINFRKSYLNNLKKFVEKGILDVLIPVEINGKEDYILGTGNINNEQVQDYLDRLNEYYETKLYELYEKEDGITGDISLEFTPKQSEKVIRILPISSQKNNNKYYIKKEDIKTKYGIVTYNPTKPKELIMKGND

SEQ ID NO: 197 - protein, 540 aa, unidentified
  source 1..540: note = uncultivated organism
MLEKTQTNEVAALYIRVSTMKASQKDSPEHQLAVTQEKAIQEEFGLDENFVYEDRSSGTNISQREEIKRLVEDAKKGLFNVVIFASLSRFSRDTLDALTLKRQLVDSIGIRLISLDEGYDSLIDKDELKFQIISAVNQKLSEQISISSRRGIRESAKKGNYIGSKAPFGYKKTVTRDGKKTLIPDEEKKKVVETIFTLYVKNNLGEKSIVNHLNDMKVPSPKGGTWGISTIQRILQNEAYVGRNVFGKYTVKKEYPDYKDLNLRKNVLKQTPKENWMRANQPNTHEPIINEVIFSEAQELRQKRGRGKRGGIRNKVNIFAGMIKCYHCNSSMVSMKSGKVSKAGKQYRYLICSSRRRQGVKGCVNGYWLPYEQFRDEMITHLSETLRKFVSSDNLIEKYNEVIQIKEYSAVKEVEKIRKQIEINRKALFQLRKEKVAGDIDDVQYRFEKEQCDIEIKNLEEKLANIEVKEKKSKSIINLYEHINSSLEELMEINFENFDETHLTLQNLIEVITVSQSGDIQVDTKFGIELTSNGLLKTTD

SEQ ID NO: 198 - protein, 587 aa, unidentified
  source 1..587: note = uncultivated organism
MTGTGPVRCAIYTRKSSDEGLEQSFNTLHAQREACEAYIKSQVGEGWVLERDRYDDGGYSGGEMDRPGLRRLLADVIARRLDVVVVYKVDRLTRSLRDFAKIIETFDAVGISFVSVTQAFNTTTSMGRLTLNVLLSFAQFEREVTCERIRDKIAASKAKGMWMGGGVPLGYDAPISQISRALVVNEPEAKTVRLIFRRYIESGNTLVLQRWLQEEGIRSKARVFIGRGQVGCCVFSRGALRHLLKNRTYIGEIPHKTKSYPGRHPPIVDRQTFDAAQALLARSSQTRREHVPRAASALLHGILFDGGGQPMESFLAHHRHGRLYRYYVSAPGGPGGAHGKDDDAIRRVPSAAIEDLVLRRLAPIAGVVEAEMDRTEVRALVQRVEIHAAAVHVILRIAALSARSPQRMTFDKIRRQLLPGEQVTAEANDSGLVRVLLPVRLKLRGGRNWIVGPGGRAARPTLEPDRQLIRRLRAAHAILRACGAQPDGSTAEVRYARAPGSSYKMNVARWAFLAPDIQEAILEGRRLDYAASPGRAPVKIPLLWSGQRSLFRVVQSPSVAYNPQGVLSEDANTIVPRVVLPADHFPC

SEQ ID NO: 199 - protein, 626 aa, unidentified
  source 1..626: note = uncultivated organism
MENLSTPFSEEKKIAGIYIRVSTEDQAREGFSLGEQEEKLRQLCKYKGFEIFKVYKDAGISAKDMKNRPAFQTMLEDMKNGLINYIVAYKLDRVTRSVRDLEVLISTLEKYHCYLICDRDDVNTSTANGRFFVRMLTVLSQLEIEIVSERTKFGLNGVIKAGHIPGKCPLGYYRDKDKTLKIDNSTKDIVVWIFEMYLEGKSYQTIANILNKEKVLYPEVKHWIDSSVNRIINNKIYMGDYERYKYDNDRETELFMDVVPPIITRAMWEEVQKQKETNQRAYCRNRVYIFFQKLVCPTCGQIMTCKGTGGKKSKYMYYFCDTCKLYYNEDEIENCLIDYILDLVEYDFHVKKYFYPILAEKKDDETKKIEKEIRKLEQQKERIKKVYLSGIVKEEDFAEDYKLIEKKLADLENKRIDSLEFEKDTYNSQHLLAERDIEREKLTEHQMYKDVLLKLWTMKSKEEKQSFISKFIETATLKKDEEGNFDIEKINFRSSFVGQIDKLYDKGVVDFPTMLERGGKLEDTRISVNMNNEQLQDYLSTLKKELDINYMDLGEYYFHDDKIDENYDNKSKVAMIRDRHIEFKLKKNQKVVRMVAIKQYKNFLAKPEGKLRLGLVTHTTAKKQHK

SEQ ID NO: 200 - protein, 552 aa, unidentified
  source 1..552: note = uncultivated organism
MARKSRKETVVFPAPEIDTSCRAGVYVRLSVEDKHTHTASIETQQLIIARYLEQNPEIIVVQTYIDNGATGTNFHRPGFQQMLSDIEAGLINCVIVKDLSRLGRNVIDTGYYIERYFPMQKVRFIAVNDRYDSSSPDNAHDGIIIPLRNMINEAYAMDIARKIKAQQRQAMKDGKYVGGRTPYGYLKAPDDCHQLIVDPVAAEVVKTMFQWAAEGAGLNTIAVRLNEAGYLSPSHYKRTLGEITHENLVGNGHWQTRTVAKILRAEVYTGDLVQGVSKIIDHKQVRASADEWTTVRGTHEAIISRELFAAVQKTLDQAAQQAKDREIHSWSPNLLRGKIFCAHCGRSLHRQKCVRRKSQEVYVYHCISNNRIKKGVCPGAFIFEKELLDALADMIQEQLDTTLGQYSLGLENLSKEAEEQKNIQAKIASRKQEIQQLRTYQRGLYEGLIQNHLSKDEYFTFKEKYEAKIEAISKEIEQLKAGLAIISKQLEQYKMLSQDAQHIKEDRQLTAALIDRLIDRVEVSREKRITVRFRFQSEFEHCEEVLSQCRNM

SEQ ID NO: 201 - protein, 526 aa, unidentified
  source 1..526: note = uncultivated organism
MSRVRCAIYTRKSSEEGLEQEFNILDAQYEACKAYIASQCHEGWTLNRERYDDGGISGGTMARPALAALLGDVAAGRINVIVIYKIDRLTRSLADFARIVEQLEKANASFVSVTQSFNTKTSMGRLMLHVLLSFAQFEREVGAERVRDKIAASKAKGMWMGGTIPLGYDVVDKKLVINPVEAHTLRAIFTAFERIRSVQGTLRWARREGLKTKRRERLGKTVGGKQFEYGSLRCLLSNRLYVGEIDHKGNIYQGQQDPIVDRQLFDEAQAILASLSTDAVRGPKLVSASLLQGVIVDRHGRTMGPVHTIRNRQRFRYYVTHPKTIRDSDPAPYRLSANAIETICCELLADHLAGEVSSIDSDAEAQRLAAILAGNDHRQRRDLVIERVRRVTIGDAMLTMLLNDGTTLDRSIQRVRHGNDAKLIVGELIVSDEPKSDPQLIVLLKDAHRARTLAMAKPNFALDRLAKTFGRSTERYKRLLRLSYLSPSIVSTIIEGRQPAHLTGRFLQNLDRVPLSWPEQDALLLR

SEQ ID NO: 202 - protein, 538 aa, unidentified
  source 1..538: note = uncultivated organism
MKIAIYSRKSKFTGKGESIENQVEMCEKYISSHFSDSTHIISVFEDEGFSGKNLNRPQFQKMMAEEFSAPFNLIIVYRLDRISRNVGDFSSLIDKLNSYNTSFVSIKEQFDTSTPMGRAMMNIAAVFAQLERETIAERVKDNMYMLARTGRWLGGTTPLGYSSEKVENTDGSDAKRFYFRLIENDEVETVKLIFAKYSELRSLNKVMTYCINHNVKSRQGRNFSVTTIRKILTNPVYCIADIDGYNYFDGHDSNMCCTIDDCTGEFGFVGYAKTQGTAKSERVINNSDKWVISVGKHKGIIDGKTYAMVQNTLLTNADKNIRFKQSHNPMALLSGLLVCNCGNYMRPKYYKENKSGVKPYAYMCELKEHSKSQKCKCNNLNGLYADKAICDILLNYNVDGNVFNKYLNDIKNNTNTQTYKQQIGKFEAEKSKKQKEIDDLVNVLKSNVNPRTLEYVDKAIVALDNDIARIDKEIDALKLASSYNDDTQTRLSDVEGAFAFFKENFDTLSIENKRNFLRQCISKIMWDGENLHIFTKSL

SEQ ID NO: 203 - protein, 564 aa, unidentified
  source 1..564: note = uncultivated organism
MTDKRVRCAIYTRKSSEEGLEQSFNSLEAQQEACRAYILSQKHEGWTVLNTRYDDGGFSGGTMERPALELLLEDIKAGKIETVVVYKVDRLTRSLNDFSRIIEVFDLHGVSFVSVTQQFNTTTSMGRLTLNVLLSFAQFEREVTGERIRDKIAASKKKGMWMGGVVPQGYDCVDRRLVINRAEARTVRRIFQEYLRLGCVSELKDYLDRKRIRSKVRTSAGGRTSGGTAYSRGALYHLLNNHIYIGEIVHRGKSHPGQHEAIVPRELWNKVAARLEENNQAHRMGKSQSTPSLLTGKLFDSNGVRFTPTYAVKNAKRYRYYTSQTVVRKGGIKPVITRFPAQELEHFITSQVLLLLQTPPKCTAGMKNSPIKGSAAERAEDLARQWPKLETSKQREFVRNILGRVTVGQTAVWIEIDRTMLLATLLGQKPEALRPWCAHKLGILRLTGDFQVLRRGGELRVISPHGDSSFQGKRVPSLVKAVARARDWYERIVAGEVTTIRQLAQKLGLPRRYVRRILQCGYLSPRITEALLTGKHRPNLTLKEFLRGVPHDWREQETKLLQRF

SEQ ID NO: 204 - protein, 626 aa, unidentified
  source 1..626: note = uncultivated organism
MRAAIYARVSTARQSHDQTIDSQLAALRKWVDGRGHQLRPEHVFTDDGYSGTRLDRPALDRLRDAAREGEIDVVAVYSPDRLARKYAYQVLLLEEFRKAGCEVAFVERPISDDPHDQLLLQIQGAIAEYEKAVLGERFRRGKLQKARAGQWVTSRAPYGYRYVFKRDGVPGHLVVEPAEAEVVRMLYRWLIDERMTVRQILKRLAQGPWRPRNGKRLWSSCVVHRILSDPAYTGTAYANRHTYVVPRKPRMRGPRAGEATCRRPRPREEWIPVPVPAIIDEPTHQSAQAQLARNSVLNFRRNTRNSYLLRCLLVCRTCGLAMHGTTTRDKQGNLIQGYYRCHGKDPAARDREHRCPQSRVKVEELDAAVWAHVCQLLDDPATLLAQFEALARPDAADDPAGEDKAEAQLRRLDREGKRLLDAYQAEAIELAELRERHREIDARRQVLIAQRDQQAQLREERRTARQVWGDLTAFCDRIRSRLGEATAADRQQILQLLVERVIVGEDALEIRHVIPLRRLKPEPVALVPAGDGGEGQTPARSPGEPPGVPEPRLRSDGVGPAADPRRPAGDHRVVPGVPVRLEEPGVAFEESGREPLGAAGGQVEHGVRVLCVPHVHPGVGRPPRGE

SEQ ID NO: 205 - protein, 517 aa, unidentified
  source 1..517: note = uncultivated organism
MKRCAIYTRKSSDEGLDQQFNSLDAQREACEAYVLSQAGEGWSALPARYDDGGFSGGSMERPGLKRLLADISRGFVDVVVVYKIDRLTRSLADFARIVEALDKANASFVSVTQAFNTTTSMGRLTLNVLLSFAQFEREVTGERIRDKIAASKAKGLWMGGLPPFGYDVPTNGTRVLQVNETEAATLRHIFERYLALRSVHKLVEELKREAICSKPRVNRNGDTTGAQPFGRGALFHLLKNRIYIGEIVHKGESFEGRHEAIVERATFDKVQSVIARDRHERRVRRARSSPFTGKLFDMHGNRLTPTHSRNRHGRTYRYYVASRLQQGGAATADLKRFPAARVDAAIGAAVSRVSGTGEQELDLVVRAILSAHSIELILAARLLTNVRHNLASGEHVTIDDDNPDLIRWTIPAVLQPRGGRANVQSVESNAPNRDPILINALRKAHRLIERDAAGLPIIKTLPQSRYDARLMRLALLSPPLQRDILAGRQPPMLRLEDLLLAPIPFSWAAQEQVILRR

SEQ ID NO: 206 - protein, 510 aa, unidentified
  source 1..510: note = uncultivated organism
MTVKEICVSNNINVKKRLAAYCRVSTDSEDQINSFLAQIRYYRDYVKNHNEYEFVDIYADEGISGTSLNNRNEFNRLLSDCKRKKIDCIITKSVSRFARNTNDLLTVIRMLKELGVKVIFEEQGIDTDKINSEMIVAFPGLAAQQESQNISDNVRWSNKKRMENGNFKTTAIPFGYKKENDEFIINAKEAEVVRVIFNLYLSGCGKSNIANILNEKYSSTQLGDVHWTRCKINYILNNEKYMGDAIFQKKYTTETLPRKQKINRGEMPKYYVENHNPAIISKDVFKKAKTMQENKISNRVSTANHIFSGMLRCKACGSLFRKTYSNKVSYWICSNKASSTTNCKTHMLRESDILLTFKAVMFKLKDNRKGIVDSLISNIKTLHSRINTNHSEILNINTKIAEYLAKSHMIAKLHTRGVLEDSEYISQTTEINQSITKLRNEYKNFVAEDKYVKLLDELEKLSSTLESYNLETELTKDFLNELIKSVVIDENDIMTITLIGNLEIQEKVII

SEQ ID NO: 207 - protein, 546 aa, unidentified
  source 1..546: note = uncultivated organism
MTSRAFRCAIYTRKSTEEGLDQDFNSLQAQREACEAYIKSQKHEGWQLVKTHYDDGGFSGGNMERPALKQLMRDIETGIIDIIVVYKVDRLSRSLHDFAKMVEVFDRHKVSFVSVTQQFNTTTSMGRLTLNVLLSFAQFEREVTGERIRDKIAASKKKGMWMGGVVPIGYDVKERKLVINPAEAETVRLIFNRYLELKNVRHLCAELKREGIATKTVPNRANTGGKPFSRPGIYKLLSNPLYIGQVRFKDVYYEGQHERIIDQDTWEQVQSQLANNRPGVVKNHQEDSVCLLKGKLFDAATGDELIIDNARKGDRRYRYYASRSMKRNSKAEAKSGWRLPAPTIEKTIRAIVDDMLADHIGLTSMLTAAGIPVRYVSQVLANAQDARRSDSLKLLKAARLKQDSIQIELDLSSLLPKGVTDKSVGLEKTIPMQMRRRGCEMRLVIGGTSAADTHYDSTLVKSIARAHVWFQELLSGKAGSLLELAKMHNVSESYVKKIMPLAFLAPHFVKEITTGQRTSHLTKQTLTRQIPIPADWAAQKVVLEFN

SEQ ID NO: 208 - protein, 522 aa, unidentified
  source 1..522: note = uncultivated organism
MAAQDNLARKPIYIPATQPEEELSLRVAAYCRVSSDSDDQLNSFAAQQNHYYDYIHAHDHWELADIYADEGITGTAARKRDDFQRMLADCRKGRIDKILVKSVSRFARNTTDCLEALRELKALGISVYFEEQNIDTKMASSEMMTAVIASCAQAESESISKNMRWSYQKRMESGAFITCKAPFGYRLVDRSLIVEETEARIIQMIFQDFLAGWNTVEIAAKLTGMGIRTREGLDEWKPYTIKRILVNEKYIGDALLQKKYSTDTFPPVKKCNNGERPQYYVENSHQAIISRETFEAAQKLLQSKRPALVGKSKHQHALRKKVTCGSCGTFFRRTISKGIPYWVCNDHNSGGACTTGPIRETELFSAFCRLHFNLIHHPEILAGLLKNLHTLRTRQMLWSPGVVELNRTISDITSQIHQLTLLNQQGLVYPDTYITMSNQLAEQLRKAKQHREKLLEQEDHNIIGKTRMIMEVLSDGPEYLEVFDEELFCELIDKIVVESNTRIRFRLKNGLELPETIERTVR

SEQ ID NO: 209 - protein, 561 aa, unidentified
  source 1..561: note = uncultivated organism
MQKIIDKTYYAAIYLRLSKEDGDTSSGEKKESNSIANQRKLIEDYLKKHPEINLIQEFCDDGYTGANFDRPDFQRMMEQVKNRKINCIIVKDLSRFGRDYIDSGKYIEKIFPSLGIRFIAINDNYDSAQSHQAGNEIILPFKNLINDSYSRDISIKIRSNLDIKRRNGEFVGSHTVYGYRRSEEDKNKLVIDQTVAPIVQSIFRMKLDGFSPAQIADKLNKDGVPSPYEYKRLSGSKYQSGFRKSVQTDWGAKAIYRILKNEMYTGTLVQGKTTTPNHKVKTRTTKDEADWMRTENAHEAIIPISLFDTVQRVMLEDTRSPSGDESVHLFSGKVFCADCQNTMVRKRTRSAGKEYVYFICNTNKQDKSACDAHSIKEQVVYDAALAVIQAQVSLALDLEVALNNLNGVSWERREMERINARIQRQEEIIDHNKEMKAHLYEDFKSEMITREEYNIFKEEFDKAIQEAKDAIARLVSNKNQISGGLTEQQSWLAQFREYQNIQELNRRVVVHFIEKIEITGDKQVHVFLNNADQFKAIMEFLEEEKQKANAKKIITFAREVS

SEQ ID NO: 210 - protein, 509 aa, unidentified
  source 1..509: note = uncultivated organism
MPQVQVIQPIQQQPKRLRVAAYARVSSDSEDQLNSLSVQVDYYTHLIQENPNWDFAGIYADEGITGTSTKHREQFNRLLDDCRAGLIDRVLVKSASRFARNTADALASVREMKSLGVTVVFEKEGFDTETSNGEMILSMICATAQEESLSISKNLKWGIRKRMQDGTYLNGMSPFGYEKQESQLIPIEREAEIVRYIYSSFLVGVGTVQIAEELNRRYPKENGTWYVSAVRRILMNEKYIGDVHHQKNFTPDDLPLLCQKNSGQLPQYYVQNHHKALVSRQEFEKVQTLLKRKGTERKNQNTCAFSNKLYCAECGSVFSRKVRANGVVVWGCRKHLDKSELCPVKPVYEADLCRVFLSMYNKLQANRDKVLRPAMDDLASLRYLQEQRNSERVTITEEIQRLGKQNHNLERLRTTGCIDSAQYWERRAVIEQQLIEKKALLMRRFFNKNVEKVLRQTKGISTRLAAGPLLTDFDEEAFTALVSRVKISSTAITFGLINGMNLPEGRTEP

SEQ ID NO: 211 - protein, 514 aa, unidentified
  source 1..514: note = uncultivated organism
MAQVTIIEAVNEVENKLKIRCAAYCRVSTEMGGQKNSYSAQINYYSEKFENSDTEILVDIYADEGISGTSEDKRAKFKRMISDCRKGKIDRIYTKSISRFSRNTRDCLRNIRELKTLGISVYFEKENIDTAEISDEMMITIMGGLAQEESTSIGQNVAWGIRKKMKSGTMKYANAPYGYRKNTETGDIEICEETAAVVRDIFNMYLNGMGCRGIAEELNQRGVTPPAGKMWRQNRIGEMLVNKSYIGDCIWQKTYKTGVPAKRMRNNGEYDMYYIEDDHEPIIDRADFDKVQQILESRRTPRTPPQERTFSKKIYCGCCGGLYSFHNRKYRSKWECIRRSNLGNCDGISLPQARIENTFIHMCNKLRFACKEILIPTKNLMCGSRLRQNSENKDIVEIYKQIAELKEQLHVIAKMRSKGFMTEEKYRNQTSVIDSKLMKLNQKLRKLSAKNSLDTRIEQIEILIDIFEKMPQDMDVFDDKLFSLIIEKMIILDNEKIEFHLIGGMKFTERISGE

SEQ ID NO: 212 - protein, 574 aa, unidentified
  source 1..574: note = uncultivated organism
MTAPRKTLRCAVYTRKSSEEGLEQDFNSLEAQREAGEAYIKSQAHEGWRLLAERFDDGGFSGGSLERPALKRLLEQVRDKRIDVIVIYKIDRLTRSLMDFAKLADLFEKQGVSFVSVTQQFNTTTSMGRLMLNVLLSFAQFEREITGERIRDKIAASKKKGIWMGGNVPAGYDVKDRALVINEQDAKTVRSLFRLYTELGSVRKVWAEAQRLKLRTPVRRSTTGQVSGGKPFDSHNLYHLLSSPIYIGQLPHKGQVYDGKHPPLVTPAQWKAVQDGIAGNRVDRRYGRSHKNPSPLAGLLFDAKGTRFTPTHTRKGTQRYRYYVDPALTTGMTPAKAHLPRIPALEIEHGVRKGLAQFLNDPKALLAALGKDVKGSLAERALKQARALAEDILDATPTTWMPLVGSALEKVVLRDNAIGLSFAATVLRSILLEQAGERDLPAAWTRSDTPLVEYRVSAQIRVRKGAMKVVIGAENRVAGETDQVLLKTLAKAYVWAERLRDGSADSVLEIAKTEGLTQSYVTRVLRLGFLAPNIIDAVLKGGAMADLTADHLLLHVDVSPLWCQQATNFRDGCS

SEQ ID NO: 213 - protein, 548 aa, unidentified
  source 1..548: note = uncultivated organism
MKAKDFYNVAVYLRLSKDDGEAGKAESNSITSQRDIIRSFIRKQDNMEIFDFYVDDGWSGANFDRPAFKRMMGDIESGHIDCVIVKDLSRLGRDYIGSGRLIQKTFPEHEVRFIAINDNYDSLTADFNEESLVLPVKNFINDAYCRDISVKVKSQQKMKRESGQYIGAFAMYGYRKDPDDKNHLIIDRYAAGIIESIFEWKVDGYSFEAIADRLNGMGVLSPMEYKRSNGEKFTTGFRTKKRSKWSAQAVRRILMDETYIGTLVQGKSERVNYKVKKSVVKPAEEWVRVPNAHEAIISQDLFEVVQQLLKTDCRSASGKNTSHLYSGLLFCGDCGEQMTRRVNRYKGQTKVYFICSNYNKNKKCSRHSILQDDLDKLVLYGIKSRVELILDQMAVISKVKDLDMRYDDIVAFDKEIVDLKAEQEKYKKLRAALYEDYKKDIIGEEDFKTFSAIYEEKYAAIESDLEKQMQNLKELFKNGLEAGMKLEQYKDVLQVESLNRTTLVHLVEKIYVYDDKRVHVVLRHQNQFIKVAMLCDFLKHSEAEGQVK

SEQ ID NO: 214 - protein, 602 aa, unidentified
  source 1..602: note = uncultivated organism
MRERARLKTFRCAIYTRKSSEEGLEQDFNSLQAQREACESYIASQKHEGWKALPTAYDDGAYSGGTMERPALQRLLADITAGLVDVVVVYKVDRLTRALTDFAKIVEVFDQRGVSFVSVTQQFNTTSSMGRLTLNVLLSFAQFEREVTGERIRDKIAASKKKGLWMGGFVPLGYRPDQRTLVIHEAQAEIVRTIFRLYRQTGSVLKVQSELDRRGIVRPTLTTMTSGRAYGGRSFGRGEIYKLLANPIYVGEINHKGHRYEGQHPAIIDRETWDEVRARLASNTHARHIRFGAKDPSLLAGLLQDDQGNRLTPTHAVKNGKRYRYYALQPSDTENRKRGRPQEGSRRWRIAAAEIEAVVIERLAKQFDDQHWLLSQCASPDGAIARRKAIIAKGKELANRIRSDARSGLREFLLGLLTCVTLGEAQVRIDIRRSSLIAMLGIVDDEAAGMDDDIGNQRSHRSTKLSAQGESPDDDVILLKVPTKLHRRGVETKLIINTPGEAQKPSDPDPALVKLIAHAHQWWDDLLAHRFSTMRALAQAYGKDERYVARVLPLAFLAPTIVEAAAGGTQPVELTAQRLMTVTDLPDHWKAQVATLGFAKEN

SEQ ID NO: 215 - protein, 502 aa, unidentified
  source 1..502: note = uncultivated organism
MIRRADITTQTPAVRCAVYTRKSTDEGLDQAFNSLDAQREAGEAFIASRRLEGWTCLPDRYDDGGFSGGNLERPALKRLMVDIEAGGVDAVVCYKVDRLSRSLLDFSRLIEVFDRHSVMFLSVTQPINTADSSGRLMLNVLLSFAQFEREMIADRTRDKMSAARRKGKWTGGHAPPGYRVHEDGGRLVVDPDEAEMLREIFALYLDRRSLISVAEELNRRGWVTKRVGTLGGKPWTKTHVHQVLTNVTPTGRVEHRGQVYPGEHDAILDVATFDRVQGLLAENRPYGGARAKNRYGHLLRGLLHCRACGCAMSPSVTRKRGKAYRYYTCCRATKNGWHTCPHPSLNASQIEAAVVEQIKVIGRDPSLVAETLGQIRQLKATRTPTLVAERRRLERELARLRERNGDADRDHLRRLESRLSEIAEELAVLQTAAVDRRDLARALEMFDDVWACLFPREQERVIALLVERVEFDATRKTVAVTFRPTGIRALAEEVQVAEGVPA

SEQ ID NO: 216 - protein, 573 aa, unidentified
  source 1..573: note = uncultivated organism
MRSPEPLAGRGQRCAIYTRKSTEDGLEQEFNSLDAQREACAAYVLSQRHEGWTLVPDLFDDGGFSGGSMERPGLKRLLADIEAGKVDTIIVYKVDRLTRSLADFAKIVDVLDAAGASFVSITQSFNTTTSMGRLTLNVLLSFAQFEREVTGERIRDKIAASKKKGLWMGGPVPLGYDVKDRKLVVNEAEAQTLRHIMQHYLEADSVRALVAVLAREGLRTKVQIRTSTANRGGVPFGRGCLFHLLKNRIYLGEIVHKGTAHPGEHDAIVSQDLWERVQSKLQDNGPRLRRIANTRHASLLVGLVFDGLGRRMSPSHANKGSKRYRYYITHAEAGIDAANPAWRAPAHDIERVVTNRLQTFLSDGTAVHAAVADCVAETRDIEAILNAASDAALELCKPASPDRPAMLSRYIERITLRDGSVEIAIRRASLLPDGKSIAANATNAANAMNADPILLEAETARVRRGHEVRLIIPSKASEKPIERDTRLVDLLAEAHAARSLLMASTDASIDQLAKRQGRCRTHFARLIKLSYLAPDIVTMVLEGRQPASLNRRKLMVAELPHRWADQRAMLGCN

SEQ ID NO: 217 - protein, 528 aa, unidentified
  source 1..528: note = uncultivated organism
MLDNANVVPGRNKTLRCAIYTRKSHEEGLEQEFNSLDAQRESAEAYIESQRMQGWIALSDRYDDGGFSGGTMERPALRRLLADIDAGKIDVIVVYKIDRLSRSLLDFMKMIEVFNEKGVSFVSVTQHFSTTDPTGRMFLGILITFAQYEREVIAERIRDKVAAAKRRGKYCGGVPILGYDVDRENKKLLVNPDEAKTVQYIFRRFIQIGSAKKLGQELNEQGYRTKAWTTKKGKVREGSEWNTAHIYRLLNNRIYIGEIAHKDRSYPGEQDGIIDRATWDKVQASLADNKPVKISMARTKMVAPLKGVIRCGHCGCSMGPTYTRKNGRRYTYYICEKDSKRTVSRCPLKRIPAGDIEQAVVEQLSAVFRTPTLVAKTYFAARDIEQAERERLFKQKAQLEMELSQAREQALELMKPGSDQPGKTEMLTTVNRQAVELSKQLTHVSERCRAYRGNSITEQDVSEAFQNVEGFWEDLFPVERNRLIRLLVDKVEIRETGIDMELRTNGLTTLIAELAGLACEVTERRVSR

SEQ ID NO: 218 - protein, 508 aa, unidentified
  source 1..508: note = uncultivated organism
MDNKPLIEPLFCIFYGVRCYTEGSRKFDSLYVCLMVRIYIDFSLYYRGFLKKERFMQKIIGYIRESTMEQVKDGYSMADQERWIRLYLDLYYKPGEYSFELFEEKGKSAKTLHRPQMKQIMGMAERQQFDTIIICALDRLTRNVADMDVLVKLFDKKNIEIVSVQENVDTHSAQGRFFIYLVSLIAQWEREIIIIRTRNGKRQSAMMGNYVKGTPPLGYKKSETEKGKLVVIPELAKSIVRIFNDVGERDIPVFAVAARMTNQRIAGRKWKEEQVRKILFKEEYYGTMVYENKAYPNQVPAIITKEQFDLAHQKMDGRHHVMRNRYVYKDRCYCELCHSKMTVTGSLKKKKKCYTYYYCTKCGRVVNQRDITEQLDKKLTKAMRQDMFETEIEKLQHKYSRAVTMLRRASYSYVTYGLTEAFYDSLIDSAETDANEIRTKIMAESARIDKIKFSECTYRDQREFVLEHVKKVELDVYDKKVTDLQFLEEKHRLDQSNENTELDCVAEV

SEQ ID NO: 219 - protein, 531 aa, unidentified
  source 1..531: note = uncultivated organism
MARVTQVPRSVTVIPATINPGTHLPKALERRRKVAGYARVSTDSEEQLTSYEAQVDYYTRYIQAKPDWEFVKVYTDEGISAVNTKRRDGFNQMVEDALAGKIDFIVTKSVSRFARNTVDSLTTVRKLKEAGVEIYFEKENIWTLDSKGELLITIMSSLAQEESRSISENVTWGQRKRFADGKVSLPYKHFLGYRKGADGLPEIVEEEAALVRRIYRLFMGGKTVCYIAKVLTEEEIPTPSGRSKWSPTTVESILTNEKYKGDALLQKRFTTDFLTKKMKVNEGEVPQYYVENSHPAIISPEEFDAVQTEFQRRKSLGRRYSGQSVLSARIVCSECGDYYGSKTWHSNSKYRRTIWQCNSKFAHTKHCDTPTLDENDVKARFLIAYNTIFADRDHLLEDGRVMQDTLTNCDAIDTELAALDEELSVIAGMMRKCIDENARSALDQGDYLERYSSLAKRHETTYAKYRSLEAQREERLNQASQIGGFLFELMERVEPLEKFDDRLWLVTIDKVIAYPDGHLGFMFRNGMEISG

SEQ ID NO: 220 - protein, 525 aa, unidentified
  source 1..525: note = uncultivated organism
MSPDERRYERMAKITTFDAKPPAGGKKKVAAYCRVSTDTEEQMVSLLAQKGHYEKYIRENKDWIYAGIYCDEGITGTNKENRPALRRMMRACREGKIDYIITKSLSRFARNTTDCLMMVRKLLRLGIGIYFEKENIDTTTMDSELLLAIMSQLAEDESRSISQNTKWSIHQRFKKGTYIVSTPPYGYENKDGKMVINEEEAKVIRYIFSEMLSGRGSYQIAKSLERKGIPTKRRGNWNTTIIREMLSNEKYVGDMLCQKTYVDDHFKDHRNKGEKEMYLVTDHHEPIIGRADFEAAQNLLKVRSDAACSGGTSKFQNRYPFSGKIYCAECGDRFKRRINNATVDKTVFWVCRTHTYYKERCSMATVKNEDLELAFTLMMNKLIFASEDMLKPFFIELTEKNRTVDCMDMEKVDEKLEKNRESMRKLLEVMTKGCLDAAVYSRENLALAREADELAKAKERLASSKGEVFSFEMEIKALYDFARHSDYLKEFDGDLFTRFVDRIIVYSKHEIAFKLKCGLTLAEGV

SEQ ID NO: 221 - protein, 567 aa, unidentified
  source 1..567: note = uncultivated organism
MNAASVKQVRCAVYTRVSTDSGLDQDFNSLDAQYDAAQAYIRSQAHAHWTLIKARYDDGGFSGGSIDRPALQQLLADVKAHRVNVIVVYKVDRLTRSLADFAKLVELFDAYGVSFVSVTQQFNTTTSMGRLTLNVLLSFAQFEREVTSERIRDKIGASKRKGLWVGGVVPLGYHARDRSITVVEEEARTVRHIFGRYLELGSLNLLLADLRKSGVKTKVRPLSTGRTIGGIPFTRGSLAYFLRNCFYIGEVKYKDEVFQGAQTAILDRKLFEAVQTKLDQQRSNHIAARHASDSLLMGRIYDSRGDRMTPTHATKAGVRYRYYISTALIQGQKSNAATLSRVPAAEIEQLVVATVRQHVRTPAHKRDYEHDTPELNDKHLISTHVARVDVKSDHLVVRIATMSEQQSGEKVETNVLNHHDGSDRSENQIAQTDASTNVLRIPWKKMPAKRPREIIPPVSVSVSPQPDKRPIRAETRAKLIASIAKGRQWLEEWTAGTVTNAEQIATRENCTIRQVNMTISLAFLTPVLVQAAVEGRLPRGIGVANLRDAPAEWSRQHAMLGLSVSRP

SEQ ID NO: 222 - protein, 546 aa, unidentified
  source 1..546: note = uncultivated organism
MALYFDGQTTLDSEQYDAIAYYRLSKDDGAKRESDSIANQRKLIRSFLQNNPNIHLIEEAQDDGYTGTNFDRPGFRSVLNAIQSKRVNCVIVKDLSRLGREYIETGKYLEMIFPSFGVRFIAINDDVDSENSRAGDDIIIPVKNIMNEAYCRELSKKLRKQFQIQRGNGEFLGAFANYGYCKSPDDKHKLVVDDYAAEVVRGIFSLKFQGYNQQAIADFLNNEKVLSPADYKKSQGLKYKTGFRTSSESHWSAVSVSRILTNPIYTGKLVQGKRGTPNYKIKTMRMREEKDWVVVENNHDPIIDPLTFMIVQRMLERDTRTAPQNDIVYPLSGMVFCADCKASMLRRTVRRGNKTFRYYVCSANKRGNGCSSHSFEQSKLEQTVLHAITKQIDIILDTDELLNAMGKSKIENAHIRRLDLAIAQKNSELDRYCNFRMKLYEALNDDLIDRDEYEKMRNKYTGMIEETESKIRQLSADREKSLTNTTPRDWMASIAKFKGITALSREAVITLVDRIYVYEDKHIRIDFNFRNELAYYKEILQQKEVG

SEQ ID NO: 223 - protein, 526 aa, unidentified
  source 1..526: note = uncultivated organism
MKDVVAIYVRLSDEDRDKLNPKSDSESIQNQKNMLTKYAMEQGWDIYNIYSDDDFSGLDSNRPEYNKLLRDAENNKFNIVLAKTQARFTRDIEHVEKYLHNKFQLWRIRFIGLADHADTFNKGNKKQRQIIGLTNEWYCEDVSENIRSVFDYKRKTGKFIGSFACYGYMKDPNDKNKLIIDEDAANVVRLIFDLYLDGNGTQQIAHILNKKNILNPTKYKQSKGLKYKNSSENNGFGLWNKTTVKRMLKNQMYIGNMVQNIRTKINYKSKKFITNKESDWIIVENTHDPIIDKNKFYEVQRRIKNNQRSCGTGKAHIFATKIKCATCGSTMQKVTTTPKNKAKYSHFRCKLYAIAPSKKLCTNHYIRMEILEEIVKTKLKEYINSTNNENIANKLQSESDNNNRLNLLNKELNNVRKQIKLNLDVLKNLYLDKVKGIITNEEFITLKGDFEKEKNNLQKRKDEIENLLIETNKRKNNIEDWLETINKHKNFKELNHEIVNDFIDYIEIGEKNKETGEQEVIIHWLF

SEQ ID NO: 224 - protein, 547 aa, unidentified
  source 1..547: note = uncultivated organism
MKCAIYTRKSSEEGLDQDFNSLEAQREACEAYVKSQGWKTLKEHYDDGGYSGGTLDRPGVQRLLEHIDAGRIQVVVVYKIDRLTRSLADFAKLIEHFDAHEVSVVAVTQPFNTTTSMGRLTLNVLLSFAQFEREITGERIRDKIAASKQKGMWMGGIVPLGYDINDRQLIVNPDEAEVVRFIFTRYRDLGSVRLLKADLDNAGYVSKQRKNRRGCVTGGRPFSRGALYTLLRNPLYIGKVRQGDTLYEGQHKGIVQSNLFNTAQQKLDEGKTGYSTRGCSRSLLAGLLYDADGHRMTPSHTRRHNQRYRYYVSQQVLYGGKSTTLARVPAQEVEQAVIEALLALLSSPHKLINKLPDPSTKIIARLNTLIEKHTNLLQTGEYKNLRSLLARVELTDTALRITLNLDALFKPLGVTGTGSYVFEVSVRIKQCQHGKKLVVYGTNRANHLDPTLVSALTEAYRWHEMLKEPDVATFNDLAHKLDREHRYLARIHQLIYLAPDIQLGILEGTQPPDLILERLTKQTRIPLSFEEQRHLYGFPPAGQEAHP

SEQ ID NO: 225 - protein, 566 aa, unidentified
  source 1..566: note = uncultivated organism
MNARRLRCAIYTRKSSEEGLDQEFNSLDAQREACEAYIRSQAGEGWRPVRARYDDGGLSGGTMERPGLQRLLEDIGARRVDTVVVYKVDRLTRSLADFAKIVEVFDANAVSFVSVTQQFNTTTSMGRLTLNMLLSFAQFEREVTGERIRDKIAASKRKGMWMGGVVPLGYDVVDRKLIINQGEAETVRTLFRLYRHLGNVRLVKEEADRRDLRTKVRHPNNGRRQGGAPFTFGHIYKLLSNPIYAGEIAHKGERYAGEHEAIIDGESWEAVQAQLKRNAVARNRGTNAMSPSLLARLLFDEDGNRMVPSHASKPGRRYRYYVSRTAPGYPNIKDSVWRLPGPAVEEAVLNAIRSLLSNRIGLSDALEIHGTQMKDVSEAATRLGKEIGRAPPAEQRGFLLDVVRRIEIGRGVLSVSLHKQSLRALLADNNSDGEHNAAEPHADDQLRIDVPIASKRRGVELKLVITDHREQPSRPDVNLIKTIALGRKWFGQIKNGDVASVRSLSKRLGLDQGDLSRILPLGLLAPDIVEAILAGRQPIELTASRLKRLPELPISWQEQRRVLGFA

SEQ ID NO: 226 - protein, 570 aa, unidentified
  source 1..570: note = uncultivated organism
MARKSRYATETPKKNKAAVLLAGVYSRLSIEDEDDEEQNSIGNQKKIVLDFLKDKTDILVSEYYSDNGYTGMNFNRPDFQRMIQDLQAGKINCVIVKDISRLGRHFVMTSEIVEKMFPMMGVRLISVNDDYDSADENCSSADLLLPFKMVMNDSYVKDISKKIRSSINAKIEQGEYLPSASSIPYGYIRNPEENTYDIDEEAAPVVVRIFEMRANGMSQNAIARILNEEGVPCPGKLRYNRGITKAAKYENALWIHGTLRKILQDQVYIGNRVHGRIKRDKLGMDKIRRPEDEWQIVENAHEPIVSKELYEAVQVEMQKTLEKHKGFKKQEELETDNRDLLREKVFCGDCGNLMRSGKGRGRTDKEGIAKTFVYYNCGKYVDSCHYLCESHYVRQEEIMAAITNALDNQLRVSVDLKQLLKEIQTMPKVAKYQSSTSGQLASVQAKRRNMEKRMEQLLIDLTDGLIDRDEYAYAKQRYSQEHDKLLEEENRVFASTKQLDTIMESCNQWIRALQEYQRFPVINRELLDMLVNRILVYPGKKIKIELAFDDPYIAVNQYLNLVTKEVAEIG

SEQ ID NO: 227 - protein, 680 aa, unidentified
  source 1..680: note = uncultivated organism
MAVAVYLRVSTEEQRERQSIATQREFGERYCQLHSLAVSRVFADDGVSGTVALEQRPDGSQILRDARLGKFDQLLVYKLDRLGRETRLILNAVADLEKLGVRIRSMTEEFDTGTSTGRLMLTLLSGFAAHEHSVIRERCVAGTLRVAEAGAWLGGIVPYGYRKVGEKRDAHLVISGEPIPGLAMSEAEVIGEVFRMASAEHASCPIIAELLNTLRIPCAYVRDGRLALRGKRKERTSGMWRPGRIRWLITNKTYMGVHEYGKRTTSGRPVITRAVPAIVTEAIWMKAQKTLQDNFLCNARSARNQYLLRGLIKCGLCGRTYVGTAANRSNGKRESYYKCNGAHSPSIYGAGERCKAKAVRGDYLETQVWSDVETFIRNPQPVLEQLHARLESDAQGCDQIRKQVTRLEGLLSQKTTERNRVVGLYRRSRLTEADLDTQMDEINKEETALNEQLAELRGRIVGADSIAATVSSAEALLAKLRKRLDEPVSWEMKRRLIEILVTGVRIDTVEEYGVKQSKITVTYRFSEPDQAMPTVLSQSYSSGRVLRIPTQPQTVGDHIRRRRLGLKMFQREVAEQIGVETASVFNWEANTTAPEIRYMPAIIRFLGYNPLAEANGWGDRLVRHRTTLGLSQKKAALDLGVDVSTLARWERGDSEPTGKCLERVICVLGDEEPQHSRRAG

SEQ ID NO: 228 - protein, 531 aa, unidentified
  source 1..531: note = uncultivated organism
MSALEEYLIYLRKSRKDRELELQTGDYDTLERHRRTLLDLAKRRGYLITHIYEEVVSGDTIADRPEMQKLLAAVETGRYAGVLVMEIPRLARGNTRDQGTVSEVFQYSGTKIITPEKIYDPCDESDEEYFEFGLFMSRREYKMIRRRLQRGRMASLSEGKYIAGAAPYGYRKVKLPHQRGYTLEPDGGTADIVRDIFRLYAEGEPNADGTLVPVGGYRIAQELNARGIPSPGGGQWSSGSVRDIIKNPTYAGMLRWGWRPETKKLVDGVIVKQNRVKTDYQPVPGMHEPLVSRDLWNSAQALMQSRAHVPLREDRQITSSLSGLLVCSVCGKRMVRNPGSGRRKPFLYCSTPGCSCVSSRFDTVEEAVLSSLRDWLSAYEVEVSSRTAQQDAKSIQAAERTIEQARKNLKALTEQKSRLYDLLEQGLYSQELFLERSHTLAQRISDAELTISTTQEQLAALRSAQDARLALIPNIQHVLDTFPQLDSPAEKNALLRTILDHAVYHKSVGGRYAESDLKLYLYPKVTSAKDF

SEQ ID NO: 229 - protein, 527 aa, unidentified
  source 1..527: note = uncultivated organism
MNPGAANPVRCAIYTRVSTDQGLEQDFNSLDAQRDAAEAYIRSQAHAAWTLIRNQYNDGGYSGGSTDRPALQRLLVDIRAKKVDVIVVYKVDRLTRSLADFAKLVELFDGHGVSFVSVTQHFNTTTSMGRLTLNVLLSFAQFEREVTSERIRDKIAASKRKGHWVGGMVPLGYQVKSRKVLIIKNEAERVRTIFRRYLELGSLNLLMADLRPHKIHTKVRHLSSGRTIGGIPFTRGPLAHLLRNRFYIGEVAFKGEILPGEQPAILDRKLFEAVQRKLDEQRTNHSTKRASSESLLMGRIFDDRGNRMTPSYARKDGKRYRYYLSSALSQGRAEHAGSVRRIPAPEIETLVIDSVRKRLKENTPTTDYDLINANVGRVEVQATQIVIKLARKGDRTTNRRSNNAVLYVPWKKTNLKRRRELIAPAASSQDIRPIRSETRLALVNSVAYGRRWLDEIVTGVVADVEQIAAREKCSVRQVNMTVSLAFLSPTLVKAAIDGRLPRGIGIARLRDAPAEWSRQHAMLGLAS

SEQ ID NO: 230 - protein, 614 aa, unidentified
  source 1..614: note = uncultivated organism
MHPEQKKDKFINCAVYTRVSVDERAATQAYSTLDNQRDSCLSYIESQKSEGWRVFKAYEDSGQSGGSLNRPAIKQLIHDIKKKLVQVVVVYKIDRLTRSHRDFYSLLEVLNENGVTFVSTTQHFETNSPAGRLLLHVMLEFAQFEREMAQERTYDKRIAMARKGMYCGGRVPLGYDTKNKKLIVNPEEAKIVQLCFELYPKLGSMSRVSRKLNEMGYRTKKFYDQGKKNSGSRGSIKFDKKKISTILANPLYIGKVRFMDKSKKSYLFEGEHKPIIKDPKVWDAAQNLLVSNRETRKSFKQNKYEMLFQGLIRCGECGSTMTNSSKRKNGKVYLYYRCVEAISKGADYCSIRNVSGEEIEELLIAEFKALGKNQALLRKSIEKANGLAKKGLAPLQREKDAVEAQLTKINGDLKRLVNIMKSEDMPQKRVQTLLSEMSDLEESKEKLEYETHRINTNMHHLSRHVIDAETFTKLFAEFPAVFDTFDFEERRKLIVLLVKEVIYTPTKITVKFWGDLPEMDFDIKNPPDWTPPPNDDGDDPSPPGGSHSNGVEAEGRVRNQVRSRVSNGCPAWARTRNLASKGQCDTISPPGNNLFTSKDQRSNGSSSPRSCVCG

SEQ ID NO: 231 - protein, 552 aa, unidentified
  source 1..552: note = uncultivated organism
MNKPLLRCAIYTRKSSEEGLEQGFNSLDAQREACEAFILSQQHEGWKLVPTFYDDGGYSGGNMERPALKQLLADIDQKKINVVVVYKVDRLTRSLADFAKIVEQFDAKGISFVSVTQQFNTTSSMGRLTLNVLLSFAQFEREVTGERIRDKIAASKAKGMWMGGTPYMGYVAHERTLKINEEQARLVRHIHERYLVLGSVRLLKQELDDQGISTPKRFTSTERQYGGRPFSRGHLYKLLSNPVYIGKIVHHDKVYEGQHPAILDIATWDATQALMHSNHQGERKRKAAPSASLLLGLVEDDAGHRLVPSHSQKQSKRYRYYISEPLNKTSRQDVPNGIRIPAQELELLVINQLQDWLSDESTVMEILNPKANQTGEISKALKHRQHLLQKNSKERYELIHRLVTKVSVFTESVEIQINPNALFDDPPHPIELVIIFTQVKIERCGMAMRLLVGNKVALQAPNQILIHSIRTSQEWLERLTTGKATSVDEIAKQEGTTSNAVTRLIYRAFLAPDIVRAIMSGTQPATLTSDLLKKIVPLPLDWVDQRKLLGFK

SEQ ID NO: 232 - protein, 551 aa, unidentified
  source 1..551: note = uncultivated organism
MKTALKIAAAVLVAIYCRLSREDLKNGRKDVSLSIENQQAMLISYAEQQGWTVYKVYIDDDVTGTTFKRPGFQEMMNDIENGKINCVITKDLSRLGRNYIEAGRHRELFSEMGVRYIAIHDNHDSINNDCYDVSTPIKEIMNEMYAADISRKVRSTKKLMAEQGKFANSRAPYGYIKSQEDKHILIVDENVSQNVVRIFELYLNGTPARAIADLLNRDGITPPNEYFYSTIGKPNPFRNNKNSWGSGSVMNILKNPAYYGAISNGKRAVTSFKNKRIICKSFDDWVIVEGTHEPLISKDQWDEAQRIGSKNKRETVRRSADGEVSIFAGIIKCADCGGNMIFNRKEKKTCTDEFYRCSTYQQKGKNVCPPHRIDYDVLYEAVLTDIQKYAVLAVKDEKKLIDRILKANDAFKDKNISRYEKNIRESKNRIKEIDGILQNLYEDKIAGEITADTFKRMAAKYENEQTKLITDVGQMELELDECQRIQQDLTGWITRIKECLKVDAVTRAIAVELISRIEVSEISDTNGEKTLNLEIFYRCGLKNSKNENRAS

SEQ ID NO: 233 - protein, 538 aa, unidentified
  source 1..538: note = uncultivated organism
MNARRPRPGTPPPADKPAALRCAIYTRKSDSAGLEQEFSSIDAQREAGELFILSQVHRGWKALPDRYDDGGFTGANLERPAFQRLVADIGAGKVDVVIVYKVDRLSRSLLDFVKVMETFDAKGVSFVSVTQNFSTADAMGRLVLNLLMSFAEFERAMIAERTRDKIAASRRRGMWTGGQVGLGYDLVRKKLVVNEHEAIVAREIFSLYIEHRSIVAVLRALDERGRTTKRHQAESGRTRPAHPWTKDAALRVLKNPIYAGLIRAGDKLVAGEHQAIVDMATFEKAQALLSGRAPAAAPQRNPAYVLRGLLRCAACGAAMTPGSTRRDGTEYRYYRCLTRDKQGARACITKPLPAEAIERYVVERVRDATATGQLAADVAARLAERIAAERCELLAERQALPGAIARLSAEGRKLAEGVGSSEGAARRLVEERLGHVGEDLAAREARLALVESRLAALAGLEVEGAWVERALRDFGALWEDLVPENQGRLLRAVVERVEHDQQGGRITLHLADLALYPAPRAAAADEAAHAPASGGGDR

SEQ ID NO: 234 - protein, 525 aa, unidentified
  source 1..525: note = uncultivated organism
MSSRNGQTAPGKQIRCAIYTRKSSEEGLEQDFNSLDAQRESAESYVTSMKHEGWVCLPTRYDDGGFTGGNLERPAVQKLLADIEGGLIDCVVVYKVDRLSRSLLDFARMMQVFEQHGVSFVSVTQQFNTTHSMGRLTLNILLSFAQFEREIISERTRDKIAAAKRKGMWGGGRPILGYDIEHRPGGNRLVISKAEADRVRRIFDLYVECGSIMETLRRLDALGWTNKAWTTKAGRAMGGSRFDKSTLFHLLTSVAYLGKVTHKGDIFDGQHEAIIDEETFSRVGSMLKANRTVEGRGNRNQYGALLKGLVRCKACGCAMIHHHTARKTKSGAERRYRYYVCTQAQKRGWTECPSPSLPAPDLERFVIDQIRALGRDDAILAESVRRAQERLRERAEELNAKRNELGKQLEGQRAELQELVDRGADRNGSAARAGALREEISELAAEMRRLNTRIESIRARLLDEDELAGALEAFDPMWERLTTAERERLVQLLVQRVEYDASSETISVTFHGLEEAPEEEPACMA

SEQ ID NO: 235 - protein, 519 aa, unidentified
  source 1..519: note = uncultivated organism
MARGITTASRQSVVSASGHVAIYTRISKDREGRALGVDRQKDECIELAKRLGYDSWEIFTDNDISASTLSNKLRPAYRRFIQEIGQRRFDAVIAYSNSRLTRRVVELQALIDAVRASGIRIHTVSSGQHDLDTADGRASMLTIAVWDQAEAERTAERVKSAQVQRVKDGRWHGGVPPFGYRREDRSLVIDDRESKLIKEAAHRVLDLDDTLYGIVKDWNGRDDFTRKGTAWRHSVLRNILINPATAGTNSAGIEDCWEPILDHDTHSRLVTKLAPDSSRRTNALGVKSSKYPLGGGLIRCGRCGGPLATVSRNDGDFLKMSCRAFMNGDHPSHAPDENGDKGRVSIDAKALEAYLYEQCVAHLDDVPYWDRVKREREEANSDLEGFRKELAARKAERDRAGRAFIAGIMSESEAQSEVARLDSEIARLSAQVDGAQGGPLGVDVWGERREALARWADWRPDRKRLFFRDLIESVTVGDWPAGVPTTTLPRKGESEKDFEARRAGVAREAMLHRVEIVWR

SEQ ID NO: 236 - protein, 539 aa, unidentified
  source 1..539: note = uncultivated organism
MNARSEIKPAVLRCAVYTRKSSEEGLEQSFNSLHAQRDACESYVRSQISEGWTCLPKAYDDGGISGGTMERPGLKALLADIAAGLIDVVVVYKVDRLTRSLGDFSRIIEAFDMAGVSFVSVTQAFNTTTSMGRLTLNVLLSFAQFEREVTGERIRDKIALSKAKGMWMGGVLPLGYDTKDRTLVPNPAEAELVRHIFTRYLTVGSVHTLCEELNAQGLRSKAWTTSKGRPMGGALFSRGALFHLLQNRHYLGEIVHKEVVHPGLHPAILDQALFDAVQRRLASNRVARRKRQVKAATHLLTGRVFDGDGRRFSPTFSTGRTGRIHRYYVLTDLQLGRAGEIHPNAITRVGGEALEALVLAELRRLTDRPGLSAAELPGLLRRIELRPGDTHLVLDRATFIGDDHPDLALQDLDARLGVAERLVMEDSGAALRIALPRRMKLRGGRSWTSFAGAGPVRRTVNPGIVDALQRVHRTKASWSEGREAEYCPHLRSLMTLSPAVQQRLLEGTGPAGIGLAQLLATEPPLRWSEQEAWLLTLAA

SEQ ID NO: 237 - protein, 550 aa, unidentified
  source 1..550: note = uncultivated organism
MKGAIYSRVSTDIQDFTKQTNELKDFAKYNNIDIVYIFEEKESGFNNDRPEFERLKRLTKADIDIVLIWELSRLSRRSIYLQQQVEEFTNKGINIYSKKEGLYTLDQNGKENPQVKFTIAILAAVAEQEVSTLKERTISSKRNKIFNLGNSYTSKPPYGYEYNKETKKLTINEDEANLMKRIFDLSINGYSLKRIALLLNSEGKRTKSNNLWTYTTVFNMFHNTVYYGKAQYRTKSEQSKEGKKYRKKLEFRYVSVPAIITEDVYNRTREKLKSRNSRSNSVNQENDPLLRGLIICPICGYRYTCEKNSGLYTCINVGVKHCKGRTIKISNLDRIVWEITLDICNSDINKETGKNIISEIKSQMENLKREIFNIDKSIDDLKIKADNIFNAAIEVKRNFPNLADLYKDKMNELKPINKDISIYENEKSIKQREITRLEIKEKDIIESRDIVITDKSEKSIILHKVVDNIKIYGYQRGKCCITVEFKNGCICYIYYISKYKFGVDYTWDIKEICDYSIEDKTFTFNEEMNEDLFNKKVAKYIKEKKFIRIK

SEQ ID NO: 238 - protein, 536 aa, unidentified
  source 1..536: note = uncultivated organism
MKVAIYSRKSKITGKGESIKNQIDLCREHMQSHFNVNEFIVYEDEGFSGGNSDRPQYKKMLQDAKAGRFSALICYRLDRISRSISDFSETIEILNSLDISFISLREQFDTSTPMGRAMMYIASVFAQLERETIAERIKDNMLSLARTGRWLGGNSPTGYKSKAVEYYDDSLNKKTIYKLIQVPDEMNTVKKLFRQYLKLGSLCQVELWAMQENLRTRNGKLFDITGIRSILTNMVYVSGDKKIFDYCKKLDMDIASNISEFNGDFGLMVYNKNIIKRGQSNKLRPTSEWVVSIGKHKGVISSSDFIRVQENIEKNKINAPKTIKSNIYLLGPILKCEHCGSSMRTTYGRKRKDGTRLYYYKCILKEKSRSSCCNVSNLNGKNADLLVFDQLKNFRISYPHLHNLLKGERKEILFLNHLNKDNKLEIEKDIINYLSMISKLTESLSLTRDSKSSQYIIRQIEDLDTKIVSCQKQLDDIKKESQLKESERQDMKLIQNIVVDFPSSLDILNLSEKRDIVDKLIKSILWDGRSLKVFIK

SEQ ID NO: 239 - protein, 516 aa, unidentified
  source 1..516: note = uncultivated organism
MSAEERTVRVIKADKSSENSTLRVAAYCRVSTSEEDQLNSFITQMHYYNDFISQSDNMVLVDIYADEGITGTSVEKRNEFKRMLNDCRLGKIDRIYVKSVSRFARNALECIESIRLLREYGVSVFFENDRIDTLTLNSKLILYVKSAFAQSEALATSKRVSTANRMRLEIGEYSICSAPYGFRAKNNELFTVPEEAAIVREVYGMYLSGMGFLKIAQALNRKYGTEKRFWKANSILYILSNEKYAGDALFQKNFTPPVLPLMKRKNKGELPKYYVQNTHEAIIDKETFNLVQEKLKENTERNAKSKSRNNIFAGKLYCAYCSRSFKIKYVNGESYYACSKNKVSEEKCLSHSMSEEVLGRTFIRFYNKLRQNENVLLKDIAAKLTEARRIIICSDSLISEIDKEISVLSEKLDLYISLQKESCMDAVTFSEQCSKLESSLLKLKSRRKKVLAEDGDEKCIDELRRLIRFLDTEPKAIIVFSRPLFEEFIDKAYFEDEYVTFYLKCGLVFKERIAWN

SEQ ID NO: 240 - protein, 598 aa, unidentified
  source 1..598: note = uncultivated organism
MMKKALKHLATEAIQLLRCVVYCRVSTDEQARKENNSIETQKKFAKRCIRLHELDGWKQVKTIHDPGYSAKNLKRPGMKELITMIKSNEVDIIVVYKLDRLTRSIKDFYDLWEICEEYGVELVSATESIDTTTAIGRAFLNLLLTFAQFEREMTSQRLCDKFEEEAKEGYKHPGMAPYGYDLDKKNRSMIQVPEEAKFVKKMFQLMTELSGPAAVAKAVNSQGARTKARVYKEGEAEERNIGGQRWTADKIKRLITRPDYKAVRIHNGSEYQALWEPIVSAKRWQQANDSLNGRNLPKKLRESRNKYELPLKGLITCGHCNCAMSPKPGGKKDKDGNQRAYYTCQEVIRHGKDCDCALRSLPAPQFDAFVTRCVGELGRHPEIIKATIKGAASRQQKSLRPLKSKLAAISKEIKRINSELTNCLTLAKQKGAGNFTKKLLKEADELSKAHEEAERQRDQIRNEIDLIERATTDETLVAEALRNFEDLFSLITFEERLKLMTLLMREIRVSQIEPEKVESMLPEGSVVTQIRTSWYRLDFDFYIKSLFREASTALKKTKQGSYLNINGGEGGIRTPGAISSTTDFESVTFGHSATSPKK

SEQ ID NO: 241 - protein, 516 aa, unidentified
  source 1..516: note = uncultivated organism
MTVRTIEAQPAEKKKLRVAAYCRVSTDNDDQRESLETQKAHYEAWIRLHSEWECAGIFYDFGITGTKADVRDGLQALIYECRIGRIDYVLTKSVSRFSRNTTDCLALVRELLSYKVPIYFEKENLDTGSMETELVLAILSSLAQEESESISKNVKWGNQKRIKSGKFRAGTAPYGYELDGDGRYVIIPTEAEIVQFIFESVVSGTGTHKICKELDRRCVPTRKGGKWSTTTVMGILNNEKYVGDVRYNKTYTDDSFRRHRNTGDVESPEVKDHHEAIISRELYATAHDVLEQRLRERGIRREDEKYQRRYAFSSKIICGACGSTFKRQVISSGISWCCKKHIADKDSCSMKFIHEEAFQSAFTTMLNKLIFTRKILFRPYYNALRVAGSDENLQRIMCLKASIQKNNDRKCELKKLRVKSIIDAVMYNQELNRMEKQNEEARREIQSLGNIESGLMLRETEKLLHFIEAAEMLDTYSEELFISFVDSIIVYSRDSVGFKLKCGLTLKEALCTDTKS

SEQ ID NO: 242 - protein, 872 aa, unidentified
  source 1..872: note = uncultivated organism
MKQKIKKSFDIYDAGLYLRLSRDDADEDGTKTESNSIANQRELLRNFVKSQPDIQIFDIYVDDGYSGTNFDRPEFKRMTADIESGKVNCVIVKDLSRFGREYIEAGRWIEKIYPAFNVRFISVTDMFDSKTADFSEKSFILPIKNFVNESYCRDISSKVRSHQRIKREKGEFIGAYAPYGYCKDPENKNCLVIDEYAADIVKEIFAWKIEGFSLNAIAKKLNRRHEQSPKEYKLSNGINFNSGFQGSSTPKWSSVQIKRILTNEVYIGNMVQGKQERISYKLKARQNKPEEEWIKVTDTHPAIINQNEFELVQRLLKYDGRALQNTGVSNLFSGFLFCGDCKTPMIRKVNKYKGKKKAFYICQTKNKGGACTRHSIQEDVLKQIVLKEISSYMLLFIDYEMSMEKLQELEINYDQVISHDFQISRLQEEYNKYYGLKMSLYDDLKTGLIDKTEFNEFREIYDAKCEELDQTIKYQKQLIREIFDGSVAIKVQIEDWKKAIAQKNGEYVGAKAPYGYCSEKVNGIYKLVIDLEPAKIVRRVFEEYASGRSIRHIVEGLFHDEVHRISDYNRYHHVYRQNEEELFQWSARSVCEVLRRNNYYGDLVQRKRESRFLRGEKGCDELDVSQWIVVPQTHEPIISRELFEKVQSMLNEAERGKNQNLCKADERAFFSVFYCGDCGRKMCTRKIEGRVSYYCGAYQYLDKRKCTSKVISENKMQKIVRDEIVDKFKLSKLRKKDMSGISNSVYEEKIKEIRKEIDCLDNETERRSRELAQIFMKYKEGNVLVDTYKKMKEERDNWKLFCEERKKELEIKIRKLQKQQKEESRFLRSLVDLKGTFHINADLAESLIERMYLYDDGRLEINFRFKEAVENE

SEQ ID NO: 243 - protein, 570 aa, unidentified
  source 1..570: note = uncultivated organism
MATKSFNFSTAGAAQVPAMACAIYTRKSSEEGLEQDFNSLHAQREACEAFVLSQKSLGWTLNSTTYDDGGFSGGNTERPALKRLIADIEAGKIKVIVVYKVDRLTRSLADFAKLVELFDAKGVSFVSVTQQFNTTTSMGRLTLNVLLSFAQFEREVTGERIRDKIAASKRKGLWMGGVAPVGYVPHGRTLVPEVIHADRVREIYELYLEKNCVRKLSEELQKRQWLTPERTTKRAGGGGNKPFSRGHLYRILSNPIYVGRVPHRDEVHPGQHPAIVSEELWDKVQQRLEQNKQGTKTKAHAANPSLLAGKLQDEQGRRLIPSHARKGNKRYRYYITAADEPGDPIRLPANDVEELVIAAVTRWATDKKQVVDAIGWNDAKKASDAIEVGKQLAQNLKLSARDHIADCIHAIEVGPTTIRIALNLVGCGILKTDADATHIEPPVLEVPAERKRTGLAVRLIIGEPGQGQIDARQHKGAKEPDPTMIALLTRARDWYERLTLQGQSIGQIAAQEQVKCYFVGRIVQLALLAPDIVQALEQGDYPVGLNATKLSRMVPLPMDWEEQRQVLGLV

SEQ ID NO: 244 - protein, 589 aa, unidentified
  source 1..589: note = uncultivated organism
MSVDRKPMMRCAIYTRKSSEEGLEQSFNSLDAQREACEAFIASQRHEGWQAIATRYDDGGYSGGTMERPALKQLLADIAANKINVIVVYKVDRLTRSLADFAKIVEALDAKGVSFVSVTQQFNTTSSMGRLTLNILLSFAQFEREVTGERIRDKIAASKKKGIWMGGLVPLGYDLEGRKLVPNPKEAELIVKIFTLYLELGCVRKLAERLDREKVRTKVWITQTGARLGGVVFARGALYHLLRNRLYLGEIRHRDQWYPGEHEGIVARALWDRVQARLNSNLRKRRNRVREQASSLLTGLVEDEHGNRYTPSFAVNRGRRYRYYVSQVAIKNTASEGSGPMRVPAQELENRVMEKLVAFLKSDADVFDALNLADESPAVANRLVTAAKQLAARLASMSSQDLRDLLVSFLWRITIYENRIGIKMGRAELRKQLQSGNKIIPANHSDAKKPLAPSDWISLTVEARRKRCGGEVHLVVPPNSSVSREHPKPPLIKAVARAHGWYEKVVQGKAFDMRSLARDAGLTDRYVRKVFRCAFLAPDIVEAILAGRQPRDLNFDKLCQNLPLSWVDQRELLGFSPANTRRLRPSLVQ

SEQ ID NO: 245 - protein, 556 aa, unidentified
  source 1..556: note = uncultivated organism
MVDPRPAVRRCAVYTRKSSEEGLEQDFNSLHAQREACEAFILSQKSEGWRLVEAAYDDGGYSGGSMERPGLQKLMADIRLGKVDVIVVYKVDRLTRALSDFARMVEDFDRHGVSFVAVTQQFNTTTSMGRLTLNVLLSFAQFEREVTGERIRDKIAASKKKGMWMGGNVPLGYDVKDRKLIVNPAEAKTVRLIFQKYQELGSVRLLKEELDREGIKSKERIDQAAVRSGGVSIARGALYTLLSNPIYVGGIRHGDATYPGQHEAIIDQSLWNSVHRQLRENGPDRQARSRKTTPSLLAGKLFDETGQRLTPSHSIKNGRRYRYYVSNDLATGTADQATNGWRVPAAELEAAVAAAVRAILDDRVGLVDGLREAGVTASEIPGLLNMVTEYPQQVLLGRIADDIPLMVDRVVLQKEGLEITVSLKKPDPSPSALPPAMVRTVPMQMKRRGHEMRLVIEGTHSSVRPVQSGLLKAVARAHRWFEELASGRALSLADIARSAHVSPRYAEAILPLAFLAPSIVDAIARGQQPVALTVGRLNHGYKISLEWDQQKKVFGE

SEQ ID NO: 246 - protein, 603 aa, unidentified
  source 1..603: note = uncultivated organism
MKRVRCAIYTRKSSEEGLEQGFNSLDAQREACAAYIASQKHEGWELINKHYDDGGVSGGTLERPALRQLLRDVEEGEVDQIVVYKIDRLTRSLADFAKLVERLDGAGASFVSVTQSFNTSTSMGRLTLNVLLSFAQFEREVTAERIRDKIAASKKKGLWMGGTVPLGYRPQGRSLQIVPAQAETIRSLFDLYIEHRSINAVQTKADELGLTRPAASRKTATTQKQNGKEGVLEEKTGFARSHLHYILSNPVYAGLIRHGDKTHEGQHEAIIERDTWTKVQDMLQGEARKKRGRSRKQKRSGAAGEQVGFNGKGSCATTGSGALIGKLFDETGDRLTPHHVNKKGRIYRYYVSNRLLAGRSRNAGLNHGEGNNAELESRTPTEKQKPACSGWRLSAPKLEETVAQAIKDHLRRGIAGSLLTTPQAELIAQMHHLLQMVDTDKSSKAPSHLLQMIQRADLAPGAISLALDGDAVASFFDCKVHHLNWDQLMFDVSFQIRKRGVETRLVMGGEQTTALDPILVHNIALGHRICEAITAGTPLEEICEKEGLSRRRLLQLVDHGLLAPDLVRKVLEGHQPVSLTSEWLQRNALPLDWQEQRRVIGLL

SEQ ID NO: 247 - protein, 566 aa, unidentified
  source 1..566: note = uncultivated organism
MLANKKSGVIQLKEKQFYAAMYLRLSKDDEDRGSLNKSESNSIGNQRELIKSFLREQPDIELYDIYVDDGFSGSNFDRPEFKRMISDIEAGRVNCVVVKDLSRFGRDYIESGRYIQKTFPALGVRFIALNDHFDSISADTGESSIVLPVKNFINDSYCRDISAKVKSQLEVKYKNGECIAAFAVYGYRKSDTDKNRLVIDEYAAENVRRIFAWKIEGLALSAIAEKLNSLGILSPKEYKKSMGLSYNGGFSGTGSSGWGSTTIKRILTNEVYLGHMVQGKTEKVNYKVKKHIAKPEGEWVKVENTHEAIISADDFAVVQHLMKADGRRSPDSGTPSPFMGLLFCGDCGQQMVRRVIRYKDTAKVYYICSTKNRGEGCSRHSIEESTLKEIVCESIRKFANSFLKEKELFDHAVQYETNFEAVARYDKEIGRLKKEQDKYYSLCSGLYEDLREGVVTKEEFERLHSGFSQKGKELEAAMQKQEQLIKDMFKKGALSAGRLKTFQDCVELREIDRHTLSSLVRRIDVYENRQVVIDFYFMDAFAVMSGIGRKALTDQAAKAQTAERSA

SEQ ID NO: 248 - protein, 572 aa, unidentified
  source 1..572: note = uncultivated organism
MGMKKLDQYRTGMYLRLSSGDDDRDGKGKIDSNSITNQKLLVEDFMKNRPEFKLAEIFIDDGFSGSNFERPGYQKMMKAVEGGKLDCIIVKDLSRIAREHIGGDELILKTFDKYRVRFIAITDNFDSLTADHGEKHIIVPMKNLINDNYCHDISTKVRSSQQVKRANGEFVGAFAPYGYAKAEENKNQLVPDEYAAVIVQDIFAKKLAGMSASAIANELNSTGVLSPAAYKKKSGQKYSTSFQSAGDSRWSAQTVGRILKDEVYVGVLAQGKRTRINHKVKKEVLVPKCDWIIIENAHEPIVSKADFKAVQILMSRDTKAIAGQKEAYMYAGLLYCGDCGMSMVRRSYLYRGKPVVNYICSNYNRNGKDNCNRHSIREEILDEIILGQLQIYMDNMRDCEALVEHLDELNVNYDEAVAHDKEIAGLRAELTKYTALKSSLYNDLKEGIITKEQFARYRETYTGKEVELETAIQKQEKIIHSIYHKGLAVADDLAKFRENFRIKELDRLVLVTFIDRILIYDDTVEIIFKYSNEMAKVAGIVQTANELLEQEVLEADAKIIDGNYVIELREVC

SEQ ID NO: 249 - protein, 624 aa, unidentified
  source 1..624: note = uncultivated organism
MRKIAIYCRVSTDEQAKNKEGSITSQIQRLRMKVEEKNRYENGKWGKVVDLYKDEAYSGKNTDRPEFQRLIADIKKKRIDTVMVTELSRLSRSVADFLNFINDMEKLGCDFICLQYDFDTTSPAGRVFMTIIMALAQFERELTAERIKNNFHSRALRGLLNGGHPFLGYDKDTKNSGRLILNKKEANLVKEIFNLYFELGSISAVAHELNKRGFVNKMWVGKDGQAKGGNPFNHDHIWRTLTNPAYIGKREINKSNKEVAPELLKFEEQYSYVDASWEAIIDEARFNQVQERLNMNKQVKSAPKHDFIFSGLLTCDECGSPLFGQSGSGRNGTHFYYGHKGASSCRIKRYPAIELETLVKKQAFSFLNNQAMKEHFVEILKDMNNSRPKVNQSLVKMKEKELEKTQAEIDQLVTIMATNSNAARLNSLINKLEESEKKLVLLKEETESLKQKLDSDHEREIDIDYLLGGIDLLRSERFRKANLAKKREILRNIVKTIHLNPENVIMVDFWGTERQSEAVREAHKGQSGVVLPFRKLGRPLEASFGGAECGEKMAEIKKAAEIGVYLGGFLMDDGSSSVRFGGGGGNRTPVRKSSTLRHYRFSLRLMICKQVHKQTHLQIFPQKI

SEQ ID NO: 250 - protein, 515 aa, unidentified
  source 1..515: note = uncultivated organism
MNPNVTVIQPTITAKQKQKIRVAAYCRVSSDSADQLNSFMTQMRYYENFLADSKTETLISVYADEGITGTRMDKREEFQRMLKDCRRGKIDRIIAKSISRFARNTKECLTVLRELKSLGITVLFEKENIDTANISDEMMITLMGGLAQEESVSISQNMRWANRKRMADGSYKISCPPYGFSICNGRLEINETEAKIVRNIFTWYLSCYGITKIANILNDLKIPSSISKSAWSFFSVKYILTNERYIGDAVFQKTYKTTTLPYMKKINHGEYEKYYVSGINDAIVDKLDFEKVQELLAIRGQTAQSTCCEHPLSRKLICGFCGATFKRKRCREKYYWVCRTHNENAEKCGGQRLPESKIYETFMRVYNKLKSQYSVIFPPIISQLQELKNRKFSGNQQYMEIAKEIAKLKEQNHVLARLKTKGFLDEAKYLEQIAELNSKINKLSREQHKIVRSDGEDDMIDQIKDIASIIENGMELMTEFNEIMFESLVEKIIVINQNELEFHLYGGLKFTERLV

SEQ ID NO: 251 - protein, 589 aa, unidentified
  source 1..589: note = uncultivated organism
MSRNQNNILHCAIYTRKSSEEGLEQSFNSLDAQREACEAFIASQRHEGWRVVATRYDDGGYSGGTIERPALKRLLEDIAANKINVIVVYKVDRLTRSLADFAKIVEALDAKGVSFVSVTQQFNTTSSMGRLTLNILLSFAQFEREVTGERIRDKIAASKKKGMWMGGMVPLGYDLEGRKLVPNPKETELIVKIFSLYLELGCVRKLAERLDREKIRTKVWRTRTGARLGGVAFARGALYHLLRNRLYLGETRHRDQWYPGEHEGIVGRARWDRVQAQLNSNLKKRRNRVREQVSSLLTGLVEDEHGTRFTPSFTVRRGRRYRYYVSQLAIKNSASEGVGPMRVPAQELENRVMEMLPAFLKSHADVFDALNLAEESPSVASRLVTAAKQLAARLASMSSQDLRDLLSSFLWRITIYENRIEIKIGRTELRKQLQSGNMIIPVGHSDGRKTFTPNDLINLTVEAMRKRCGGEVRLVVPPSSGVLLQHPKLPLIKAVARAHGWLEKVIEGKVVDIRSLARDAGLTDRYVRKVFRCAFVAPDIVEVVLAGRQPLDLNFDKLCQDLPFNWVEQRELLGFSPASTRRSRPSLVQ

SEQ ID NO: 252 - protein, 549 aa, unidentified
  source 1..549: note = uncultivated organism
MASVPRLRCAVYTRKSSEEGLEQDFNSLHAQREACEAFIRSQKHEGWVLIPAAYDDGGISGGTMDRPGLQQLLADIAARKIDVVVVYKVDRLTRSLADFARMVELFDQNQVSFVSVTQQFNTTSSMGRLTLNVLLSFAQFEREVTGERIRDKIKASKAKGMWMGGSVPLGYEVKDRKLLIQPEDADLVKLVYQLYLDLGTVRRLKGYLEQHDIRRRNNPYPWSGGMLYALLSNPIYVGKIVHKGVQHQGQHEALMDQHLWDQVQAKLTDNKNGKQGKHRVTEPCPLTGKLFDPQGRRMVPSHSQKRGRRYRYYISADLKSSAEDSGHGWRLPAKTIETAVVDTARDILLKAQIDHVADADTTTDQVALTIQQRLHLTQQLPTTAERLTTGEILSILIHRVDVAPDALTLTLDLSSLMLATDRPAGCFLSRHVIPVTLKRRHNELRLILKSPTARPSNIDQTLLRNIAKGHVWFRDWMSGQVGNLKDIADREGVSREYVADVVQLAFLSPKIVEAIAAGLQPIELNSRKLLAKNAIPLRWSEQAEQLLGR

SEQ ID NO: 253 - protein, 564 aa, unidentified
  source 1..564: note = uncultivated organism
MKEVIKGKIAIYSRKSKFTGKGESIENQIEECKRHIAYKYNITDTNEILIYEDEGFSGKNTKRPQFQEMLKACRNHEISMIVCYRLDRISRNTIDFALLYKELERLDINFISVTENFDTTTPLGRAMLSISSAFAQLERDTIAERVRDNMIGLAKTGRWLGGTTPLGYTSIEIKTPVDIEGRIRTAYRLKTDMEQFHIARLIFDKFMEFHSLTKTETYLLNHHIKTRNGKPFARFGIRAILSNPVYAAADKDSLNYFTELGTIVYNDPSEFDGKHGLMVYNKTDQASEIPHKLHDYSEWIVAIGKHKPLVTGKEWLKVQELLEQNKSKSYRKPKNNTALLSGLLFCGDCGSFMRPKTNRRFDENGNKRFSYLCETKEKSHGQLCDMKRPDGNLLDKMVCDEIKKIAHGEDNNKFREQLIMAKKQLLSKEISNTTELDHLHKTLSDTEKKIENLVLSLSQASESPAFAYINEQITALHEEKLQIEKQIENLNEHLKNQNLLLANFDVLITKLSSFSDSFDMMSVEEKRTTLKILIDKVVWDGAHVHLYFTGSTDEFAKPQGGGCK

SEQ ID NO: 254 - protein, 516 aa, unidentified
  source 1..516: note = uncultivated organism
MSQAAPNPVRCAVYTRKSTDENLELDFNSLDAQRESAEAYIASQKGAGWVCLPNRYDDAGFSGATTERPAFQRLLAAVEAGEVDCIVVYKIDRLSRSLMDFARVMDTLDRRGVSLVSVTQQFNTTTSMGRLTLNVLLSFAQFERELISERTRDKMAAARRKGKWTGGPQVLGYDLARDSGGPRLVVNAAEAEQVRSTFEQYLALGSLADTCEWIDARGWANKRYTTRKGKERGGKDFDKSTLQKMLTNRLYLGKVTLKGQVFEGEHEPIVGEDVFGRVQGMLARNRNSGGKFQRNKYGALLKGLVRCRHCGCAMNHHFATRGNRRYRYYVCQSAQQKGWAKCPYPSLPAGELERFVFERIKETTRDPALLAEVVGRARSEIDRQVEALKERRERRERRARRLNEDLCELTRVPDAPGTAAELASVQDDLVKVEKSIVDINRRIVELEARRVDEDEFVGAFEAFEPMWDRLRPAEKGKLIHLLVQCVEYDGEGDEIAITYHPVGLETLSEMEAACDG

SEQ ID NO: 255 - protein, 528 aa, unidentified
  source 1..528: note = uncultivated organism
MKTAKNITVIPATLNKHTGLPTKKAYRRRVTAYARVSTDSEEQQTSYEAQVDYYTQYIRSKPEWEFVGVYTDEGISATNTKKRDGFNRMIQDALDGKIDLILTKSVSRFARNTVDSLTTVRRLKDAGVEVYFEKENIWTLDSKGELLITIMSSLAQEESRSISENVTWGQRKRFADGKVTMPYRSFLGYRKGADGNPEIVPEEAAIVQRIYAMFMQGKTTSAIAKILTAEGIPTPGGKAKWAVSTVESILKNEKYKGDAILQKSFTVDFLQKKMKRNEGEVPQYYVRNSHPAIIEPEEWELVQAEMARRKELKQRYSSHSVFASMIFCGECGGYYGSKVWHSTDKYRRVIWQCSDKFKNDHHCGTPHLTEAQLQELFLRAFGKVVSLRDVILEDCLLVQKELLDCSDFDTQQQHLEEEMRIAADLVRYCIEENALKVQDQAEYLMRYDQFTQRYEKLKKKYDALEAERQRRKEGHDRLGAFIATMEQTKTVPVAFDADLWLVTVDHVTVNPGAAVFTFKGGMEITEEI

SEQ ID NO: 256 - protein, 517 aa, unidentified
  source 1..517: note = uncultivated organism
MKVNNSPDKVAPDKVAIYIRWSTEDQGLGHTLEIQRESSRYYALSQGWSVRDDLTFIDDGHSGGSLERPALTRLRRQVRAGRVDCVVVYKLDRLSRNIKDIINLVLDEWDGICCVRSTQEPVDTTTDAGKMFFTMLGSFADFERATIKTRTWSGKLKNAEQGRNPGFPYPFGFRKGETGGYEVVEAEAAVVRQIFDLYLRGQSCHGIARMFNEQGIATRGGRGWADAYVSAILRNPIYFGRLVFNRQAHARGRKLGKVILNDANQVITVDGAAPAIVDPQTWEQVRRIAAQRPRVDRTGSPRTRSSAFLLTGLARCTCGHSIVGYYGGKGYKPYYYCAGAQKKGPAICVAGMVQARALERFVVERVRATWPLRGAFRADMLAGLNDRLRQHDAAGAALQARLDALSRHLERFKHDYQAGKLAADLYSELTAEARRERDELVARLRSAGALRQELAAARVDLDQLETWYGKLNDWETLETAEQKQVLQMLIAQVSVFRKRRTDDVHLHIDWRLPKPVR

SEQ ID NO: 257 - protein, 564 aa, unidentified
  source 1..564: note = uncultivated organism
MERAKSPVQRCAVYTRKSSEEGLDQDFNSLQAQREACEAFIKSQAGEGWRLVKTPYDDGGISGGTMERPALQRLLSDIDESRIDLVVVYKVDRLTRSLADFAKMVEIFDAHHVSFVSITQQFNTTTSMGRLTLNVLLSFAQFEREVTGERIRDKIAASKKKGMWMGGFCSLGYDVRDRRLVVNQEESKTVRQIYKRYLELGSVRLLKHDLDRRGVVSKIRVTKNGARSGGRSFSRGALYELLANPIYIGEIRHKKVRHPGQHKSVVDRQTWEEVQKRLRDQTTRDRIPKIRAAANVLAGKLFDEHGEPLYSTGAKGRHGGRYRYYVSRELVRGGGSSLDAEKRWRLAAAELEQSVVVSAQRILDDQAAIATTLQEAGLPSAEIQSLLKAAEAKRGSLRSGSQAAPTIVELVKRVDLRKNGIEISMNLESLLPRDSGISGAPSMTFTRFAPLQMKRRGVAMRLVIGGGVSTRKIDPTLLKSVARGHKWFNELVSGRAVFTREIAAREGVNERFVRRLIPLAFLSPAIVQAIAEGRHPADLTGEALSRGIEIPVEWAKQNAALGFE

SEQ ID NO: 258 - protein, 555 aa, unidentified
  source 1..555: note = uncultivated organism
MNSRIRCAIYTRKSSEEGLEQSFNSLDAQREACEAFVKSQQHEGWKLIAGHYDDGGFSGGNMDRPALKQLMTDIHAGKISVVVVYKVDRLTRSLADFAKLVEQFDKFGVSFVSVTQQFNTTSSMGRLTLNVLLSFAQFEREVTGERIRDKIAASKRKGMWMGGNVPLGYDARDRRLEINEADAVTVRTIFNEFLRLGSVHRLQDWLRENNITSRRGNHFFRGPLYMMLRNPHYIGLIKHKKLTYPGEHAAIIDRETWDKAQTLLNDNIQGKRRKVRATKESILTSILFDANGTLYTPTHANKNGRRYRYYTSQAVIKKTGNSNAPARIPAHDLEKAVVDRMLQWLQTPTELLAAIRDETTVAPLEGIFAKIIAQAATMAQSWSEHIAEDRTQFLKRVIVRVIIHPLHVEIRLRVPALLNEILGGGEPAIDLPQIASIECPFRHVRQGRAVRLVVGDTNITTDASRQAILNAIARARLWYELITTGKARSTSELAGLHCISPRFVNEQFKLILLGPQSIECLMTRPESLPLSLNDLLTSIPMNWREQPFGLSAKSA

SEQ ID NO: 259 - protein, 547 aa, unidentified
  source 1..547: note = uncultivated organism
MAQKRRADAEAALPKRRVWNIAVYIRLSREDACCPDESESVANQRKIIEAHIAGLRDGDEYRIVDEYVDDGISGTTDDGRGGFQRMLSDIRRGRVNCVIVKDLARSFRNYSDQGYYLDDWFPRHNVRFISLSHQPLDSYREPQGMRSIAVPIQGVLNENHCAETSEKVRQVFDMKRQNGEHIGSFAAYGYLKDPCDKNALVIDGEAAAVVRDIFRMFLDGMSKNAIVRDLNSRGILSPSAYKRRRLGLKYQNPRVDPARPSLWCAMSVTSILKNRMYCGDMVQGRYRMKSYKVHIQETVPEDEWYIVEHTHEAIIDRGTFEKAQRLLKRNTRTGPGQNRLYLFSGFLKCADCGRAMTRSQVGNVVYYYCRTYKNQSKAACTKHTIRHDRLETAVLFAIRQQIYLTVDCAKIIEQIDRAPLAKSRPGKPADAAGQTERELARITRYKQAIYQDWKDGEISHSDYRHMKEDYDRQSHELKRLLETLRSEQERPEGGADAEHPFLASFRRLQNIDRLTRDLLIELVDHIEIHEKGRIRIVFRFADGLRPA

SEQ ID NO: 260 - protein, 567 aa, unidentified
  source 1..567: note = uncultivated organism
MARKSRKNAVQETVAVESAEHIYKCALYARISVENERKREADTIGNQMQLLNDYVSEHSDLTVYDLYIDDAISGVNFVRPEFSRMMNDLRDGKFDCIVVKDLSRLGRNYLESGEYIELVFPFFQCRFIAITDRFDSKYQQADFSIQLKNLANEMYAKDISKKITSAKRIAQEQGKLTTGRAPYGYLIDPADKDHLIVDEEVAPIVRQLFEMVAAGSTLHAAATTMNERGIPSPGRLLYDRGIATTDKFQNSRWYMPTIRRILTDEVYLGWMVSGRQRSAYRTTGQKKAIKVPREEWIVTKATHEPIVTEALFYKTQEYFVKTKEKYGKASLYNMRSRKASVLTGHLRCGECGKAMHLRKKKDHSSQEQNWYFCPMHEHYNSTYCTKKAVKQEDVESVVLKLIQAQIKLFTDSRELCLSLNKRSSSKTKFRIYCDHIREVKGQIDRYMNSKAALYEDYADGTISQEDYLSMGQQYAQKADDLRIFLAELEQESQKYSQIYQSGSSWAHLAEQYQDIDELTEEVVDAFIDKVTLYNNGYVDITFNFRDEMDEVIHLAAIRRREAERYAI

SEQ ID NO: 261 - protein, 541 aa, unidentified
  source 1..541: note = uncultivated organism
MSASPQRKRCAIYTRKSSEEGLEQAFNSLDAQREACEAYVLSQAGEGWECLPTLYDDGGWSGGNMDRPAIKQLLDDIRQGRVDIVVVYKVDRLTRSLMDFARIVEIFDAQNVSFVSVTQAFNTTSSMGRLTLNVLLSFAQFEREVTGERIRDKIAASRARGIWMGGNIPIGYDLGDRRLEVNDADAATVQHMFTRYTELHSLTALAHELRQQGIVSKRRTSRSGCTTGGVTLSVGAISHILNNRVYLGEATHKGKSYPGEHAAIIDPDLFEAVQAILAGHRIRRHTRKTRAASSPLIGKICDSDGQPMCVSFSYGRGSVMYRYYVSECLTVAGRFKAGASNYQGIRLPATRTENAVAEMLAPLAISPVGPDHIFSALERLTVMEHRLLVEIDGAGLFPEGTSTALMLARAQVIDPDAIIAGSLIKLSVQSTLVHKGKSVRSPDAAMMGSDGKSELAELVRTAHRYLAKMNASPQSPTNHAVMSAPATEWIRRRIVVGLLAPDIQKGMLAGTLPAHVTAHWVLAHDWPLNWDEQRRMIGKGG

SEQ ID NO: 262 - protein, 565 aa, unidentified
  source 1..565: note = uncultivated organism
MSGKHIRCAIYTRKSSEEGLEQDFNSLDAQREACSAYVLSQASEGWKLLPDFYDDGGLSGGSLERPALQRLLADVKQGRIDIIVVYKVDRLTRSLLDFARLVEAFDAAEVSFVSVTQSFNTTTSMGRLTLNMLLSFAQFEREVTAERIRDKIAASKAKGMWMGGTPPLGYEPDERSLSIVEEHAAIVRDIFARYRRLGNVRLVAEELARERIRTPRRQTANGKSYGGCAFTRGKLYHLLKNPIYAGDIAHKGKTYPGNHPAIITREEWDAVQQQLTENVRGTRTAREASAAMLAGKLFDHTGEALIPVHTSKPCARGGTATRRRYRYYVSRNAHHDAASSSCDTMRIPAREIERVVASELVKALADPLALARQLKIDIAPAQFAMVTGRLQQLRTELGNHRRSSIKSLIDRVIIHPDRLELVISAQALAEMFELHLGSDAPATISHMANIHLTRSGQSLKLVDDSGIPAGSRGPDPTLLRLLVQAHHWWGILSRGEMDATRLANQEGVSVSWITRVARLAFLSPQVVEAILAGKTPAALDGKALLATGAIAPHWSEQACRMLAQT

SEQ ID NO: 263 - protein, 522 aa, unidentified
  source 1..522: note = uncultivated organism
MPKVRVIQATKGTLADRLPVAAYCRVSSNSEDQHHSFVAQVKEYTTRIAENDKWELAGIYADKGISGTSAAKRPEFQRLIEDCRQGKVKRILTKSISRFARNTQECLEYVRELKMLGVTVYFEKEGLDTADIAGELLISVFGSLAQEESTSIGGNMRVSYNYRMEQGRFVGCCAPFGYFLKNGTLIINEAEAAIVRKVFEWYLSGIRKTDILENLKAMQQSEPSRMKWNLSSLNYILRNERYIGDALLQKKYTPQGSNGVRLLNRGELPQYYVEMSHPAIISKDTFQKAQNLCAMRRSNMPSVINPTKDYLAHKIFCAECGHAFRRKKQPNGSVRWVCKTHDEGSQNCITPPVADAHIRRVIGDTMNVMVSIIDTILFPMITQLSRLRERSIMGNEDVNAFNQQILSITDQLHAVSKLHSLRILDVVAYRERSNALNAQLGEVQRKRKLLISGTVKDDKLEKTEALISILQDAAQTPASIEDGGVFEQIVDKVLVDRNKKIVFRLINGLELTGSAGNGDGKE

SEQ ID NO: 264 - protein, 603 aa, unidentified
  source 1..603: note = uncultivated organism
MGRSQNGFNSRYERKSLRFLDTTQPITVAIYGRVSTEHEAQLSALENQMAWYEMQVASHPNWTVYKTYVDPGISGTQMKKRPQFLKMLEDAKNGQFDLIFTRETCRFARNIEETLRVTRELADFNVEVFFHFEDIWTFAERDMDRLVDYARRAQEESHRTSERVLSGQEISRKRGVLYGNGNILGYNRVGDTYVIDPEQAETVKMIFDLYLQGNGSVKIANELTERKRKTASGKVKWDATTVMRTIRNRTYAGMNCYNKSRSNNYLEQKRVNNLDMDTYEYVEGNFPPIISDEVWKKAQQLRESRTTTPAEPGEQKRARRSSADIWVQKLRCSCGKCFRKNVWYKYKDGTYAYGYQCYNQLNNGTKKNRQRLELDTEGFCDQKMIADWKMDFMAKAVAEDLWQNRTEAVNLALDMIKSFYKEEQSGGNATFVSAIRADIKKQQKRLDNLIDMRADGEISREEFAKRRKAIDDELTSLTKELELQLSQKDAQSAMNLDGISDALNAMAGLTADDIDPALLSKMVSKVVPTTEGTFDWYLNLGGAEQAKATISADGRKTNAVINLEDIVQVAPHSEAKPQAVLDAKNSYQYTLRDRLLSRANGLT

SEQ ID NO: 265 - protein, 518 aa, unidentified
  source 1..518: note = uncultivated organism
MKSMTKIDATVGSAIRRLKVAVYARVSTSSDEQLLSLEAQKQHYEQYVNDNPEWDFAGMYFDEGISGTKTTKRDDLKRLLDDCKAGKIDKIITKSISRFARNTADCLEMVRTLQAMNVSIYFEKENIDTGLMNSELMLSILSSIAESESRSISGNTKWSIKNRFENGEFIVSTPPYGYRNQDKKMMIDEEEAAVIKEIFTMTVNGFGCHKIAQTLNNRKIKTRKGKQWHPSTIQQIIKNETYTGDLLLQKTYTDKSFNRHVNYGEKNMYLVQDHHPSIISKELFEKAQEAVARRAREKGLIPGTEKYQSRYCFSQKIICGECGSVFKRCKHQKPDYILWACQTHLRDKHSCSLKAVKDEEIKAAFIRMICKLHSYGKEIMDPFIYSLRGYDNKEKLIQIQELDQRIDDTTKHLNVLDSLMAAQVLENNVYLIERKNLMQEAKNLQQQREAIANDINGDVKHLNEAQNLLKLITKKDPSSTFDEDLFLQIVDKITVHSQDFITFNLKCGLHLEERLVHI

SEQ ID NO: 266 - protein, 509 aa, unidentified
  source 1..509: note = uncultivated organism
MKRIAIYSRKSKETDTGESIKNQISICKNYFKNQNFKCSFEIFIDEGFSGGNTNRPAFKKMLKLCTLKKFDIIAIYKIDRIARNITDFFSIYNKLEQNNITLISVTEGFDATTPIGRMMMTMLAGFADMERENIKQRVKDNMYELAKLGRWSGGTPPTGYKSITKVINGKKYTYLSLINEECNNIISIFELCAKGYTSTQIGKRLNMNPKTILNIIQNPTYLKSDIPSKNYLESIGFKVYGEINGKGYLSYGRRPRKNGQKLNNAPNMFVSVSEHEGIIDSSLWIKANNQLSKRSKKAKPRTSTNSFLAHLVKCSCGNYMFISSGRKRKDGSKSFYFRCTSKVNKNLVCNNKKSLRVDLAEEYVLNELLNIKISEDLLKEYILNNTNHNNLNDKIKSIKNKIQSNNIAINNLSKKLLYVNGNTLSILNDKINNLSLENSNLNNELLDLNKKSILGNVTINSDVLKKKLNILLKNFRSLPLDQKQIFIRSLIKEIIFDGDESIEIIFNDC

SEQ ID NO: 267 - protein, 528 aa, unidentified
  source 1..528: note = uncultivated organism
MSKPSKEAKKIIRCAIYTRKSHEEGLEQEFNSLDSQRDSAENYIASQQHEGWVALPNRYDDGGYSGGNLQRPAMLRLLADIEAGEVDCVIVYKVDRLSRSLLDFARIMGTFDEQNVSFVSVTQHFNTTHSMGRLTLNILLSFAQFEREIIGERIRDKIAGQRRRGKWAGGIPVLGYDVDRTGPSPKLVINNDEAVHVRRIFAMYLEMQSLLPVVEELERLKWSNKSWQTKSGKARGGYLFDKSSLHAMLTNQIYIGRVKHKEESFKGEHQAIVDRQVFDAAQAMLRSHSHGKGTRLSNKYDALLRGLLICPKCEKAMVHNVARRDSRVYRYYTCQTAIKRGYTKCTFPTLPAAEMENAVVDHIRCIASDAELRRDVFQQSQSQSQLELEGLESQERSLVARMDRCHEEIDRMTTTASKTSAATDRLATLHEQVAQVERTLATVRSDTEALRDRRFSEHDINAAFADFDNVWNALTTTEQTQVLKLLVERVHYDAKDSTIAITLHPSGIKSLTQNNAPESTSPIKELRS

SEQ ID NO: 268 - protein, 510 aa, unidentified
  source 1..510: note = uncultivated organism
MDPTHEDTLKDQLRAGVYARLSETYDAAESVPTQLAKGTAHAERRGWRVAATFKDDGYSAFKEISRDDFIRLIEAIEHGDIDVVIVRDIDRLTRNLTDWNQFEKACVRHAVRLSPYTGGDLDLSTPEGAYYGGMETLRAKRESAVKSVRVREGAERKARAGKRWGGGSLWFGYVRVYANPDEPEPRKRHILREELNPVQAEALRHAAHRILDLGETIGSIIRDWDERGIKPVTAPEWSPSSLVQTLTSPRLAGFRQWQGVKYPTTDWPAIFDADTHERLVKLFADPARRTHLGRRHAYLLSGFARCPKCGAGMHYRNWNGRRSNSYACVKGPSRGCGGAAIKADLLEEYVTGAVLDALESPTVQEALRDSQDGGAPRRAELLATIKQAEETRADARRDLAEGTIDRTDWLDIRARTEQIITKARRDYDRLSGSATVLSDIPPAEQVRQAWESWSTDRRRAAIRSVLHAINIKPLPAGAASNPAGSAKDPAIRRERETAILRQRVEFDWRV

SEQ ID NO: 269 - protein, 529 aa, unidentified
  source 1..529: note = uncultivated organism
MAVALYARVSTTRQAEKDLSIPDQLRQLREWCARQGLEVGREYVEPGASATDDRRAIFQDMIAAATAKPSPFEAIVVHSLSRFFRDHVELALYERKLKKAGVKLVSITQQTGDGTSGELARSMFALFDEYQSKENAKHTLRAMQENARQGFWNGSRPPFGYCTITVEQGSGKAGPKKKLAVEEAEAALVRKVFHLYLHGLDGETMGAKNIAAHFNAAGVLVRGQRWSRNRVHRILTETAYMGTYLFNQVNVRTGTVKPREEWIPMTVPVIVPAEVFEAVASLRHERSPEVTPPRVVSSPTLLTGLLRCANCGASMTLITGKGGKYRYYKCNTRIAQHANACSTPALPMEKLDAKVLEALADKVLAPQRLKALLSELKGQLKQAREERADGLRELRKELAELDTAIERLYEAVEKGLLPMDDTLASRAAKLKNRREALLRDIDGAKQAGETPLDLLSPATMDAFARVMRKRLLDPSSGLPKRYLHELVSEITFDGEVVRMQGRNAALLAAAAGKKMDTARVPTSGIGWGG

SEQ ID NO: 270 - protein, 548 aa, unidentified
  source 1..548: note = uncultivated organism
MAKDHEVGIYVRLSQEDSRAGESVSIENQKLMLMKHVKEMGWELKEVYIDDGFSGTNQNRPSFQRMIADVKQGFINTILIKDLSRLGRNYLEVGNLAEVFLPENGCELISLNEKIDEMMFLRNWFNEQYCSSTSKKVKAAKKICAENGKYLGSYAPYGYIKNPENKHKLIIDDESANVVKRIFALRAQGKGYKYIAGHLNEANIAAPRDYYYRQKDETNPTRSNHLWNDRTVYMILKSEAYIGNTVQAKIGTVSYKNSKIVRKPEEEWITAVGTHEPIIEPDVWEKVQYLRQKRYQPRVKSDGTFSIFSGLLVCADCGFKMRSHSKRKTRKDGSLYIRPTFICGNYARSGKTACTTHHISEDSLKELVAEQIREHAKMVTHDEKQIIEHILRLQNDEAATSRAAFESELKNHRTRLTLLEKITAKLYEDRVTGAVSETMFKTLIQKYEQERSDRQQYVNTLEARLSSIRQDSDNAAAWAKLIRQYANLEELSAEAMVTLVDSIIIGEALSADDRQIRDIKIIYKYIGDADKLTAGTGEVVTEYERQAV

SEQ ID NO: 271 - protein, 554 aa, unidentified
  source 1..554: note = uncultivated organism
MADTRRLRCAIYTRKSTEEGLDQSFNSLDAQREACAAYVLSQQHEGWKLLPEFYDDGGFSGGSMERPALRRLLAAVRAGRVDVIVVYKIDRLTRSLADFAKIVEVLDAANTSFVSVTQAFNTTNSMGRLTLNVLLSFAQFEREVITERVRDKIAASKARGMWMGGTVPLGYRVQDRKLLVVPEEADTVRQIMERYIGSGSVRELVAELRRDGFRSKVRIGRDGRQRGGIPFERGALYNLLSNRTYVGETVHQGKIYPGEHEAIVSRELFDAVQARLAERTNARSPNCSRIPISMLAGMMFDQLDRPMSPTHTRNHGRRYRYYASNLNDDASAPVQRLPAGDLEAALCRAIADWFSRPVNTRELAMGLDTPALAKLVEGGQSLGRELATASLGDARMILQQLGVRVVVTSAGVTASFDPAALLTRAEITSNATDRIELAIATGSVSHGHEPRLRLDPPADVTSPRDERLVELILRSFVVRDQLLAMTQGEVSAIPATSLRHLERVARLSYLSPDIVTAILDGTQPRRLNARTLSRMAALPLSWTEQRRVLGFAPA

SEQ ID NO: 272 - protein, 532 aa, unidentified
  source 1..532: note = uncultivated organism
MEKMLKIDGNLAVQPGERRVITIAANEKTEDATLRVAAYARVSTASNEQLNSYAAQNRYYTDFITAHAGWKMVDIYADEGISGTSTERRDDFQRLMADCRRGLIDRVLCKSISRFARNTKECLEAIRELKSIGVSVFFEEQKIDTATMSSETITVIMASVAQKESETIGSNMQWSYQKRMERGEFLTNTPPYGYRLIDGDLVVDKEQAGVIRKIFRQYLTGQPRKEIADELNKEGIPPCYGANQWKGSSIYHILTNERYTGNALLGKTYAADTFPHKRLKNKGERKQYYVANSHPPIISQETFDKTKALLERRLSVESCAPKVHPLQKQIYCGCCGAVFKRQQPRETEYWICYSRYESKEECEMPSISTETIEDAFCRLYYKLKHYGEPILSQMISTHLEIKSRRMLWSLDVIELNKRIADLTSQNQLLSMLKQQGLVDSDVFISRSNTIAEQLQKSKQEKSRILEVKGDQTVQQTQELIDILADGPERIDVFDADLYSSLVERIIVEDGDHISFQLKNGLRLKERIERMRR

SEQ ID NO: 273 - protein, 533 aa, unidentified
  source 1..533: note = uncultivated organism
MKAVIYARYSSDSQREESIEGQLRECKEYAERNGITVLSTYIDRALSAKTDNRPDFQRMIKDSANGLFDIILVWKLDRFARNRYDSAHYKAILKKNGVKVVSAKEAIAEDSTGILLESLLEGYAEFYSVELSEKIHRGQKENALKGLNNGGGIPLGYVLGSDKRLAVDPMTAPVVLEIFTRYAEGETVRAIVESLNERGLQTKHNKPYSLGSFNAILKNRKYIGEYRYQDVVIPGGVPAIVPQELFDRVQARIARNKRAPAMSKADEAFLLTTKLFCGKCGRLMVGESGTSHTGKKHYYYKCGSAKRKTGCTKKAVKKDWIENLVVERTMQMIFDDTTLNAIASMVLDVQARENTSLPVLKAQLAQTEQGIQNMLNAIQQGIFTVSTKQRLEELEATKEQLTVSILQEELQKPHLSKEQILFFLQRFRAIDTTKQEQRQRLIDSFVNAVYVYDDKIILTFNYQDGTETITLDDINGSDLEAGCPPRKTLKPHGFEVFSYIWQIAQSRFCVEFMLNAREKRPQKILCNRRSSTV

SEQ ID NO: 274 - protein, 543 aa, unidentified
  source 1..543: note = uncultivated organism
MAGKPAVRCAIYTRKSTEEGLEQAFNSLDAQREACEAYITSQKAEGWIALSHRYDDGGYSGGTLERPALQHLMRDIEQSKIDVVVVYKIDRLSRSLMDFARLVELFDRRSVTFVSVTQAFNTTTSMGRLTLNVLLSFAQFEREVIGERIRDKFAASRRKGMWMGGNIPLGYDLEARKLIINETEARTVRLIFQRYLKLGCVRALRDDLKQRGIRPKQWTSSTGVTRGGHSFERGGLYHLLRNRLYQGEVLYKSIAYPGEHKAIVPAGLFEAVQQQLASNRQRRPGKPGTSQDAPLANRLVDGEGTAMAATYSLKKGGRRYRYYVSRTKPNMARAAITRVPAPPLEQLIDATLLRLGLPKTANSHAVLQRVQIGASSIVLSLDKAAALEIWQMQAAEPLDDRQTQAHCRSHLATGETLMDHGATIIVTLPVCTQFRGGRAGISQTWQDRQARTPDPALLKALARAYRWKALLLAGEIRAIEDLAIRVGQERRHVGRTLSLAFLNPALTRQILRGEQPASLRLSTLLDADIPLSWQQQDQLFGTA

SEQ ID NO: 275 - protein, 540 aa, unidentified
  source 1..540: note = uncultivated organism
MKRIAIYSRKSKFTGKGDSIGNQIEMCKNYISNLAIEDKIDISVFEDEGFSGKNLERPSFKKMMEIHEIKPFDYLVVYRLDRISRNVGDCAKLIEQLNATHTAFICIKEQFDTSTSTGVAMMNIAMVFAQLERDNIAERIKDNMYMLAQNGRWTGGTTPLGYKSVKHTNADTNGKSRSYYTLEFDENTISLVKLIFSKYSELQSLNAVEIYLNETKNFTQNGKEWSKANVKRILENPIYCIADKDSLDYFKGLGSNVCFTEDDCDGIKGIIPYNRHVGEKNTATTPDKWVIAVSTHKGIYAGDEWIRIQNLLKENSKNCYGGVSANKQSYNKHSILSGVLYCSCGAYMRPKVYASGTMYYKCINKEKSKMKICSMPNINGTELDKVVLNELFSFSIKDSNISKQLATLRKKVNNVEDDLYAQIKLLNAQKEENKKAIDNLVNALASGANQVTMDVINKKMTELSEHNTAIDIQLDELSHKDDIQTKMHNNINDLETAIIYLKDNFDRLSIENRREYIKKIIDKIIWDGDKVHIFIKGSTI

SEQ ID NO: 276 - protein, 500 aa, unidentified
  source 1..500: note = uncultivated organism
MVKRMAKQDNRKDAVYARQSLDKKDSLSIEAQIDKGKAWAGGEVEVYEDKGYSGKNTDRPDLQRLKADIEAGKIKKVIVYRLDRISRNIADFYQLYKIMEEHKVEFTSISENFDTSTQMGRLMMGILIIFAQMERESIQERVKDNYYYRIEEDGRWPGGRAPKGFDLSRTADNKPTLKPNKDIEMVKIAFESYANDVNSSLAKIGRELNAKGYKSSRASGAFDSVTIGRILQNPVYAIADSLLYKYFKMRKAHILSDEDKWDGSTSAHIVGKKVGNANIRKYTSLEEQTVYRTNFKGVVSSEVYIAVQERLAKNEKIGRANAPSKMRELAGLVKCAKCGYAIKVNHPPNLSCHGRNTLHICDASIQIKFPILQESVAVEIQKQLDKIANKILQNSINRKKEQDKISQINEEIERLVKLAAMGTMDIEQVHKAIEERKQKIDEIELSQERNLSFTDEARISSYLPLVYSRLTEEEKKSVAQLLIKKIMLSENGDIEIEWKI

SEQ ID NO: 277 - protein, 531 aa, unidentified
  source 1..531: note = uncultivated organism
MNDNGKIIKVALYARVSTEEQKDNFSLAAQLELLRKHSSDSKYEVFDEYVDDGYSGTSFERPQFQRLMDDSRQNRFQLILVYKVDRFFRNNKDLLNTVDELQNCGVSVRSITEPFDTSNYLGKFVLSLFGSIAELERNTFMERSKMGKLRRAREGYYSGSSPAKFGYVYNKETKKIEIDEKEAEIVKLAFELYSQPDSSLIKVTRKMREFGYRTKEKHLMREDVVHDILRDSIYIGKWYANRHDSKTGKLKPVEEWIEVSVPKIVSEEQFLKAQEYLNNRRNYSERNAKYKYLLQGMVKCGDCGNTIAGAADKQVYIEKNGGKRTYFKLYYRCSHFFRNKYQKAVNCRLKYIQAGKLEDAVWNAVGKIFQNPYLIEHAITNGEEARKLDKETAQKEISRISLMQDSLTKEEQRILEAYRQNIISISQLKEQMDSLRKNRENLERTRQDLRLSLSENDKKSAISHAVDYIEKIKKGIRRFDYEQKKAVLRLFNTLVKVNVNGRIGIDCFLPSVPAPSEKEFLSFFESARPIF

SEQ ID NO: 278 - protein, 557 aa, unidentified
  source 1..557: note = uncultivated organism
MEQKKRVKCLYRVSSKQQLRSEDIPVQREECRAYIETHQNWEFEGEYVEKAVSGFKTSIKDRDVLQDILSDARQRVFDVLLVYMSDRIGRKEDESPVFVTTLNNLGIEVWSVKEGQLKTQEHIDKLLNYIRFWQAEGESRKTGARVKDAQMTFARAGRFVGGYAPYGYRLEYSGEISNHGRALKHLVRDDSKTEIIEKIFDYSIRYNYGNQKIAKELNESKVPAIKDAWKASTISQILQNPIYMGYIAYNRRQHSGCGGTFERTPMENWIMSDHRMPELAHVSEDTWYLAQQMREARKARIKRARDEGQGYGKYTSTTSGKLALMGLIYCGCCGSRLTNGSKYDYWTTKAGEKRTKYVGKYRCTRASNGSMQCGGKALYRAEEIEPIVYSVVTSYLNSLKEADTYDEIMQLQEEQRKRLQKEKLQLEKQYEAVGKDIDTLQENIPLALRGEGAFTVDQLSALIEKKQTERQQLQDQIGQKQQEYEETKIKKNDISELGSIISNWGELFMESSIAEKKVLLGRIIERIDIYDKEIKIKFKINIGDYIPRICVGSDTTP

SEQ ID NO: 279 - protein, 508 aa, unidentified
  source 1..508: note = uncultivated organism
MKRVAIYVRVSTAEQAEHGYSLETQLEACNNKAKDIGAGFICEFIDNGYSGEFIDRPAITSLRTAMVSKDFDVVIVYDPDRLARNLAHQLIITDDIEKSGAQLVFVSVTFEQSPEGRLFYSMRGAISAYEKEKIKERTMRGKRGKAARGKLVNNGRPFGYSYDAANSTYIVNQCEAKIVRMIFDLIVKDKKGTSLICKELNSLGIPSPRSKSAWIISSIHRILTNTLYKGVVYSMKYRYEKIGLKKKKRSMRPESEWIPIPVPPIVDDLTWEAAQKQLKQNKATATRNIKRDHLLNGLMHCARCGRKMTITHSGTGAKSYYVCLSQKSAAYTYSGQKPCGTRRIPTEIIDEYVIDYLDQIRDNPSLIEDHIQTAPGRKDTDEISYKINQVLTTEQNLVKQRDTVIRWFRQQMISDQEADVQLNEIRMQLLDVAQTKNRFQEELAAASQITSAEQISASLESFFNKKDFTIEEKRVAIQSILDKIIAERVDTTLARGSKPELSVQIKFL

SEQ ID NO: 280 - protein, 557 aa, unidentified
  source 1..557: note = uncultivated organism
MNKKNKVTIEKIAAAYSRVSTSNQEDQETIKNQIMAMNEYAKKNHISIVEEYIDDGWSGDILARPELDRLRQDVKSKKWEAVLIYDPDRLARRYSYQALITEELEEAGIEVIYVTTDAPKNSEDKIFHGMKGLFAEYERAKISERFRLGKLRKLDEGHVLTTEAPYGYKYIPKKDKIHGYYEVDEAEARVVRMIFSWVANEGLTLRTIVRKLQSLGIKPRKSKRGVWNTSTLSTLLRNEVYIGRAHWGSTEAVVPENPIKKVKYKKMKKTSRKVRPKEDWKYVDVPPIIDKDQFERAEAQLKKNFAQCKRNKKNDYLLSNFIYCTCGRRRNGEGVLGGKHLYYRCTDRVLSYPLPRKCFEKGVNARVADELVWKKVSSLMSNKELLKKQVERYLREQSKKLKYENKDLQVLEKELLKLKKEEERYNKAYGAGVFDLDTLKEYTGTIREQISGIKVQIDEVKKEKDLFSLNSAPTEKQIEEFATRSASMLKRLDFTKKREIAVKIIDKVEATKHSLQVYGKIPVTNYVEYKTSNRNSQCAIRHIKTIPFSFRIKIPTQ

SEQ ID NO: 281 - protein, 559 aa, unidentified
  source 1..559: note = uncultivated organism
MAQVEVIAANLKTNIKNSVKKIIKRVCAYARVSTDSEEQQTSYSSQIKHYTETIKENSEWEFVGIYADEGISGTQVKKRTEFKRMIDDAIKGKIDIIIAKSISRFARNTLDTLKYVRLLREHGVDVYFEKENIHTLKMDSEMFLTLFSAFAQAESESISQNVKMGLRAKMKRGEIVGNPNCYGYKRGSEKGTIEIVEEQAKVVMDIFNWYISGLGYKCIAKKLNDLGIPSYTGKKWCNTSIKCIIVNEKYVGDIRSQKSYSVDPLTHKTIKNYGEKEQYYVKDHHIPIITREVWNTAQEILKERNIKAGDNKGHDSIHAMHYPFSKKVVCGLCGHNFVRRQRSRKYIRNYWKCWERTANQDCNAISLREEYLEEMFVQIYNHIVINKHKTKDKLLNAIKETITNSDCKNNIDKLNKEKEVLQNRLSNLIDMKLDDFSNKEAYSQKEREITERLKFITTEIQNYEDLEKENKTLSKKLKEIENILSEPTTITEFDRETFESIVGRIVVGEKDENGNENLNVVRFILKTGSEYVYNLDNNGNKNNSVSYGTSKQPWLCRTT

SEQ ID NO: 282 - protein, 511 aa, unidentified
  source 1..511: note = uncultivated organism
MVQVQPDKVAIYIRWSTEDQGLGHTLEIQRESCRYYCLAQGWTPREAATFIDDGYSGSTLERPALARLRALVQAGDVECVVVYKLDRLSRNVRDMLNLVLDEWEERCFVRSTQEPVDTTSDAGRMFFAMLGSFADFERSSIKSRTWSGKRKNAEQGKNPGMVYPYGFVRSETGGWELVEPEAALVRRIFETYIRGGSCRRIAATLNQEGLRTRSGKRWADADISRLLRNPLYAGRLVYNRRAFARRAKVGHVALKDPADVITCEGAAPAVVDAETWAAAARIRAERPRVDRPGGARAVSSPHLLAGLLKCAQCGHTWVCLTGGKRRERFYACGGARSGGPAVCASRSVKAETLEQFVLCRARESWTLPAALRPDLLTRTAGRARDLEDRFKALRHRLSGLEAALARFKADYKAGKLPAEAYSDLLAENRTEQAELRSLLAALETERQAAPPDRPDLDLACRLYARMDPWDTLLPPERQQVLRLLLTEIRVCRPKTGGDLTLHLNWRLPATV

SEQ ID NO: 283 - protein, 627 aa, unidentified
  source 1..627: note = uncultivated organism
MDFHLIGASLWKSLHLCPAAPQTAGESHRQGEIDMKKSSSMIAIYSRKSKFTGKGESIGNQIELCREYIRNMFGAEWVEGCEVYEDEGFSGGDLKRPDFQRMMENVRKHRYRAIVVYRLDRISRNIGDFAGLIDELNKLEVSFISIREQFDTGTPMGRAMMYIISVFSQLERETIAERIRDNMHELAKTGRWLGGNTPLGFQSEAVSKITIDGKARKSFKLTPIPEEEKLVKTIFDLYTKTDSLSAVETELLQRHAKTKLGKDFTRFAVKGILQNPVYMAADEEAYRYFTEREAEICFPREAFDGSCGVMAYNRTDQEKGRASRINPVSDWIIALGKHPGLVPSSQWILIQESLERNRSKAYRKPRINEALLTGLLFCSCGDRMYPKLSRRKTADGEPVYTYVCRMKERSQRARCCCRNANGSVLDAAIIDRFKLLPEADSEFLSLLEKSRGFYTGKREEYAAQLEQLRAEWTKNTRIVSGLMDSMGILEHSAAKPQVMKRIEELSEENHRIENRIQELEGLADVDRLSGDEFEILRQMLSMLRASVDGMSVEEKRAAVRNIVRKVIWDGENSHVIVFGAEEGEIVYNQTDDLDFEDGPNSLLWEDSKRDPDVFPGPEEDRGGRLAL

SEQ ID NO: 284 - protein, 507 aa, unidentified
  source 1..507: note = uncultivated organism
MIKVASYCRVSTDKSDQANSFQTQQRFFREYIQRNRDWELYAVYADEGITGTSTKKRKEFNRMMNDAYEGRFRMILTKEVSRFSRNILDTIAYTRELKRLGIAVLFLNDGIYTMDPDAELRLSIMASIAQEESRRTSERVVWGQTRQMEKGVVFGRSLLGYDVRDGHISVNPEGAEIVRLIFHKYAVEQVGSSEIARFLSREGCRTFRGSRNWNPGTVIKILKNEKYVGDLVQKKTYTPDFLSHEKKTNKGAVPLITIPDHHEPIISREVWKLTQARLRKNNKHAAGVRGHSNRSVFSGKIKCGQCRSSFVGRFKYLKDGTGIRRWCCGKAAREGTAGCDIGKLVRDDDALEMLKTAIRSLPVDFGAVIRNVTELALEAVLMGQTDARDDPERLQQELGRMRKKKEAVMDAYFSQEIEKADMISFTAKYDQQLSELQKRLEEAQNRRDSKQDPAALRAQLQAEVTAILQGEIESEVFYKSLLHSLTVYKDRHLELRLNHLPQVFYFV

SEQ ID NO: 285 - protein, 535 aa, unidentified
  source 1..535: note = uncultivated organism
MEKVGVYCRLSDEDRYKKNKNDDSESIANQKSMLLKYALEQDWEVVDIYSDDDYSGAGVERPDFNRLINDCESGRINIVLCKTQSRFSRDMEVIEKYLHNKFVEWGVRFVSIVDNADTNNEANKKSRQINGLVNEWYLEDLSNNVKKSLKNKREDGLFMGSFAPYGYKKDPNDKHKLIIDENVAPVVRDIFKKYKNGLGYHRICASLNQRKILCPSLYKKSIGSNFVCCNFDYDTTGIWTSDTIARMLRNESYIGTLVQGKRTNISYKNHKSKKVPKSEWSVTENAHEPIIDNETWYLVQRRLKNHHRPAKEDGKVHVLSSKVYCAECGRIFMRNQSNIKCAGGVMEKRAYLQCKGNKKYHTCDNNRSIRYDIIENYVLDAINDLLKKCNKKLLEEEYNATLERENRQDTLIINLNKEKANLEKKINESKLYFKNLYTDKLKGVISDSDFSMLRDEYTKDVESYQNRLEDIEKQLEDTQERKENSKDIESILKKYKHIKKLTRIIVDEFIEKIYVGALNKETNTREIKIEWNLDL

SEQ ID NO: 286 - protein, 534 aa, unidentified
  source 1..534: note = uncultivated organism
MNGLGRPSVRAVVYTRKSSEEGLDQEFNSLDAQYEACTAYIASQRHEGWKLVKQRFDDGGVSGGTMDRPALKALLDEVDKGLIDMIVVYKIDRLTRSLSDFARLIERLEKAGCSFVSVTQSFNTSSSMGRLTLNVLLSFAQFEREVTAERIRDKIAASKKKGMWMGGMVPWGYQVHSDPKVQSLEPHPQNAPDIQRVFDLYEELGCLSKLKREVDQLWPNRSYSRGRLHNILRNPIYIGKVRHKSDVYDGLHEAIIAQEQFDRVQQQMQLKSVIKRGTHHSRGPSAFLVGKVFDETGDRLTPSKTRKNGRSIRYYYSNRLITKGADPTGWRLKADMMEEALQDMVKQRLGRRLHRMQIAPLMKPHDVNRAIQRLERLSIDQVLGLIARVDLSNSVLAIKIDHEALVNHLAINTDDLDHDYLSFEQPVTFQRRSNGTKMVWASYKSEPNHALIRAIVQSRSWVEKLKAGKSVSDITASEGISEGRLWKRIRLAFLSPKLVTAILDGTTNQELTINKLSAKDIPLNWEEQQAQFLC

SEQ ID NO: 287 - protein, 560 aa, unidentified
  source 1..560: note = uncultivated organism
MAERVLRCAVYTRKSTEDGLDQAFNSLDAQYEACAAYALSQRHEGWALAKERYDDGGFSGGNMERPGLKRLLADVAAGRINVILVYKIDRLTRSLADFAKIVDVLDGAQASFVSITQSFNTTTSMGRLTLNMLLSFAQFEREVTGERIRDKIAASKRKGLWMGGPVPLGYDVQDRKLVVNESEAARVREIMQLYLELPSVSALAQELTQRGYRTKVQQRTSGPHRGGCPFRRGTLYHLLANRIYVGEMGHKGTYFPGEHQPIVPTELFDAVQAKLKASASGSSRRTRALKPSLLAGVLYDGEGRAMSPSHASRKSKTTRQRYFYYVTRPDRLDGTPAWRVTGPDLDRLICDRLAKMLSDEHMILALANDLPAQQLRDAMTLARTKAETMRSGLPGERLDVLNAVTPRIDLHEDRVELTVDPQRLGTLLGIASLPASHDPIMMTLPVTKVRRGHQLRLVIPGPEAALPPRRDDKLIALIAEAHEARQLIMANPTQSLNAIGIAHKRCRTRLGKLAALACMAPDIVTAILEGRQPATLTAKTLARVELPLAWDAQRLVLGFS

SEQ ID NO: 288 - protein, 525 aa, unidentified
  source 1..525: note = uncultivated organism
METVINGNFDFNNAISYDGDGIYTSRNVEEEKMRVAIFGRVSTSKESQDTSVETQHDMLTNYALTKGWHVVKYYEERVSGTLTESNREILRRMIADLEDGEFDLILVKELSRLGRDGELLYRLKKLLTNNNVHLVTYDNKVNTLEGESQFFGLYVWMAESEANTISQRVRASLKSVAKAGKFTGSNAPYGYRLENQKLVLGDVEQVDTVKRIYKLYLEDKGFEAIARILTREGIPTPARIAGKKNAGRIWHGSTVSTILTNPHYTGDLIQNRTTTVSISNKRRVKCSEENMSIVRNTHEPIINKTDFALVQEIIRNKSQHKAKSRGSKHLFTEVSFCGCCNKGMVYKANSKGYVCSSYNKFGTVLCTAHLVRESDLKRQIQLDLTGQVANMKDRKYLSKVRANLEKQFSNDKKELNQLQKKLSKLEMKKENLIDLVADGKVEAHLLNDFLLKNNEAINKLNLKIMQIQKKPDMSVEIEKKMKVVQSMINELLKFDDITPEVVNRFISKIVVDKAGNPQIFYRFAD

SEQ ID NO: 289 - protein, 593 aa, unidentified
  source 1..593: note = uncultivated organism
MSAKKLRCAIYTRKSTEEGLEQEFNSLDAQREACAAFIASQVGLGWQLIPDHYDDGGISDGTMERPALQRLLADIGEGKVDVVVVYKIDRLTRSLMDFARIVDIFDRHEVSFVSVTQQFNTTTSMGRLTLNVLLSFAQFEREVTAERIRDKVAASKKKGMWMGGTVPFGYRVENRKLVIDEAAAAEVRRLFARYLQLGSVPALAAELNEQADATGLGSTLLHGDTGQGRRKPSRKIGKGKLYYMLSNPIYVGRIRHGGAIYRGEHRPIIGEDVFDAVQARLAAQAPRPRGTTVTRDIHLLNGLLFDEAGDRLSPIHAAKAGKRYRYYVSTRPKNGGSDHKDGWRIPAAEIEPIVLHQLENLLTNRPLLSQWLEAPGQMHRIEAALEKAERTSAGLKAVGTNPAMGRQIVHMAIRRISLSNDRIRMLIDRRALANWLADTKPEDAAAPGGGRPSNSASRNTKGKLPTVEDDPDLHVIDLPLSVRKRGVERRLVIDGQAAVRSRPDKPLIDMIARAHVYLATLTDGQGLGRKAVAKQFGVHAEDVSRLLPLAFLSPRIVELILTGRQPADLSVRHLARGIELPISWAAQHKLLGI

SEQ ID NO: 290 - protein, 540 aa, unidentified
  source 1..540: note = uncultivated organism
MPNRCAIYVRKSTEHGLDMEFNSLQNQEESCKAYIASQAFNGWQYHKTYTDAAISGGAMERPALKQMLDDMAHGLINTVVVYKVDRLSRSILDFHNMMRYFEKYGANFVSITQSFDTSTSMGKLMLNMLLSFAQFEREVSSERVRDKIRASKAKGLWMGGNPPLGYDVVNKKLIPNAVEAANVRTLFEKYLELQSVNALTEYAVAHNIHAKQWTTAKGITKGGRPIAKMSMHRILRDRTYIGQIVNKTDNTVAPGDHQAILPTELFERVQTALRNNANNKSETHGSPNLLTGKLFNHNGVRFTNQRTCGKGKTNTHYYATRGFYLPAPTVDEIAIKTITQFLDADLSVLPSAIVDILKRINTQNMPYAEKKAFVQSLADKVIYSQEKLIFYLMPDTAKLQPFATENFINQKSDPMDFTVNDNRIIITVPIVLRKYVNTVFDKTKNGVLTISDNNHLILKAFATAWKYRDMYEECGDVDKIINSEHVAPRFVYKHPALAYLNPKITNNLLSGKYTMPVRDILDKASRSQDLYEQESLFGLK

SEQ ID NO: 291 - protein, 769 aa, unidentified
  source 1..769: note = uncultivated organism
MSQSRIAKPLPGEQEEVPVAAYCRVSTEEASQEESLESQRAHWLQVVQAHAGWTLVDVYAERLSATHADNRPELTRLIGDCARGRVRVVLTKSVSRFSRNTVDCLRLVRTLKALGVRILFDKEHIDTGSMSSELFLSVMASFAAEESRSISGNVKLGYRQRFQAGEFRYKRPPYGYKVADGSLEVLPEEAAVVEEIFACALRGMRPGAIAAMLEARGVPTKYRVTWQPSTVTAILTNLTYTGDALLQKTYRDGEFRQHVNRGEADQFYVPERHEGIVSREVFVLANQTLGFGDPYARIRAAEAEEKPGAVQVIKARERGSGTDDGPLRVAAYCRVSTDLEEQESSYAAQCAHYHDLIVNHPGWALAGIFADEGISGTSLARRDGFNRMIEEAEAGRIDQILTKSISRFARNTLDCLTVVRRLKAKGVGVTFEKEGIDTLDGQGEVLLTILASIAQQESASISQNIRLGIQYRFQRGLPMVNCNRFLGYDKDARGRLVVNADQAEVVRRVYRDFLDGYSLDMIAGFLRREGVPSGSGCTTWRPSAVRYLLTNEKYAGDLLLQKTFVSDFLTHKNEKNRGQLPSYRVRDAHPPVIPREVFERAADELWLRSNFGKKGGMRFGSRRALVGRTLCPCGGGMKRLRRIETVFACPACGREVLEGALKRQVLDAVAALPSQAEEIMRLRREIAPALVSEDPAVRAPARRTDWYLGNLLPQDGPMRHRPECADVDDFRARTRRSAEFWNDGTINRLLDHVVAGVETVFKGGVVVRK

SEQ ID NO: 292 - protein, 501 aa, unidentified
  source 1..501: note = uncultivated organism
MKESTSHSRVVLPLHEQGIAIYSRKSRFTGKGESVGNQIELCRQYLRAHEPDAPEPEIFEDDGFSGGDLNRPAFRRMMRAAEAGRFRMLIVYRLDRISRSIGDFTALIERLAQLNVAFVSIREQFDTSTPMGRAMMYIASVFSQLERETIAERIRDNLRELAKTGRWLGGITPTGFASEAVQAVTVDGRTKRACRLRLLPEEAETVKAMYSLFARLGSLTAVVKGLQERGITTKNGNAFTRHAVRDILHNPVYARADADMLAWLRAAGTDLSAAQEEFDGRHGVLAYHRTDQSRGRTAVALPPEAWIVAVGQHPGLIPGSQWAAVQERLRRTDCRTPRTEHETPALLAGLLQCRCGRPMYAKYRRAADGERFSYVCRAKSTGGREQCSCPNVPGTAADAAVRAMLCALPEDHAVLAAALRGLRRSLPESSPAPPDRIPLALRDCLNLRTLSGGQECSSIPLALRDCLNTIRRTQRVLEALTEQLRWDGETLCMTLRRVDCK

SEQ ID NO: 293 - protein, 515 aa, unidentified
  source 1..515: note = uncultivated organism
MNNRYDIIYTRQSVYKENSISQLTQRESCEEYLRKEHSGDLKLLVLDEDKNKSGGTLDRPKLDKLRKLVKTGQVRSVTVYKLDRISRSLIQFAELMEEFEKYDVAFYTTDTRSGIEPPFGKAFLEILMIFAQLERENIIMRVSDAYYNRSIKGFYMGGRRPYGFDFEEYTIEGKKTKRHIINEAEMKQVEELFRTYAVEGFSLRTVLKHMLEHNMQDLSGAGWSTAKISNILKSPLYVKADEKIYDYYKSKNIEFAEGLTLEMFDGTHALQVYGRAKHDESKGDYSDMMLVMLPTEGRINSETWLKCQKKLEANNQIGNAVSNKVTWLGGKVFCKECGHRMTTIKGKPTKDGTVTTYFNCIGRSDKRSCKGPATVYISELEAVIEKAITLKLKTLKTERRVLSKENEALIADINRQIGEIKSKEDKIFERILDGEFNDYVKAKAEENLSELGKKKGELKQRIDDIMAKDDILTQSIDLAEKWRKAGFQTRKTVLNALVESILIHKDGQPEIIWKI

SEQ ID NO: 294 - protein, 521 aa, unidentified
  source 1..521: note = uncultivated organism
MATVRMIPARPAVGARKKTENAPKIRVAAYCRVSTDTDEQATSYDAQIEHYTDLIAKHPEWELAGIYADDGISGTNTKKREEFNRLIDDCMAGRVDMVISKSISRFARNTLDCLKYIRQLKEKNIAVFFEKEAINTLDAKGEVLLTIMASLAQQESQSLSQNVRLGLQYRYQQGKVQVCTNRFLGYDKDEEGNLVINPEEAEVVKRIYREYLEGKSYYAIGQGLTADGIRTAAGNDYWLASTLKKILTNEKYIGDALLQKTVTTDFLNKKRVVNKGIVPQYYVENSHEAIIPRELFMQVKEEMVRRARLDTGTGKRRVYSGKYALSHLVYCAHCGDIFRRSQWFIRGEHIPVWRCISRLEKKKSGIDCPSRTLYEADLQASVVTAFNQLVEQKEDFLPGMRLAMERMLGQSNSPRVTEIDKQLEALQKELLKKANANQGFDSLADEIDALREEKQTLLMEDASRAGLRQRLTEFEEFLDGQVTGLTDYDEAMVRQLVERITVFDDHLAFEFKCGIETEVQM

SEQ ID NO: 295 - protein, 533 aa, unidentified
  source 1..533: note = uncultivated organism
MARKADHQTLRCAIYTRKSTDEGLEQSFNSLDAQREACAAYVMSQTHEGWEAVAERYDDGGWSGGNMERPALRQLLDDVKAGKIDIIVVYKVDRLTRSLVDFAKIVEILDGQGASFVSVTQAFNTTNSMGRLTLNVLLSFAQFEREVTAERIRDKVAASKAKGMWMGGPIPIGYALEDRKLVPAAQEAATVRLIFERYVELRSIGALVEELYERGIRTKQRTYCDGRIVGGIPFTKGPLAALLQNPIYIGKVRHRDQIYDGQHEAIIEPELFAKVQAILDANRQDRRLGRNAKSPSLLTSMLFDPDGRPMSPSHANKGTRRYRYYQTRLGPGEKELVWRLPAGEIERLVIAAVIDHLQKQRPHQNTHPSARELVKALDNRSDLVERLPQFPVAEQRRALMALQVRIELQEAAIIIGIGADKITLASKLVKRGNDVRLVIAEHRTASPDPILCKLVAQGFAARDYLITGTLHLCIREYSPRYLKGLARISWLAPDLIGALLDGSQPPHLTGRRLIRANAIPLDWPSQRKMFGFA

SEQ ID NO: 296 - protein, 535 aa, unidentified
  source 1..535: note = uncultivated organism
MAEKQQLRGIVAKRLSHLTEATTHLVTEAETTEDYCRRKNVLVVAETEDLDVSGGKPIRERPGVGPWLTLDHLDEWDVLILYKLDRGFRNHLDFVTFFHEFCDVHGKQIVSVSEDIDMSTRMGKFFASQLVQFAEWELMNMSQRRAAAADVIRRAARWGGGSFTFGYEPYQVQAGGQKAWYLRPHPVYAKETLQMALDLLSGKSIGSIARNLNERGIPTARDVQRIFSGKPRKGYKWTVAAVTQHLRSDSIRGYVLHYVNGSGKPPIRVVDETGEFVRREPLIDDDEMWLRVQAKLDVNTKKLSGARAGSATLLQVAFCGYCGAALHKGGSVKYTHGEKRNNDYYQCRYMRTSCKPSRSVPKDMLEQAVLGKLLDTVGSCEITEKRVIAGEDHSQALLKIGMQIADLTTQHYTRGGLPEFHSRIAALEAEHDRISDLPKEQPKIRRVATGKTFRQQWEEMDDEQRRDYLKSAEVTALVVRRQDLTQAMTFDKTADISENPELDIPQNVICECGDFVVNVNLGMLGDQLEWASAAA

SEQ ID NO: 297 - protein, 513 aa, unidentified
  source 1..513: note = uncultivated organism
MKPQTKNCAIYCRKSTEEGLDMDFNTLDAQRESCEAYITSQRAEGWKVLKASYSDGGYSGGNMERPALKKLLAEIKDGKIQTVVVYKIDRLTRSLMDFSKLVEIFDEYGVTFVSVTQSFNTTTSMGRLTLNVLLSFAQFEREVSAERIRDKIAASKKKGIWMGGMPPIGYEAQDKKLIINKEEAKIVQYIFDTYLSLGCVAKLKRKLDDQNIVSKIRTSKRGRVVGGKPYSRGALYSFLKNPIYAGKIKHKDKIYEGLHKVIISEDVWNAVQKKLKNQATATLGRKHSRETNILKGLLFDSEGTPYSPDYTKKKNGQIYRYYTSQNLIQYRDHPNGIMARIPAQEIEKTIRNSIQQNMMNILGLDPIEDHTIIEHLDTHKTPSDDLIIKSVNKICVQQNNLEIDINIACLRQYLQEYLKLHIPVKVNKQNHILSVPFTIRRAHKGTIILKPETPENDRLDLPPAQLKNLVRGIVWRDQHFAGATLRDIAKQENMSEAGVRKIIMGSFDTLMSL

SEQ ID NO: 298 - protein, 537 aa, unidentified
  source 1..537: note = uncultivated organism
MPKVNCAIYTRKSTEHGLDMEFNSLQNQEEACKAYILSQAFNGWEYYKTYSDGGISGGTMERPGLKTLLNDIRTGQIQVVVVYKVDRLSRSIIDFHKMMQEFDKYGCNFVSITQSFDTSNSMGKLTLNMLLSFAQFEREVSAERVHDKIAASKAKGLWMGGTPPLGYDLKDKQLIPNPQEAEVVNLIFTKYLELENMQAVAEWLNQKGYRTKTWTPHSGQLRGGKAFQKSSIQRILTNPVYIGKVAHQAKNKVYAGRHEGIVLKPVWESVQDMVRRRITDPHAFSHYQTHKTALSGKLYDDKGQSFRLTSSKKQGKKFLYYYNGVGGHYLPAGQLDAFVLKTLKMTNFDELDPLADMQRLTDEQLARWITRAECQSIEKTHYLTVFLDEKQVRTDLSACPRISGQAEERTGVLHRLLDKIYVKSTFLVDNVSSAKLQNGTARNILTVRQLNESLVRGLARGWQLKRLLEKAKPLCECEKASGNKRTFARYLNLCYLSPRIVVDILEYHNPRNMSLKELMNLAERESNFEAQEKAWNQ

SEQ ID NO: 299 - protein, 546 aa, unidentified
  source 1..546: note = uncultivated organism
MRAESRKGSPVPGMYRAALYMRLSKDDEGTTESTSITTQRKMLRNYAQENGYAVTDEYIDDGWSGTNFDRPDFKRLIADIEAKKINMVITKDFSRLGRDYITAGQYTEMYFPEHNVRYIAINDGYDSTNPYNDIAPFKHVINEMYARDTSKKIRSAFQTKMQEGSFIGNFAPYGYKKDPDNKNHLIIDYEAAPVVQEIFQLAANGERPSEIAAHLNQNGIISPALYRCSTRPHLNLENYTTRMEWTSSTICKMLANVVYLGHTAQGKTSKPSFKSKTAFRKTRDEWCVVENTHDPLISPDMFDIVRKRSVSRRVTPKTEFHNVFSGVAKCADCGGNMSTTGSRRKNSTYNLVCGRYKLYGSEECSNHFIDYELLYQSVLSEVREMLALSEKDKRLVLADMGKAKRGNKANDTNNEAVNFLKTLESRDKELDNLIRRLYEDNVSGKISDERFGKLNAAYEAEQREIVQKIKMLRKPVVQETDDKAARRRFFEMLDGLAGVSELSPNLVKRLIDRIEIGQGNYEKTPEGKKKRQTVKIFWRFIGEING

SEQ ID NO: 300 - protein, 556 aa, unidentified
  source 1..556: note = uncultivated organism
MPKYRASEYLRLSYSDDKNNESDSVANQKRLIADYLSGHPEIELVSTRVDDGYSGVLFDRPEFQKMMEEIMAGKVNCVIVKDLSRLGREYIETGRYLRQIFPTYGVRFISINDGIDTANEHSGDDLTVGLKNIMNDSYCHDISVKTRSALQVKRKNGDYVGACPIYGYQKSPENHNQLIVDRDPAAVVKEIFRQRINGVSAQKIAASLNDRGILSPLAYKISHGLPHPKRGYTDSADAKWAAHTVIRILQDETYTGTLVQGKQGTHNHKVKNLIQFPPSEWIRFEGAHEAIISKRDYDLVQRIMRLDTRTAPNGEGVYLFSGMVICGCCGSCMTRKILRRGDKAYIYYYCRTGKKNGCTNPVMIREDELEQCVLAAVQAHVQSVVTLSELLDSINEEQINRDAIASCKAQIAENEAKLEKANSIKATLYESFIDGVISKVEYKDHKERYNAQAESARKAIALLRESMENTVRNTGERLRWARQFKEFSNITKLDRRAVVALLESIEIHGKTDIRINFRYKLEFDTAMKMVRPENAPQSAVSQTFAFVPALLVKEAV

SEQ ID NO: 301 - protein, 702 aa, unidentified
  source 1..702: note = uncultivated organism
MSKLIEGSNHIVKALVRVVLYLRLSDEDSDKLTKEQISESIKNQEIMLRNYAKEQGWKIVGVYSDEDYSGSDRNRPNFNKMINECEKGNVDIVFVKSQARFARDIELIDKYIHNKFHEWNIRFITHLEKIDNTRRETKKTSQITAMTDEWMLEDTSYNIRQTFYSKRRDGQFTGSFAPYGYMKDPENKNHLLIDPIPAEIVERIFVEYSKGYGLQKIANDLTKDNVLSPLEYKLMNNYKLKIPIIKNYCNYSHISKAGIYIIKNHFYNNQYQILKNLITIDLITTDDKSFNRKVSVKINKYRDDKTRIFYSNKSYEELNIKLNANNRLIFDTSVINDNFIEVSKNDEIPSNVSFVATLTKVLDRTHEISYEYEVSLEENRNHDNFYFKTFAVADNTDVDLVFDYNIRNKHNWSTQTIKKILRDEVYIGNLVQFKTTYVSYKNHKVIYNDEEKRVRKDNTHEPIIDKELWYSSQERLDNRKKCCKNGTAQILANKVYCSNCGKLFCKCGKNDAHGMAYLCCKDKNTKWSNCNNNKYIKEIDLQEYLLNKINDLLKKFYKENIQIEINNNIVENDLFKDKIKNLKKEQININKELDNKSSYFQDLYEDKKKGLLNEDEYMTLRKKYKDDCDKLKSRSLIINKELLTILSKQEKLKDKKNLFKKYKQISNLSIEIVNDFVDKIEIGTFDKENNAREIRIIWNFTI

SEQ ID NO: 302 - protein, 524 aa, unidentified
  source 1..524: note = uncultivated organism
MKTLRRGTPKPVPSVTRCAIYCRQSIEERGSNGFGSIEAQREKGETYVNLYPEKHWELIPTEYSDSGFSGGTLDRPALTLLRSDIAAGNVDCVVVYRSDRLSRSIRDFLELMEEFDRHGVTFVSVSEQFDTSTPGGRMHRNMLLMFAQYERELIAERTRDKVHAARRRGQFTGGGLILGFDRHPDGGRLVVNESEARRVRKIFRLFEEHPSLVDTVKELNRRGWTLKKWTTKASLDYGGGPFDVHSLRRMLTNHAYIGKVNFRETVYDGEHDAIVDQEIWDRVQELLKIGRKGPRRPSSRCTSLLAGILRCAACDAAMTPTYSQKGRVRYRYYLCTKAHLRGWESCPSKSVSAKKIEAFVVEKIRGVGRDPELVARTVEEAREQLSARKAELEAEAKQLHMDLEKAHTDLRSRLKTVPGDGKSRRFRDAGAQEETIRLIEERMATMNEELAALKGIHIDPADLQSALAAFDPVWSQLEPAEQARVMQLLIERIDYDGGTGNLAIAFRPGGVRTLAEEATASVTP

SEQ ID NO: 303 - protein, 546 aa, unidentified
  source 1..546: note = uncultivated organism
MPRKDKVKKKQATEVKATRAVIYCRVSTRNQGESGLSLDHQLNRCRSHCEAQDWQIVKEYSDVASAKDLERPEMQKLLLSANKKEFDVVVSLKLDRLSRVPRDFYNLFEDLGEIDVGLAVVEDNIDTTNAVGRMLVGMLLQFAAFEREIGIERTQAAMDQIASEGRPGGGVPPLGYDRVDKHFEINPNEAKIIKRIYREYLLGMSPAEIARRLNSDGFCTKTHLKKDGSFRSGGRPFDMKILHTHITNPLYKGIIFHSGHNFQGKHEPIVSPDKWEQAQLIVQRNAKKKNLGNSVRDQHLLNGLMICAICGDIISPHGGTGKSKKVYHYYQCMSSKSAGRRNDCDNAPIRTVHLEGIIIDLIKKIATNDEFFEATEKAIDSSFEQNVINKLRDDIQRTAGEESEIARQQKNLAKLISDGKIDSSGTIAQELENLDKKRSTLANRRAGFKEELSTKNSNPPDPLKLRQLYQEFDKMWDSLSQPERRDITKLLVNEVVVNTPKGSKKGAVTVALYHEPLITSIKDITKGSRLLTVQLRRRDLNSQPSD

SEQ ID NO: 304 - protein, 570 aa, unidentified
  source 1..570: note = uncultivated organism
MKNKIVRILLRVSSNQQLDADGDLSIQRKIVLEYIEKYPEWILDDKEYFEGSQSGFSTPVSDRGILQEILEDAEKGEFDILVIYKDDRLGRRMWEIGMYVMSLKTLGVDIYTVKDGSISPRSDDVMGQMMLAMRYASAQKSSADTAMRVKDTAKKLVQQGRYLGGKAPYGYVFQLTDELSKHKRRLSKLVISPERAEVVKKIFEMSLYQEFGSTRIAKELNKDERYRKMSPGYPDRYWMGGTINSILTNPIYAGYSAYNRRESVKGADGKVHNRRLDSKDWVISEKQNLDITIIDPDMWNKVQESRRKRGDKYTKKLEHKDVAVISRNDGSLALIDVLHCGYCGRKMTNGSKYNYWKIKGTGEKRASKIPTYKCQNAWQGVPHDKQKQIRADKIEPIIFEALAKYIEKLQENEDIFEQITSNQSVEKRKKEEELKKLKKNLEKIQQHLHIMKGHIPDAMTGDYPLSLDELVECMNEEKAKEAEQLEEIRGKEAEIAGLAVSAKEWDDIQSKIPTWRDIFLNADTASKRVLVDKIVERIDIWRDEVKIRFKFNLDSFLDQSRMSIDFGVQK

SEQ ID NO: 305 - protein, 514 aa, unidentified
  source 1..514: note = uncultivated organism
MVIMKTITKNCAIYCRKSSDEGLDMDFNSLHAQRESCEAYVASQRAEGWKLVKTDYSDAGVSGGTLDRPALQKLLTDIRDGKVQIIVCYKIDRLSRSLMDFAKLIDIFDQYGVTFVSITQNFSTVTSMGRLTLNVLLSFAQFERELSAERIRDKISASKKKGLWMGGNPPLGYEVRDRKLLIKPDDAKTAQMIFERYLGLGSVAALKKELDERGITSPVRISKRGHKVGGKPFSRGALYSTLGNPIYIGKIRHKGQIYDGQHEALIDEELWDRVQKKLSDQAVTHKEHKKARDVNLLKGLLFDPDGKPYSPSHTKKGGKRYRYYISQTLLQYGDHPKGTMARLPAHEIEQVVMNTVRNGLNEILALDTIEDYDLIAHIKPSSLPDAMLIESINRITVMQGELLLEINPETLRQNIQIHIDLHIPSRFEVPTHILSVPFSIRRTYKGAVILKPDKPDHDPFDLPPYQLRNLIRGVIWRDEHFSGTTIKDIAARENLSESGIRKIIMASFDILQAA

SEQ ID NO: 306 - protein, 509 aa, unidentified
  source 1..509: note = uncultivated organism
MNPAVKNCAVYTRKSTEEGLDQNFNSLDAQREACLAYITSQKAEGWIPVQANYDDGGYSGGNIERPGLKKLIEDIKAGKVDIIVVYKIDRLTRALMDFAKLVELFDKHQVTFVSVTQSFNTTTSMGRLTLNVLLSFAQFEREVTGERIRDKITASKKKGIWMGGPIPLGYDLKDRNLLVNEKEASLVRKIYETYLKVRSVIKLIEILNHDGDKTKAGNNFTRGMLYTLLASPLYIGKLKHKSQIYEGGQRPIVPLDTWSAAQELLAKNAVEPRGKKKPQQAYLLRGLIFDAQGTIYSPVFTNKNGQRYRYYVSRDKIQNRAHLESIPLRMPAQEMEALVEKGLRVWLSDHGNLCRIVGKSIEGDFEVIESISNRIAALSLEHLFRGISKITVGSDTLSIEVSVSGLGAVLHEIYGLNLVALVRGTESICLEVPFRVGKSWHGAVVIRPPETGTPEDMFDLPSHELRDLIRGFIWRDEHFNGMTIREIAKRDKRSDAFVGKMIRKTFEVA

SEQ ID NO: 307 - protein, 603 aa, unidentified
  source 1..603: note = uncultivated organism
MNNHENQTIAIYSRKSKFTGKGESIGNQIELCRAYIRMNEGEDAAEKAVVYEDEGFSGGNLNRPAFKEMMKAVKAKRHRAVIVYRLDRISRNISDFAGLIEELGRMKVDFISIRERFDTSQPMGRAMMYIASVFSQLERETIAERIRDNMRELAKTGRWLGGVTPTGYASQSVQTITVDGKKKKACQLKLIPEEAEAVKLIYDVFSETNSLTKTETALMQRHIVSKNGKYHTRFSIKGILQNPVYALADEEMYQFFAAHGTDVFADKAEFDGVHGIMAYNRTDQEKGQATVYLPVSEWIVAVGQHPGLIPGKTWVRVQEALEQNKSKAYRRPRSNEALLTGFLFCKCGNRMYPKLSKRLTPEGKPVYTYVCKLKERSQKALCNNKNVNGNLLDAMIVDRVRHIDEDAGEFMEQLSRSRGFFTGDRSEYEQQKAALQQEKAETDKKITGLVDTLAGMEAGDAREQVARRLEELSRNSKAIGNRLQELNSLLNQHELTDSEFDLLRDLLAGFKDGLNDMSIEQQRSALKTVIRRVIWDGENAHVILFGARDDEIPYPEVLHKWAENPAEEDEGCDLTPYLDVDYGENDEEERFPTPVQHPGEDSK

SEQ ID NO: 308 - protein, 558 aa, unidentified
  source 1..558: note = uncultivated organism
MKRQDRKTELRRCAIYTRVSTEYGLEQEFNSLDNQREASEAYVKSQAHEGWKLIRDRYDDGGFSGGSMERPALKKLLNDVRARRIDVIVVYKVDRLTRSLADFAKLVELFDEHEVSFISVTQSFNTTTSMGRLTLNMLLSFAQFEREITGERIRDKVAASKKKGIWMGGAVPIGYRVENRALHIVEEQADFVRDLFRRYLEVGSVVRLKIALDAENVRLPIRTVGTGGTTGGGLISRGHIYHILSNPIYAGRLRHKEQIHEGQHAAIVDEDIWNRVQFLLADQTQTRKPASRDVHSFLAGKLFDDRGHRMGPSHAAKGGRRWRYYISRAVLKGRKQDAGSVARVPAAEIEKQVLAAVKSLLPPLEHAVDGSRGSVGHSISRSSNSTLAANSSSLTDPSNFEDRARSAIDRVTIGKAGIEIQLCDAAAREGDRIATIPWTLPSPHRRREIFQGEGEPSSTVRPMRVRDRAVFVEALGDAHRWLDELTRNADHTAATIAAREGKTERSIRMTLSLAFVAPPIVAAAIEGRLPRGFGVKRLMDLPMVWSEQWTALGLAPPA

SEQ ID NO: 309 - protein, 555 aa, unidentified
  source 1..555: note = uncultivated organism
MTTPIRAALYLRVSTSRQADNDLSIPDQRRQAKGYCTSHGWEIVADYVEPGASATDDRRPEFQRMIDAATAKPPMFDVILVHSFSRFFRDQFQLEFYVRRLAKNGVRLVSITQELGDDPMSNMIRQIMALFDEYQSKENAKHTLRAMKENARQGFWNGALPPIGYRIIAGEQRGHRIKKTLEIDPFQAETVRLIFRLAWEGDGTSGPMGVKSITKHLNAAGIRTRDGGRWGIDAVHKVLTRTTYIGRHRFNTKFWKTRERKPETEVVEMTVPPIIDAAEFEAVQALLRSRSPALTAPRIVSGPTLLTGICFCASCGMAMTLRTGKSGRYRYYTCSTKARQGNTGCQGRTVPMEKLDRFVADHIEHRLLQPDRLEKVLSSVLDRREERSERQATHIAELRKRATEADAKLKRLYDAIENGVTDLSDLLLKDRITELKAIRDQARADAERAEGAIERLGPAITIQSVKKFARTARKRMRTESGGYRRDYLRALAQRVEVDAQELRIMGSKSELLRTLVAASSAKTAGFGVPSSVPKWRTRHDSNVWPSPSEGDALSS

SEQ ID NO: 310 - protein, 560 aa, unidentified
  source 1..560: note = uncultivated organism
MTKQQVRCAVYTRKSSEEGLEQSFNSLEAQREACMAYINSQKHEGWVAANARYDDSGFSGGTMDRPALKQLLDHISAGKIATVIVYKVDRLTRSLADFAKIIEVFDSHNVSFVSVTQQFNTTTSMGRLTLNVLLSFAQFERELTGERIRDKVAASKKKGMWMGGVVPLGYNCVDHRLIVNRPEAETVQEIFRQYLRLSCVKGLKDYLGREQINSKVRTSGSGRTSGGASCSRGALYHLLNNRVYIGETVHRDRCYPGQHEAIVSKELWDQVAARLAANNQAHRSKKSLAKPSLLSGIVFDVNGVRFTPTHTTKNGKRYRYYTSQAAIRKTDSALTVTAFPAQELEALVLSQIHLLLGSPEKCVTSLENSPEKDVTAERALDLAKHWPQLETAKQHEFFRNVVRRVVVGQTRVWIDVERLQLVETLLGHPPACGTVTGEHERGPLQLAAELKPLRRGGKIRLAGPNCSEETPILSLVKAIARARDWYERIVSGEVSTVCQLAQKTGLSSTYIKRIMECAALSPQITEIVLSGKHRPDLTLEELLKNAPVDWPEQLRGLQLT

SEQ ID NO: 311 - protein, 527 aa, unidentified
  source 1..527: note = uncultivated organism
MNVRNNILGMPRQEVDRKSLVDLYLRLSIDKEGKDSLERQEADLRAWATREGLTVREVWRDPGKSGYKRGVKRPDFDAAIRAVTSGEVGTLAVWKLDRLSRQGAGQVGTVLDDVDAVGGRLFFLKDSLDSSIPGHRIVIVMVSEQARAESANTSLRVRAKKEASRKEGKYLGGTAPWGYIVDEDRKLRQHPDEAPLVRELVDRVLAGDSLLTVCRDWNARGIPTRRQGGTWRTSTLSAALRSPALAGLMPEKRRVEGKWSTSTEAWRDPDTGETVSLMAPGERAIVTESERQRLLDLMDSRLRAYGRGRMPVRQPKSLLGGLLRCASCKRPAHTFGRSYRCRKWHVGGNDCERPLNVSIDVIEPAVRRAWAFGLAAHDPESPILAAVAEHWLQTYDPAPLREREELAEQLDEARARLAAADEDHYVRGTLDAERYARVSRALNERIATLAARLADLPEPAVDLTALLDPELSLPAIESAPVNEARALLRLAIKRIYVTAAPKPGARFLPHERIRIVWHGQPDPFGED

SEQ ID NO: 312 - protein, 521 aa, unidentified
  source 1..521: note = uncultivated organism
MKSDDARMIRRLRCAIYTRKSSDEGLDQEFNSLDAQREAAEAFICSQRGEGLIALPERYDDGGFSGANLNRPGLERLLADIRSGAVECVVVYKVDRLSRSLIDFARIIEIFEKHNVNFVSVTQQFNTTNSLGRLTLNILLSFAQFEREIISERTRDKVSAARRKGKWIGGRLMLGYDIDPCSSRLLVNDDEAVQVRTIFQLYLDYNALIPVVREIDRRGWRTKQWVTKVGASHGGKRFTKGRLYRLLTNPIYIGKIGFEKQIYEGEHEAIIDAETWERAEQILRRNGCDGGAEVRDSYGTLLKRVLRCASCDGGLVHTYTTSDSYHHRSYVCRNSQQRCHAKLVSEPTIKAAMTDQIRGIGSDPLIVAQTIAKAEEQRRLRAITLALEREAAQHALASMERELGKTLPVLSCDHSVADRVADLQERIGQTERRMSEIILELRSLEGQPIDEADLRTTLEQFEPVWESLKSWERVKVIRTLIERVTYNGKTNRVAVSFRSAGIRAMCCAARTPRHEVRVQRR

SEQ ID NO: 313 - protein, 593 aa, unidentified
  source 1..593: note = uncultivated organism
MVRRKNRSDGLLGKTSRRRLRCAIYTRKSSDEGLEQSFNSLHAQRDACEAYVASQKHEGWVLLPQGYDDGAYSAGSMDRPALQQLLGDIRSGLIDIVVVYKVDRLTRSLADFAKLTELFDANGTSFVSVTQQFNTSTSMGRLTLNVLLSFAQFEREVAGERIRDKIALSKRRGMWMGGLPPLGYDGIERKLVVNTAEADTVRLIFHRYLELGSIAALKQNLDRSGIVSKRRRFSDGREVGGVPLSRGALYQILRNRLYRGEIAYRGEIHPGNHDAIIDAGLWSQVQDLLVAQSQRKRRAPEQSNDRTAKASKQPALLADLAFDEQGNRLTPTYASRRGRRYRYYVSAPLTRGERDVDGIRVPAADLDDLIVKMLEQHLSDRSWIRAHLGPDLDALHTQRLIAAARSLASQIASFACRTDGGGINTSSRTIRSLLKRVTVGRQRLNIEIQVKAVADTLAKIDGSLGRMVAGRGTVMIELEAHALRCGKQVRLVVGEVETQYGSLDPQLVQLIADGRRWFEDLRTGRRATIAEIAAREHEQVSHVSRTIGLAFLSPEIVEMILLGNQPITLTPERLKPRRPLPLDWDEQRAQLLG

SEQ ID NO: 314 - protein, 568 aa, unidentified
  source 1..568: note = uncultivated organism
MEKKDEYIAIYSRKSRFTGKGESIGNQVELCKAYICGHYGEAALDYTVIYEDEGFSGGDLNRPDFKRMMDDAKKHRIHAIVVYRLDRISRNISDFAGLIEELARLDIAFVSIKEQFDTGTPMGRAMMYIASVFSQLERETIAERIRDNMHELAKTGRWLGGTTPTGYASEAVKSIHVDGKNRKACRLKLIPEEAEVIKTIYDLYMETDSQTITEAELIKRGLKTKNNKYFTRFSIKSILQNPVYMIADEDAYNYFVKVKSDLFSDRKAFDGVHGIMAYNRTCQEKGRTTKFRPPEEWIVAVGLHPGMIPGKVWAAVQESLERNKSKAYHRPRSNEALLTGLLYCTCGSRMYPKLSQRKTPDGKQVYTYVCKMKERSRRTVCYSKNVNGNIIDMAVIQEIKLLTEDREAFTMQLKKNRKIHIGERMNCRERLTALRKEEKDAEKKIAGLVDSLAGLGDSAAKVHVVKRMEQLNQEWMELKGHICELERLSSQNELSHTEFEGMCQILAGFADGIDEMSIQQKRMVIHSIVRKVVWDGLNAHVVLFGAQDDEFAFPDTSSDGSETELKTH

SEQ ID NO: 315 - protein, 509 aa, unidentified
  source 1..509: note = uncultivated organism
MSIAIYARQSVEKENSISCETQIEYCKSMMKPDERNEKLVTFIDNGFSGGNTDREGFQKMMRLIRQGKVEKVLVYKLDRISRSVSDFVNILQEFKSHNVEFVSSQECFDTSSPYGELVIKILMVFAEFERASIIERVTQAYAHRSEMGFYMGGRQPYGFELVPTVIHGINTKKLEPIPSETEQVRYIYEVYSQENISLGKLRDILVAEGKEPLNGSAWTTSKLSSMLKNPIYVKADSDVYDYYLNRGTQITADVSEFTGEFGAQLYGHSKHKSDNPDWSDMKLVMLTHKGVVDSDVWLRCQHKLEKNKQITNSFSNPTSWLAGKVICAKCGHTMTTVKGKANKNGEVRRYFNCTGKAHKKICKGPKCSVYAEDLENMIFECISEKFSELKIAKSSGKNTDTTEMNELKLKLKSIEKTEQQLMESIMSGDFNEDLVAIANQKATQLKRDKNALLNRIEELKSKDKETDIIIDFSKTWKNAGYDRKKSVAMILIHKILIHENGDAEIVWNL

SEQ ID NO: 316 - protein, 523 aa, unidentified
  source 1..523: note = uncultivated organism
MPKVGIYCRLSIEDRDKAESDSSASIQNQKAMLRDHCRERDWEIYDIYIDDGYSGVDRSRPEFRRLLSDCEKGNIDIVLCKDQSRFSRDTVVIEEFINDKFLEWGIRFIGIADNADTESESYSTMRLFTSAYNEMYVKDISSKIRRTLAYKREQGQFIGSFAPYGYQIDPDDKHRLIIDRETAPVVRRIFEMYVSGEGYRRIVRKLNDDGIACPTEYKRQKGSKYVNRKAETGGANGLWTQSTIGKMLANEVYIGTLVQGRSHHISYKNKKRKRVDESEWVRVTDAHEAIIDPDTWSRVQERLKSHTRVGRSSQELSPLSGKVKCALCGRPMKRNVYYNKAKTIRYYGLQCAAYKTGAMNCPNKSSISGLVLEQNILDELNAIIEQYCQADKIKFSDIYSEQLRQLEPELSKLNERRNSAEKRLVSMYKDKLDGVISNEDYILFREKLSGEERELSARIDDIKSKIIDCREHIRNNDGKKSVIEEYTHFSKLDRIVADEFIDLVEVGMADNNGERDIHIHWKL

SEQ ID NO: 317 - protein, 605 aa, unidentified
  source 1..605: note = uncultivated organism
MTNDFDSKPRATKVLHCAVYTRKSSEEGLDMAFNSLDAQREAGCDYIKSQKHQGWTLVPHHYDDGGYSGGTTDRPGLQKLLGDIQGGKVDVVVVYKVDRLSRSLADFAKLMQTFDEHHVSFVSVTQQFNTTTSMGRLTLNMLLSFAQFEREVTGERIRDKIAATKRKGVWVGGQPPLGYKLLRKGDDGYAPPPGGGDRILRIVDPEAKLVRAIYAGYLELGSLVELAARLNKQGHSTKRWVSSRQNRHGGNPLTAAFLYRVLTNPIYTGHITHAPGSGKPGPGLQARSNVQVFPGKHEPIIDQGTWDSVKARMTIIERDGQQRWTHTHLLKGKLRTFEDHAMSPGATVRPGTKRKGVDVPKRRVGYYVSQKGLKHGFASCPIKRVPAAFIDDMVRGMVMDYLHAQYGIDLRGLEPELRDRKLRDVVTAVVLAPEEIRVQIDRLGVLRCAEAMQALRTSRASAAVEPSCPYKPRIVAVNGGVRLVLPVRIKQVNGRRRVVSPDGNDLLVFLNSGGQPNAKRHIAEAIGLAYAWHRELERPGATFESVAKAYGVADSWVHSLLALTQLSPDILGRALSGTLSTSRSLTDLLRAGAWVDWQEQKRQIG

SEQ ID NO: 318 - protein, 652 aa, unidentified
  source 1..652: note = uncultivated organism
MLRNKIQIVVAYCRLSREDGDNESVSIGNQKKIIEAFAKEHNMIISDFYIDDGVSGYIMDRPDFNRLKMDLNTGKADVVIVKDLSRLGRHNAKVQLFLENILETGKRVLTIGEGYDTFNPKTHDMAGVHTLVNEMYVRDASRKIRVAIDIMQQEGKYISSVPYGYYLDPLRKGIYHIDETCAMYVREMFNMYLDGMGVNAIAKEFKQRGIPTKSMVIKQRLERIGRVYRGTPTNIWAPNVVRAMLKNDFYIGTLTLGKTKKRSIKGKPIRQPEESHHVFKDAHEAIIDKATFKVVQDTMVSRSKTNYRGKRIQTRQNVFTGVLYCNDCGTRLTSTQNRPNTRYVCRTYNFYGTSECSSHTITESELTEAVIYFLEHCRENLSEAINDLDKIIQNNSKKSNGNVIEVLEKDIQKVEYEIKILLEQKMRDTIKNPAMVDVIDSTYSGMINEKYTQINTFKTQLEDYQRDALRGDTVHQDLNSAMAILEDIINTKQITKRQVATIIDKIVVYNDGGLDIYLKGNLHELCTNYIQMKNLDKDKILQETISYIEQYPNEINMTKAWKYTKAQDIKVGYDNYNKIFKKLIDFGYLESKGYNKGYILAKPIEVLKNDFDNNIVMASSMRVTKNSVTIRIINKICEWVKGLEQAKKKNVF

SEQ ID NO: 319 - protein, 530 aa, unidentified
  source 1..530: note = uncultivated organism
MICKKMWTAGLYIRLSQEDLDIGKNKKESNSITSQKELLQEFVDKQDDIEIFETYVDDGFTGTDFNRPGFQKLLTDMKKGKINSVIVKDLSRLGRNYIEVGNYIEQIFPLYNIRFIAINDMIDSFKNPDSTNTIIVPFKNLINDEYCRDTSIKIRTALNTKKKKGEFVGAFAPYGYVKDKKDKHKLIIDKESTEIVKNIFNWYVYKGMGKISICHKLNDLGILNPTGYKKIKLKQNYKNYGIQDDKYNWTPSTIRNILKNEVYIGNTVQGKRKSKSYKIHKVEKVSKDDWIRVENTHKGIIDKATFEKAQELNQKEIRTSPKTQTTSIWAGIIKCNECQMAMNKKSSTNKTGKKYEYYICSTYRKKSNKLCTKHTIKAEEIYETILKLINMYIKKYIDTNEIIKENEKFNNNKKLNEVESLILEKENEIKRIVNYKQSLYEDWKNEDITKEEYTEYKKKYNLKQELIEKNIRQLKEEKKEDKKENNLLKELKEKNQIAKLTRNIISELIQCIYVKEDGSLRIKFNYQSCE

SEQ ID NO: 320 - protein, 527 aa, unidentified
  source 1..527: note = uncultivated organism
MIEQEYKVGIYLRLSREDCMLGESGSISTQRDLLLNYIRDNNLIFVDEYVDDGVSGTTFDRAGFNRMIKDCEDKKINMIITKDTSRLGRDHIEFGFYVERYFPEHGIRYVAVNDGIDTASNSSANDMLVFKSAFNDMYVKDISNKLRSSLYVKKRNGEFVGAYAPYGYNKSSDDKHKLVINEEEAEVVRRIFNMFASGLSLSKICDILTNEKVPTPSMSKNMNVGQNNLHYGVWSTRTINDILKSPNYIGNLTQCKQKKINYKSKKRIHNRQDNWITAPNTIPRIIDDDLFNLVGDMFKSNKNRTKGNGITDSLLLRGLIYCKECGHTFGFRAQYQDTKKYGKVCRIYGNCNYWAKRKNQGVCTPHSVKYNEIEEVVVNELKNMCNKYIDSKKLEDSLKKSNKLQAKKDKCNTQILKLENSNKILNKKIDACYNDKLDENITLDMYKRACNNFVNEIKANEHKIDEYKKEIYNIENNHNLSDKSLIDTIEKFLNMENPSRSLIASLIDRIEITEDNNIDIYYKFKLV

SEQ ID NO: 321 - protein, 684 aa, unidentified
  source 1..684: note = uncultivated organism
MKESTSHSRVVLPLHEQGIAIYSRKSRFTGKGESVGNQIELCRQYLRAHEPDAPEPEIFEDDGFSGGDLNRPAFRRMMRAAEAGRFRMLIVYRLDRISRSIGDFTALIERLAQLNVAFVSIREQFDTSTPMGRAMMYIASVFSQLERETIAERIRDNLRELAKTGRWLGGITPTGFSSEAVQAVTVDGRTKRACRLRLVPEEAETVKAMYSLFARLGSLTAVVKGLQEHGLTTKNGNAFTRHAVRDILHNPVYARADADMLAWLRAAGTELSAAQEEFDGRHGVLAYHRTDQSRGRTAVALPPEAWIVAVGQHPGLIPGSQWAAVQERLRRTDCRTPRTEHETPALLAGLLQCRCGRPMYAKYRRAADGERFSYVCRAKSTGGREQCSCPNVPGTAADAAVRAMLCALPEDHAVLAAALRGLRRGLPESSPAPPDRIPLVLRDCLDTIRRTQRVLEALTEQLRWDGETLRVTLRRVDCKCYTNLTEETAVEVAERVSFEAKWRLLAQVEVRCYILISYVSGAVKVAPLQILQFPVVLPHKFQDAEKFNLQFPDFSEITETADKLRWLRYQKGLRQRDVADYAGIDRSTYVHYEEYGKDLYPPEHMEKIAQLFEVPVDTLLDDYNLFLRNGQSNQIKAIRTKLGLTQKQYADKLGVSLGNLKHWEQNRKQIFKSTWEKYFKQMES

SEQ ID NO: 322 - protein, 513 aa, unidentified
  source 1..513: note = uncultivated organism
MANVTVIAPVKTESTIHKIRCAAYCRVSSSSEDQLHSYAAQVKFYGEKFNDSDNEELIDIYADEGITGTSADKRTEFQRLIRDCKRGKIDRIYTKSLSRFARNTKECLNTVRLLRELGITIIFEKENIDTAKNTDELMITIMGGLAQEESTSISQNMRWSVRKRMENGSFVQSVPPYGYVKKDEKLAVDPETSEIVKDIFRMYLGGVGTNTIARILNDRGILTGMYQKKWNHKIVKYILSNEKYTGDSLMQKTYKTETLPMVQKRNHGEYDQYYVENTHEGIISKADFQKVQEMLSVSASKFHRESTGKHILGSMIKCGECGSTYKRKCNNGKYYWSCIEHDLSSQNCGSKPVAEEAIMQAFTSLCNKLIQHYKEILLPLRRNLQELNIRRFSGNTKVLNIRKDMAELKEQRHVIARLRKRGFLDEKKYNEKLIELESKMARLDRELKKHTKTDNEDETLEQLDILIDCFESQSSIMSGFNEKLFGMIVEKMIIRNNMLEFSLISGIVFKERI

SEQ ID NO: 323 - protein, 512 aa, unidentified
  source 1..512: note = uncultivated organism
MANVTVIPAKPRQELQGLEATAKLRVCAYCRVSTDNEEQLSSYEAQVSHYTDYIKRNQEWDFGGIFADEGISGTNTKKRVEFNRMIDDCMAGKIDMVITKSISRFARNTLDTLQYVRQLKEKGITIFFEKENVNTLDSKGEFLITLLESLAQEESSNISQITRMGIAYRFQEGKVIVNHNRFLGYTKDDNGELIIVPEQAEIIKRIYREFMEGKSPYKIATNLQRDGIITGSGGSRWYDSTVNKILKNEKYMGEALLQKTFTVDFLTKKRVKNNGQAAQYYVENSHPPIVSKEEFAAVQIEFERRANMRGYSKTGKSKFTSDYAFSGKLFCQNCGSKFRRTKWGKGKNQQIVWICINHQMGGNEACNMKTVKEKALEQAFLRVMNRLIGSKELEKIAEEYTLEQLGARLEELQKEMISLTKAGFDENEYSTLAREIDLMRDRIQRIKGLQTERTLRVKYVQELQDYLTAQENEISKFDEVIFRRVVEKVKVRSMVEVEFLFKVGVEVREILG

SEQ ID NO: 324 - protein, 569 aa, unidentified
  source 1..569: note = uncultivated organism
MSNRQIDVYRTGMYLRLSQGDEDIDGYEKQESNSISNQKLLLEGFIASHNDLELADVFIDDGYSGSNFDRPEFKRMMVAVDEGKLDCIIVKDLSRLARERIGADELILKTFKKYGVRFIAVSDNYDSLTANRGETHTIIPFKNLMNEQYNNDISIKVRASQNVKRMSGQFIGAFAPYGYKKSDDNKNLLVPDPYAAGVVQGIFAKKLAGMSASAIDNVLNKNGVLSPAEYKAKCGEKYTTSFKGAGQSKWSSKCVGRILKNVVYVGTLAQGKRTTVSHKVKKEIEVPECDWIVVENAHESIISKMDFDAVQILMTRDTKAIVGQNEAYMYAGILYCRDCGSSMVRRKESYRGEDYITYICSNYNRNSSKACSRHSIREADLNEIVLGELQCYIKSMCDYKKVVEHLDELNVNYEEAVAHDKEIATLKAELTKCSVFKSSLYQDLQDEIISKEQFTRYREEFTAKEQEIEQAIKEQEEIIRSIYENGFAVSKDLEQFREGLVLGKLDRMTLVAFIDRILIYDDFRVEIVFKYRQEMEKVAGIFGDANELFYEPDYTIMDGLFVIELKEAV

SEQ ID NO: 325 - protein, 534 aa, unidentified
  source 1..534: note = uncultivated organism
MKTDAEEKKIIRCAIYTRKSTSEGLDQDFTTLDNQRESAESYIQSQKSQGWTAISEQYNDGGFTGANIDRPALQKLMDDIKTQKVDCVVVYKVDRLSRSLIDFVKLLQFFEENKVTFVSVTQHFNTQTSMGRLTLNILLSFAQFEREIISERTKDKMGAARKKGKWVGGLSPLGYDLDRVNKKLVINPKGAETIRMIYDLYIQEKSLLAVARRLNERGLATKSYIRKTGTFGGVKFSTTNIQMIIRNYAYIGKVFYGGEIYQGLHEAIIPEEVFQKAHEILALNRKERGVSKNTKSLGILSGLIRCKDCNVAMYHTYSKKEKFKYLYYVCVNSVKRGRKDCPTKSISADKTEETILGILRELSQEPKLKEKAWKRLVLEEKVAVVKTLLKEADYSAKDAILGLALQGEGERREFRVEVRDLKHVPASKKEAIKNEPKVRQNLALAHQIEELLDTGKINDVKQLTGHLNMSHARIHQLMAMTLLAPSIQEDILLGENERLSEIPEYKLREVTSETDWQTQRNLWDKLLLPIPAAN

SEQ ID NO: 326 - protein, 539 aa, unidentified
  source 1..539: note = uncultivated organism
MKAKQNYNAALYCRLSVDDGNYGGSVSIETQKIMLEQYCKDHKITNYIFYCDDGSSGTNFERPSFQRMYDDISQGKIDLVIVKDLSRFGRNYIEVGSYVEEFKDSGVRFIAADDSYDSLNNSDDLMFPMKNVINEMYARDVSKKTKAAKKAKARAGQYIGSKPPFGYKLDPNDRHHLVVDEPAAETVRRIFRLFAQGCGYNKMAKLFREEKVLTPIAYFNLHNPDYFKSDYWRKEFDWHVTSIKVILENEVYLGNLIYGKQRNKSMKSKQKVRNDRDDWIIVENCHEPIISQELWDTVHKIMKSKHRPSGTGQTQIFAGLLYCADCGHALTYSQKKRRDGTYHGAYSCWMYKTHGKEYCASHYITYDTIYSLVLNDIKRILAGYCNDEEKFRSFLENRYRCSAQKENANLKKEYELKKKRCDELDRIISRLYEDSVLGKITESRFEIMSEEYESEQKRIRSELPEIKDRIAKLSSDNSAADKFIRVIKQYTDIKELNAALLNELIDRVFVHHKEKTSDGNTIQQIEIFYRFVGKLDKSE

SEQ ID NO: 327 - protein, 558 aa, unidentified
  source 1..558: note = uncultivated organism
MLNSTTIFRAADYLRLSKEDGDFSFSPGKRESNSITSQRDLIHSFVSKCPDIELVAEYVDDGYTGTNFDRPNFQEMMKAVERGEINCIIVKDLSRFGREYIDAGQYIEKLFPRKGVRFIAINDHYDSLAANGSGDSLIVPFKNLINDSYSRDISIKVRSNLENKRHRGEFIANFPVYGYIRDPEDKNKLLVDEFAANIVRMIFRWKIEGLSPVKIAAKLNEMGVLAPSEYKKASGSKYKTSFKTHRKAEWSPVAVMRILTNETYCGVLVQGRRTTPNYKVKKVIYKDESEWTRIEGTHEAIIRSAEFNIVQRLMNEDCRSAPGGETVHPLSGRIYCGDCGTLAKRKVVSHANKRYAYYCCPHSGKNGSCEARTISEEALEAAVLASLRLQISLVLNMEQALSQIEELAWERREIRKLEANIEVQAGIIEKNNDLKVNLYEDFRKGLIDREELRQLKEGFSQRIQEAEQSIGVLRQKIRELEDGIRTQDGWIAQFRAFQNITELSRPLVVNLVDRILLYPDKQIKVELRHKDQLRHAMEFLCEQDKSMSVALAELREVV

SEQ ID NO: 328 - protein, 510 aa, unidentified
  source 1..510: note = uncultivated organism
MAEITIIPAKNRSDEIVRTAAYARVSSDSEDQLNSFATQIRYYTEMLQNSTDAVFVDMYADEGISGTGTAKRTEFQRLMSDCRKGKIDRILAKSISRFARNTRDSLEAVRELKTLGVSVYFEKENIDTGEISSEMLLAIYSQFAQEESMSISKNVRIGVHKRMADGSYKNPSVPYGYIYDKGNISTDSEKSKVVQQIFEWYSVGVGAEEISARLNKSKISAPHGQHWRPSAILEILSNERYIGDTLLQKSFMSDTLPFRQIPNRGEKPQYYVSNTHQPIIECGLFNNVQELIRSKKLHINFTPQIKVFSRKIKCVCGGTFRRKKVREKIYWVCRNHDHKNILECEIRQIREVIFQNSFVQMFNKLQAHYKAILVPMLRQLETLSEKEKSGNTQLAELRKEIAEIKQQAYLLTMLNSQGTLDGAYFKERTQELDRKLIIAQKQLHVSLDDKYSERLDDIRKLIGIFERAKPITDFDEIKFGQIVEKITVLSEKEIRFDLIGGIGFTEQIER

SEQ ID NO: 329 - protein, 521 aa, unidentified
  source 1..521: note = uncultivated organism
MPETDPKTLRCAIYTRKSTEEGLDQEFNSLDAQRDACAAYIESQRHEGWSLVPDYFDDGGFSGGNMNRPSLKHLLEDVKAARVDVIVVYKVDRLTRNLSDFARIVDVLDGNNASFVSVTQAFNTTTSMGRLTLNVLLSFAQFEREVTGERIRDKIAASKARGMWMGGNVPMGYDICDRKLIVNLEQAKKVRAIFERYLSIGSVIALAQNLEIEGARSPRRVSRTGKESGGAVFSPGALYSILKNRIYLGEVSHKGKAYQGQHDAIIDHQLFETANELLARNRANTILGLNAAHPSLLTGLGWDSDGRRMLADHAAKRGKRYRYYASQKGKRCGNKILRVPAGDLEAMVLAQLRQRRMSEGVINQHAKTSSRETVLAQIDKAIITAESVEIRFKDADVFGVKTIKIQAQLARRGKETKFVEPPNNSAIVSRDPSLIKLVVKAHRARSALEHADGLSIAEIASAQSLSSDYFRVLLRISYLAPDIVGAILDGRQPVQLNRQRLARATNLPVDWQEQRKALGFS

SEQ ID NO: 330 - protein, 539 aa, unidentified
  source 1..539: note = uncultivated organism
MVDDTSLKAVAYCRFSSSNQREESIDAQLRAITRYIENSDGKYRFIDQYIDMALTGTNTDRPNFQRMLEDAKKGLFDVVIVHKMDRFSRNVRDTLNIESELAQYGVKIISVIEQFSDTPEGQLQQIIQLGVSQYYSSNLAREVMKGLRENAYKCLHNGGLPPLGYDVDSITKQYIINEKEAESIRIIFKKFLEGWSYRELAEYLNVLGYRTKIGNKFSANSSFYDILVNSKYKGEYVFGRSLSKPKQPGMKRSHRKNKDESEIIRVPNGLPAIIDEGTFEQVQKLLASRQRSKGASKAKEVYLVSGLIECGECGSAYHGSARIGGRNKQKYVSYRCSKRKKIENPCQCKEINRTLLDSFIVNQLFTTILNPQHLELLHQKVNEKLKQKFSEMDDDLPKLEKQLKEVNQKASNLVQAIAVGGLGSIDTITAELQRLEQQKIVLTNEIQNHQVKQSEVNLTLDQMKEVLEEAKEYVLKNNDEMMKYILSRFIHKIIVKDTAIEVEYNLGGFFVEFKQVVLIETKVYSKKVIYAYSPLKEVS

SEQ ID NO: 331 - protein, 613 aa, unidentified
  source 1..613: note = uncultivated organism
MSPRAAKVRSGMAAESRSDQARAGAGGLAGAARAGARPGAVRCAIYTRKSSEEGLEQDFNSLHAQREACEAYVTSQRHEGWTVLPEVYDDGGFSGGSMERPALRGLLAAIDAGGVDVVVVYKVDRLTRSLADFAKIVEVFDARGVSFVSVTQQFNTTSSMGRLTLNVLLSFAQFEREVTGERIRDKIAASKRKGMWMGGNVPLGYAARDRSLATDPEEAATVRQVYDLYARLGNVRLVQVETDRLGLVSKRRPRPDGRVLGGVGFTRGALYKLLSNPVYAGDIVHRDKRHRGLHAPIIVPEAWEAVQRQLTSQAARTRGQGSAQSPSLLAGLIVDDAGAPLTPTHANKKGRRYRYYVSRMLVAGPNAEPALSATSRVSRKPDADTWRLPANEIEMLVIEAVYALLIDQSRLMDQLGLGRLRPDALDAALAASAQLADALKDATGHEQRDLLQAIVERVEIGPERVTVDINTIAVWTELGVANEMRIDAEARDPRLQLTIPIRLARRGSELKLVLADRPETNRDRNLIGRLAKGYLWFEELRTGAVDSLAAIAEREGITVSMVRRACDLAFLSTDMIEAILAGEQPVELNSEAFKVAYPLPIGWEEQRRVLGFA

SEQ ID NO: 332 - protein, 524 aa, unidentified
  source 1..524: note = uncultivated organism
MLKNIVDIYIRLSDQDRDKKNPSDESESIRNQRKMLVDYCKKRGWIINDICCDEDYSGADRNRPGWNQVLKDCEEHKCDIVLCKTQSRFSRDMEMVEKYIHGKFLEWGVRFVSIVDNADTSVKGNKLSRMFNGLMNEMYLDELSGNVKATLGIKRKNGEFVGSFAPYGYLVDPENKNHLVIDEAAAPVVRRIFDMYINGAGYIAIANALNAEHISPPCERKKQLGLKYYNANYEKTHSPIPKWSDAAIYTVLRRREYTGALVQGRETVTNYKTGARSKKPEEEWDIVENAHEPIISNETFLLANEIRMKRGRSQKIPTGECYSLARKVFCGECGNTMWKNSFEIRGSRHNYLACRTRKTVKGICPNVHQIKLEYLETYVTAKINELLADYRSGRIELYTDNSSEIKKISGAIELRENEIKQNDLKLAQIYEDKLNGIITADEFNRYHKKYMMLNEKSEKELEILRCNLYSISKKGNESLRKDIISKYHSIEKLDFKTADIFVDKVFVYGRRDDGTRDIKIVWKI

SEQ ID NO: 333 - protein, 517 aa, unidentified
  source 1..517: note = uncultivated organism
MKKITKIEPTAVGKMLMRKRVAAYCRVSTGTDDQLVSLEAQKSHYEEYISSNPEWVFAGIYYDEGISGIKKNKRPALMQMMQDCESGMIDVILTKSLSRFARNTIDCLELVRRLQKLGVTIYFEKEKLNTGKMESELFLSVMSGLAQSESESISQNNAWSVRHRFEDGTYKSGYAPYGYSIEDGVYSINEEEAQWVRFIFDQVVKGYSCPKMAKLLTEKNAPTRKGGTWHTSSVYAILKNERYIGDCMFQKTYKNSQGKQSKNYGEADKFYVKDHHEAIISREVFEAVQNLLVQRAMEKQLNLGTANIHYPFTGKLVCGKCGAKLIRHMNTISGIKSPIWVCREHLRHKEQCPMKYVKESSLKGAFATMMNKLIFGSDEILWGLFNNIRQQNTNSNRLRIAEIDAAIGEMTERRQSLSLLANKGYLDAAAFAQETNSIINETEKLKKEKELVVDGADEVRQRKLALEKLLRFIGRRPMFFDFDGETFENFVDHATLVSRTTVTFHMKCGLNLSEVFR

SEQ ID NO: 334 - protein, 530 aa, unidentified
  source 1..530: note = uncultivated organism
MTYPKGGETMKRITKIEGNSAYVKAVKKTRVAAYCRVSTGSDEQLLSLETQKGHFEKYIKAHPDWEYAGLYYDQGITGTKKDKRPALMQMVADCEDGRIDRIITKSISRFSRNTTDCLELVRKLLSLGIPIFFEKEDLDTGSMESELMLSILSSLAESESASIAENSKWSIRRRFENGTFKLSYPPYGYDYIGNGEWAINEEQAKWVRFIYSETLSGKGSDVIAAELTELGVPTRKGGKWTSTTVRGILSNEKYTGDCLFQKTYSDEQYNRHRNYGEMDQFYMEGHHEAIISHEDFEAVEILIEQRSREKGIVKGDSKYQVRYPMSGKVFCGECGSVYKRRMNYSTHIQYPALTCSGHLKDKNSCSQKFIREDALQMAFVTMMNKLIFAHKEVLQPLLTSLRSISQKDAVSRLTELDERLEKNAERQNTLTTLMTRGYLDPALFTQESNDLLIEAQALTEEKEHLVFSVNGEMKKTEKLADLIRFCSRGEMLTEFDGDCFTRFVERVVIHERTTAFFELKCGLTLKERMR

SEQ ID NO: 335 - protein, 664 aa, unidentified
  source 1..664: note = uncultivated organism
MPDAVVDSRYIALKLIALLYEKGAINRATYECVCGICTFLREKKLRYNGRIQKEDSSMNNIKQDRARPRKVVFYGRVSTEHEAQISALDNQMEWYQELASSHPNWTVVDQYVDEGITGTQAKKRPSFLRMIEDAKSGKFDLIVTREVCRFARNTVDTLSYTRELAKLGVEVYFAADGIWTMDNDGELRLSLMATLAQEESRKISERVLAGQRMSREKKVLYGNGNILGYDLDKANNTYVINEEQAETVRMIFEQYATGDGLTKVAKTLMEKGRKDGAGHVNWDASKVTRVLRKATYMGYCVYNRSRTVDYLEHRRVNNTDEDTYVMVKGDFPAIIDEELWYKCNAIRKGRTRHLLDENGKPRRYGGTIAKNVWVTKLVCSCGAKFRRCLWQTKADGTQTWGFECYRHTKRSLQFLQQHGLPEGLCDLKDFPEWKLELMAVKIFEAVWGSRREAVLEACRMLSACYQRETADPVKLNALDKRIDGLNEKLNNLILMKASNQITLKQFLEQSNEISAQQSRATREREELLARESQDGGLDIDAIEASLCEAVTFTDGKVSEWFIQTFVKKVVPMDGTRFAWVLDLAPQPQTVFCEATGRKEYPRISLESNLFPGAWPDIQDEPPDQPFLLDREGNPNGDISAAELEQGRLPSRTPKSGLMQLDNVF

SEQ ID NO: 336 - protein, 523 aa, unidentified
  source 1..523: note = uncultivated organism
MIKVASYCRVSTDSEDQANSFESQQRYFREYIERHPDWELYEVYADEGITGTSTKKRTQFNRMINDAYLGKFKLIITKEVSRFSRNLLDTIAYTRELKSLGIGVIFMNDGFTSLDPDSELRLSIMGSIAQEESRKTSSRVKWGQTRQMERGVVFGTSLLGYDVCDGKLTINPEGAEIVRLIFQKYGIEKKGTSIIARELREAGFKTYSDNVVWSSSHIIKILHNEKYVGDLVQKKTITLDYLTHAKKYNRGEEELITIRDHHEPIIERELWDTVQEELKKRNRKNSTSGHSNRYVFSGKMICGECGARFVARSKTRKSGSSYMRWGCYTASTLGVKSVDIQGNLIGCDIGKTIRDDLAMEALTKAIKSIPVDWGWIIQNLTNIVNAAVSASDDPMDDVQKLEKQIQQIMKKKEATIEAYVSGDLSKEELQHMKALFDERLKPLKERLQACKKTKKPTPAQIQSDLQKQIKSIVTCKHIAEPFYKALLEKVVIQKDGTFQISINHIPQVWHFELQYHKTSQEEK

SEQ ID NO: 337 - protein, 526 aa, unidentified
  source 1..526: note = uncultivated organism
MCCQQEVATMATAQDNLARKQIYIPALQPEAVILRVAAYCRVSTDSEDQLNSFVAQQSYYNDYIRKHDNWQLAEIYADEGITGTSAAKRDDFQRMMADCRKGRIDKIIVKSISRFARNTKECLECIRELKALGISVFFEEHNIDTCMVTSEMLTAILASCAQAESESISKNMTWSVQRRMQKGTFNTCRAGIGFLLSKDGLAILPEAVPVIQGIYMDYVSGRNSREISNRLTAEKALGRVWNRKLVDYILTNERYAGNALLQKKYRTDTFPRVKKPNRGERPMYYVERSNPAMIEQEMFEQAALLRNNRRHETVQVEARPFAKKLYCNCCGSLLRPKKVNNTWYWVCRTHEEYIDRCSLLPVAETVIERAFMRLYWNLKHHQEVLSFLLQQERKIRNRQMLWGADIIELNKRISDIISQSHKLTAMQRNGNVDPDIFIAKSNQLAEQLRKAKQQKEKLQDQEDNNLIESTGQLIQVISDGPDILDTFAVELFCELIEKIIVQSNTEIRFRLKNGLELPESIERTVR

SEQ ID NO: 338 - protein, 560 aa, unidentified
  source 1..560: note = uncultivated organism
MQLSKIKIYNAALYYRLSDEDRAVSRREKKESDSISGQKNLIKDFLKNKTDINIVDEYTDDGVSGSSFSRPAFNEMMEQIESGKIDCVIVKDLSRFGREYIDAGNLLERVFPSLGVRFISVNDNVDTLYGMDSLTIALKNIMNDEYCRDISIKIRSHLTTKRNHGEFVGSYAIYGYQKDPKNRHQLIIDEYAAQIVQQIFSWKINGLSCKVIAERLNDLGVLSPYDYKEKMGLNYATEFKVNEQCQWVAMSVRRILDNENYTGTLVQGKTTTPNHKVKKLIVKDSSQWARVENTHEAIVTRREYELAQKSIAVDSRTPPGQTTCYPLSGMMKCGDCGSNMIRKSQKCGQRVYIYYECMEHKKSNRCSSHRIREEILENTILQTIQTQIDLAVNLQECMKELDVDLLMEHDRKKLQDAIKLHDADVMKYRELISGLYEDLRSGFLTKDDYSSYKQDFSEKKKKAEKALGIAQGELQDIEKKKTTNYQWIENFLKYQDVGTLTRAMVLELVDEVLVFDKNHIEIRLAYRDEYAEACKDMETVLFQMGKLDAKEEMANGKNIA

SEQ ID NO: 339 - protein, 659 aa, unidentified
  source 1..659: note = uncultivated organism
MNDNGIKNVGIYLRVSTEDQAREGFSLPEQRERLTKECELRGYTIIDYYQDAGISAKTGNHRPEFERMLEDAKNKKIDTIYAIKLDRISRSIYDMEKIMKFCEEYNIKIVCLYDDYNTATANGKMVARIMMSVSQNEIERTSERTKIGMDGALKAGHIPGKVPYGYKKNGKNLEVDPISSLVIKDIYDMYSKGNSFFIISEKLNKQKALNKTNWFDGTIRKIIMNPIYMGDYITRKGQPTEKYYENVVPPIIDKELWHWCQVQAPKNLKHYCRKEDYLFLQKLTCPKCGNIMGGKATRKKNGNIYYYYQCKDCKNYIREDLIEKQVKDIMNDFYEYDALINNYYYPLMRNKLNNPEKDYEKTLKELNKKQERIREAYINGAFELEVFNMEKDKIDKDIKLVNELLKETRTLNKTSFSKVDVLVRRDINYINRVKFPALYNSFAHNWSNSTRDRKQNLVLSYIEDIKLKQVGRKVIVDCINFRDTILTDFRKLIEEGFMDWAAFRNTDISDKYFRCSNSLNVEELKRYMAIMNQYYDVQIFEGTFNEETKFVNYKMDPYYDLLRIARKNKNKTMNVPIYVYGYHKANKNICDYDNDLSSSEMFLKAAFIEQISDGKIIMRDDVHGLLDNPQEESINWRRILEWSILSTIKFPYNIRVRLF

SEQ ID NO: 340 - protein, 530 aa, unidentified
  source 1..530: note = uncultivated organism
MTSFSMRAVGYRRVSMREQVDGFSLDAQENNIRKLAAERGWDLIKIYTDAGISAKKNSRRPELAKLMQDAEDGHFDVIIVDKIDRFYRHLNGLLNALDQLNSHNVTFISVQERLDFTTPWGKLTLTMLGMLAEIYIDNLRQETRKGKMQRAREGLWNGNISYGYCRGLCSKCTDPNGPGYCPDVGMPDKGNGKTMIEHPIDGNGVRMMFDFYLNGIKSDIGVAEKMNQMTFTLPDGTVRNYRQKGIHGRKGPGVFTKDFVRGVLTRILYTGKIAYYGRGRKRKIESVHPGKHPALISDETFNALMDLRKTMGTVSHMKRNTKQRLYPLTGMLFCATCGWSMRGTTWRKMGYVYKDSSRIELDNGHCEQKVMKAIPLEKQVIKLLYQATKAWEKSAKPYAIKKHANDAQTELQRAQELYIRGEITKETLEREKERVEKIIKPLQENNFTATLTLSKKVQEAYANWTKLSTIEQKRLLRLAIEAIFVRENALVAVQPTFAFLPLFTTFFEGCSKSGPDGIRTRDLGLDRAAC

SEQ ID NO: 341 - protein, 637 aa, unidentified
  source 1..637: note = uncultivated organism
MSFSLLSIMYKNVERSVSLIYNRNTILTKHKKVGRKMAKRKLNCYIYTRVSTELQLDGYSLEAQKERLRKEASHRGMRIVGEYSDGGKSGKNVAGRPEFRKMLADIKSGIDNVDYVLVFKLSRFGRNTADTLNSLQYMEDYGVNLLCVEDNIDSAGASGKLMISVLAAVAEIERENIKEQTMAGRQQKARDGLWNGGFAPYGYKLVNVDGQKSKMLVVDEEEAKLIRLIYEKYLQGMGVNAVAKWLNENGYTKTVRQNGTVPNISAHFVTNVLDNPVYCGKISYGRRRTEKIDGTRNEFHVVKQDKESYKLYQGQHDAIIDENIWYRVQVKRKKNAFKREKTHSLLHEHILSGIIKCPVCGSSMYGVVNRKKKKGSDEFYTDMWYYLCKNRKMVSGHLCDYKKHIRQDEINAEVIQLVKYVFCGENDMKDQILKKLGSDDSLSELLQEKERLTKEHDKLDSKKSKQLRRINELDIDDELYDDLMKTYRAGVQEINEQIAIIENQMYQNDLSIENAQGENLSAEVYKRIIDEMLDHIDDMPDSDKKLMMNLLIEKVEIYEEKQKDGRWVKSVQFKIPLNVDGKLVDTMFFDDDEDTENSLSNEKHVETVVLLSQQKPDDTIEIDLDLDELDLTAAERR

SEQ ID NO: 342 - protein, 519 aa, unidentified
  source 1..519: note = uncultivated organism
MAERVVQVIPATIDKIQAERKTRAAAYCRVSTDSEDQANSFAAQLKYYTDFIRGNTDFEFVDIYADEGITGTCVNKRDEFKRMMKDAANGKIDRIFVKSVSRFARNSLECIESIRKLANYGVTVLFENDNIDTKTMNSELILYVKSAFAQMEAMSGSKRVATAVRMRMENGECVATHAPFGYEFTEKGVLKIIPEQAEIVRRIFDLYLAGNGSNRIVEILNNEGVPSVNGKWTTVGVRYILTNEKYIGDTLHQKTYTPQIFPLRNRPNNGAVDQFYVENTHEAIVSREVFEAAQQRMRRNPNMPKAEKSQRLFDKMIFCEECGWAYKAKMLRGVRYWVCSRKSTAGHSCGGQNVREEEIKEAFVEVYNKLRVFEKEILDRTLAQILSVREKISGQNNEIAQIDAEIAKMCTQNNMYAQLHGQGIIDEVSYLERTTELGYKITELRNKRLKLLNADENEMLIENLRVLKEMLAESPKAILHFDPQLFLTVTEKVFVGNNGTVVFQFKGGLQLRQRLSEVL

SEQ ID NO: 343 - protein, 543 aa, unidentified
  source 1..543: note = uncultivated organism
MAVVKALIVVRLSNLTDETTSPERQRAVCERYCEDRGWSVVGVAEDLDVSASTTSPFERPSLRPWLDRAAEYDVIVFWRVDRLVRRVTHLARMIEWSEQNDVNLISATEAHFDLSTSIGQALAIFVGVFAQMEADAISDRTSQAFAHNIRAGKYRGGYPPFGYRPMKVGGEWRYVPDPVTSEQVRGLVARVLDGERPSSVCRDLNDRGVPTPQDYFRAEQGKAMTGAKWRTGNLVRALQSPTLLGQVVVSESEKRNGRKVYTSPTVLRGDDGAPIVRSEPILDRDTFDRLQRALADMNGKRTPYKKSRALLLRVVHCAGLCAHKRGGQECPADCPGTCGRPMYYAKGRTKTYYRCSSASFETSCGNRAVPVEDADEFVTTALLDDFGEVPMMRKVYDPGEDHAAELAEVEAELADVAGLIGTGPFRSGPARAKLEARAEALEARRQALAAVPYRPAGYRFEPTGRTFREHWDGLDEQGRNLFLRDHHVRLEVRQTVGSPEWHLSFGDVPDLVRAINPEAADRAAGLMSGEGWTWPAVREALGG

SEQ ID NO: 344 - protein, 505 aa, unidentified
  source 1..505: note = uncultivated organism
MKTAVIYARYSSNSQTEQSIEGQLNVCNKFAQDNGLYIVDTYIDRAMTGTNDNRPAFQQMLSDSERGKWDIVLVYAIDRFGRNSTDIAINKYRLKKNGKILLSATQKTSDNLDGTTNLDGIILEQVYIGMAEYYSKELAQKVSRGLHESRKKGQFCGGSIPYGYYVKDKRVHIDEEKAKTVIFIYEQYALSESVPRIIVKLNEKGLLHDGKPFIPNCVYSILRNEKYTGVTKVRDEVFDIFPRIVPQELFEKVRKRIANNRYGRRGVTESYLLRNKVRCGYCGNPISAECGTSKHGKQVRYYKCRGRKKLHNGCEKSPIRKEALEKFVIDNMIETLTSKEEMQKIIKWLMEVQEAQSKNRPIVTALEREKHQIENALNNIMRAIEEGITSNTTNRRLHELETRQEELEKELVIEKSKTALLLTEEEIRAFYEKALKLEIQELVNYLLEEVTLYDDKIIIRYKSATKNGSDESQGFSFYMGKTVMPVIILNKNDPVYVAYEVIKVI

SEQ ID NO: 345 - protein, 527 aa, unidentified
  source 1..527: note = uncultivated organism
MKKKVRCAIYTRKSTEEGLEQDFNSLDAQREACDAYIKSQVHEGWVLVDKQYNDGGYSGGTMERPAFKELLKDLENNEIDIVVVYKVDRLTRSLMDFSKIIDVFDKHNASFVSITQHFNTTTSMGRLTLNILLSFAQFEREVTGERIRDKFEASRKKGLWLSGICPYGYEKDEHHILHPQQPYADNVRILYESFLEMKNVLKLKKYLAENEILTRSGKELAKGSLYHILSNKVYLGKIIHKNKEYDGLHEPIISEELFNNVQNLLKANSVQRKHSTNAKTGSLLAGLLFDDKGNKMSPSYSNANNKHYRYYISMSIKNPVDYERREITKISAGEIENFVQNDLKKLLKNTHKMQTYLENYSVEQQKLILGLMESSETDKVFLRTAIKRVELNIDYIRIISYDIAYIAKHFATLAFNAEFNHIEEDEQIITNRIDVRISLTPQRQNKIIILGKANYDMKLIQAIVKSFWYNKLGAERKLPIEARNGNNKRLRKLRFLPPEIIESIMNGTQDPELNVKKLVEMAEKAVL

SEQ ID NO: 346 - protein, 577 aa, unidentified
  source 1..577: note = uncultivated organism
MSKKAYVYTRVSTLMQVDGNSLEGQLKEIEKYCEYAGIEIIAVYSDEGKSGKSITGRPEFQRMMEDVIEKEEVDYVIVWKLSRFGRSAKDTLNSLEILQQHKVELYTVVERIDSGNKMARFMLTMLSALAEMERINIIEQTNNGKKYNALDGRWNGGAAPYGYTLVDKELVVVPEEAEVVKKIFHEFVYTDFGYNGVTGILNKANIKPRQNRRLDRKAIAESGTDDKIYLTAAEDWYATKVKKILDCPVYCGKIRWGNESVIHKDGKERRVKRKEEDVILVNGIHEPIISEELWNLAQKKRKETGVAFGRPDSNSEFIRNTLNGIARCPNCGSGMIAHKEIYKKKNGESSFYYNYICGYYNNHKHGKCKRNAIKADYLEGAVVDEIQKYIRRPNLIDDITKNLGKQIDTGSIEEEISEAIEDMKELDKREEMQYNILSQIGIGKYKKINPDMIEETLEKISSQREELEGFIERKKREIEAINQDKLNAESVKFLIENFDKAYNYASKEQQKRLIQSMVKEVKLGYLEDTKKVIPVSMKLKITGEQIDLYHEYKGICGKDNSELNKVNDETCCLLSKL

SEQ ID NO: 347 - protein, 562 aa, unidentified
  source 1..562: note = uncultivated organism
MVRASSSSVAPSLACAIYTRKSSEEGLEQDFNSLHAQREACEAFVLSQKGLGWTLNPTTYDDGGFSGGNVERPALKRLIADVEAGKVKVIVVYKVDRLTRSLADFVKLVELFDAKGVSFVSVTQQFNTTTSMGRLTLNVLLSFAQFEREVTGERIRDKIAASKRKGLWMGGVPPVGYRAKGRTLEPEEPHASRISEIYSLYLQLNCVSKVAADLKSRGWLTAERENKRAGFTGNKPFSRGHLYRILSNPIYVGLVPHRGENHPGQHPAIVNQELWEQVQQRLQLNRQGTKTQSKAADPSLLAGKLVDETGRRLIPSHTRKGKKRYRYYVTPADDPGDPIRLPAGELEKLVIQAIVNWTGSDKQVLDAVGWKDAVRAQEALKAAKRLYLAVHLSPKAEIASAVRQIEVGETTVRITLDLVGCGLQKAGAGGTGQGETLIEVPAQRKRCGMAVRLVIGGSSPGEIKREPDPTLLALMAKGKTWLQQFTREGQAIEMIAEREKFSVRYVNRVINVALLAPDIVQAIERGEHPAEVNATKLLTSVPFPVDWAAQRQVLGMAGVPAA

SEQ ID NO: 348 - protein, 1109 aa, unidentified
  source 1..1109: note = uncultivated organism
MERKKVELQWQPPQKLSLGENGEKLRVAAYCRISRIQDDTKLSSLENQMDYYSKLIVANPDHKLIGIYYDSGISGLTIDKRPGFKRLIRHCQEGKIDLVITKSISRFSRNAKDLLETVELLKEHNVTVFFEKEKIDSSKTRHKFFLTALAAVYQQESLTISEHVKWGFEKKNRMGEPVMLNQYGYRVVETNGGKTFRIVEEEAHVIRTIFEEFLLGKTSHQIGLMLTEEGIKSPGGKELWASASVKNVLTNSNYTGDRLTNKQTSIFLEKKAMMNDGHENRYLIKNTHPAIIDEVTFNKVQEIFGSRPKREKSANVKYPLSQRITCGCCGWYFHRSKRKTNSIWKCGLNSKNKNSCSLDVPFSESTLLEMMIRALKVRYDFEKPGALKHMKDNLERVNQNDRFELHRMSHLMSLILAKEELAESDHNMYKYKMERVKELENTIVAFEDLATKIEEDRIYRVSALERLQRVETVDKFMDMADIPLLRAWIMELSILTEQDFQIVWMDNDITEIGEFKRSYDTKATVPSNNKKQKAGIEVEHEDTSKFTIPKNDESIPKTVQSKEGSEDQVEVLELRNKPPNELINKIKKKLKDDSQGIIKIEPKKKSKKTRVGVYARVSTREPDQLGSLEAQVAYYTFALLKDSNNQLVRIYADEGVSGTNAEKRAGFQKMIRDCENGKVDRIITKSISRFARNTVDALDYVRKLKEHNVSIYFEKEGIDTASEDGEILLTVYSALAQEESRSLGESISWGKKAYAKRGMVGHSMRTYGYDFKKDRTWYIVEDEAKVVQSIFEKCIDGLSGLQICKDLTKEGIPTMKKKASWNPKTVSTILNNINYTGDLLYQKRYTQDTFTSRSKLNFGQTSQVLIEEHHPAIIDKTTWNKAQLVLDKRRPRKSAKAKVFHEQLEFFSRFICSECGQFYFHVTRKTKAGIKHRWRCKAALGKDALINCDSPYIDEEEIKILFTKILSGIKKDKAFIAQLNKQIEDKKLTENEKRLLEYYEEENKKEYLELYKVVEDGTKSGEDTTEIKRYTDSIMETQDLINELNDKEDAHRFLVKEKTWLFKELENIGNEEGALYREDIFKRIIENGVIHPDNSITFHLIFDVSRHIK

SEQ ID NO: 349 - protein, 534 aa, unidentified
  source 1..534: note = uncultivated organism
MAKAAIYCRVSSEEQAEKGTIEGQVQYAKKYLELHGPEAGITEWEFYLDEGVSGTVALLDRPAGARLVADAQAGKFQVLYVYRLDRLARSVKHVLDIYDLLEKQGIALKSMTEAFDTGTPTGKFFMTLLASIAALERDTILERTQMGKDRKARQGKWVTGMPPFGYRIGADGALEVYEDEAETVRLIFRLYLEGMSTIDIAKYLNARGIPTPAKSKRTKNKSTGKWHAGHISIILRTEAYTGTYTYLKRSKRRKDTIEIPVPAIVSDQDFVAAQAKLIENADAARGSRGRNYLLRGLIFCGNCGRRMVGSSGMSKEGRVYYRCTGVINTGAGRQCNAKLIRAKDIEDAVWQDILEFAKEPGKIKEIMEAKIVQNKQEMDPVREELAVLEKSILEKQAARGKVLSLCARGIITDQEAEAELQNLAREIEVLAARRDFLFGKQQAAQQFETEILNVQVLMEELAERLETITEEEKAEVIQALVKRIDVYTVEENGKRGSKVVIQYRFGPRPGEKELYGSKNNRKCSNATRNFSITY

SEQ ID NO: 350 - protein, 553 aa, unidentified
  source 1..553: note = uncultivated organism
MKTAIQNYNVGQGLAPKIKRAAIYVRCSSDEAGKEGYSPETQEEKIKSFAKNEGWEINEESLYKDIGFSGGTEKRPDLQRLLKDARNKKIDVIIVYRMDRFFRNLRLLLNTVAELRDIGIEFKSVTEPFDTSTPTGRAMFANAGVFAEWMREVGLESRNEGMVKAMKEGKYLGGTAPYGCKFNKETQKLEIEKNEIKIVKMMFEWLVSEGLSEYKIQQRLNTMKVPTKFDLIGRKKITETKGWWNRKTVDRILSNEVYTGTFYYRKYLHTGRTKNESNLRPKEDWIKVEDKSLKVISKEIFEKGQKQLKKNKEQAIRNTKEIYTLQHKIVCGYDGYKYQSANRKYKTDEGEKRKTKYYFCVGNRSYMTARRCHVPTVSESRIMPPVWDKLKEILIEPEMALKQIEACKNQGDDTNIPERLDIIKKELSAQDEKKERYAELYAEKSISKNFYDKKIKECDDKAEKLHEEDAKIGRIATSEQEKEIQIMSIKDIYEQLKDGLENATYEEKREVLQDLVEKVVKTDDKLEIEFLIPLRGEKGQERLSDCSDNPRMD

SEQ ID NO: 351 - protein, 540 aa, unidentified
  source 1..540: note = uncultivated organism
MARKSRKIPTTVLVVQKQDAVYNAAAYIRLSSDAKRKPGDSLYNQQDIIENFIATSPNIRLVDIYIDNQATGTNFERPAFVRMLEDAESGRINCIIVKDLSRFGRNAIDCGYYIEKHLPALGVRFIAVTDSFDSLEGDGGVLLPLKNVIAESYALDISRKCRSVQRQNIQDGRFVGRMAPYGFAKSPEDCHRLIIDAEAAAIVRQIFAWAAGGIGVGEIIRELNERGVLPPSHYKWEKGQITSKKLLGRPFWQKRTVTDILRDRVYVGDMVQGKSRTVNGKELSVPRNEWICVPNTHEPVISRELFEHVQEVLRQTSEKDKAVRSTAVSYSPHVFKGKVFCAHCGHPMHRHRQNKDGTYWYRCESQWKYHKGACYQVSVKEEEIKAEVFALLRKHAEGILGGYIHIERMAPMKNAAADTELEEINRKLSSSGHFLKSLYENMVAGLITVDEFIAMKADYEGKIAALSKRADQIRTQRRERASKQESYRDFTDAVSDALSSKELTADTINCLVEKMQVQRDKSFEILLRFKDEFREVKRVG

SEQ ID NO: 352 - protein, 553 aa, unidentified
  source 1..553: note = uncultivated organism
MHSKQKQLNNTGIYLRLSKDDERAGESLSIDNQRLILQKYVAERGWNLVDEYVDDGFSGTDFERPEVKRLLDDAKTGRINTIVVKDLSRFGRNYIMVGQYLDYIFPAYGIRFIAINDNVDTADRNSTGMDMMPIMNVFNEWHSANTSKKIRAVLEASQKAGKYTSGYYPYGYLVGNDENRTAIIDEPAAEVVRRIYSLRIEGQSPYQIARKLSDEGIPNPTLYRTKKDGSKINRQCPPWWSHKTVRDILSDPTYKGCTVQHRRSTISYKNHNTYWRPQEEWIVKQNAHEPIVSEEVWEKAQEVARSVSRAKRTKSGVTFPLSGFIYCADCGHKMKIVHSKKKLKDDREYDCECYICRTYANLGKNYCTTHAIQRTDIEALVLADIRSKFDFVLEDKDTAREEFLKGKSKRSASARTADKRQLKTKYKRVEELDILIRTAFEDKVFKKMPENLCNSLCESYQAEQQTLKAEIAALEKKLQEESKDEADVEEYIRRIKMYGSCPELTREMCLQLIEFITIDAKTERNNRWHSPAPRNIHIYYKLIDKEHAKPNKN

SEQ ID NO: 353 - protein, 568 aa, unidentified
  source 1..568: note = uncultivated organism
MAPSSVRHPRRDFVMKAPAARPSLRCAIYTRVSTDARLEQEFNSLDAQREASEAYIKSQTHEGWSLVRARYDDGGFSGGSMERPALQKLLLEVQAKRIDVIVVYKVDRLTRSLADFAKLVEMFDAQGVSFVSVTQSFNTTTSMGRLTLNVLLSFAQFEREVTGERIRDKIAASKKKGIWMGGVVPLGYRVEARALHIVEDHAELVMGLFKRYLEVGSVARLKEILDAEDVRLPIRIDGKGRSTGGGLFSRGHIYKIFSNPIYIGQLAHKGLVHEGQHSAIVDRELWDKVQQRLENNLAAKTQRRERQSTNALLVGKLFDDRGNLMTPSWSKRGSKRWRYYVSQAILRGDKAGAGSVARVSAPEIESRVINAIGSFDEGQNPQAVHPGRHPSRDNIPPTENAVPQSDHHEQLRSRIERVILERTAIRIVLARKDNEDAETKVLTIPWAAPSPYRRREIIHGTSVGSSSARPLPTSARLVLVKALRKAHRWLDELLAEPTQTIESIAARESKSERSIRMTMSLAFLSPDLVKAAFDGRLPRGFGLTRLIDLPIAWSDQWAELGLKAPART

SEQ ID NO: 354 - protein, 536 aa, unidentified
  source 1..536: note = uncultivated organism
MRGDRSSKENGNGLGARAGVRCGIYTRKSTEEGLDQAFNTLDAQREAAESFINSQRQEGWTALPQKYDDGGYTGANMDRPALKRLLADVQSGTVNCVVVYKVDRLSRSLLDFARIMEILDKHGATFVSVTQQFNTTSSMGRLTLNVLLSFAQFEREMISERTRDKMSAARRKGKWVGGNPVIGYDVAPQGGSLWVNQEEAQRVREIFALYLELGSLIPVVEELDRRGWRMKSWTTRGGRQAGGKPIPKNSLYNLLTNMIYVGKVEYGGQVYEGEHNRIVDDETWNRVQSALNRNGRRGGRNIGNKHGALLKGLVQCASCDVGMIHTYVNKKNKLYRYYVCVKAHQRGWTQCETRSVSAPALENAVVDQLRGICQNPTLLREVQRQLAESRNQEVGELDREKADIEKELKKIAQQMKDAVSAVGRAGSSAEIGTSRLADLQDRVSQLSDRLAELDQQTTAIEAEGIDARDVETALHDFSPVWEQLSTWEQERFIRTLVAHVRYDGRSGNVTLGFHSRGIRGLCDWAPDLEERYDHAK

SEQ ID NO: 355 - protein, 509 aa, unidentified
  source 1..509: note = uncultivated organism
MDDMLTSDYDGCGRCLVGVRRLSRRTDATSSPQRQGDQILEATADAGGHVIAWADDWEVSGATDPLTRRGFGPWLRGEMGPYDGIAAASVDRVGRNVRDTLNTQTLLTTQDRIVVTADHAGVWDFSDPNQENEWLMKAWGSQMELRAIQKRNRDETVRARNAGEPKQRPSYGYMFVRLAPAAKVDHVEIDPVASEVIREVARRILADETGKITCATEAARLNREGIPSPSDRRAQLYGRAMKEGPWNPKTVKHILCSEAALGYLMHDGRPVTGEDGRPVRIAEPLWDRPAHDALVVKTAPKYDGSRAPKGAQLLSGTAFCGNCGARLHITGRRGGSGFAYGCNARVRGIRASAGCKPAPAMSVTAMDALTGGWFLSRYGAGEVMRKIYDPGTGHAAQIADLEATRTRLREDRQAGLYDSADDAEWYRTEYRRLGEEIAELKALPERKPGMRMVGEGRTIAQEWKSADGTRRREMLAEFEVRVALRPAGHGPRVAITGMEISQDGPGLAG

SEQ ID NO: 356 - protein, 542 aa, unidentified
  source 1..542: note = uncultivated organism
MRRIRCAIYTRKSSEDGLEQDFNSLDAQREACEAYVASQKHEGWELLPDRYDDGGISGGHLDRPSLQRLMQAVDEKRVDQIVVYKIDRLTRSLADFAKLVERLDQAEASFVSVTQSFNTATSMGRLTLNVLLSFAQFEREVTAERIRDKIAASKRKGLWMGGNVPLGYQADGRTLKFHEDEAATITTLYDLYLDLGIIREVKERAEDLGLRSRRRVRGAGRVSGGKPFDRGHIHHILSNPIYAGRIRHKGQVFEGQHPAIIEPALWEQVQKRLAGEAQKARGTSRKAKQSLLAGKLFDETGDRLTPSHSRKNGKRLRYYISHRLVKDRSQKHPDAWRLPAEQLEGLIADLLRDHLHRHDCTARLIRDLSAPEVSAKSERLHAIGQPKHCLGLVERADLIPGTLTVRLNQGELARALDCDAGRINTDELVLTSPFRMRRRGVELKLHLGDAPPEIDRTLVQNIVKAQRWMAMIIEGIPFSEIAQAEGTSKRRVQDVVDLALLAPDVLDAISIGQQPDGLTSDYLIKSGVPASWAEQREQFANL

SEQ ID NO: 357 - protein, 619 aa, unidentified
  source 1..619: note = uncultivated organism
MAKHKKRTEQDRPLRIAGYIRVSSQRQASEGDSLIAQRHEIEQEVEIRKRRESWKVAKVGYYTDAGKSAKDQNRPELLRLKGDIEAGQIDVVICMKLDRITRSLADFVELWELFESRGVNVISLREQFDTSTPSGRAMLRMIIVFAELEREMTSERTFDIMKDRVERGLWNGGCIVGYKSDPTEPGKLLVDPEWADIIRRQFFDAFEELGSAGAVQRKLHKLGLRCPVWTSRSGKVRGGKLFTKQQVIAILRSPLYIGRIKWGEAFKDDCHEPLISKEQFERVQRVLGETTKHRRNHRRNSDRCYLLRGLVRCSCGAQMTPAGAHGHGGKYHYYVCTRQVHEGGKVSCQAPRFPAEALEIAILERIRVLAAMEEARERIVQEALKVIAEESTRVRGEEEILRRQLAKVRGDIGQLVGVLKTLGATVLKSVQEELSRLEQEERGLDQQLQEVSERKNPLDQISSQARQFIETWKNVGQLLDQADAEEQRLILQHYVEVIELRATDSKGKVGTYALRLFPEVRPFTCQGDESKKAEGPAAQSPRGGSPLLTSDGQVLETVGKAPREGFEPSTRRLTAGCSTIELSRINTSTYKARPFARQGEYETTSHLFHTSRCPVRIYS

SEQ ID NO: 358 - protein, 533 aa, unidentified
  source 1..533: note = uncultivated organism
MNGQIQTNGNLALNGKKVIVIEAAPKLETAKLRVAAYCRVSSDSTDQLNSFMAQLNYYTTLIGSKENWTLADLYADEGISGTSAEKRPDFQRLLSDCRRGRVDKVLVKSISRFARNTKDCLETVRELKSIGVGVCFEEQHIDTSNMSGELLTTVFSTIAQKESESISAHMRWSYQARMKGGTFLPAAVPFGYVLRDKQIVVDEERAGTVRRIFRWYLAGSSMEEIAAQLNRENVLVRTGQESRRWLHTAISYILSNERYIGDSLWQKTYATDTLPARQVKNHGEREQYYAEGTHPPILDRETFFAAQELKSRRKESRGVCHQQESPLHRKIVCGVCGTLYGRKMLNGKTFWVCRNHDDSKENCPSGRIPEEEIHAAFLRVYRKLRLHGEPILKQLIADLQSIRERRMLWSVDIVELNKRISDISDQDRMLADMNQCGLVDPDIFISQSNELARQLRAAKQEKERLMADADDSTIPNTQELLETLETLPEFLPDFDGEIFADLVDRITAEEDGALRFRLKNGLELAETTERSVC

SEQ ID NO: 359 - protein, 546 aa, unidentified
  source 1..546: note = uncultivated organism
MPRKNKVKIKQDKEVTAKRAVIYCRVSTQNQGESGLSLAHQLNRCRSYCEAQDWQIVKEYSETASAKDLDRPEMQKLLLSANKNEFDVVVTLKLDRLSRVPRDFYNLFEDLGEIDVGLAVVEDNIDTTTAVGRMLVGILLQFAAFEREIGIERTQAAMDQIASEGRPGGGVPPLGYDRIEKHFEINAKEAKIIKRIYREYLLGMSPAEIARRLNSDGLRTKTHLKNDGSFRSGDRPFDMKILHTHITNPLYKGIIFHSGHNFPGKHEPIISVDKWEQAQLIVQRNAKKKNLGNSVRDQHLLNGLMTCEICGDILSPHGGTGKSKKVYHYYQCMSSKSTGRRKDCDNAPIRTIHLEGIVIDLIKKIAISDEFYKATEEAIDSSFKRNVIEKLKDEIHRTAGEESEIARRQNNLAKLISDGQIDSSGTITHELEELDRMRSTLATRRATLKEELATKKSSPPNPLKLKQLYQEFDEMWDSLSQSERRDITKLLVNEVVVNTPKGSKKGIVTVTLYHEPLITSIKEITKGSRLLTVQLRRRDLNSQPSD

SEQ ID NO: 360 - protein, 576 aa, unidentified
  source 1..576: note = uncultivated organism
MGIRVRNQAAKPKVLKCAIYTRKSSEEGLEQDFNSLHAQRESCEAYIKSQKHEGWIALPTLYDDGGYSGGSIERPALKKLLADIQSRAVDVVVVYKVDRLTRSLADFAKIVEIFDAAGVSFVSVTQQFNTTTSMGRLTLNVLLSFAQFEREVTGERIRDKIAASKQKGMWMGGWVPIGYDRKDRTLVVNEEEARTVRTIFELFLKLRNVRKVQAELARLGLTTKIYPISTGKVLGGLPFSRGHIYRILSNPLYVGEIAHRDLRHAGRHPRIIDQEIWDAVYALIGSNRREHRVRAKAGHASLLAGLIYDEAGRPLVSSHSTKNGKRYLYYITSDGSGRHPAPAGQTKLRLPATGIDAFVIGAFQTFLTDTTGLAKLLRVAQVRSGRLAEALQKAETTSQQLEAMSFQCKLELVTHFLARIDVMQTGLRMTFRVTGIVHYLIGGQNAGYANEQDTVLVDFPMPTLRQNGAIKLVVTQPKQKSEDASLITAIARGTCWFEDLTSGKASSISEIASRENVTDSYVSRLLNLALLSPTIVHQVLEGRPTATEVARPEMTRQRLPALWRKQCVSQSIARSR

SEQ ID NO: 361 - protein, 532 aa, unidentified
  source 1..532: note = uncultivated organism
MAERKTVDGSMALADKQVRVITIAAAEKPQAAKLRVAAYARVSSSSADQLGSFAAQHDYYQNLIRAKENWTLADIYADEGISGTSAEKRPDFQRLLADCHRGLIDRIIVKSISRFARNTRECLETIRELRLLGVGVYFEEQNIDTATMSGEMLTALFAAIAEEESKSISRNTRWGNRKRMAAGTYLPSSMPYGYRLIEKEIIIEPSEALVVCQIYQDYLAGMGTDAIARKLNEQGVPPSQGKKWGHSGVAYILRNERYIGDSLWQKTYATESFPTQQVRNKGELPKYYAEETHPPILSKEIFEAAQRLAADKKPHAVDELAMHSPLSRRIVCGQCGRSFRKRIDRGQTYWLCRGHEENMENCEVMQIPEDEFYEAFLRLYYNLKHSGADILPQMLSGLQSIRERKMLWSSDVIELNEQISKLSSENQMWADLKCQGLIDPDIFIARTNELTEQIRSLKQKKERLLLESADGTLARTKALIVALEAGPNDLDSFDAELFEELVEKIIVDGNGQIHFRLKNGLELCETVRRTIR

SEQ ID NO: 362 - protein, 533 aa, unidentified
  source 1..533: note = uncultivated organism
MIEKVGVYCRLSDEDRDKINKNDDSDSIVNQRSMCLKYANQNGWNVVDIYSDDDFSGAGTYRPDFERLIKDCESGKINLVLCKSQSRFSRDMEVIERYLHNKFIEWGVRFVSIVDNADTSIESNKKSRQINGLINEWYLDDLSTNIKKSLKNKREDGLFMGSFAPYGYDRSEEDYHKLVVDPVAAEVVKTIFKMYADGNGYYKICEYLNNNNIPPRSVYKRQKGSKFVCSNCDYKTVRWNPDTIAQMLKNEVYIGNLVQGKITSMGYKVHKFKKVDEKDWCRIENAHEPIIDMETWNKVQKILGTHQKPIKTGEIHYLTRKVYCSECSKVFMRNVYHVKGEETGKRAYLQCKGAKKYHTCDNNKAIRMDELEKIIIDAINDLLDNYYDKNNLQELYNKRKEQYTNNYETIKILEKEKHNLDKKIEDNKVFYRNLYEDKVKGTITEDMFCMMSADYLREIETMTKRIETIDNEIKSLEIVKEERKQADEILKKYKHIDKLNRVIVDEFIDKVYVGCYNKETKTRDIEIEWNIEF

SEQ ID NO: 363 - protein, 567 aa, unidentified
  source 1..567: note = uncultivated organism
MAIRIVAKDLIRCAIYTRKSSEEGLEQSFNSLAAQREACRAFILSQKHEGWTVLKDVYDDGGISGGTMDRPALKQLLSDIQEGKVNTVVVYKVDRLTRSLADFAKIIEIFDSNSVSFVSVTQQFNTTSSMGRLTLNVLLSFAQFEREITGERIRDKIAASKKKGIWMGGMVPLGYDCVNRELVVRESEADTVREVFRQYVRLGCLTKLKQHLEQSQTRSKIRTSNAGRKYGGAAYSRGALHHLLCNRIYLGEIVHRGEHFPGQHEAIVSRELWDQVASRLKQNNRAHRSAGRASTPSPLSGLLFDSNGVRFTPTQSRKNGKRYRYYSSQTMVQQNGVKPPITHFPAQELENFVAMQIFGLLRSPDKFVREIEDGKVGDSITKRIAQLVKGWTQLERAKLHQFIRCVVSRVTIGQSKLWMEIRKANLFDYLHHGPMRRDIAVAFHGKPSLQLVGDFEIARRGGEIHVVAPNDDSGRASPVPSIVKAIARSRDWYERIVAGEFGTLAQLAENSGLTKRYVRKILLCAHLSPKATEALLAGKHPPSLTLKKLLKGVPLNWLEQERAIFGR

SEQ ID NO: 364 - protein, 525 aa, unidentified
  source 1..525: note = uncultivated organism
MKNGTVKAPSAKRCAIYTRKSTSEGLELEFNSLDAQREACEHYVRAQTHLGWKLAEQAYDDGGFTGANLDRPAFQRLLADIEARRVDVVVVYKVDRLSRSLLDFARVMDRFNQAKVDFVSVTQNFSTADAMGRLTLNMLMSFAEFEREMIAERTRDKIAASRRRGKWTGGPVPLGYDVKDKHLVVNELEAVTVREVFDLYEQHRSTLAVARLLTERRRATKRHRGRGKPRETFVWTKDDVTRVLRNPLCAGWMRLRDELHEGEHQAIIDRATFNRVRALLDGAVRNGSSNRGRNPSYILRGVLFCAYCGSAFTPASTRKGSREFRYYRCVKRDKGGTDQCPARQLPAQAIEEYVVERLREAAVTNSLAEAITASVKARVEARRKDLLIERRDLPAKIAKLTGEGRGLADNVRDINAPGRKFLEERFEKLGEHLGHLEARLAEVERELASLQNVEVEAGWVAQCLADFNTCWDVLTPENRGRLIRALVHRIEVDEPANRVEMRVASFAAEVPQRVVAAVGAREASP

SEQ ID NO: 365 - protein, 524 aa, unidentified
  source 1..524: note = uncultivated organism
MSKTQSITTPRVRCAIYTRKSTEEGLEQEFNSLDAQRESGEAFIVSQRHEGWTVMPQRYDDGGFSGGNMERPAMERLIEDVVNHRVDCVVVYKVDRLSRSLLDFAKIIETFDRNGVSFVSVTQQFSTTTSMGRLTLNILLSFAQFEREIIGERIRDKVAAAKRKGKFTGGTPPLGYDVDPEKTRLVVNREEAKVVKHVFQRFMEIGSPLTIAEELNKKGITTKAWMTKKGIFREGHPWNKMHVYRALYNRTYLGEVLHKDKTYPGEHEAIITRDLWQRAHAVIEENKRHRSQHVRAKAPALLKGLIRCGACDSAMSPVSATNKDRVYRYYQCGKASKNGHHSCPVKSVPAGEIEGAVIHQLRSIFRSPEMVAQTYRATRELEAEELERLRSERSELESRLAELKQTASRLLDSGASDRDTNDEIRKTNEEFVDTQRRFRDVDDEIQGMQARLVSERDVAECLLRLDPIWDELFPLEQSRIVQLLIERVTISTDGMNIRIRGNGLHSLVSEMRDTTEKHERSCAE

SEQ ID NO: 366 - protein, 536 aa, unidentified
  source 1..536: note = uncultivated organism
MAEPQIRCAIYTRKSSEEGLEQSFNSLDAQREACAAYILSQCHEGWSLIPTFYDDGGFSGGNMDRPGLKALLADIEAGKVDVIVVYKVDRLTRSLADFAKMVEILDKSNVSFVSITQAFNTTTSMGRLTLNVLLSFAQFEREVTSERIRDKFAASKKKGICMGGPLPLGYDVKDRKLIVNEPEANTVIHIFERYVALGSAEALVEELARDGFRTKRQKTIGGNPFCRGGIRHMISNRIYLGEICHKGTCYPGEHKAIVPKELWDKAQHVRAQNTYQWTQGRRRSQVSFLSTLIRDHLDRHVYATHAVKRGIRYRYYVTHPMDVAATNEPAVRFSASTLEDVVIEQLTALFSDRQKLIQLVGNLDAAALQDLFNDVATALQRLSSTPSMQRTVAEKWIKQIRVSHDTMDMDVQLTDSVGHTLSVRLSKVRVGQDVKLTVSPTEAEDCPRNEQLVAMLAKAYKLKQAALASPEKTIDELAKAEGLRTAHYKRLLKLGFIAPDIVEAVLDGEQDAPASFSALTKWVDAGVVWGAQSKVA

SEQ ID NO: 367 - protein, 564 aa, unidentified
  source 1..564: note = uncultivated organism
MAKQQIRCAIYTRKSSEEGLEQSFNSLEAQREACCAFTLSQKHEGWTVLSNRYDDGGFSGGTMERPALKQLLSDIKAARVDTVVVYKVDRLTRSLADFAKIIEIFDTHKVSFVSVTQQFNTTSSMGRLTLNVLLSFAQFEREITGERIRDKVAASKKKGIWMGGFVPLGYDCVERELVVNPAEATTVREIFRNYVRLGSVRKLQEFLDRRQIRSKARVSERFSGGASFSRGALYHLLSNPIYVGQIRHRSQCYPGRHQPIVSRKLWDRAASILKENDRAQRTERSRSSGSLLTGILFDSNGMRFTPTHAVKGAKRYRYYTSQTVIHDGGLKPEITRFPADEIEQLVKSRFLTLLQSPEKLTARTTQIVRGAVADAAIDLVRVWPSVQSSKQDQLVRTGLRRVILGQTAVSIEIDKTKLIRTLMAKNSDALASLEQLDLGIVTLTCQFHTLRRGREVRIESPQNDSRSDAAPIPSLVKAVTRGREWHDQIVAGKINSIDELAKQTGLRKRSVRRLLPFAWLSPKVVESILTGKHRRNLTVKDFLQGTPLCWQEQEERFLRIPTID

SEQ ID NO: 368 - protein, 506 aa, unidentified
  source 1..506: note = uncultivated organism
MTRKAKDNVLERAKIRCAIYTRKSTDERLDMQINSLDSQRSAAEAFIASQKSEGWICLPKLYDDGGFSGGNLDRPAFKQMMADIAAGEIDCVVVYKVDRLSRSLMDFARAMETFDKHGVSFVSVTQQFNTTHSMGRLTLNILLSFAQFERDIIGERIRDKIAAQREKGLWCGGQPVLGYDVDRSQTSPKLVINAIEAAKVREIYELYLKLRTLLPVVQELAERGWANKSWLTRKGHSKGGRAFDKCSVYSLLTNPVYVGKIRHKENIYEGQHEAIIDQKTFDAVNALLKAHGRKSIEGKRLINRHDALLKGLLYCPGCGYTMVHNVNKRKSKLYRYYVCQTAIKRGRQLCDTGSLPAGAIEAAVLSEIRCIVEDDGLKREVFEQTEGIVDRQQAKLAIQLRQLEHQLSRDQAETQRSSLDGLSGQLNQARRDDLRLRMESVSNQIDEVRQSIEAAKQTRLQRKDIAVAFKDFDSLWALLNPRERTQLLDLLIERVEFDRQSSNPTD

SEQ ID NO: 369 - protein, 514 aa, unidentified
  source 1..514: note = uncultivated organism
MPQVQIIEPTIRPQEQKIRVCAYARVSSDSDDQLNSFSAQVEYFTQLIQAHSDWEFVDIYADEGITGTRADKREDFQRLMRDCRVGRIDRILVKSISRFARNSADCIEAVRELKMLGITVAFEKEGIDTSQMTNEMYFSMYSAFSQEESTSIAKNMRRGAAMRMKNGTYRLSQAPYGYRLDEHGGFLICPEEAKIVRRIFGNFLSGKSIREITDELAKAQIPKLKGNPVWSATGVSYILTNERYIGDELFQKRFTTDAFPFKKAKNRGEKSQFYAENTHEAIVSPDVFRLTQELLKKKGELHGRKKEIQTYTFSKMLECSECGSTFCRRVTKAGTVVWSCYRHFRDKKLCAMENVQESEVEAAFVTLYNKLGKNCSEILTPFIQQVENLRDKNFMSHPGAMQLNKEIADLLEQNHALATLRAKECIDSAFFMSETNANNTKLEGLRKELQRHRDLNDYREILEGSRLLLKIFEEQESVLLFDPAAFRNMVTKVKISADAVCFRLINGMELAERR

SEQ ID NO: 370 - protein, 548 aa, unidentified
  source 1..548: note = uncultivated organism
MSKRVGIYCRVSTIEQAEEGYSIDEQKIKIQEYCEKNGHQVYQIYEDRGISGKNITNRPGMKQLLEDATKNKFDLVVVWKLNRISRKLLDLLNIVELLDKHRIAFRSLTESFETETSTGRLNLSIMGAVGEFERATIAENVKMGLLARAREGRWNGGVVLGYDIVEIPNEGKKRKNTRLEINEKEANTVRRIFELYSQGYGYKAVVNRINKEGHKTKRNGEFAVSTVKEILQNPVYIGKIRYNVRQDWSKKRRNNINANPILSDGIHESIIDEKTWNKVQIILKERSKKHNKIYDSEFPLTGILKCPVCGAGMTISRSTSKRKDGTRRVNEYYSCGNWKNKGTSVCNSNSIRVDVADKYVLDKIMQLINDEYILRRVIDNINKNKSTKLKPTLEQLEQINKEIEKLIDKKNKNIELFEDGILDKSELSTRVKVINDDIEKLKYREQELKQDLQLADGEPISFEIVKEVMKRFEEVFLGMSTSQQRKQLIHLLVSKITMNKEREIDSIEIQINNDVITYLMKDGLPKEQGNPSFLHLLRLNCVNLKIVI

SEQ ID NO: 371 - protein, 537 aa, unidentified
  source 1..537: note = uncultivated organism
MLKIHCAIYTRKSTEHGLDMEFNSLQNQEEACKAYILSQAFNNWEYYRTYSDGGISGGTMERPGLQTLLNDIRAGQIQIVVVYKVDRLSRSIIDFHKMMQEFNKYNCNFVSITQSFDTSNSMGKLTLNMLLSFAQFEREVSAERVRDKIAASKAKGLWMGGTPPLGYDLKDKQLIPNPQEAELVNLIFTKYLELENMQAVAEWLNQKGYHTKAWIPRGGQSRGGKAFQKSSIQRILTNPIYIGQVAHLAKNKVYAGRHEGIVLKPVWESVQDMVRRRITDPHAFSHYQTHKTVLAGKLYDDKGQSFRLTSSKKQGKKFLYYYNGVGGHYLPAEQLDAFVLKTLKKTDFNELEPLVNMQGLTDEQLTHWITRAECQTVGKAHYLTVFLDEKQVRTDLSACSRISGQAEERRGVLHRLLDKIYVKSTFLVDNVSSVKLQNGTARNILTVQQLNESLVRGLARGWQLKRLLEHSKPLRECEKVSGLNKRTFARYLNLCYLSPRIVADILEYNNPRNMSLKELMNLAEGNVDFAEQEKAWI

SEQ ID NO: 372 - protein, 610 aa, unidentified
  source 1..610: note = uncultivated organism
MDERRARPERAQSAPKDAPQGSRGGRVRCAIYTRKSSEEGLEQEFNSLDAQREACEAYVRSQKHEGWIASPALYDDPGYSGGNMERPALKRLLADIAAKKIDVVVVYKVDRLTRSLADFAKIVEIFDASNVSFVSITQAFNTTTSMGRLTLNVLLSFAQFEREVTGERIRDKIAASKKKGLWMGGQPALGYDVRDRKLVVNEAEAETVRAIFRRYLDLGSVRELKAALDAEGVVSKHRTAANGDAYGGQSFSRGALYQMLQNRVYRGEIVHKGAAYPGEHPAIVDEELWRQVQEKLEVNGVERTGARDRAKLAYLLAGVLFDAEGEAMTSTHAIKKGVRYRYYVSRRLIADVRASGGRQQGRREQGQRLPAGDLERLVIERLKSFFADPDAVTDSLPPRRRNAPSVRRAMGAAAEFVRVIAAEDAGATFDLFRPLIVRAQVLLDRIDIELAADRVADALLGGGSSIEDHPGVRHDADLAAYAAAADDDRRILLTIGAQLQRAGMEMRFVIDGVEIGAPPDGALVRLLTRALSLARRLATNPSATLEEAGAAEDMGAPYAARLMRLNFLAPDIVVAILNGRQPLALTATKLMTDTRLPLAWTEQRRALGFA

SEQ ID NO: 373 - protein, 540 aa, unidentified
  source 1..540: note = uncultivated organism
MNGSQMKTVRVIPPKPEFSGENRINLRPKRVAAYCRVSTDREEQEHSFETQKEMYTELIMMKPTWQMAGIYADAGITGTSAKKRPGFMRMIEDCRKGKIDLIITKSVSRFSRNNLDCLLYVRELKEHGIPIIFEKEGINTMQVSSELLITLFSGLSQAESESISLNVRIGKRQSLKNGNVPFCYQSFLGYRKGLDGKPEIDPEQAPVIRRIFTEYLAGKTLRDIADDLTADGIATARGKTNWRSSAVQAILKNEKYKGDALLQKTYIADCISKKEKKNNGELPMYYVENNHPAIIERAMFDRVQKELARRSSKRKVKQVGTKTELGKYSGKYALSELLFCGCCGTPYRRCTWAKNGRKKVVWRCISRLDYGTKYCKDSPTVEETALHNAIARAITQKAQTENADLRCLQKHIELYQTSQNVQGILAKRNRLKAIQKRIDELTESNSEAAQNGDFDAQFESLYAQLYAIKDELEKWEKSNTVLQANPNVRTEVADVIEGLQNHPVEYNDLIVRQLVECIKVTDADILNVYFKDETEINVEL

SEQ ID NO: 374 - protein, 555 aa, unidentified
  source 1..555: note = uncultivated organism
MQVLEKIRDRKKLVRAAVYARFSSDNQREESIDAQIRAIEEYAKRNDVLITSKYIDKAKSAMTDNRPEFLRMIEESKRNDFDVVLVHKLDRFARNRQDSIGYRMELKRNGVSLISVLEYIDESPESIILESVLEAMAEYYSKNLAREVNKGMRENALKGLHTGGLPPLGYDVNKQTRKLVVNEREAQAVRLMFKRVLEGKGYGQIIDELNLRGYKTKTGKSFGHNSITDILRNEKYIGTYTFNKLSSKDIDGKRNGHKYKEPEEIIRLEDAVPPIIDKREFEQVRAKMEARKQYCPSGQAKETYLLSSKIVCGECGYAMAGCRQYSGRNKNLRVTYRCMGRKNKHVCKIKDIRKEYIEAFVLEKLSEYVFNDSLVKKIANRAKEFLAASNEDEMSKRESIMKRISTLNKEIDNLVILAAKIGSESIAQKIVDMEQDRVMLQSELSKIMMASDVPDITEEALQKRFLKARQLLAVGRLKETKTLINMFIEMVVVFDDHVEVVFNVHPDLTPPKVDFIKAATKTNTDKKLSHNSGKGEVRGKTIGQGQTPLASTKQL

SEQ ID NO: 375 - protein, 604 aa, unidentified
  source 1..604: note = uncultivated organism
MTKRKPPNVAALGGGCKGICTFPKYNIPLLYCNTKGGGKKGAFSVKQADSTARNAVIYARYSSHNQTEQSIEGQLRVCHEYAKREGFTIVGEYIDRAISGKTDDRPDFQRMISDSRKRAFQYVLVYKLDRFARNRYDSAVYKHKLKQNGVKVVSAMENIGDNPESIILEAVLEASAEYYSLELAQKIKRGMRESALKGQFCGGGIPFGYKSAGGRLVVDEAKAPFVKKVFEQYAAGVPKKQIIAELNAAGLRNRNGKPFGNTALQVALQSEKYIGILRWGDIEIENGCPALIDRETFDKVQERIKQNKREGGKNKAKMEYLLTGKVFCGYCGGTVTGVSGTGRHGDIYYYYCCRNRRLRKGCKKAHEKKDFLEWYVVEQTVLYVLTPQRMQEIAAAVVAQYDNEFNNGKIKELERQIAKLERDMDKYTEMLLDAPKSARPRIYEKIETADMQKTDLEIDLSKLRIANKIRYTEADIVAWLKMFCKGDLFDMEFRRRIIDTFINSVYLYDDRVIVFYNIRGGKQVSYIDMLDATEGFPGLDDEPEAPADSSETTDAKKKPDTVSGVRLLNDVVDPKGIEPSNLTDANRALSQLSYGPKYAGGEES

SEQ ID NO: 376 - protein, 502 aa, unidentified
  source 1..502: note = uncultivated organism
MKVATYTRISTDEKHQPYSLDAQSHRLGAYAESQEDWQIVRRFTDQKSGVTLERPGLERALREADAKRFDLLLVYRVDRLARSVRGLAQIFERLDAAEVLFRSATEPFDTSTSAGRMMVQMLGVFAEFERATIVERIVAGMERKAARGEWTAGKVPFGYQYDEDRRFLEINPDEAPIVCLIFERYARRRVGAATLGKWLAGHGYRTRQGKPFNFKIILGILRNRVYIGEIFFRGTYHPSPHPPLVDPTLFQQVQEILDERSEDASLRRSNQSEYLLTGRVRCGNCGKRYLGAAAHGNGGRYSYYVCFSRQRYGRGSCQGDRLPADQLETAILNQLVALLERSDLVRESINAAIVKRQEDRPDRQGEIDHVDASIKRTDASLARYFNAFESGSLPESACGERIAELNKQLSALRARHHELCLDQQDDPDPEPPTDDELAALQEYAREVVRDGDRPARKALLQALVSEIRVVSRTEIYPTFSLPTVRPPTPLVPPTGFEPVLPP

SEQ ID NO: 377 - protein, 605 aa, unidentified
  source 1..605: note = uncultivated organism
MGRNSAPRSSANGSNGATENRVVRCAICTRKSTEDGLQQEFNSLDAQREAGEAFIVSQKTEGWQLVPDRFDDGGYTGGNMERPALQRLLAAVESRAVDCVVVYKVDRLSRSLMDFSRIIEGFDRNSVSFVAVTQQFNTTSSLGRLTLNILLSFAQFEREIISERTRDKMSAARRKGKWIGGHPVLGYDIDPKGGRLIVNPEEAEQVRTLFALYLELGSLLPVLQEATRRGLLTKRWTTEDGHVRGGQRIAKGTMHGMLTNAIYTGMLDHKGALYPGEHERIIDQNTWDRVHETLQRNGGDNGASVRNKFGALLRGVLFCVPCGTPMMHTYTMRKSKRYRYYVCCNAQQKGWKNCETKSVPAQAIESAVLDSIRRVGTDPKLAEAVAAEALDQVARRRREIDQETEAQRRSVRQLNQSLAREAADTGVGSGPRFERMATLQGEIETIERRLVDLIAELGDLDRDHINADDLPPHTGRVRRGLVVPDDQGAGADDPSAGRQGRLRRAGRQGHRQFQQRGSKGTMPRKVLIGASPEPCEDGSIQVEVMLPVRQRRSEAIARRLPGSASNELNHLRIPRITRLMALAIKFQEMVDRGDVRDYADLARLG

SEQ ID NO: 378 - protein, 506 aa, unidentified
  source 1..506: note = uncultivated organism
MSNSFIALYARQSLDRLDSVSIEMQIEYCRQEVRAGIFQEYIDRGYSGSNINRPAFQALLADIKAGKIRKVVVYRLDRISRSVLDFANMMDVFQTYGVDFVSATEKFDTSTPLGLAMLNICMVFAQLERETIQRRISDAYYSRTMRGIPMMLPAPYGFHYEPYEIDGIHTKRLVENPEELVFVKKIYEMYALPQTTYVEIKRYLDEHGVRTNGKCISQPTLKRILSDPAFVLADQSIFEYYKSHGATIVNSASEYIGTNGCYLFKGRDVNTQKYIDPAGHTLVLAPHNGVIPADLWLVCRKKLDHIEQMRRERPARTVPRTWLSKKLQCASCGSPMMIRREGDGQTHLHCIAQMRGHGCPGVGRIVASELEATVFNRMQKRAQTQHLPSKPKKVSASTTEYSRLRQDLVKVRNEIETLMASLSGANELLVSYAKEKAASLEKRQQELQEKINMLEQQQPQPILAESLLESLEQWDTLCLEQKRDILDELVISISVSQDKLQIKWKR

SEQ ID NO: 379 - protein, 589 aa, unidentified
  source 1..589: note = uncultivated organism
MSKAAKGNIRCAIYTRKSSDEGLEQDFNSLDAQREACAAYIKSQAHEGWRALPDRFDDGGYSGGTLERPAIQQLIALIKERRIDVIVIYKIDRLTRSLMDFAKLAEQFDAHGVSFVSVTQAFNTTTSMGRLMLNVLLSFAQFERELTGERIRDKIAASKKKGLWMGGNVPLGYDAKARTLVINETEAETVRSLFRLYLDLGSIRLVWLEAKRSGLHTKPRIRSGKPSGGGGFFPGHIHHILTCPLYIGRIPHKGESHPGNHPPLIDQQTWDAVQAKLRANHKGRYVHGNTKHPSPLAGLVSDAQGNRFTTGHAQKGGVRYRYYIDMALLTGKDASNAKLRRIPAPELEEAVRKGLCDFLSDAKQLFAATGDVITAHLYEQTRRNAEELRYRIRAAATPAELGALIRTFLIGIVLHNGAIHLQIDRDALRQVLCLPPATLGTDDCANAGGHSKHPTAAQYNVIIATQIRTRGAVLKLVFADDRNLTPPQPDASLIKVVARAHVWWEQIRLGNATSMTEFAAAEGVTRSYLIRVLRLAFLAPDIVEAILDGRQPYGLTADALTLEMDVPVEWKQQRKGLGFELRPYSNGRL

SEQ ID NO: 380 - protein, 526 aa, unidentified
  source 1..526: note = uncultivated organism
MVAIYPRQSIDKKDSLSIEQQIQRCVDLCEMNEWPYTIYGKDKGYSGKNLKRPSFEEMMADVRAGKINKILCYKFDRISRNISDFSNLMVELQNYNCEFISISENFDTTTPIGRAMVYICMVFAQMERENISQRVHDNYYYRTELGFWGGGVAPYGFKTVRTKYKGQMHTILEPNPETAEIVKMIYKWYSEPNGSVSKILYKLNEELHIPSQKGKKWTSRVIVDILTRALYAPNDMAVYNYLISQGANITNAPEEFDGKASIDVYGKKTTNASKHKRCREFKDMYCNISNNDSIIDSSTWIKVQNKRNQIANRPSRTGTGKNSYFTGLMKCSCCGTGVSYTNSRGTQGYYICSSRKNRGWNSCNMPPASKKRTDPAIIQAVIDYYSNPQVIKMIKEITPESQVENSKDDKKRNNLLMELAIVDKEIDNLISSLTDGSPILIKYINEKIEKLDQKRNEITQMISSLNAGKSTANEKYAIITQIRNMIDGIPDILESDDFDEIRDLCHLLINNILFHEDGSIDITYTV

SEQ ID NO: 381 - protein, 516 aa, unidentified
  source 1..516: note = uncultivated organism
MKFATYTRKSIYSDKSDSTGNQQRMCKEYVDFKFKNDVESFSIYEDEGFTGANTKRPELQRLIKDVEANKIDALVVYQLDRLSRDIKDFANIYSVLEEYNVMFISIKENIDTTTPIGRAMMYITTIFAQLERETIAERVTDNMIGLAKRGFWTGGNPPYGYKREHVAVNGKKHCIIVPVPEAVEYIKSIYLDFLENHHSLQGMETTYKHQGKRTINGAFFSTTQLHKILTMPYCVPATGEVWDFYNNLGCKMIDERNTWNGEHGVMIYGRSTEKKKKHQLQPPSEWLVCQGIHEPFVDASIWLKVQDKFYKNKFNKTSRYDKPLLKGVLRCAKCGNLMQVSRKKLAHGNILSHYYCRKRMREGVEVCDTSMIKCDTLDEKVIEIFKGIEADPKTIKDYCKAYNMPSNSARKDELEHEARNIRLRIKRLTESLAEGENVARYILKQIEAEDLSLQAVERELEQLQDVESTFDVNDNIKAIENMIHSFDKLSADEKNAIAIEVIKKATWDGESLNILL

SEQ ID NO: 382 - protein, 566 aa, unidentified
  source 1..566: note = uncultivated organism
MTTAAIYVRKSKFTGKGESIKNQIDMCKQYARGRNLIVRKDLLYFDEGFSGGNTDRPEFQRMLNDAKKEKFDILICYRLDRISRSITDFSATMDLLQQYNISFISIREQFDTTTPMGRAMMYIASVFAQLERETIAERIRDNMLQLARTGRWLGGVTPTGFESKPIIYYDVDMKERKMYKLSPVNNELETVKTIFDKYLELKSLSKLETYCLQNNIKSKNNNDFKKNTLKNILNNPVYAVADNELYDYLNRYNMDITNDKSEFDGSHGVLVYNKNIETKGKSNRPRNKEEWIVAIANHKGIIPSRQWIEVQNLLKKNKKKSPRHGNSSKGLLSGLIKCGKCNQPMRIKYGHINPKTGERYYYYVCTLKESSRGVRCKSSNLKGITADQLIIERVKDLLQDNNNIIKHINIYRKQLIKKNIKNKHRQNEIRKKISQNESKIANLIKQLYNNQNSRASKYIIKEIEKIDKENLKLFENLDNKSNDLDDNVSNQRQYSAIRKSLSDWDNLFDKIDIETKKNLLGKVVENILWFDGYFEINFFNTVEKLAMFTSHRKPLKNDLYLPKAKG

SEQ ID NO: 383 - protein, 519 aa, unidentified
  source 1..519: note = uncultivated organism
MSNNVIIIPPNESKPDTLRVAAYCRVSSDSSDQLHSYAAQIRKYTEEIGHHEGWELVDIYADEGLTGTRMDKREDFNRMLSDCRKGRIDKVLVKSVSRFARNTKDCLATLRELMSLGVTVYFEKENINTETLTTELMVSVSGALAQQESISISQNLRQSWRRMMESGEFITTNPPLGYELTDGCKLKINVDEANIVRWIFNTYLEGVSTRQIAKELTEQRVRTTEGNTTWNPRSVQLILTNEKYMGDTLCKKRYTTDVLPFTIKRNHGESEQYYIENSHPAIITKETFERVQDLRERRLRKKQVRKRDYPLRGKIFCGTCGTLFMRRVTQNGLVSWVCRKHDEQAKNCPIGRIPESEIYAAFVRMYNKLRLHEGIILNPALTQLQELNSSLQRDNPAMLEINRAIASASEQSYKVSALQSKGLLDTAVCSAKLLDIETKLTELRRERRRLLKNEDIETVMDTLRQTADLIHSGPERLERFDEALFADLVEKITVESQTRIRFCLYGGIELTERLREVRR

SEQ ID NO: 384 - protein, 555 aa, unidentified
  source 1..555: note = uncultivated organism
MTAPIRAAYYGRVSSEHQVDGTSLDTQREKCLAMIQAHDGWVLSGEYVDEAVSGAKGSRPELDRLMAACRAREVDAVVVAKLDRFGRSVRHLSRLVGDLDDLGVAFVSVAESFDSSTSGGRLLRNMLGSFAEFERDQIRERTSAGLAAVARDGYWPGGPPPLGFLLVKDGRHTRLAIDEVEAEMIRRAVALVVDEGQTTWEAAATMNALGYKPRRSEHWTHVNLRRLLQDARISGTWDYGRPKGKSGAAPGEHKVAIPEIITPERHDQLRTVLDMTTTGPRTKDRFYLLSKGLLLGACGAKMFGVYRKDRDTRQYSCNNSRAELRNRNGADGGERCSCRNLHADLVEPLVWAEVTKLLADPSQLMKLAAEYLSARGDQMVGERDASAEVERQVAKLERARTDQATAALKAGLDPELLRQAVAEIDEELAVLRRRSRQLDALREQSEAATEGVRQVVELAEKAHQRLGLLTPAEQRSVLEALELRVQVLDWSPCTTCAGKGKLPGGRGGTPCPSCWTTREVPRFRIEGVWSSALLEGADVGELSDGIPRCSRCSTP

SEQ ID NO: 385 - protein, 539 aa, unidentified
  source 1..539: note = uncultivated organism
MRVSTVEQSENDFSSLDGQLSQCETWVKNESHTVVETYRDTKSGKDLSRPGIERMLLDAKSSKFDLIVVSKLDRISRSLSDFLKLVEKLDSYGVDIAVTSQNIDTSTPAGKALQRMMLVFAEFERDMISERTSEKRIETIKAGLWPGGHPPLGYNTVNKKLVINDDEATTVREIFNRYIDKKSASKVVRSLNKDGYQTKFWKTKKGKIKGGAKFGKNKLLRILKSRIYLGEYEHNGKIYEGKHDAIVDHTKFNAVQKIISQNSSDPKVYVSGNTPANLTGICYCALCSSALTTTSTKKKSTGNKYYYYKCVKKNKEGKSENHSPKDLPVSTLDEFVASTLCIMLEQPELLKAFKKRNQFDNNVAEKNLKSKKERLSDSLKNVNKEITNTVNFISKNAAASNEKILQDKLTELNLRKQEIKDEYDFCSEELQKLSNQKPLNSDDYKNILNEFLKKWSDEKFEHKETMLKTIIRKVESSVETDNSGTVEVQYIADKKLEAEWSEIKNANSEKIKVRISGMDGSPGRIRTYDRSVNSRLLCH

SEQ ID NO: 386 - protein, 695 aa, unidentified
  source 1..695: note = uncultivated organism
MTEKQKQEKPCAIYVRVSTQMQADVGLSIESQIETMKQEAERRGKPVYDIYNDAASGGSQANRPEFQRMLKESQRKPPPFDMILTWSISRFGRNTMESYIATEKLRERGISIFYFKEPFNDQDPVGNMVIQILRSVAEFSRLEYVKDVERSKTHLAKNGFSTGGPPPFGLRRLEVIENGKRHVRWAPNPETAPIARKIFQMYADGHGYKAICKWLNTQGVSTIRGNKWQAASFSRMLRNEIYIGNVVYNKEVKRSACGSGGSLEQRPEDEWVRCDGVVEPIVPREVFDRVQLKLLGNNVSDSMTRNSQYLLSGLTKCNVCGNAYLGRTPKKKCGDKVYIYSQYVCSGKERFNDKRDNVNLKRDWFDGLVVNRLLGRILTEANIMERIRNEAAEIEQAVAERNERLEELKKKKKNIEITLQKYYEAFEGGSLSPDELKARLKRHRGRVEEIDLEIKNIQNEIAICRMRKDSGLETLLKVDFKRMRGMFDALTFERQKEFLRTFIEKVVIDPEWFEIHYVLPSGMGVEHLLFEGDEDDGNGMGGNRNGRKRGAAQGEKTDSASGNGNKAARRLVSTTPCKILTCGNGVSDKNPGQNSVSNFSRQDDGALRLSAYRKSRKNAGATATAPENTKIKNQQETKPISAIADQQSAAHHSSYGKNGEGGIRTHVDASAKSVFETDAFSLSATSPDGKTTLYL

SEQ ID NO: 387 - protein, 513 aa, unidentified
  source 1..513: note = uncultivated organism
MPEARLISPMTRTAITKCRVAAYCRVSTNSADQLNSYATQIRVYTNLITKNKEWELVEIFADEGLSGTKAENRTAFQRMIRMCELHQIDRIITKSVSRFARNAKETLSYVRKLKLLGIGVQFEKEGIYTLALGDEMLLNTFSAIAEEESKAISQNQRLSIVKRMQDGEYVDSNAPYGFRLVDKVLTVYEPEAEIVQSIFQKYLSGYSTSEIARELNINGIRTKTGKSTWRSAKIAYILSNERYIGDCFYQKTYRDVIVPFKQYTNRGQEDKFYAKETHDPLIDQDTFNKVQMLLKKRQENFCKATTQNIYPLTSRIQCTECGSFFRRRLVSGTVKWACCKHIEDRTACNSSYYSEERICDGFTAMVNKLRFGNENILGVVINRLESAVTLYKKNNTTAREMSQSIAELNAKLLMLEQLRAKSYIAPEVHQSQVREINGQLAALKKARQDELESHIIKMLEDVRHLKSILDELEDPLESFDEKLFSEIVTGITINRHDEMQITVIGNLQFTELI

SEQ ID NO: 388 - protein, 704 aa, unidentified
  source 1..704: note = uncultivated organism
MEKDEQTKAQQQKPCAIYVRVSTQMQAETGLSIESQIESLKQEAERRGKPVFDVYYDAASGGSQANRPEFQRMLKDSQRKPPPFDMIMTWSISRFGRNTMESYIATEKLRERGISIFYYKEPFNDQDPVGNMVIQILRAVAEFSRLEYVKDVERSKTHLAKNGYSTGGPPPFGLRRLDMIENGKRHVRWTPDPETAPVARKIFQMYADGHGYKAICKWLNTQGISTIRGNKWQAASFSRMLRNEIYIGNVVYNKEIKRRACGNGGSLEHKSQEDWVRCDGVVESIVPQDIFDRVQLKLLGNNVSDSMTKNSQYLLSGLLKCNVCGNAYLGRTPKKKCGDKVYSYSQYICSGRERFNGRRDNVNLKRDWFDGLVVNRLFERILSGTNIMERIQNEAAEIEQAISERNGQIEELRKEKKRVEGTLQKYYEAFENGSLTPDELKARLKRHKGRVEEIDLEIKNIQNEVAICMMRKDSGLETLLKVDFKRLKGMFDALSFERQKEFLKTFIEKVVIDPEWFEIHYVLPSGMGVDHLLFEGGGDDGNGTGGNGNGNGRKRGATHGEKSNSADGNGKKSAQLLTASTSYKNLTYGSGVSDENPGENSVSGFCGHDDNAPRYGVYRKTGKSSGATATAPENAKYKNPQGTKPFSDVAEKQLASHHSSYGKNGEGGIRTPDDVAATPVFKTGAINRSATSPTASKRIIRIFF

SEQ ID NO: 389 - protein, 565 aa, unidentified
  source 1..565: note = uncultivated organism
MEKNSDTIAIYSRKSRFTGKGESIGNQVDMCRAYIRTAFGEAYAEQAAVFEDEGFSGGNLNRPDFKRMMQAARAHQFRAVVVYRLDRISRSISDFSALIEELGRLGIAFVSIRESFDTSSPMGRAMMYIASVFSQLERETIAERIRDNMHELAKTGRWLGGVTPTGYTSEAVETVTVDGKNKRACCLKLLPEEAAIVRVIYQLYAETDSLTRTETELLRRGCKTKNDRNFTRFSIKSILQNPVYMIADREAYRYFKEQQAELFSAPEEFDGVRGILAYNRTDQEKGRAAIFLPISRWIISVGQHPGLIPAHTWIQVQKSLELNRCNAYRKPRSNQALLTGLLWCRCGSRMYPKLTQRMDIDGKPLFRYVCKQKEHSRRSLCSLDNAGGNSLDAALWEQIKSLEGDPHTFVARLEQGHRFCVGGEDETTQRREELHRQQADLQRKITALIDSLPDFAGGCAADHVKQRIEELHAQKASLEEELRGLEQPPEQRTLPAGEFKLLQRQLTLFRDCADQMAVEQKRAGVRALVQKVLWDGACAHVFLLGTENEAILQSPENTHLCEDSK

SEQ ID NO: 390 - protein, 505 aa, unidentified
  source 1..505: note = uncultivated organism
MKFDAIYARQSVDKMDSISIESQIERCKVEAEGEYRVYKDKGYSGKNTDRPEFQQMLEEIRHGEIKRVIAYKLDRVSRSVIDFTSLIEEFQKYGVEFVSCTERFDTSTPMGRAMLNICVVFAQLERETIQQRVLDAYIARSRKGFFMGGKNPFGYNREPYIIEGIHTTRFVINEKEAEIVRYIYDLYSNPETSLRDVIKVLNAEGIKQGRRDDGYWSVAHLGEMLKSPVYVRADLDVYDFLKGQGAQMHSPAEYFVGTNGIYLFSERGAQRKQTCLQDQNIVLAPHEGIVSSDVWIKCRIKLLGNHQVAKPIKAKNTWLAGKIKCPLCGYAMVVRKAKTKVGRYFICSHHEDTIDGCPGVGGLHAAEIESIIYDEISEKLKEFETINENPTAAARQNPKITEIKLQIAGVEEEIDKLMKKLPDAEGVVMEYIAERIKVLDGQKKELSEKLKELEPLEMVNKDFDGLRNYMSHWDDLTIADKMTVVDAVINKISADQSSIVIDWKI

SEQ ID NO: 391 - protein, 1166 aa, unidentified
  source 1..1166: note = uncultivated organism
MEVQIIKKKKNITSIYRQKLRVAAYVRVSTKLELQLFSYESQLKYYENKISQNSNWTLVGLYADYGVTGTSRSKRKGFLKLLDDAYNGKIDYILTKSVSRFARNTFDAIEIVRELRQRKIGIYFEEEHLDTLKLESELLLTILCSVAQQESDNYSNHIHTGNIMRMKQGRVISSSKIYGYDVVKLDKTSTFKINEEEAKIVKEIFDMYIKGSSFPQIANFLNKRKVQNDFKHNLWNRQNIGNIIRNPAYTGRLVQGKKYVTIVNGERRYRLNKGERDLYVVENHHPRIIDDYVFEKAKELRSSRAKVKSLNKEALSIPVICGFCGSAMGCSNRQDYSWQYICYKRKSEIDWCENSGYIRMDLIQQGFLECIKRLSRYMYRKRIIENQNNLSVQIRRLKNKRDILLSSNVELLNKYMEKKINPYNYKLKKKELENDIELLSDELEQLEVRLENYKDSKTDLENLFFTIDNEIENFEIFDLEEFKKIVSFIIIGGYSEKGTKLPYVYRYVYSSKQCLRKDYKEKVLSNPLKDDEYIKLLDFRSDFTFKYFDEKKNIHRRKGNRIIFEIERWWSMPNVEIIKAKDTMLDSKGKEVRNKLRVAAYARVSTDHEEQQSSFESQQIYYLDKIKSNPNWTFVDIYADEGISGTQAYRRENFMRLMRDCEEGKIDLVLTKSISRFARNTLDTLKYVRKLRDKQIGIQFEEEGINTLGMAGELLLTVLSAVAQQESETISSHVKLGFKMKRERGELVGFNACYGYDYNKERDSMIINEDQAKYVRMIYQWYLNGYGGRSIAKMLTEMGVPSPTGRDHWCENSITGIIKNEKYVGDLCQGKTYTVDAVSHKVVRNKGEEDMYYTKDHHEPIISREDWDKAQSIINSRNANISNGRKARTKFTFSGKFRCGFCGKTYTKKSLYKKRPAWDCISVATLGRQYCPDSKIMHEDVIKSCFMQAYHLLTSNDSLAVNQFLENIQESIRSSTPSQMKTKFENELNMAQKKLSKLVDLYVDEKIDSMSFDKKHNLLQNKIEDISNKIKTIDEKVIHEDNINLGIENIKQEIQARETDKSPILFDEELFDTVVDYGIIGGVTENGAKEPYMIRFICKTGLASRSRSDITDETIIDNNQLGKENSIYMPIIDFISNQHFFVYNVKGQGLKKQLITKVRVTVEVEK

SEQ ID NO: 392 - protein, 653 aa, unidentified
  source 1..653: note = uncultivated organism
MASRARDAVATVTAAPVRCAIYTRKSTDENLDSDFNSLDAQRESAEAYIHAQRGEGWVALPDRYDDGAYSGATIDRPALQRLMADVRAGRVNTIVVYKIDRLSRSLLDFTKLVEELERHEVSLVAVTQQFNTTTSMGRLTLNILLSFAQYERELITERISDKMAAARKKGKYVGGIPAFGYDVDRVNKRLVVNQEEAVIVRYIFRRFLQVQGAVDLVSELSRKGYRTKAWVSKKGKERPGKPWHKNHLYRLLRNPVYIGKVEYKGEVYNGEHEPIIDMDLWNQVQAAIASPPKERSNQNRAETPGLLKGMLRCGYCGTSMAVAFTKRNGRLYRYYNCHRATRTGYHNCAVRSISAGIVEDLVKNLLRRVFRSPEVVERTLEAVRRIQTAEQGQLEGEKRRLAEELAGVRTCGEQLMQSLRTGENAFVRGELDRLDRRRAQLEADLQAAQERLEIAGQTPQATEDLARELATLDNIWDNLFPGEQQHLVRTVIERVTLHTDRFEITLRADGVQHVVDLLVGNDGAEPGPRTKVDPYGKTTISIPILLKRRGGRKEIVLAEEAQRANTVFLLTLARAFRWKDLLESGRFPTIKALAEAVGHERSYVAKMLNLALLSPSIVAAVVAGKEPDGLLVAKLRQGVPVCWEEQHRIFPGT

SEQ ID NO: 393 - protein, 565 aa, unidentified
  source 1..565: note = uncultivated organism
MCSIQKAERIYHAAIYVRLSKEDSDVADAVKKESNSISNQKSLIRDFLKDKKDIKIVSERIDDGYSGSNFERPQFKLMMEEIRKGIVDCVVVKDLSRFGREYIDSGKYIERLFPALGVRFIAINDRIDSLVDERDDIVVPFKNLMNDAYCRDISIKIRSHLEVKRRNGDYIGAFTPYGYLKDEQDKNRIVPDTYAAGIVKEIFRMKLSGMSQTAIANYLNDHGILSPMEYKHSLGINIQDNFKTHGQAEWSAMSVRRILENEVYVGTLVQGKHTTPNHKVKKLVNKPKEEWVCIKKNHTPIIEERDFALVQRLLGMDTRTSPYEEEVYVLSGIAICGDCGAAMVKRDVPAGGKVYSYYICSKNNATKACKTHRIPREKLESLVLKILQTHIEHILNIKRILQYASVVPFQELDIKELENRKEVKEQEILRCKEMRNLLYEDLKEGVVSKEDYTELYNGYNEKRKKAEEAVRTIQREIEDILESKTEKYQWLDYFTKHQNIKQLTRTAVVELVDSVKVFDKKHIEVNFQFDDCYMALLEQIKRSGFDICLADMETREAKAERKEVL

SEQ ID NO: 394 - protein, 590 aa, unidentified
  source 1..590: note = uncultivated organism
MSTTHRLRCAVYTRKSSEEGLDQEFNSLDAQREACAAFIASQVGLGWKLHPDRYDDGGISGGTMERPALQRLLQDIRDHKIDVVVVYKIDRLTRSLTDFAKIVDVFDGSGISFVSVTQQFNTTTSMGRLTLNVLLSFAQFEREVTAERIRDKIAASKRKGMWMGGTVPLGYRVDQRKLLIKEPEASFVQGLFSRYLELRSVPALAAEVTKEAEATDDDASDAAMESGPVRYTRQIGSGMLYKLLANPIYIGKLRHRENVYDGEHDAIIDLDQFNQVQRLLASQAATPRGSSTHPDAHLLTGLLYDDTGDRMSPTHATARGKRFRYYVSSRIKGARQTDSMAWRIPASTVDTAILRFATGQFSDHVRLSGWIRAHAPSARVEAAIGCSASITTMLTNGTRAGQREILGQIVSRITLRAERITIRVDAAAVVRLLTTPPLELGSADGQQVALPGPQVGQALPSKMPSDQEDPDAIIEISLPIKLKRRGNEMRLVIDGESSGGGVDRNLVAMVAKAHVYLEKMIENPDLGSSGVAKLFGVDRADVGRVLPLAFMAPRLLDQIMTGRQSDKVSARHLARQELPVLWLEQIASLS

SEQ ID NO: 395 - protein, 558 aa, unidentified
  source 1..558: note = uncultivated organism
MARSDGAPKRCAIYTRKSSEEGLDQNFNSLHAQRQACEAFVKSQVGEGWRLIKTAYDDGGFSGATMDRPALKALLAHVKEKRIDVVVVYKVDRLTRSLADFAKIVEIFDAHGVSFVAVTQQFNTTTSMGRLTLNVLLSFAQFEREVTGERIRDKIAASKQKWMWMGGTPPLGYDLRDHRLVINKAEAETVRLIFRLYIEHKTLRKVRQELDRRSVTSKQWMSRGNVRHGGFPFGRGALYHLLANPIYVGEIRHKSIAYPGQHEAIVERATWERVQEMLSKKAAHPRGRTVRKSAGLLMGKLFDENGEPLYSCWAKKGQRRYRYFVSKRLVRGTAKPNDRGWRLPAERTELAVAVGMRQILSDRGALASTLKACGFAAAELKQAIEAIDAKVNQQIETTEDTSTLIERVELKRDSMQITLNLRALLPAERFPAGGAYLRMTRLVLLRLKRRGVETRLVLPGETVAVSRTDPALLRALARGYQWFGELAAGTAVSTRQIAAREGVSDSYVRHLVPLALLAPAIVESICAGRQGVCLSAERLKTQAGLPIEWNAQQRLLAD

SEQ ID NO: 396 - protein, 595 aa, unidentified
  source 1..595: note = uncultivated organism
MSIQEPKQKKKVALYIRVSTDEQAEMFGVDLQRSALMGLIQSKGGEYEFAGEDYVYIDEGVSGSDEPEERPEFKRLKEDILLSPEPPFDIVAVYKIDRFARRLKILLEILEFFEDRETPIEFLSSQESIDTSTPFGRAMLGIIGVIAELELETIRQRTIHGKEKAAEQGVYMGSSPPVGYIKGPDKKILIHDKEAKIVKKIFNLFVNDRHSLEYIAKYLRDHKVFSPSEMKYRHKKEENKKKKRVSKHGPYHWYPQAVRRVLEDEIYIGNQYYNKSKDGKNLPKEKWEVYYHDKRIIDDETFNKAQELLNKKTRRSSNSSQHRTYLLQGLLKCANCYDPERHEEPYTWSGIPHKVRSTREMAFYYECSCKNTSKKRVRNTECHTISLPALPLEEHIVNFLHDLIKDPRPIFAYQQKLQSNANKIKYKKRDLKELLKLINSCKARKTRIVDLYANGDIDQKEKNKRLEEIEKDKRRYLKEKKDLESDLDIYTKSDEYIKVFKIFEKKYEKVLEDLKGNSTDEELYSLIHMMIDEIIIFSRPKRKTDSVSGPKKEGQMIPYKLKISLKIPSKMLSDLLFSLAPEEKLQAKKHGWWAM

SEQ ID NO: 397 - protein, 549 aa, unidentified
  source 1..549: note = uncultivated organism
MSETITKVWNTCGYVRLSREDGDKEESNSVTGQKDLIRNFLHHHPELQECGMKVDDGYTGSNFNRPAFQEMLADVKAGKFNCIVVKDLSRFGREYLDAGEYIERIFPFLGVRFIAINDNYDSLHHNDGSDDLIIPFKNLINEAYCRDTSVKIRSQLEIKRQRGDFIGPFATFGYQKDPDDHHKLLIDEYAANVVRDMFMWKLSGVSSCDIADRLTKAGIPTPMDYKRSLGMRYKTSFRVKAESVWSANMVLRILKNPIYIGTLEQGRVTTPNYKIKRLVYKPREEWAVVEGCHEPVIDSDIFEIVQKVLALDTRTSPGGEGVELFSGLVYCGECGGAMIRKTVPSGKKKYVYYVCATHKKQPAVCYSHNLRDTQLNEIVLDALKAHIKDVLGLAGLMEITSTAQLQQASMKKLQERLEHKQEEINRNQTLLMSLYENLNDGIIDRDEYRDLKKTYTRRREEAEHQADDIRAEMEREVNHASNGHRWIDRFRTYQDITELDRTIVVSLIERIMVYRDHRVEIVYRWYDEYQWYLDLLLKAQEMPLEKEAM

SEQ ID NO: 398 - protein, 521 aa, unidentified
  source 1..521: note = uncultivated organism
MIQTINKAALYARYSSDNQRSESIDAQLRAMQNYCQQNHILIVETYIDEAKSATTDHRPSFQKMISDSKYHQFNIILVHKLDRFARNRYDSAVYKRELKKNGVSVYSVLENLDDSPESIMMESVLEGMSEYYSQNLAREVMKGMRETALQCKHTGGKPPLGYEIDQQSKKLTVNEQEAEIVRSIFSMYAQGNGYSQILHYLHQKGYKTKRGQEFQKNSLYSILTNKKYQGIYVFNQSSSKSISGSRNTHLHKNSDDIICIEGGCPQIVDSITFQKVQQRIKEHRHHGGRENAKTNYLLSGKVFCMDCGRAMVGNTRYSGRNKQRYVTYRCPSKRYACSNKEINQEYLETYIIHLLENRIFNRASLKQISDRIKGKEEEGREKQEDRTDLIAEKLRKIDEAIQNITDAVIQGLYSPALGERLSALEQEKVSLEAEKTKMSSMEQEKIPQIDPELILQEYVQAKKATSSPEYKQLIQEFIDKIVVGKYCVEITLKTGMDIFPSLDTSVQIKRQEIYEKKGEVS

SEQ ID NO: 399 - protein, 562 aa, unidentified
  source 1..562: note = uncultivated organism
MNQNRNIKKIYHAAIYVRLSKEDGDIVSANKRESNSISNQKDLIKNFLKDKKDIVVVSERVDDGYSGSNFERPAFQMMLEDIRRGVVDCVVVKDLSRFGREYIDAGKYIERIFPALGVRFIAINDNYDSLEGKSQADEIVIPFKNLINDAYCRDISIKIRSHLEVKRKNGEYIGAFTPYGYKKDDSDKNKLVVDTYAADIVKEIFRLKLSGMSQTAIANYLNDQGVLSPMEYKHSLGINIQDNFKRHEQAEWSAMSVKRVLENEVYIGTLVQGRHTTPNHKVKKLMDKPEKDWIRIEHNHEPIVTEREFTLVQRLLGLDTRTSPNGDKVYPLSGLAVCGDCGALMIKRDVPAGGKVYSYYICSRNAATKECGTHRIPMEKLEETVLEILKIQIENILDMKRILDYINVVPFQELDIKELEKRKEAKVQEVERCRQLRDYLYEDFREGIISKEDYTELHEGYTEKRKKAVRNIEHQITEILESKSDKYQWLDYFTEHQNIQELNRTVAVELIDQIKIYDKKHIEVVFNFNDCYQSLLRQMAAVGCTVTVDDNGRVELERKEVV

SEQ ID NO: 400 - protein, 502 aa, unidentified
  source 1..502: note = uncultivated organism
MRSTIYTRVSSEMQTDGHSLDAQLAACRKLCADRGWTIVSAYSDVESARTTDRPQFRAMLLAAEVHAFDVIVVHKLDRFSRSVTDTLSTLRRLAVINVGLVSISEQFDFTTPAGKVMLTMLSAFAEWYVDNLSTEVAKGKRARAAKGQWNSMLPYGYTCTYRKDGGDGAPIVRTDEGAGVLSAFTWFATGHYSDLEIAGMLNRAGYRPHGRGQRALPLWSKDSIRYLLTNRFYVGEVQYQGQWQPGQHEPIIDRALFDRCQQIRAGRGDRHSLTAKAHDRTYPLSGLARCARCGARMRGHSSSVGHRVRYYRDPSRERGGACPQRSVRAQEAEDALAAYLSTLRLPDEWREKVMANLHSRFQAGNSEQDKIRLQQQMERYRTLFVLGDITEEEYKSRRQELKRQLDALTPPAMPDLEQAAQLLDNIGNIWQRANDDERHKLLHAMLEAVYLDSEAGPVVGIVPKPDLAPLFSVMSHTGTTGVTPACDIILFLPGLIVALPLV

SEQ ID NO: 401 - protein, 639 aa, unidentified
  source 1..639: note = uncultivated organism
MRVAIYTRVSTEQQVDRDSLAAQKSALLAFCKSNDHRNVQHYEDAGVSAKDAEREGLQKLLTDIKAGKIDLVVVTKLDRMMRSTQHMLELLGEFRKHNVVFKSLSDPIDNAGPTGNLLLQLLSVLAEFERRLTAERVRSVMDYRAKGGQWNGGVIPFGYTTRDRLIRERVQTGLSSEKANREADKSTPEFKRLYVDPAEAATVRLMVELFLEIRTILGVTTELNRRKVRTRNGGEWTTTSVRRALGNPQYVGKLTWGQRRTDEHTGKLKKGKDGPLITESNHEPILDNEVFAKVEQLLKQGSFKRTKPMKRYLLGGLLHCRACGRIMYGYTYRKKDDAEYSYYRCPQKRPNDGNPECKGQSLPGKPFEEFIVGQIMELSKNTRFLNDREKMVKGLQAKLARHIRSRSRTVKSLRRREQDLRRKMDTLVERLEDETITRDLFKDRYQKHEQELAEITAQMESENSLEARGTMHAAALQISWEQISSFGHGWGKLDLEAKRNRLLAIVHSIQADREKVDLKLYLDDPGGDNGSGPNSGPTNSRNMDERMPLRIFLRPAKGLQMLAVANREIPGSHQRPTDRPDRHSRRGSGGALPGTAGQQGGHGLGDDARPSDRRPAASASKVPRQQPHGQRTDEHQVVA

SEQ ID NO: 402 - protein, 644 aa, unidentified
  source 1..644: note = uncultivated organism
MKDKVYQEKKRIYCAIYTRKSTSESLDQDFTSLDAQREAAENYIASQRNEGWLVLPERYDDGGYTGANLERPALQRLLSDIRDGRVDCVVVYKVDRLSRSLLDFAQLLEFFDKHKVTFVSVTQNFNTNTSMGRLTLNILLSFAQFEREIISERTRDKMAAGRRKGKWLGGRPVLGYDLDRENHRLVVNEKEAEIVREIFYLYIKEGSLRTVAAIMNDKGFETKKFVTRSGKVLGGKRFKIAYIQHIIKNVLYIGKVKYMGQIYPGLHEPIIEEDIFEKAQEILVHNRVKRQRRKNNKNLGLLSHLLRCKACNSPMFHTYSVKGDYNYRYYVCLDAQKGGYRRCPTRAVNAQAIEEAVINILRKIYEEGKAQEERTKPIGETKKEIKDLQEIQYGWSKMREDGENLGSNRDSHNPSIIELKNLQGKILSDGELMEVRDEEEILTGEQFREALSLVSSLWDTLFPEEKRRILKLLLREVDFDGRDGTIGLTLKGSRIELFDSKINLLSEVPLNTLGDPKSNLRFEFKVALKRPRQGRSLGKIFIEKEPLLRQNLVLAYQIQELLERKKVKNLNQVAQWLHKTRARVSQIMHLLFLAPDIQEEILFLKKEAISHLTEHMIREIIKEIDWIKQRKMWNEIWKIKQAQE

SEQ ID NO: 403 - protein, 568 aa, unidentified
  source 1..568: note = uncultivated organism
MARKSRKNAETVIDVVDAVPKKAYIAALYARISVETERKREADTIGNQLQLLRDFAAEHPDIQVFDIYSDDDISGTDFVRPEFSRMMNDIRDGKINCVIVKDLSRLGRNYLESGEYIEMVFPFFNVRFIAITDRFDTLNQQADISVQLKNIANEMYAKDISKKICSTMRSIQEQGKFAGSRAPYGYRLHLEDKHQLVIDEETAPVVKEMFELLADGNTLHYIAVTMNARGVPSPGRLLYDRGIAKTEKFQNSKWYMQTVRRILQDPIYLGWMVGGKYRSEFHTNGVKGSQPVPREEWIITKGTHEPIITESLFNRAQEYFAETKKDKGMTAKYNSKSKQASIFKGHLRCGECGQAMFLRRKKNHQGEEVWWYYCALHENYNSSYCTKKAVKQEAVEGIALKLIQAQIKLFLDARDLLTALNKKESSKTKYRIYRDQIGSVQKQIDRYLELKASLYEDYANSIINRDDYIRMGQEYAQKADELRIFLTELEKESQKYSPAYAMDGGWARLVEEFRDIKSLDAKVVDAFIDQMILYNDGHVEIKFNFRDELDEVIHLSAIRHREVDRYAV

SEQ ID NO: 404 - protein, 639 aa, unidentified
  source 1..639: note = uncultivated organism
MTKKLKCYLYTRVSTEIQLDGYSLEAQKDRLRREAAHRGMKVVGEYSDEGKSGKNIKGRPAFQQMLTDIKEKKDDVDYVLVFKLSRFGRNAADTLNSLQYMEDYGVHLLCVEDGIDSAGAAGKLMVSVLAAVAEIERENIKEQTMAGRQQKARDGRWNGGFAPYGYKLVAVDGQKSKSLVINEEEAPLIRMIYDKYLNGNMGITGTAKWLNEHGYTKTPRQNGTITGISTSFVKGVLDNPVYCGKIAYGRRRTEKIDGTRNEFHITKQPKDSYKLYEGEHEGIISEDDWYQVQVKRAKNAFKREKTHSLEHCHILSGLVKCPVCGAPMYGVVNRKKKKGSEEFYKDMWYYHCKNRRMVTGHPCDYKKNIPQEQLNQEVFALFRYAYGGDNNFRDGLQKKYGSSEGVSELMREKEHLEQELEKLESQKKKQLIKIDRLDIDDEFYDDLLVTYKEGLREITDKIAGLNATLYQTEVAIDSKKGESFSYEMYIRAIDSVLNLPDEIPDEEAKRIMNFFIEKIEVYPERQPDGRWVRYVKFKIPLNMGGEDFDIICYEDDNSENNSLPKEAHVETVVLLSHKSPDSAISVKVEFGEGNDKISLDAIAERAKKYQPKPKITYKMIQEYVEQKYGFKVHTAILQK

SEQ ID NO: 405 - protein, 539 aa, unidentified
  source 1..539: note = uncultivated organism
MTRVCLYTRISTDEDHQPTSLGTQRERLERYCQAMEDWHIAAAFEDQATGTTLERPGLQAALDLARQGRVELLLVYRVDRLSRKVRQLAVFCEELDKLGVVLKSATEPFDTGSAAGRMMLQMLGVFEHATIVDRVTAGLERRVREGRWMGRRIPYGYTRDPDSKALLPCPVRAPVLRHIFALYTQDRQGTTSIARTLEAEGAPPPRQHGWSPNALQVILANPAYLGMIRWNDKLYEGQHEPLIEKDTFDQAQAILTRRFKDATLRRGNPTPFLLSGLVRCQHCGRAYVGTSAHGHKDRYTYYACSTRYKYGRTRCQGQRLSKDRLEHAVLTQLATIYRDGQLINDALAQAAEQANADRPQHEQQLAGVRADIQNLERKIDRYLQAFEDAKLDPDVCQQRIERHHARLQALRDQEADLAQTLTAHAGTRPDTANLAALADQLDQLIATVNPEQAKELLRLLIKDIRVHDQHTIIPTYRVPPAVRTMHGTVGDTGLELASGAQVGPDSPVLLGFGALRSAQLRSNCYQNCYQGQGQAATVE

SEQ ID NO: 406 - protein, 594 aa, unidentified
  source 1..594: note = uncultivated organism
MTQSQSRSRGRGKRQAPKVVTRVATYRRISTNEVNQPHSLEAQERSLNDYIARTPGLVHVGDYFDMQTGTKTERPGLQALLSAAADGEFDLVLIYRIDRLARSVHGFMEVLQRLGEHGVSLQSATETFETTSPSGKLMAQTLASFAEFEHDVLMDRILEGFTAKAMKGEWLGGRAPYGYANDRENRTLRVVADEAPIVKRIFQRYLDGLGAKAIAEELDRAGLRARGGQRWTGHNVLRLLASPTYAGLIERNDEYYPGLHEAIVSREVFEQAMALRQTKVGDDQFAKMQAGNSEFILSGVARCGACGGAFVGAAANSKNRHYRYYDCSMKSKRSDAERCQNDRVDADALEKMVVERLLAAYRDSDLFLAAVRLAGEQAPERRAALEEQVSAAEVAVTHTTRAIDRYYAAFEAGELDPGALRPRVTALGEQLDAQRQELARLQRERDESVGAAELVDLEAATARIEAALSEPESWRAKRRLVGALVESVVVSPGRHVRVTLRVPTAGDAGPDSVLSGERVRRARSGSRAASGHGSVAGAATSNAVGQWTPFRMGSQFVEVLGVEPRSIRAAVDILRAQPMGDCRAGPVIGTAYQP

SEQ ID NO: 407 - protein, 525 aa, unidentified
  source 1..525: note = uncultivated organism
MKKNGIHKPAPEAKRCAVYTRKSTSAGLEQDFNSLDAQRESCVGYIQRQPGWTRVDERYDDGGFTGANIERPAFQRLLADIEAGKIDVVVVYKVDRLSRSLLDFAKVMERFSAAGASFVSVTQNFSTADAMGRLTLNMLMSFAEFEREMIAERTRDKIAAARRKGKWTGGPVPLGYTVADKKLVMNELEAVLVREIFTLYLEQRSALAVARALNDRQRSTKRHRAANGNLRESRTWTKGDVLRVLKNPVYAGYMPCGGELHEAEHTPLIPRETFTRVRALLEGATESKKDRGRNPDYVLRGLLRCACCGASFTPASTRKGRAEYRYYRCLTRDKQGRDACPSSPLPADAIEEYVLERLRETTADGMLAKDVAASVKERAAARRKDILTERQKLPNEIASLSDEGKRLVETIATVNGAARRLLDERLVEIGQQLARSEARLAAAERELANLDALEVEAAWVTQCLTDFDKVWDVLTPENRARLLRAVVQRVEVDEPANKVSVHITDLSAALAPATTNEPTHEEVRQ

SEQ ID NO: 408 - protein, 564 aa, unidentified
  source 1..564: note = uncultivated organism
MTTPSRIRCAIYTRKSSEEGLEQSFNSLDAQREACEAYIVSQRHEGWQLIPTQYDDGGFSGGNMERPALKRLLDDIAAKRVDTVVVYKVDRLTRSLADFAKIVEQFDKQGISFVSVTQQFNTTTSMGRLTLNVLLSFAQFEREVTGERIRDKIAASKRKGMWMGGSVPVGYDLEDRHLVVNPAGAEHVREIYRLYLKLGCVSKLKEYLKQAGILSKKRISRTGRTSGGATYSRGALYLILHNRIYLGEITHKKASYPGQHAAIIDQAMWDQVQAQFQSNLQAPRKRPRATEQSLLMGLLYDERGNRFTPSHANKNGRRYRYYVSQAVIKKRGEKQSGPLRIPASEVEGLVLSQLTLLLRSPQRLLDVLVDVDGPPSDIKAVTEVSREWDTASSEKVQCLLESAVKRIVVHYDRIEIEISKVALRQAVLSVPDDPEHLNTNADEVVVIEAAAQLKRCGGEVRLVLPPDSHGANLHEVPSLIRAISRAHDWVDRILRGQAVNQRSIAKQTGLDERYISRIIPLAFLAPDLTETILEGRQAPGLSLDTCLGNIPDDWVQQRTIFVSP

SEQ ID NO: 409 - protein, 1209 aa, unidentified
  source 1..1209: note = uncultivated organism
MDKNDQALWVNKLWEPLEKIEESPLHSKKDGIKVAAYCRLSADVPEISQSLENQLSHYTHVINDRENWTFVGIYFDNLVTGRKASLRRGFTRMLRHCEEGKIDLILVKNVSRFSRNTKELIEVIERLKEINVTVYFETENIESTRSDTAYLLKTYASIAQGEIEASSASIEWGHEQRILKGKTYLGPIYGYTQEKAGDEIIITINEEQAEVVRSIYQMYLSGMSQNSIAAELTNQDVKTYFGKTRWSRKTISSILSNVSYTGDVLTRKRTRDLMSNKIRSSEGVRDQYLIENHHPTIISKEIYELANSRRKKNVKKKKTTSPSCGPNPLSKRVLCGNCKSSFLRTRYSPWSYFKCVTSTLKNELCPTPTIRDDYMISLMLRGVEERFKIEELRSIKMLQRMLVRINQNDHFEFHRLKALTQIQLAKSLRGIQYSDEMIERMEKDYHRFEKRLAEIEDDRQYRLDAIQWLDKVNSYQEFKDQATIELLRAWILEMVIYSKEDYQITWVDGEETIIGDCLASAPEVEVPKRKYYLRKSPEIEVLEPSRITSAEGGDETQEEEFEVLAERKLESDMVVKKIKKQLSSSVLMQTSIPAVREDKLKVAAYVRVSTELEHQKTSIKTQYSYYLFLILKDPRYTLAGIYMDDGKSGRTTDDRPEFKRMIDDCRSGKIDLIVTKSISRFARNTVDTLSYLNILKGLDPPVEVWFERENLRSLDSKSNVLISLLSALGQEESVSLGEAISWGRRSLAQRGIARPARLGYGYQYGKNKEWKIKEEEAEVVKRIYRAYEKGVTVSEICRVLTDDSIPTPGGKKRWSHTTVRSILRSEIYRGNYIYQRFHNGFSLEKKRIRNTGELPMYYIENHHEGIIDDQQWLRVQKRIENNEKKRKENYEEFPDDQGKNESFARKFYCGKCGSLVGYSRAINRTKNNRETRWWRCYRSGKGLCDSMHLNQEYLEENFSQLLMDLKFNPAFDEYIESFIEGLEITSEDDHQRERLLKETEELNQELYQAVEGELSSKERDARLIDELTDEIMAKRQVLISYTEREEQIEDVKEEVNSLKKALDTYKNKGRDNLGYYKNAPQFSPELFDRFIADGTILDNGRILYRFKSCFEWSAPIKYEDYQERNKRKRRAMSALEKKEFLKGPEVERLLSYCKEPKSIVEMREFLPRYLTNYNFKKYIVNPLMEKGLLKETIPDKPTSRLQKYYSIKD

SEQ ID NO: 410 - protein, 536 aa, unidentified
  source 1..536: note = uncultivated organism
MAEKKRCAIYTRKSTEEGLEQAFNSLDAQREACGAYILSQSHEGWEQGTELYDDGGWSGGSMERPALKQLLADVESGKVDIIVVYKVDRLTRSLADFAKIVEILDERKASFVSVTQAFNTTNSMGRLTLNVLLSFAQFEREVTSERIRDKIAASKRKGMWMGGAVPHGYRVEERKLLIENEEAEVVRLIFRRYLELKSIPKLADDLARSNIRTRRRILGSGRVIGDVHFGRGALALLLKNPIYIGKTRHKEHTYEGAHEAIIGDDVFQAVRDILTRNNHDKVVGTKTSQPCLLTGMLTDPDDYPMSPTRGKKGPKSYCYYATRHRPGEARDRAWRFPVGEIDRVVIEAVSRHLETLVFRSAAGTEQLQMEMEASSNIAETLRCGSTVEQRKLLLGLKTSIRLTKESIDIAITIPDTTDPETISVSAKLVRKGNELKLVQHPGGAISNAPPDPVLVKLLALAFASRDYLISEIVTPSISRYSKRHLQKLARLSWLAPDIVSAILEGRQPPQLTGRYLLRCGEVPLEWKAQRSFLGFA

SEQ ID NO: 411 - protein, 528 aa, unidentified
  source 1..528: note = uncultivated organism
MTRQRLRCAIYTRKSTSEGLEQDFNSLDAQREACAAYILSQAGEGWERVKTTYDDGGFSGGSMERPGLRALMKDIEAGRVDVVVVYKVDRLTRSLSDFAKIVDIFDAAGASFVSVTQAFNTTTSMGRLTLNMLLSFAQFEREVTGERIRDKIAASKAKGMWMGGNPPLGYDIRERALHINESEAGIVRDIFQRFLALRSVMDVRDALAADGVRSKRWVSSTERVHGGVAFTHGALFHILKSRLYLGEVVHKDRVYAGQHAPIIDLDVFERVQSKLKAGAPVLPGKPVRGVGAPLLGKLFDDLGTPMTRAHGNKGSKRYHYYVSTAVAQRKRVGSQPRVSAPRLEAAIVDLLAPSLAHAWHPEAPVRDRVMSAIDRVVLALGRIEVFARAGAINLDAPTSSTMSVDETGIRIVADVDLSAPLNDRSVIDGERPTEIRVDRALVRAVVMAGVWTRRLGEHGAPSLQIFAEREGVSPIYAGQILPLAYLAPDLVEAILDGRQPRRLSLSSLIAHALPVDWAGQRALFATFA

SEQ ID NO: 412 - protein, 527 aa, unidentified
  source 1..527: note = uncultivated organism
MSKTRTPSLATIVRCAIYTRKSTEEGLEQEFNSLDAQRESAEAYIKSQTHEGWECLAGHYDDGGFTGGNIERPALKRLLADIEAGRIDCVVVYKVDRLSRSLLDFARIIGIFEKHHVAFVSVTQQFNSATSMGRLMLNVLLSFAQFEREIISERTRDKIAAARRKGKWAGGHPLLGYDIDPRGFKLVVNEDEAFRVRAIYDLYLEHQAMIPVIKELDRRGWLNKRWTTRKGRERGGKVFTKTNLHKLLTNITYTGKIRYKNEIHDGEHVAIVDPAVWQRVQAMLQRNGRTGGALVRNRFGALLKGLIRCRPCGCAMTPTHSTKQGSRRYRYYVCSNAQRRGWHTCPSKAIPAGEIENFVVDQIKAIGKDPALLKATIVQAREQGQARIAELEAEERGLKRELAGWNAEVRKLLEKSGPIHANPAALARLADLQERMRNAEQRATEIREEAVALTQDMIGEGEVIQALAAFNPVWESLSPKEQCRVVQLLVERVDYDGAKGKVSITFHPSGIKALAEELPDERKEKIA

SEQ ID NO: 413 - protein, 546 aa, unidentified
  source 1..546: note = uncultivated organism
MKKIRCAIYTRKSSEGGLEQEFNSLDAQRESCEAYIDSQRHEGWVLLPEVYDDGGLSGGSLKRPALQKILKHVEEKRVDQIVVYKIDRLTRSLADFVKIVDILDAARASFVSVTQSFNTATSMGRLTLNMLLSFAQFEREVTAERIRDKIAASKRKGLWMGGAVSIGYDPDGRTLKINEAEAVTIRTLYGLYEQHGSISAVREEAERLGLRTRRRESISGDVSGGGPFDRGHIYYILTNPTFAGRFRNRKLIHDGLHAAIIDPERWEKIQVQLQDGASRSRSMTTANQKSLLCGKLFDETGDRLTPSHTKTRKGIRLRYYISHRLMTRSRKAHLDAWRLPGPELENKSADVLKSIFRDHAFVIGLSPGSQAEEIGRIQFRLSELSDAEDIKGLIRFIDRIDIRPGHIRVSVNGPLLAEELGLSADAINNEILTRNFPFQLRKRGVETKLILDDSPTGVDETLIRNIARAHSWFEQIMKGNTFAEIARTHETSPRRVQQLIDLAFLAPDIVRNVLNGKQPLGFTSKWCLLHSLPSDWAEQRKILATL

SEQ ID NO: 414 - protein, 534 aa, unidentified
  source 1..534: note = uncultivated organism
MQHNTETKIWNATLYLRLSRDDGDKEESNSITGQRELLRDFIRTRPELREYAVRIDDGFTGSNFERPSFKKMLEDVKAGRTNCIIVKDLSRFGRDYLTVGDYISRVFPFLGVRFISVNDGFDSSNPLDIDSLDTSFRTLIYDLYSRDLSRRVKSAKKARAEHGAFLSPYAPYGYVKDPEDKNHLLVDTKAADVVRRIFQMAADGTKTWQIAAALNGDGVSSPKDYKVEAGCTRTPWRSIQEDNFWTASLVAKLLRDERYIGKTVYGKRSRDIVGRTHTVKIFRNDWVIVPDRHEAIVSEALIEKAQICMREYREREVMTSGGNPLKRKVICGVCGHAMQRDNKKNGSYRCVMKRLNTGFDCSEEKVPEADILEAVIDTIQVYAQYAVSIDRLLQTRQEQRQLDRKQAQRRLQTLQSRKAQLDERLQDLYEQLVEGEISRESFAAQKKALTAQAEEISRTVLELERKISGSDDGSNAVIEHFKSYAGITALTREISIDLLHSVTIYPDGRMDIRLNLVDEIKALMETLRRESCTA

SEQ ID NO: 415 - protein, 519 aa, unidentified
  source 1..519: note = uncultivated organism
MKRRCAIYTRKSTEEGLDQAFNSLDAQREACAAYILSQAHEGWELVNEHYDDGGWSGGNMARPALQQLLADIAAGKVDVIVVYKVDRLTRSLADFARIVEALDKANASFVSVTQAFNTTTSMGRLTLNVLLSFAQFEREVTSERIRDKVAASKRKGIWMGGPVPLGYRLENRKLLIDGQDAETVRLIFRRYLELRSVGALADELAASGIRTKVRHYANGRSVGGVCFSRGPLALLLQNPVFIGKVQHRDELFEGEHDAIIDQELWDKVQQSLATNRREWLHGNRARSPSLLTGLITDQDGRPMTPVFTSRSSHQHRYYVTRLKPGDDKKTAWRVPAGEIDRAVLKCTSKFLSQRAAEELNPQNRACAIDLSRLSVPEQRKILLEAKVRVQLSAPGVTVSVDNGLEQIPLPARFARRGNELKLVAEDQGTAKEPDPVMLKLLAHANAAREAMLAARSDPLVSHYSKRHYWQLLRLNWLAADIVTAIVEGRQPPSLAGRRLLRAADVPLSWEQQRRYFGFA

SEQ ID NO: 416 - protein, 633 aa, unidentified
  source 1..633: note = uncultivated organism
MKNNTGHIAIYSRKSKFTGKGESIGNQVELCKEYIRVHYGDTALENAIVYEDEGFSGGNLNRPGFKKMMDAARSRKLSAIIVYRLDRISRNISDFSGLIEELSHLNVAFVSIKEQFDTGTPMGRAMMYIASVFSQLERETIAERIRDNMHELAKTGRWLGGITPTGYASEAVKSITIDGKSKKACKLRLIPEEADIVRLIYDLYLETDSLTLTETELLRRSVKTKNGRHFTRFSIKGILQNPVYVIADADTYDYFVSAEADLFSDKAAFDGVHGIMAYNRTNQEKGKTTEFLPTSEWIVSVGQHPGMIPGKVWAGIQASLERNKSKSFRKPRSNEALLTGLLFCSCGSRMYPKLSKRKTADGKPIYTYVCKLKEHSQRSVCNSKNAHGNTLDAAIIEQIKSLENDQSAFIQQLERSRKFYTGNREAYNDRLEAMQKERTETEKKIEGLVDSLAELSEGATRDRVAKRIEQLNGKCQDLDARILELESLTTQHALSDIEFDLMRQLLTVFRNSIDQMTIEQKRAAIRTVVRKVVWDGINAHVVLFGAEDGEIEYPPLPGLAAGADCEDETAEDLEPFADVDYGESGTETSDSTNIETPGEAGVEAYDSADSKIPGGPEAEISGDIKAHWGENSK

SEQ ID NO: 417 - protein, 562 aa, unidentified
  source 1..562: note = uncultivated organism
MPNPPKTGTRAFRCAVYTRKSSEEGLEQDFNSLHAQRESCEAYIKSQRHEDWTPLPALYDDGGYSGGSTDRPALKRLLADIQSRLIDVVVVYKVDRLTRSLADFAKIVEIFDAADVSFVSVTRQFNTTTSMGRLTLNVLLSFAQFEREVTGERIRDKIAASKQKGMWMGGWIPIGYDRKDRTLTINETEALTVRAIFNLFLKLRNVRQVQTELMRLNLTTKPYATPRGRAVGGLSFARGHIYKILSNPLYIGEIEHKGVRYPGQHPPLIDSATWAAVQAQLAANHHEKRTRTNAKSKSLLAGLIYDDAGNRLVSSHATKNGKRYGYYVTTQGAGRSAAAAGSARLWLPATVIDELVRAKLQNFLTDRTQISLLLREARCRPAQIGVGLNIATELANSLTSGLPTAQSAAELIARVTAGHEILKISIKRDRLLAILTGKTVEQFQTDAQANIISLKVTVPAPPGHGSGKLIFENQNAKTPDAVVVKAIARASIWFEQLTAGKSRSMAEIAASEGITDNYVSNLIHLAWLSPDLVGRVLIGDPEATSVARTAMLSRKSDSLWNR

SEQ ID NO: 418 - protein, 512 aa, unidentified
  source 1..512: note = uncultivated organism
MGLEQEFNSLDAQRDACEQYIANRGHEGWQLLPERFDDGGFTGANIERPAFQRLMAEVEAGEVDIVVVYKVDRLSRSLLDFAQVMNRFHRAGTAFVSVTQNFSTADAMGRLTLNMLMSFAEFEREMIAERTRDKIAAARRKGKWTGGPVPLGYDVIDKKLVVNELEAVVVRELFSLYEQHRSALVTSRQLNEAGRTTKSHRAKNGNLRPGKKWGKDAVLRVLKNPIYAGFMPCKGELHEGEHEPLIDRERYRRIRSMLDSRGGAKRDRGRNPAYLLRGILRCARCNASMTPASTRKGGKEYRYYRCVSKDKRGRSACGSRPLPADAIESFVIERIRKVASDGTLAVEVEARLRARIESRRDELATERRELPARIAKLSAEGRRLVERVGDMTGTAASLLDQRIEEIGDELGRCESRLAEVERALAALDQAKLDTEWVVRALADFDVVWDDLTIENRSRLVCALVRSVTVDEPTGAVTAVLAEIGLDDVGGESVADQTAPAASPGDAQMEAQA

SEQ ID NO: 419 - protein, 546 aa, unidentified
  source 1..546: note = uncultivated organism
MSIVYNVGIYCRLSREDYKGGSKSDVSLSIENQQVMLENHVKKKGWFVYKVYVDDDFTGTNFDRPSFQEMMSDIQAHKIDCVITKDLSRLGRNYIEAGRHRELFADYGVRYIALHDNHDSANDGQNNITTPILEIMNENYAAEISRKVRYTKKLMAEQGKFANSRAPYGYLKSPDDKHKLVVDENVSHIIVRIYELYLSGTPARGIADIFNNEGIVTPNAYYYAQLGKPNPYKSNKNAWGSATIMNVLRNPAYYGAMSSGKRYAKSYKSKLLVCRPFDEWVIVEGTHEPIITKEQWEDAQRVGVKNRRETVRRGKNGEVSIFAGIIKCADCGANMVFNRNKNYEFYRCSTYQQKGKDACGHHKIRYDTLYNAVLANLQEYAVLAVEDEERLIKRILKANEDYNGKSVSRHERSLREANNRVNEIDGLLQSLFEDKCKGNVTDDMFKRMAAKYEDEQKQLTINIKQMEAELAEHQRTQQDVTGLIARIKDCLTIDALTRAVVVDLIDRIEVSEAYEIDGEKQFDLEIFYKFGLTNASSDLAKEKRAG

SEQ ID NO: 420 - protein, 517 aa, unidentified
  source 1..517: note = uncultivated organism
MKVAIYCRLSEEDRNKQFETDDSNSIQNQKAMLLQYSMEQGWEVFNIYSDDDYTGSDRNRPEFQRLLRDAEQRKFDIVLCKTQSRFTRELELVEKYIHGLFPVWGIRFISIVDNADTANKGNKKSRQINGLVNEWYLEDMSDNIRSVLTNRRQNGFHIGAFALYGYQKDPNQKGHLVIDEEAAAIVREVFTLFSQGYGKTAIARMLNDRGIPNPTEYKRLHGLRYQQPKRKNSTLWKYFAIADMLENEIYIGNMVQGKYGSISYKSKQNKPRPKSEWYRVEDTHEPIIDRELWDRVQAILAQRAKPFIGGSIGLFARKVRCANCGYTMRSTKNRGRHYLQCSNRHVAKDACIGSFISVEKLEQIVLAELNRLSSEYLDKDELERNIQFCGNLQAQKRQLQASLTAYEKKIDEYAKGIRELYLDKVKGVITERDFLDMSKEFSAEKERLEHLVEGSQRQIAELDSRIEAGDNRKAIVEQYANLEHLTREMVEALIDYISVGKRESGAKYPPVEIHWNF

SEQ ID NO: 421 - protein, 538 aa, unidentified
  source 1..538: note = uncultivated organism
MKTTSVKSVRCAIYTRVSTDHGLDQEFNSLDAQHDAASAYIRSQAHAGWTLIRSRYDDGGYSGGSTDRPALQKLLEDIRARKIDVIVVYKVDRLTRSLADFAKLVELFDAHGVSFVSVTQQFNTTTSMGRLTLNVLLSFAQFEREVTSERIRDKIAASKRKGIWVGGPLPLGYELKDGKIIIIENEADRVRLIFRRYLEVGGVNQLVRDLRDRNFLTKVRPLATGATRGGIPFGRGSLFYLLRNRFYIGEIKYKGEIFAGEQPAIMDHALFDAVQQTLTDQWSHRTVMRNKSDHLLTGLLFDDAGHRMVPTHATKAGVRYRYYVSLPHLYGESKTASVGSVSRIPATDIEDIVVKSLSEHLTQQEPVSSSSICEKDRSVIAAQIARIDVHKDRLTVRLKSPDTEETSASTDDHVLSMPWQKPPSRKSRQILLPHHASRPDVRPIRIERRARLVGAIARSRRWLDEIVSGEVTDVDQIAARQKCSVRQVNMTISLAFLAPGLVRAAVEGRLPRGIGVERLRDAPAEWNRQFEALGLNPQ

SEQ ID NO: 422 - protein, 527 aa, unidentified
  source 1..527: note = uncultivated organism
MITRAAAYARYSTSRQHETSIEAQLQAIDAFCKQQGWQLSGLPYIDEARSGTNTNRAGFQRLLDDARLGRFDVIVVYDLSRGARDVADWFNFRKEMEVNGIRVVSATGGIGNLNDPNDFLQESIQATVGQFMVMQSRQKSIAGKRVRASRGLFMGGTPPLGYDIDKEKGAYVINHREAKAVRLIFDMYAAGHSYADILREVDKIGVTGKFGQPIQRNTLHYILKNPRYTGTFIWGEYEMRNMHQWVGRRNPEEEVIRIEEAIPQIIPPHIFDIVARRMRENRHANSVRTPDRCYLLSGIIRCGLCGAPMSGVTVTSRGYSYKKYFCSNRRKQQRCAQKELRAEKLEAFVLDLLRDRVLTEDYLNALVDRIVSIADHSKRRAAISAEIQSLDNKIANILTAIETGQPPEALLDRLNRHTRQKEQLVQQLSSIPRTANINRAAVRQALVQDIQCAMDKPKEQKAIIQQFFSDITVDDSAITLTLSPNLTAFTTPQNQKKATTSKVVTFAGSPGRTRTYNNSVNSRVLCH

SEQ ID NO: 423 - protein, 528 aa, unidentified
  source 1..528: note = uncultivated organism
MQTTVTVTVTELKAPETAEAEKPKIRLAPYCRVSSPSEDQLHSFAAQIRHYTEYVGTHPEYELVDIYADEGLSGTSMQKRDELNRLLRDCAKGKVDRIVTKSVSRLSRNAKEFLETVRLLKSLGVSIYFEEQGIDTDKLNAEMILTFPGLHAQQESENISRNTRWSIQKRMARGEYFGTHAPLGYRFQDGRLTVEESEAETVRRIFDLYLQGYGCQSIAELLNREGNISERTNGKILDRWYPGTVRYIIGNERYVGDALLQKRYNAEAIPYRTHRNYGERKQYYAEQTHPPIIERALYDEVQKLLKARYQAVGETRGKHQLNRKLICPECGSAFRKVEKNGKRSWVCSSKALGRTACRVERIREETVYRIFRLLLLKLLDYGDALLGTLIDQLETLQAVTADDPECFQSLNREISNLAAQNLVLTRLYSKKLLPTEDYYAQSGDIDRQIRNLQSKRKRLLQEQDEPETVDTLRHLRDVLRESDPNGNPERLMDEIVEQMTVRSATEVTFRLIGGVELTESLHGKGEEP

SEQ ID NO: 424 - protein, 535 aa, unidentified
  source 1..535: note = uncultivated organism
MIRVASYCRVSTDQEDQANSFESQQHYFREYIDRQPDWELYEVYADEGITGTSTKKRADFNRMIHDAHLGKFQLILTKEVSRFSRNILDTITYTRELRSLGVGVLFMSDGINTLEPDAELRLSIMGSIAQEESRKTSSRVKWGQTRRMEQGVVFGRSLLGYDIKDGHLTVNPEGAEIVRRIFHKYGVEKKGTSVIARELREAGYQTCRGSTKWSNSHIVKILKNEKYVGDLVQKKTITPDYLSHAKKYNHGEEELVVIENHHEPIIDRDLWNTVQAELKKRDRSGALGVGHSNRYVFSGKIKCGECGASFVSRKKTRKDGSCYKRWGCCTAANEGTRRLDPQGNEVGCDVGKMVRDELAMDMLRQSLNSLKLDRGWIIHNVTAIAMEAIQAEEQGNTDSAERLEHEISQITEKKADVLDAFFAKDITKEEMRLMNERYDSQLDGLRERLDAVKARGELSYERSALEQDVRGHVSKIVACRSGSDAFYKNLLDKMVVYRGGRVEVKLNLLPQKWVFALPHYDSSVPISVRTPLATS

SEQ ID NO: 425 - protein, 510 aa, unidentified
  source 1..510: note = uncultivated organism
MRNAGIYIRVSTERQAQEGYSVAAQKQNLISFAKTSNFKVYDVYADEGISGKDVEGRPSVRRLIKDIQDGKIDVVLIQKFDRLTRNLTDTEDFIQLFQKYDVDVWSISDGKVDISNSNGKFMTLLKGLFAQHERELTSERIKVAFNQKAKQGYTLCCACTPYGYNRKKGNKVIIINQEEAKVVRRIFKMYIEGTSFTTIAKRLTAEGIPTKRAGDTVNIGRNGEIVGTKTFVGVWSPKLIRLMLSNPVYIGKVQYGIGRKDYYIGDGKHKPIISEKMWNKVQDNLSKIETKVHTNRPKDDVYFCGTLVCGVCGKRLTTARTIGRLRKDGTRNLFNAYRCVNQEKQICTARYVSHLKAEEAFIEYLKNNIAEFDAIDDLVIEEEDVDLEEIENIKKLLINKRAKQKEVMDLFMAQKIDYNQFKYMSEELDNIIQVNETRLSRLEQVYTKKPDINKAEISRYIVDHWKLLTDKEKLNFLNEFVESITIVNRDTDRHNGKAEVLDIKFYDYQQ

SEQ ID NO: 426 - protein, 560 aa, unidentified
  source 1..560: note = uncultivated organism
MARRSRAVVETVKAKFRVWRIAIYIRLSKEDARCLDESESVTNQRQIIEDHIAGFHDGDEYIIVDEYVDDGISGTTDDERDDFQRMLADIKRGRVNCVIVKDLARSFRNYSDQGYYLDDWFPRYNVRFISLYHQPLDSYKEPQNMRSIAVPIQGVLNENHCAETSDKVREVFDMKRRNGEHIGSFAAYGYIKDPNDKNALVVDEEAAAVVRDIFNMFLDGMSKNAIVHSLNDHGILSPAAYKRERLGLKYQNPSVDPAKPSLWCAQSITTILKNRMYCGDMVQGRYRMKSYKVHVQEVVPEDEWYIVENTHEAIIDRETFEKVQRLLIRDTRTGPQQKKPYLFSGFLKCADCGKAMTRSKVGNVVYYYCRTYKDRSKTACTKHTIKHDRLEAAVLYAIQQQVYLAVDYTKTIERINRAPLVKSQSKKLMDAIEQKERELAKITRYKQAIYQDWKDGEISHSDYRHMKEDYERQAEALDEVIGKLRAEQAELENGIDTENPFLTAFRQYQNIDKLTRDILIELVDHIKIYEGGYISIVFRFADELRRIQEFIEVNTHSEAV

SEQ ID NO: 427 - protein, 564 aa, unidentified
  source 1..564: note = uncultivated organism
MKRRRSVTAAPSEAKATRCAIYTRVSTDHGLEQDFNSLDAQREACAAFVKSQIHEGWTAVPDHYDDGGFSGGSLDRPALTRLLAEIKARKIDTVVVYKVDRLTRSLTGFARLIELFEANDVSFVSVTQSFNTTTSMGRLTLNVLLSFAQFEREVAGERIRDKVAASKRKGIWVGGVVPFGYRLDGRKLVIEDAEAATVRMIFERYLQLGGLTPLLAELHQRGITTRRRTLSTGKTVGGIPLGRGALGYLLKNRMYVGDLNHRGQSYSGEHPPIIDRELFDAVQAKLVENRATAHHHQAASEALLMGCIFDDRGNRMTPTHSRKNGARYRYYTSRALADGRKDEAGSVASVPAPDVEALVLDAVRPFSSVIEGPSPRPDQGDKSAETRLSEMSAEAASSSISISSQRLAHELIAVTIDRVVIMPRSIDVHLDEGIAADHPERVVSIPWTKPASHRRRAILAPQDVGTEDRRVIGTDARANLIEAIARARQWMDDITSGKVDSVEAVAAREGRSERSIRMTLSLAFLAPDIVRAVVRGALPRGISFSRLVSMPMDWAEQAALLGQA

SEQ ID NO: 428 - protein, 521 aa, unidentified
  source 1..521: note = uncultivated organism
MQIQDITPEKKSGDGKIRLAAYCRVSSDSADQIHSFASQIRHYSDYAKQNPQYELIDVFADEGLSGTGMANRDELNRLLKDCSRGKIDRIITKSVSRLARNTEDLLYMLRMLKEFGVSVYFEEQGIDTTQMNMEMIVTFPGMAAQQESETISGNLRWGIQKRMAMGEYVIPHPAYGYIKEGKNLAIDETAAKTIRRIFSLYLQGKGIQQIADIFNKENIARPSKKNPVRWTIPTIRYILKNEKYMGDAVFSKRYTTQTLPYKRKENRGEKAKYYVENYCPPIIDRETFQKVQNLIELKQSGGERSGRKTSVFVGKIRCPDCGRTFLRSAMGGRICWQCSLNAKNGKCRSRRIRDAGLKESFIQMVYRLKFNRRAIIENLIRELEILHAITSEKTGEIQRIDTEIGNLSAKNFVIAKLYTKGILSSTDYAKQTGEIGNKLKALRAERRRKLSEDASEMSISELKELNERISNYNLTSKFDAELFDEIVEKIIVEDKGKLKFCLKGGITAVEEISEKWRCRCR

SEQ ID NO: 429 - protein, 528 aa, unidentified
  source 1..528: note = uncultivated organism
MAKASKAMRCAIYTRKSSDEGLDQEFNSLDAQREAGEAYVKSQAHEGWKVIPTLYDDGGFSGGSMERPALQKLLSHVDQGLIDVVVVYKIDRLTRSLPDFARIVERFDAQEVSFVSVTQSFNTTSSMGRLTLNVLLSFAQFEREVTGERIRDKITASKAKGMWMGGVLPLGYDLPAPDTRTLVANQAEAETVHEIFTRYLKLGSVHALQRELEREGVLSKQWISSKGKTMGGQPFSRGALFHLLRNPVYLGKIRHKDVVHDGKHQAILDPDLFDRVQQQLDANARRHRAAPERRVAHSPLTGKLFDANGEPMTPCFSRGSKGKHYRYYVSASLQQGGRPPKDKILRRVAAPAIEKVIGQALSRWTPGKALSLGDLLAVHLQRDHLLIDLPGEHASSIASRLSEGETIAFANKETLRIKLAIAFPMRGGERLIIPSSKRTPMPDAKLIAALRKAHGMTRSQRGAPTIEKAPASQYDRKILRLAFLAPDLQRDILKGLQPPSLNLEALHKHEIPLDWGAQRVALGWDLSS

SEQ ID NO: 430 - protein, 538 aa, unidentified
  source 1..538: note = uncultivated organism
MNGNGTKNGHTNGNGKVERVRCAIYTRKSTEEGLDQEFNSLDAQRDAGEAYILSQKAQGWVMLPDRYDDGGFSGATIQRPALERLLADIDAGKIDAVVVYKVDRLSRSLLDFAKMMEKFEKKRVAFVSVTQQFNTGNSMGRLVLNLLLSFAQFEREMIAERTRDKMAAARRKGKWVGGRPTLGYDVDANGRRLVVNEREAAVVREAFELYLQERSLLQVVDILNGRQIGMKSWTTKKGTTRKGGTWDKGGLRRMLTNVIYIGKVNYKGEIYQGEHPPVVDVRTFDKVQELLANAVPSRDRASVTRNKEGFLLRGLIRCEHCKSVMTSSFARSHGKTYRYYKCTATNRRGADACKVRSLPADEFERYIVDRIREMSRNPKLVRSTAERVREDREKAIPALSKEKADLGDELERCRKEAKRLLATLANEEGGDGRFVTERLAELDARAGQIERRLTDITEQIVNIKRATIKPDDIDAVMTLFDPVWDALVPKERARVLHLLVEQIDYDGASGRVSITFHPAGVSLLAQDVKASRTREATA

SEQ ID NO: 431 - protein, 502 aa, unidentified
  source 1..502: note = uncultivated organism
MRYDAIYVRQSLYREESISLETQVQIAKKYCTNEIKVYQDAGYSGKNTQRPQFQQLMRDVGMGNIDKVIVYRIDRFSRSILDFFNAWEILEKNNVNFVSATEQFDTSTPMGKIMLLIIVGFAEMERMDISARVTDNYYERAKRGQWPGGPAPMGYDLGYLYEEDGRKIPTLTANGEMPVVQYIMEQYALPTTTLGEIMRDLNSRSIPGPPGPKKQRTNWNTVALSRLIKNPVYVQASAAVYAFYKREELVTVTSRVEEFDGHSGCLLVGKIQSRGQKKGRQKTGTEKTLSVGNWEGYVQPEIYLKCQEKLKQNRQVGKNGSGTHTWLSGIIKCGKCGYALTVTYHVNKTGKIRKLGCSGNYIRNMCNVRQNELLDIQSVENEVEKELIKLLGKQKTITYEEHVDHDTEIRLVKTQESIQNLLEILAGGKLNLTTINYVNEEMERLHSAEEELLKQIQKAKKKVEIEPIDFTELAFEERKRVARTYIDKVYVYADRIKIKWKV

SEQ ID NO: 432 - protein, 552 aa, unidentified
  source 1..552: note = uncultivated organism
MVDKPIRVAIYARVSTQEQATEGTSLDYQADQLSAYCQAQGWTVTGKYVDPGYSGKDDERPALKQMLTDAKSRLFDKIVIYKLDRLARKLRLLLDIEEKLKEHGVSLHSIKETLDTSTAIGRTVFQMLGLVSEWERETIIERTKAGRLQRYKEGCWGPGSPPFGYDYDRETKKLIINEDEARVIRRIYDEYSKGKSMTQVANMLNGEKIPPRNPKKGKGWRNTSIRDVLFNPVYKGTQIVNIYQKHSRLPEEIPESAIKIKVPPIVDKALWNIAQERRKNNKHLQPPRSEHWLLQGLITCGLCGYTFSTGITHNRREYGCRGRLKYTHIDGSSRCTSPRRDAEWLEQEVWQRIEGIINDPNKLDKLLKETVDSLKNREADLNARIRPIDDRLAEIASQKARLAEEWVQSSLSPHRLQEIKRDLDQEEARLRSIRTEIDPTQLEELEQIRGRLRFWDAQLAALDWNLETEDGHMVRTVEKPHKTASTILGFEDKELTSILSFPATKREVLDLLQVRLIAFADRVEVKAIFPIKPIANQLLRSNYRSVHCPQSR

SEQ ID NO: 433 - protein, 545 aa, unidentified
  source 1..545: note = uncultivated organism
MREPCTKIWNATLYLRLSREDGDKEESNSIAGQRDLIRDYLAHHPELREYAVRVDDGFSGSSFERPAFQEMMDDIKTGKTNCVIVKDLSRFGRNYLDAGEYIEKIFPFLGVRFIAINDNYDSEKERTSSDDLMIPFKNLINEAYCRDISVKIRSQLEIKRKRGEYLGSFAAYGYLKSPTEKNKLIIDEYAADVVRDIFKWKLEGASPMAIADRLNHAGVLSPMEYKKSLGMKYATSFKANAQALWSAASIIRVLKNPLYIGVLTQGKETTPSYKVHKRICKDADEWAVVQDSHEAIISKSDYDMVQKVLAMDTRTCKDDSVVQIFSGLVFCGDCGASMIRKTVPSGGKKYVYYVCSENKANKKVCSSHSIRDTDLENIVLLSTQQYIRAVIDLQDLLELTETAPLRTAEAQKVQRQIDRKRSELERCNRLLMSLYESLTDGILNKDEYLRLKQRYAAQSAEAEKQLLSLQDTLVNIQEHGSASLTWMNEFREHQNITSLDRETVVALIERILIYEDKRVEIIFRWHDEYAWQADILKNIRLKEAV

SEQ ID NO: 434 - protein, 564 aa, unidentified
  source 1..564: note = uncultivated organism
MTTASRIRCAIYTRKSSEEGLEQSFNSLDVQREACEAYIVSQRHEGWQLIPTRYDDGGFSGGNMERPALKRLLEDIAAKRVDTVVVYKVDRLTRALADFAKIVEQFDKQGISFVSVTQQFNTTTSMGRLTLNVLLSFAQFEREVTGERIRDKIAASKRKGMWMGGVVPLGYDLNDRHLVLNPTEADQVKEIYRTYLQLGCVTKLQEYLEQAGIRSKKRMSKTGRASGGVSYSRGALYLILHNRIYLGEITHKGASYPGQHPAIIDQKLWEQVQAQFQSNLQAPRKRPRATEQSLLIGLLYDEQGNRFTPSHATKKGRRYRYYVSQAVLKGPGQKHRGPIRIPASEIEELVLSQLTFFLQSPQRMLDILVGSDGSPAEVHAITEASRQWSSATSDKILDLLRSTVKSIVIYNDRIEMQLNKSALRQTVLGNSEEDAQPGNDTDEVVLIEATAQLKRYGGEVRLILPPDSPAAKPHSVPSLIRAISRAHDWVDRILRGEIINQRSIAKETGLDERYVSRIIPLAFLAPDLTEAILEGNQAAHLSLDTCLGNIAEDWSQQRTQLLDQ

SEQ ID NO: 435 - protein, 538 aa, unidentified
  source 1..538: note = uncultivated organism
MQSFYNATAYARASKDDADSSTIENQLDLIKEYANTKPDIQIISERSDNGFSGIDFLRPSFTEMMKDVEESRINCIIVKDLSRLGRNYIEVGELMEYILPQLKVRLISINDRYDSNNPKSESDDIIIPFKNLINEQYLRDISIKIRSNLNVKRKNGEFVASHAPYGYMRDKSNKHKLVIDERAAKIVQDIFSMKIQGMSQQKIADRLNDIGEPAPCEYKRKQGINFNTSFQKNERAIWSVVAIKRILNNPVYIGTLIQGRETTPNYKVKKRIMKPENEWNIIEEHHEAIITKTDYETVSGLLDHDTRTPPNQETVLPLSGIMFCGDCGNNIVRKKVGKYYYYICATKKAGKGCTLHNIAANELETAILEIIKKQIAVILDSEKCLDYLANLPYQQINMQKIQGQIIERENEIKNCERYKRSLYEDYQNDDLSKEDFIAFGKDYTDRIDELTQAIKILKQEAELIFDENNTTHKWIEHFKRYKNVSELSRQLVTNLIKRINVFENKRITIIFRYQDKFETIKKLLPEYVKKEGGVNHGA

SEQ ID NO: 436 - protein, 687 aa, unidentified
  source 1..687: note = uncultivated organism
MMTKLKAALYARVSTEEQAKEGYSIAAQISEIKKYAEQHGYEIVDEYVDEGASGKSIEGRPQMKRLLKDASQQKFGVVIIYKIDRLARKLKDALEISEILEKNNVNLISLNEKFDTTTAFGRTAFQMICSFAELERNNIVERVKLGMEQRAKEGKFNGGKVLGYDSIDKNLVVNENEAVIVRKIFDYANQGLGYKAIARRLNEAGYRTKMNKPFNVFGIKTILHNPIYIGKIRYNQQKNWAEKRRKGRNLDYLLVDGSHEPIITTELWENVQQKLSQRSYKPSRSHQPYILSGLLKCPVCGHGMVPARSKGAGGKSYRYYVCGQFHNKGKAVCGSNMIRADVAEEQVLQELVKVASRPEILRQLVDKINEMRANSGSTIMKEKKAIIEELNKTSKHLQKIKQNILNDPELIAIFKDDLKEAHSRQEQLQKQLEALEAEMEKQNQKPVDYAALHNLLTQIQKALMQADADEQKALLRLMVESIHITKEAPRRVGRRITKINLHFDFTVDTLQKDSVILLSRIASIQQNDFIAPLEHTVLDSLNNITEEKLGDLMKSLNILPLAMIRFPPDDLERAVNLLGQDEAHELVRVGDAPEGQLDVRSAKDCVGQAEAAADDEYDLALAVGGQPGQMVRKLFGRPQCPVDRQSDDMGVVANMAEDALPFPLHNLPLFRLTPRLGGFFVRNFHDV

SEQ ID NO: 437 - protein, 581 aa, unidentified
  source 1..581: note = uncultivated organism
MVESEKAPRRSTKRLRCAIYTRKSSEEGLDQAFNSLDAQREACAAFIQSQKHEGWTVSPTLYDDGGFSGGTLQRPALKRLLADIEEGQIDAIVVYKVDRLTRALSDFAKLVEIFDRRGVSFVSITQQFNTTTSMGRLTLNVLLSFAQFEREVIGERVRDKIAASKKKGMWMGGMPSLGYEVKDRKLVVNHDEARTVVDIYRRYLTLKSVRALTAELAEAGIRSKRRVRPDGTEYGGQTFSRGALYLMLQNRIYRGEITHKGISYSGEHPAIIDQPLWDEVQAVLAKNRIERATGIRTEHPSLLAGLLFDDDGERLTPTNAVKKGTRYRYYVSTALLTGTRKDRSSGRRIPAGNLEDLVINRLRAFFADSGAVLDAVDDESNSGPGRSQLIERGRQVADELDSAAPNEIKAMLMTLACRVTIDPDRVEIKMSRHRLGVFLAGRSIGLTKQDQKLTRDPDDVVKLVVPVQLKRVGREMRMLVENSDDQTAADPGLLRIIARAHDIQARLIQNTKLTVHDIAREERVTAAYVYTLLRLPWLAPDITSDIVNGRQPQQLNAKTLMRQASRLPAAWAEQRALLGFR

SEQ ID NO: 438 - protein, 545 aa, unidentified
  source 1..545: note = uncultivated organism
MKVLRCAVYTRKSTEDGLEQEFNSLDAQREACEAYITSQRHEGWTLVPGRYDDGGFSGGNMERPGLKALLADIDAGQVDVIVVYKVDRLTRSLADFAKIVERLDAREASFVSVTQAFNTTTSMGRLTLNVLLSFAQFEREVTGERIRDKIAASKKKGLWMGGPVPLGYEVVERKLVPVPEEAERVRTIMRRYLEVKRAPALLELLRAEGVVTKIQQRTSGPHRGGIPFRRGSLFYLLKNPVYRGKIVHRGKVYDGEHEAIIDEALWNAVQAQLKEKAPPRRRSTNEPQQAMLRGLITDPHGRPMVPTYGSSKVKRYAYYETRKDLARPGDPPGIRFQRGHLEQHLISHLEQLLGDEHALRHLAGVEEAGTLRTMFANAHLLALQLREIGKVEGALRSIVAAIAIRADGMEVILKPDALGIEAAAGWSWTLPLPDRRPFREARLRIDADAGTGSVSNDLLALVADAMVAQRLVLASPELSLAQLAKREGRCRTQLARLLRLSWMSPRIIEAIAAGPQPKGLTRRALLVCDMPIDWAEQERQFGFAA

SEQ ID NO: 439 - protein, 571 aa, unidentified
  source 1..571: note = uncultivated organism
MMDLFEKKKCYIYLRVSTTIQVDGYSLEAQEAALRKFAEGSNMEVVECYTDAGKSGKSMVGRDDFNRMLSDIESDKDGVDYVLVFKLSRFGRNVRDVQNSLYLLEQHNVVLHCVADGISTANNIGKLLISIMSAIAEMEAENISQQTMAGRKQKAKNGLWNGGQAPFGYALEKGKLIINEAEAEVVRKIYDMYTEEAYGVAGIVKYLNIHGYVKEARGTSTLDYFTRKLVSGILENPIYSGGITYGRRHTLPINSDHNEGRRKTIRQKDYITAEGQHDAIIDKDQFEAAQRRRTSMARTCEKREDSTHVHLLATLVRCPVCGAKMYGNTCRKKKKDGSGEYYSHYYFYGCKHRREIEGQPCDFKDNILEEKIDKPVIDVLCMLASNQTLANKIAEKVGTVTDEAEVLATMGGIQRLIDKKRAAAKNATKKLLLFDDDSAAADHILEDMKEEINNLYASIDELTADLDREKAKLAAIRENKLTTQRIYEILERFKDLYDIMSPEDRQLLMRTLVKEVHIYKEVQPNNKLVKKIVLNIPIGYDGDTPYVTISPDAFGLDKKVIDESVVTLIRA

SEQ ID NO: 440 - protein, 501 aa, unidentified
  source 1..501: note = uncultivated organism
MNTIPTAAIYARQSIDKKDSISIETQIDLCRSGSEYKDIKVYSDKGYSGKNTERPGFKMMMSDIRSGLIEKVFVYKLDRISRSLPDFVRMIEEFDKYGCEFSSRSESFDTSTPFGRAMLQICMVFAQLERENTIQRVRDAYGARSKEGFYMGGRVPYGFSLKETTLNGKKTSMYEPIPNETEQLKMIFDLYSQPDVTLNGIVKKLINDDIPHLRGSKWQTARLSDIIKNPCYVKSNAEVYRFFQTNGTIIVNDISEFDGRAGFMFGRRNHGKKFSSINDQTLVLALHEGIIEPEIWLKCQYKLSRNKQLKRTGSGKTTWLSGLVKCGKCGNSMKITKSNTKAGRYFNCIGRSSLHICEGHSCTIYAEFIEHLVSDEIAEKFTENEFRSSEKSSFNKKEINDLTIKLTEVETEINLLIDKIAKSDDVLFNYINKRISELDGRKMLIERSIKEKQLLSHNNTDILDLSTIWTENNFDKRKVIAQMLIKEIKIRDNEIEIIWKI

SEQ ID NO: 441 - protein, 528 aa, unidentified
  source 1..528: note = uncultivated organism
MKDMKAVIYARFSSSSQREASIDEQVKVCKDYAEKNNYEVVKVYSDSALTGKTDERPALKKLLTDSSKNNFNIVLVYSIDRFGRDLVQTLLNEKKLSDNNVVLISATEHFSNDPSGVFFRNIMMSYAQYYSDELSVKIKRGMDYNAEKCLYNGGGVPLGYKIGADKHFEINPETAFIVKDIYEMYANGNSISEINSYLNSQGLKTNKGVAFNKNSLHTILKNKRYLGYYIHSGREIAGGIPQIIPDELFERVQEKMNKNKKAPARARAKVEYLLTTKLFCGHCKEMMTGFSGTGKQGKTYRYYICNGTKYNPKTCDKKRVNKEYIENIVITECKRLLTAENIRRIAKEVVVICESERDVSNLKRLKKLLSENERKQQNAITAIMESDIESVRKALGKQIPILEKEHTEIEKMIAKEEAPYPNLSESAIRFFLTSLKKGNINDIKYRKTLVRIFVNKIFLYDDRITITYNSGDEPVNISDHLLSKLEENSNKDKFLFKNGSGPPNSANPNSLFFINHCFGFVIVLEDVG

SEQ ID NO: 442 - protein, 567 aa, unidentified
  source 1..567: note = uncultivated organism
MTGTLNRRKQHRGIQPETRAMQRVCFYCRVSTDEQADQHTVEIQLDYLRSRFRADFEGTGPVPMVLVDEFVDEGWSGALPFADRPAGARALEAARERQYDVLALYKVDRLGRKASVLLQAHDDLEAYGVAITSATEPFDTRPGPMQAFGIFVFQLLGSIAQLERSTIETRTMGGKLRVAKEGEFVNGVVPFGYMVSPAGLLVPNTTLVPELGVTEADLVAQLFDRISAGESTYALADWLVDLGVTSPRRWYNKDKGHVTVAPVAAPWSNRRVWETIRNETYKGERLLSFGMAEHTQEVPPLVTPEIWDRANERMKDRNAWKGDRTDTYVYLLSRKLRCALCGNLYTGGAANGYFYYKCNGSKKRHGAHCSARMLRADKLEAAVWADMAWRVRNPAAGLQQAQEKLRARQTDSVEQSDQRAALRQQRATLEGVRLHLRHELTNGLRPFGEVEEDLAANAAAIARLDERLAQLDVSLAVTSDMERNFAAALPLLRQIADELDAIEAEGDRLKMRAIMDRLVQRVAIDDPHARLPDLTVDYTFALGTSSVRDLTNIQTVVIMDPSRPRVA

SEQ ID NO: 443 - protein, 575 aa, unidentified
  source 1..575: note = uncultivated organism
MKKKTIAIYSRKSKFTGKGESIDNQIELCKQYISVHEGEDAAVSAQVYEDEGFSGGNLERPKFKKMMADAKAGGISVIVVYRLDRISRNIGDFATLIEELNDMKISFVSIKEQFDTSSPMGRAMMYIASVFSQLERETIAERIRDNMHELSKTGRWLGGTTPTGYASEQIQRVTVDGKVRKACKLKTIPEEVKVVKVIYEKFLETNSLTKTDAFLLQKCYTTKNGKSFTRFAIKGILTNPVYMIADEDAYRYMNENEVELFSEKSDFDGKHGMMVYNRTIQKAGKANTVRPMSEWIVSVGKHHGLITGAQWIKVQGMLEQNRSKNYRKPRSNVALLSGLLFCGNCGDYMRPKLSSRIDAHGEQIYTYLCAMKERSRAHCCNIKNANGNTLDKAIIEEIKKLSEDNSEFMRQLEKSKKALAGNREGYEEQIEKLSAELGENEKEIRALVSSLTKASGTSAEKYIMRQIDELHDKSEMLKRRIDEMKQLTASHELSDIEFDVFRQMLCSFKNTIDDMTVEQKRAAIRTCVKKVVWDGKEVHLYLFGSDDDYELPEHPTTGGGNNGGDILEPLGEDSK

SEQ ID NO: 444 - protein, 521 aa, unidentified
  source 1..521: note = uncultivated organism
MLSTQKVALYIRVSTHEQSEHGFSIDAQSEALQQHCQMQKWAIYDLYIDRGISGKSVTNRPALQQLLQDAASQKFQLVLVWKINRLARNVADLLNIAEHFRKHQVALRSLTEPFETETPMGQFSLHMMAAVGELERKTIAENFRLGKQQRNKQGKYCGAQIFGYELKTTDYHSARRQVTKLTTVPQEAATVQHIFVLYAEGFGLKAIMNRLNRSGYTTKQGKPFSIHTIRKILKNPVYIGKVRYTDLQSDRECMVEGEHKPIISLELWKQVQQCYAEKSGRPKNQRKRDYLLTSLLRCPQCQSGMIGWHTKHQRKDGSFRIYHYYVCSCYHNKGSTVCKPNCISVDAIEAIVLNKLKELILHPKLLKDVVENMNQQNRAQLRPLKEQRQIIEKKLKEIAQKREQLFHLFEDDKLDKKTLGKQLEYLKQRNGALQAEQQKIEQQIGAIRQHEISFQLVQQALKQFDRLWQPAEPKKKRDLLRSMIDRITINPQRNLGSVQIHLNQALANLVLPALLPDRQIS

SEQ ID NO: 445 - protein, 537 aa, unidentified
  source 1..537: note = uncultivated organism
MIRVIGTSPPNQPKKAIAYCRQSKDKKDGIDRQVEKCLKLIAERGWELVHAPFTDNDVSASSKKKKRPAYDQAMAMVKAKRCDVLVVSHMDRLYRRLVELEDIIPVVEQAEVMVVSIDGTYDLSTPMGRLVARNLCSAAQAEVEIKAERNVGKNVQAAQNGVRNKSGCRPFGYCADRFTPMDAGVSLNVVHGTPKNPCPTVDGAGWPSREPWHEVTVRIPDTAYDADGRVTATQSEADAIRDAIASVRRGGSLIAIERKWHSLGLRPPLAPFGPLREGNPWNHHTVKRILTNPHIAGWRSYRNGEIVAAGNWPPLVGVSDFEEAQVILTDPGRVRPGGALSLLGGIAECRCRAVVKRAARRNYGTYRCSAYEAGDAARTGPHVAVKAGLIDQYVADVLIETMGLPDAAELFADDTEEIDIPALKQRLGTLEKALAKLSLQNSMDLIPDSVFAVNAAEISAERELISAQIAEAGQVNAAAVLLASADVRATWEGMNISEQRAVVRQVMRVTLRPLGCGCRRPDLDQIVKIAWKVPVAA

SEQ ID NO: 446 - protein, 534 aa, unidentified
  source 1..534: note = uncultivated organism
MSRQVRIATYARVSTAEQVERGTSLTDQRRRLTAAVTARAAELVEHFDDAGVSGVLDSRPGLNRLLARVEAGGVDAVMATKIDRISRSAVGLLKLVEKLREHGCHLVLIDEGLDTSTPAGDLTSGVLGVIGGWERRRISERTQQGRRAAAQNEGRFVSSTPPFGYRVISAPTRRGKRLVRDDAQAETVRTIFQRLIVDGSKANTVAAELNSAGMAPARASAWSATSLRRWALRQPPLRAASGVWIFDGISVSIPAILTQVESAQWFAWQQGRRGPQQQIRGPYLLSGVLRMPCGRGAMGRTAGTQRPTYSCRDHYLPTSDPSRHGSCLNVPVDVVDDAVLQHVRQALAAPEVLQQAAKRYLLGPVQPEGESAALEAQLLDLDRQITADSAALRAEGLSGRALGAALVPLHRQQQDIARELRSLHRRAATAAHIRDDVQLARLVAMAHQALSEDTVSTWRPLLNVLHAIVTIDGYTACTQCQGTGFLALGSGNDRCWPLRCPTCLKGQTPDLTVELDNITAFVIADQIDKLPGPK

SEQ ID NO: 447 - protein, 561 aa, unidentified
  source 1..561: note = uncultivated organism
MDNFLAKNNNSYISYMAAVYLRLSKEDEDLREAKDKKESNSIANQKALILKTLESMPDVTLYDIYIDDGFTGLNFERPNFQRMCEDIYNGRVNMVIVKDLSRLGRDYIDSGRYVKKVFPSYHVRFVSVLDHFDSLTATQSDVNLLIPVKNFVNDNYSRDISSKVRSHQEVMRENGLYVGSHVAYGYKKLETDRNRIIPDEYAADIVRKIFSWKLKGLSSVSIADKLNGLGVAAPSEYKRQLGGNYKSGFQKNRKAKWSAVAINRILKNKIYIGVLEQGKRKKVNYKLNKVVEKPETEWAVKENTHEAIISKADFENVAKLLNLDIRKSPEEETLFMLSGLMFCGECGRSMVRRCNRYKDKQRVYYICATYNKGKGCSRHSIAQPVIEDILLDAIKRHIEHVARLDRLLNIIRDRKVNYDDIVANDREILAKYKELDQCKKVEMSLHRDLAAGIISIKEYEQFKNNFAHKSAEIEETIRTLQHEIETVFKEGLFADEWIDTFTKTGNITSLDRNIVLSLVEKITVHEENRIEITFKYQDEYETLCRIIETLPVSLKEVGSNG

SEQ ID NO: 448 - protein, 538 aa, unidentified
  source 1..538: note = uncultivated organism
MRIYIYSRKSVWTGKGESIENQVEMCRQYITNRIDGGRAAEVTVYEDEGFSGKNLDRPQFQRMLADSKKQKPDYIVCYRLDRISRSVGDFAPLVEDFISRDIGFICIKEQFDTSTPMGKAMMYIASVFAQLERETIAERVRDNMLMLARTGRWLGGAPPTGYQSEKVEECVVDGKVKTSFKLKSNPAEIGTVKLLFQKYLELRSLNGVSKYLIHAGICNRNGDPYSLPGIKDILRNPVYCIADRAARDYFVSCGSDVCFPLEGCSDKYGLLSYNKRNYTRKGHSRLDKSQWIIAVGKHRGIVSGADWVRVQQLLEERSEKNIAKSPLSYNDYSLLSGQIFCSKCGARMFAKRRSNSETLFDYICGNKLRDGGLCDCQNLSGQQADHKVSEYLMDYVHEDNGIYQLLDALKKKIEDQIPADPAGHFGAQMEKAQREMDGLVATLAASGGNESVVRHVSARMEELDEELKRLTAAKAQAKQAHLGAKMGEAQIAALSWALSGFKEHFDDMTIHEKRDFVRLFVKKLEWDGKDLHIFVYKG

SEQ ID NO: 449 - protein, 562 aa, unidentified
  source 1..562: note = uncultivated organism
MARKSKKVDYVNAGSMGQQTVTMPSVPKKICYKAGLYARLSDETQANKERATIETQMELLRRFVSENDDMVAEKEYFDISCTGTNFERPGFEEMIQDMRAGRINCIIVKDLSRLGRNYVETGNYIERVFPFFDVRFIAVTDGYDSDKSGEELLMPLKNMVNEMYVKDLSKKMKTAHRAYWRNGEYSSGMVPYGYINVDRHLYPDEEVSGFVQEIFRLFLDGNSLKEVARQLSEKTLNPKTHKMIRFGHEIPEGFNTKWNPVTVRSILTNYSYVGSSVHNRVTRVNGKQVKQPREKWIVIENTHEPLVSREDFDRVQEMLEENTKAFHSTHGKNGYNHTRFNFLGKKIVCADCGKVMGFRTEGVKHQKSFYRCKTYLADTHGACTNHKVSLEEVNRAVFDTIHAHMKVSIDAEALVKRMNSKTESMKKYDIYGKEADRIRRELQKTTEVKAGIFEDYREGLIDEEQYVQISEKYAAKITELTCRLDEMLKAQTRFSKEYHIDSDWKADIEKYISRRKLTREMAEAFVEKVIVYENGKLEVRLVYDDVLKELLDLRTERGGING

SEQ ID NO: 450 - protein, 525 aa, unidentified
  source 1..525: note = uncultivated organism
MKTIREVLGEGKKGAFYARVSSDKQTIDMQRHHVYGFIKNYEGEIVKEYIDPGESAFKKKITQRPQMMKLIEGVEQGKYDFVIVYADDRLARSELEHMQIRLIMKQTNTDVILTSTSEIYTERDSITQLIRDGATRYEVERISHRTRDAYKQRTADGKRMGGPIPYGYREDEKTKELSIVEDEKDVVLKIYEMYHKGDGFSAIANMLNEQKEQTHCQHWKKEAVKRILTNPFYAGYVTNKRIKHGAGNSVEAFSNWEMERCEEIQPIMSKAEWLTTIRLFEQKRNGEIDPKKLKTEYILRDLIHCKNCDLPLVPKNQETKGKNGKKYGHKKYICPNKSCKMSHIVGELHDSIFNSIVAEIKDKVISKSHAELIVEIEKSVEDQMRNTQKETKRLTKQIKNCLVLVKESEREIDALYNHKKRLSEDNLDIDPLLDVMLDYRIHLLHEIKESEEIIKQKQLEIEHIQEVSFNRKVLQQNVLKELALEFSSLKLDIKRIRHFLVHIVDKITIDKDMNTAYTLKINLGY

SEQ ID NO: 451 - protein, 541 aa, unidentified
  source 1..541: note = uncultivated organism
MSKTEIKQVRCAIYTRKSTNEGVNEDFTSLDSQRESAENYIASQKNQGWIALAESYNDYGFTGANMERPGLEKLLKDIKDGRIDCVVVYKVDRLSRSLLDFTSLLNMFEQHNVTFVSITQHFNTNSSMGRLTLNILLSFAQFEREIISERTRDKIAGARKRGKFTGGNPALGYDYDFKSKKLTINTKEASLIIKIFKLYIKERSLLSTANKLNEQGYQTKIHVRKGKIAGGVPFNKLNLDYILRNVLYIGKVKYKDELFEGEQDPIISDDLFNTVQEALNERRTVQRKKWAKTGGGLLSKIFRCEHCNAAMVYNYSYKKNYKYRYYMCHRVTKSGFDSCPTKTIAAQNCENTILDCLQKICDDQRLKLEEWTAYTDEQKREIMRSIVQVVYYDAVDPTIKIKLIKDPQTYQFKINLKQGRVYRPREEEKTNKQPHIRLLLLLAHQVQTMIKEDPTKDLKTIASWLNMNYSRICDIITLTLLSPAIQEEIICSDDERLLKVPEYKMRTILRELHWGKQLEKWHALLHKYSAVRASDSALLTS

SEQ ID NO: 452 - protein, 555 aa, unidentified
  source 1..555: note = uncultivated organism
MPKYRGDAYLRLSYSADHSVESDSIANQKKLIEDFVAAHPDIELVSERVDDGYSGVLFDRPAFQEMMNNIVSGKINCVIVKDLSRLGREYIETGRYLRQVFPTYGVRFISVNDGIDTANEQNGDDLHITLKNLLNDTYSHDISVKTRSALLTKRQNGDYVGSCPIYGYRKDPENKNHLIIDEYPARVVRDIYRRRIDGASAKHIAEELNRLGVLSPMAYKDSRGLPHPTGGFADVPDAKWSARAVIRILQEETYTGVLLQGRQETHNHKLKNIIHKPAEEWVRIENAHEPIIQKRDFDLVQKISSLDTRTAPDGEAVYLFSGLLVCGCCGGRMTRKTNTVKGRKYVYYHCPTGKKKGCTHPVMLKEADLIDCVLVSLQAHIRHIVSLDEVLDSISEEQINQEEIAKFKAQIADNEVKLEEARQFKATLYENFIANLISKKDYQDLKNLYTERAEQAQEAIDRLRAEMELVTNNSSSRLRWTQHFKEFSAMTTLDRRAVIALVQSIRVKAKDDLVITLRYHIEYVKVLKRLDEMGKLPPDLKDILNSLTAMEKEAA

SEQ ID NO: 453 - protein, 563 aa, unidentified
  source 1..563: note = uncultivated organism
MDQRIDRLYQVAIYLRLSKDDGDFSFSGNGKTESNSIHNQREMLMTYLRGHPEMTLYDEYKDDGYTGTNFDRPAFKRMMEDIRGGKVNCVLVKDLSRFGRDYIDCGKYIEKIFPTLKIRFISLNDGYDTEAGNGSDSIIVPFKNLINDSYSRDISIKIRSNLDVKRKQGEFVSNFPVYGYVKDAGDKNHLVIDEYAAEVVRDIFKWKIEGLSPNRIAEKLNEMGVLSPLEYKKAKGSNYKTNFNTGKKASWSHVAVRRILQNEVYLGVLVQGKRTTSNYKTKRFVQKDKSEWSHVEGTHEAIVTRQQFDTVQQLLREDTRASENEAAVHAYSGRIFCKDCGAPAVRKVSKCGDKRYVYYVCSANKADRNVCSSHSIREDVLDAAVLATIQNYISVIMDMDRALEDVEALSWERSAVRKLEADIEFQQQVIETNNDLILGMYEDLRGGILTRDEFVSMKAEFSDRIHEAERIIEQLKSDRDNIRQGLTNQQGWLKQFLKFKNISEINRVEIVSLVERINISKDAEIDIVFRQKNRLADIMDFLDEQNKLKNQSKVITLPQMEVI

SEQ ID NO: 454 - protein, 500 aa, unidentified
  source 1..500: note = uncultivated organism
MKTAVIYARYSCDAQSEQSIEGQLRVCEEYAGRNDILILDTYVDRAMTGTNDMRPDFQRMIRDSAKRQWNYVVVYKLDRFSRNKYEATVHKNTLKNNGVKVVSAMENIPDSPEGIILESLLEGMNQYYSAELAQKVRRGMRETRLKGNYQGGHLPYGYVACDKKVIIDEEKAEVVRFIFEQYAKGVFVKDIIATLTANGICYKGKPFVMNTIYGILKNEKYSGSYMLGDEVVDKIYPPIISQEVFTRVRAKVNANKYGKRSVAVVYLLRHKMKCGYCGESIIAECGTSKTGDRRYYYKCHGRKNLHNGCTQSAYRKDTLEAFVINSILEELKKPHQIERIIEGVLALQEAQIKTSSTLGILEKERKQNGSAIENIMSAVERGFYTATANKRMRELEKRQSELDRLIIIERSKMQVKVSAEEIRAFYEAALMQEPQMLINYLVKEIIVFDNEIHIYFNSPLQMSPDESQGFSLCERETTIPERIQNTDKAREKTIQLTITI

SEQ ID NO: 455 - protein, 556 aa, unidentified
  source 1..556: note = uncultivated organism
MSDVLHIYTRVSTVAQEEQGTSLSSQKELGIKKANELGFSSRLWNEGGASSAKDTLDNRPVLVDLLTEIDAGRVKHLFVYNTDRLSRNEQTWGLIKTKLLRNDVTLHTSLGVYQLADPMNKLLLGILSEISAYDNQVRTERSRLGKIQQVRNGQWHGGPPPFGYKISEKKLVVDDEEAKWVKRIFSEYANGISIIDIKTLLDQNGVLPRRKGSTWTMGSIQKLIGNTHFIGRYKYHDKKSDQEIEVSCPKILSASVWQKCNDRKKKTLVRKGQINRTTHFYMLRDLMFCGHCGKPMGGRIAKSQNKAYYYCTSKERNWERGANEVEKWKRGRNCEMVRSLNIEETDRLVWGTVKRIVGNSHVLMQKIKEDALKMKDISDKEQKLILQNLQKKERLAVKNLKRVEESIAKIETDRLLEKMDLDLFKQVRKNLDQERNKVVAEVDGLREALSEATTRSRWIDWVSKFREKYKEVDDLSPEQKKEYLAGVLNKIDVYLDHGTNEHTLVLDFKFPIVEDAYSSVDRRVIEGRHAYDLTASFSSKYRNNFVGRSKKKALAA

SEQ ID NO: 456 - protein, 556 aa, unidentified
  source 1..556: note = uncultivated organism
MANISIKRCAIYTRKSSEEGLEQDYNSLHAQREACEAFIKSQAGEGRRLVKAAYDDGGFSGGTMERPALQQLLKDIRQGKIDVVVVYKVDRLTRSLADFARIVELFDAQSVSFVAVTQQFNTTTSMGRLTLNVLLSFAQFEREVIGERIRDKVAASKRKGMWMGGTLPMGYDLHERKLVINERETKTVRFLFQRYLELGSVRLLKRELDRLGMVSAAKASRKGNVRGGKSFSRGALYNLLRNPIYAGEVRHKAERYLGQHQGIVKREVWEQVQQRLRSRAARSGEGRRTEAVASPLAGKLFDEQGEPLYVQGAAKGRRRYRYYVSKGLVRGESVSAEEGWRLAAPAIEQAVSVAAQKMLGDQSAISLVLEESAIDANRLPMVLKSCRGWMERLQSAEASSALNELIERIEISREGFKLSLSVLLPLSDSGKADHISLVRFVPMEIRRRGVEMKMVLEGDATPARIDLPLLKAVARARRWSNELIAGTVASVDELAKREHLDRRSVRRLIRLGFLSPRIVEAIALGHQPPELTVFALVRRLDLPELWSAQEVSLAIR

SEQ ID NO: 457 - protein, 551 aa, unidentified
  source 1..551: note = uncultivated organism
MEAPYDVAIYARKSKFTGKGESIENQTEMCKQYIRMHYPEVSDDRIITYEDEGYSGKSIKRPQFTLMMRDCRQHKFKTIVCYRFDRISRNIKDFADLIQELDNLQISFISIKENFDTASPMGRAMMYISSVFSQLERETIAERIKDNMCELAKSGRWLGGVAPTGYRSSEIVGSVAADGKIRKAFKLEVIEGEADIVKMIFQTFIETGSLTKTEEYLREHGIKTKNGREFRRFSIRNILCNPVYLKADEKAWEYFRSLDVNVYAQRMDFDGHRGIMAYGKTKQMPGQMNHIKDIGEWIITVGKHEGLISGDKWTLVQKMLEVNRSKSCRKPRSNVALLSGLLFCGKCGSYMRPKLSGRYNENGERIYDYLCETREKTKGTECQMKRINGNELDFSICERVKSMAGDPERFSYFLDKVRERINSAEDDDYMQVYSLRARENEIERKINILVDALAVSEKSSAFAYYSDKINSLANEKTAIKAKIEGKESSRDAEPLSGDELKKTEKELTDFSFAFDTMYLKEKRKALVGIIEKVIWEGESIHAYLSGESEVW

SEQ ID NO: 458 - protein, 523 aa, unidentified
  source 1..523: note = uncultivated organism
MPKVGIYCRLSIEDKDKEKNDSSASIQNQKAMLRDYCHERSWEIYDIYIDDGYSGIDRSRPDFCRLLKDCEKGYIDIVLCKDQSRFSRDTIIIEQYINDKFLEWGVRFIGVADNADSESESYSTMRLFTSAYNEMYVKDISAKIRKTLAYKREQGQFIGSFAPYGYMIDPTDKHHLIIDEETAPIVKWIFELYVSGNGYRRIVQELNERGISSPNEYKRKHGSKYINSNADSSNSRGLWTQSTVAVILANEVYTGTLVQGKSHHISYKNKKRKKVDKTEWIRIPNAHEAIIDAETWTKAQERRSSRARVGKCSQELSPLSGKVKCACCGRPMKRNIYYNKAKTIKYYNLQCATYKTGAMNCPNKTSMSGLVLERKILDELNAIIERYCQIDRIEFTDVYGEQLRQLEADLSKLKERHNSAEKRLVTMYKDKLDGVISDEDYTLFRHALTAEEQELSVRIDDINEQISTCKERIRNTEEQRAVIEKYTHFDKLDRTVADEFIDYIEIGMADENGIREIHIQWKI

SEQ ID NO: 459 - protein, 530 aa, unidentified
  source 1..530: note = uncultivated organism
MKGRLRCAIYTRKSSEEGLDQHFNSLHAQREACEAYVRSQAGEGWSLIRTAYDDGGFSGGTMERPALASLLADIASGRIDVVVVYKVDRLTRSLTDFARIVEAFDARGVSFVSVTQAFNTTSSMGRLTLNVLLSFAQFEREVTGERIRDKIAASKAKGMWMGGTIPLGYSAPTDPVTRALVVNQAEAATVRRIFELYLELGSVHRLREQLEAEGVRSAGRISRSGRIRGGQPFGRGGLFHVLRSRIYLGEIPHGDRTFPGAHPALIDREIFDEVQRRLDAQSRRGRGAQASTQVMALTGRIFTEAGEPLSPTSTRGSKGQVYRYYVASSLQRGERRARGCIRRVPAAPIEACVRETLQALLGALDLAPLERVEVRAGELRLVVTAWEAWGEPRTDLPPGWSITAPEPGRLQVTRPMQLVRRQGRVEVLPPPGQGDAPRPNPYLTGALREAHHMLARHGGSPVGQPELACPQSAPDGPHARKLIRLAFLAPDLQARILDGRQPRGLTLKALLRWDMPADWDAQRRAFDALR

SEQ ID NO: 460 - protein, 559 aa, unidentified
  source 1..559: note = uncultivated organism
MHMSATVHMARTSKYNNENTAPYSLKPKWRAGLYIRLSREDGDRAESESVSSQRAILQKFVDDNPEITFSDYYIDDGWSGTDFERPSFCRMLADVTGKKINCVVVKDLSRFGRNYVESGKYLETVFPLFDVRFIAVNDGVDSYANPQSMNNVIVPFKNIINDEYCRDISVKVRSALDIRRRQGKFIGSFAAYGYKKDPGDHSRLIIDETAAQTVREIFQKFLTGHSIMGIARELNARAIPNPSAYKVRSGLNCVKSGTLWCDTTVRRILKNEVYIGNLVQKKNEVISHKLHVCKPVAEQNRIRVENTHEAIICVEDFEKARALLARDTRISPTSKTLSVFSGFIKCADCGRAMQKRTVKQPYKTYDYYVCSTYKKSRQSCSKHAVRSDELEKTVLAFLNKYIGVAVDFDRLTKLIEASQKTRKAAVKIDDELKKCEREIIKIKGNILDLYPDYKDGIIDREQYFALKERYENSVNTLEATVERLKAQLEKVKDGKGGGNEFISVFKKHRGLAVLTREVVVELIENIFIQADGGIEIHLKFKDSYDAAREYFSESKNQPA

SEQ ID NO: 461 - protein, 596 aa, unidentified
  source 1..596: note = uncultivated organism
MKVRVVSDARNAGSRVTAVYSRVTKDESVKTDLSLPNQRDRAIEMCGSRGWQTVKIYQEPRHVGGDLGPEKRPALAELLRDVEAGAVERVLVRHTDRLWRSTEVEDRIIDVLHRSSVELWDFGGHKEFKSAGGRFALKVLGAAAELEKNLTGERIREMKRGKAKSGKLGGGPPPYGYTSQSRELRERKVDGLGDDEAYRIACDQYPLAKTWYFDEREVEIVRLIFDLYLNKRWGARRISEELNRRGHRRRSGLPWVPVKVGAVLNNPAVAGFTSYDEEAYDRGLPSTKARFRQTLFDGTHTAIIEPPRWHEAQRLKTEVNAKRLRTKSASSRCYPLTGVLRCSVCGSPMSGKSNGTRSTAQYVCNRRRYYGPKDGCNGTTVHQKWAEETVWNYLDGLLASPNVIGELVKRVAIRSDGKMPEFVERIAGLQAEIAGLDGKQRRWIEKYEDAKDEAAAEVVWARIHELKTRQLNLKRELEGVEQQLSFSSEKKVASADIAMYVKKLTTLAKGSSEKRKTLIERLEQHHDLRVRVVDQRRLAVSFRLDTFTGTTRGEIGSRVVMVGAKASPRRMSTRSPVPGGPDSSKLWPPATAISIA

SEQ ID NO: 462 - protein, 556 aa, unidentified
  source 1..556: note = uncultivated organism
MNYTSIVPNYVFDKNTGWRLDLPEIIPPGARVLCLYRVSTDGQLYHNDQNEADIPMQRIRCRKFCEQKGWTVVCELQEEGVSGHKVRAEKRDKIQTIREYVREKRFDILLVFMFDRIGRIADETPFIVEWFVKNGIRVWSTQEGEQKFESHTDKLINYIRYWQADGESEKTSVRTSNSMGIIAENGYFTGGVCPYGYELVRNGRKNKKGQDVYDLAICAAEAHIVRLMFNLAYTEGYGAQRIANHLNEQGIKNHSGQNWHPASIRGMLRNIQYIGIVRSGENQSPVQEQLRIIDDKVFYGVAEILKVRSKANEAVRSAPLNTRGNSLCSGFIFCGHCGARLCITTSGKCRRRGDGTDIIRMRYTCQTKSRKHGDCDGQTGYTVEKLDKMVDAIIRGIFSKVHSIRREELLSKRYADERKSEEACYAKMKSDYEKAELELAKLKDEIVKSIMGESAFSPELLTAAIQAQEQKCSDLRTAYLNAERERTESAARKASIAAKYDELLKWSAAYDSANMSTKKMIASRMFDRVEVRTGYQLTLKLNISVEQFLISLDLAA

SEQ ID NO: 463 - protein, 1121 aa, unidentified
  source 1..1121: note = uncultivated organism
MEKKTIEVIWSTENDKPVKPKGEKIRVAAYCRISRLKDCKKLNSLENQLKHYTHSIRVNSNYKLVGLYYDQQLSGATITERPGLRRLIRHCEEGMVELILTKSVSRFSRNSKDLLELVEFLDELGVTVIFEKENINTAIRKNKFFLTALGAVYQEEIRSTSESVSWGYQKRILEGNFKYHRQFGYEVITIDNKRTVVINEQEADIIREIYDLYLSGMKINDICVMLTNRGVESVTGKTVWPNSTINKLLKNPSYVGEKRANHRLSSFAKKVDFMRGIERDIYLIDDAYPRIISKDIFEKVQAKLSESSPRKSISVAEPHTCSKRIWCGLCDTKYHKNKKGRRNIWVCNIKHKQARLCDSPRIDDLIILSMMKNAFKLKYDFSNPQLLKNLKDELEWVNKNDRFEFHRLSNLTQLQIAREREKQAQNNKRIDAHNNVKIKEKVVIDFENLASMIEDDRILRVRAIEKLSLAKSAEEFFDETDIETLRAWILELTVFSLKDYRVRWNDDQIMEIGECDKKKTDMKEKRRNLIDEEIKLNSSRHINQNIVNIEEDEHTQISLTKEEGGTDSMQAEIVEYNPRLKLVERIRKEISNGEDSVANYKKPKKRIAAYARVSTDDPTQLGSLEVQMAYYTYSVLKNPDYQLVQVYYDEGISGRKTSNRPGFQQMIADCKKGKIDKIITKSISRFSRNTVECLKYIRDLRYSGISILFEKEEIDTSDMDSETLITVHSALAQEESRSLGESVAWSKQKTAQRGEFKQSTLPYGYLYNKYGVWVIEGQRARVIRRIYDSYLAGKSVRQIAAELTKDGVPTARNGKKWAQTTLYKTLRNPAYKGDLLFQSTYTKDTIQGLRVVNNGEYPMYYIEDHHDPIIDKKTWKKVEELIANNQFKREGWKEKTKHTREEFFKVFVCGNCGGLISHQGRSNKVDYWRCVNSMKSKEIKICNAGSLRQKNIEHTFMAMLLEMKNSKKLSQQVNAAIDDINLKPYEEEELEHLEAEIETHYQALYNTVEDGKKHGEDTEAIKTVTDKIMKLHDRIRNFEDRIEQVKDIKEEMKWLRKELLVLEPFNPKKERIPFRGDIFTRLIKSGTFLIDGVIEYKLSIGVSWTVRDNRKQYWKLPMKTK

SEQ ID NO: 464 - protein, 582 aa, unidentified
  source 1..582: note = uncultivated organism
MTFFFNVLESCEIYTRKSSEEGLDQSFNSLDAQREACEAFILSQREEGWKALPAHYDDGGYSGGTMERPALRQLLQDVEAKKVNVIVVYKVDRLTRSLADFAKIVEALDSHGVSFVSVTQQFNTTSSMGRLTLNVLLSFAQFEREVTGERIRDKIAASKRKGIWMGGPVPLGYDLEGRKLIPSPKEAALVCKIFSLYVELGCVSRLAARLAREKIRSKVWITKAGTRHGGNAFARGALYDLLQNRLYIGEIRHRDQWYGGEHQGIVPRKLWDKVQALMSGNRKKRRQHVRDRASCLLTGLLADTKGNRFTPSFTFKKGRRYRYYVSQLSIKNPTNKIKGPIRLPAREIESRVTERLLSFLKSEAEVFDRLGAAAERPAASRQLVAAAKKLALRWASLRSDELRDLLAAFVRRIIIQENNIEVRISRKDLREVLEKGDTFVPMGVDPRHKSVDADDLICLTIEAKLKRSGGEVHLIVPPNASGVSALQPNPSLMKAVARARDWYERVLQGKSSNQKSLTLYVGVTRRYIDKVFPCAFLAPDIVEAILEGRQPRDLTFKKLCSEIPLSWVEQRQQFGFASDSPR

SEQ ID NO: 465 - protein, 569 aa, unidentified
  source 1..569: note = uncultivated organism
MPVPERLSAKPNGRGEGAKTIRCAIYTRKSTEEGLEQEFNSLDAQAEACAAYIASQRHEGWSPVDKQYDDGGYSGGSMERPGLKRLMADVEACKVDVIVVYKVDRLTRALSDFAKIVDILDGAGASFVSVTQSFNTTTSMGRLTLNVLLSFAQFEREVTGERIRDKIAASKKKGMWMGGPLPLGYDVKDRKLMINEKEAKIVRHIFDRYCALKSIGELAGELERDGIRSKPRTYRSGRKAGNQIFGKGALAHLLQNRIFIGEITHKDQSYAGEHKPIIDRKLWGTVQALIHKNRNNHRLQSQADQPSPFAGMLTDGLGRAMTPTHAKRGNRRYRYYVTRPQNIDGKSLPDAWRIPAREIERPIQARLAAWLRDEANIAATLSDLASKVPSQTLISNCAELAIRIETATPSRLRDILLCIDLQIKLSEGAVTLNFDASKLAEHIYPQLHVSGSDTNVTISIAMTLAKRGQELRLVFASSEPVQTKRIDTKLIGLIAKAEAAYFTLASGESVPSEQRPHLARLARLRFLAPDIVTAILEGRQPAMLSSRKVLRATGIPHCWKAQRVFFGFE

SEQ ID NO: 466 - protein, 623 aa, unidentified
  source 1..623: note = uncultivated organism
MSKVHIIEAKKDKINRTTGKVINKMRVAAYCRVSTDSDEQMNSYNSQVIHYKDLIKQNKEWDFVDIYADSGISGTQSDNRDEFQRMISDATKGLIDIIITKSISRFARNTMDTLKYVRQLKDENVAIIFEKENINTLTMNGEVLLTILSSLAQQESESLSANTKKGLEMKMIRGELVGYQGCLGYDYDKETKSISINEEESKTVRYIFDRYTEGVGCFVIAQELTAMGSVTKKGNTEWVDTSVRGIIKNEKYKGDILMGKSFTVDPISKRRLDNFGESKKYYIENHHEPIISREQFDKAQEILSKRSKNFNQGRQNKYSLKYTFSSMMKCGYCGGNITRRRWHSGSDNQKDVWSCVTAIRKGKKNCSECKALEETIIENAFVKAFNILCTDNKTVVEEFLNNVEEGLQTKDNKKRINKLNAEINSTEIKISKLIDLHLEDKIDKIAYEEKYGQLRKTLKELKTERIELDTVQGEEKVIKDRLSDFKKIFEGKEPLAEFDGDVFKTVVEEVVIGGHNEDGISDPYMLTFIFKTGLNTKIDGHKTPSKMKKKTGNKKCTYQEDNPCGDGKYDVTSSRLTAEKVLIFRNFCVSGHQLRIPNSIEKSLRGNLSTATVGGVSSRFRCQ

SEQ ID NO: 467 - protein, 515 aa, unidentified
  source 1..515: note = uncultivated organism
MTKLKRCAIYTRKSSEEGLDQAFNSLDAQREACEAYIKSQKSEGWRCLPTRYDDGGFSGGTMERPALTDLLADIAAGKIDVVVVYKIDRLTRALADFARMVELFDRHEVSFVSVTQAFNTTTSMGRLTLNVLLSFAQFEREVTGERIRDKIAASKAKGMWMGGNVPLGYELPTGAERALVVNEAEAVTVRSIFSTYLEIGSVHVLQRVLAERGIQPKQRTTRAGRTIGGHNFSRGALFHLLRNRIYVGEIVHKGTAHPGLHLAIVDADLFDAVQAKLDANARRHAAGSDQTAQAPLAGRIFDGDGQVMSPSFTRGKNRQVYRYYVSAPLQQGRGQASDTAIQRIAGPALEALVSTSLRRLAPRVSEPLSLIERVEVHADSLQLLLPAAHLATIRSRLAEGEIAEAEAAVPTSLRLTLPIRMRLRGGRTWILGATKPASRRDPVLIKALCKAHTMLQTDAAGLPTLTTAPPSPYLRRLLRLAFLAPDLQRAILDGRQPPGLTLEQLTRAPIPHIWS

SEQ ID NO: 468 - protein, 545 aa, unidentified
  source 1..545: note = uncultivated organism
MNEPVTRTWDTTLYLRLSREDGDKEESNSISGQRDLLRDYMSRHPELREYAVRVDDGFSGSTFERPAFKEMLADIKAGKTNCVIVKDLSRFGRNYLDAGEYIEKIFPFLGVRFIAVNDNFDSERERTASDDLMIPFKNLINEAYCRDISVKIRSQLEIKRKRGEYLGAFAAYGYMKSETDKNRLVIDEYAADVVRDIYRWKLEGASPKAIADKLNSVGVLSPLEYKKSLGMKYATSFKANTQATWSAGSIIRILKNPIYIGVLIQGRETTPSYKVHKRISRDADEWAVVQDCHEAIISKSDFDKVQKILALDTRTCKGDSVVQLFSGMVFCGDCGASMIRKTIPSGDKKYTYYVCSENKGNRKVCSAHSIRDKDLEDIVLLSTQQYIRAVIDLQDLLEMTDTAPLRTAEAQKVQRQLDMKRSELERYNRLLMSLYESLTDGIINKEEYMRLKQRYTEQGAEAEKQLMALQDVLTNIQEHGSASLGWMNDFREHQNITMLDRETVVTLIERIFIYDDKRVEITFRWHDEFEWQSDILRRAQMKEAV

SEQ ID NO: 469 - protein, 537 aa, unidentified
  source 1..537: note = uncultivated organism
MDKKKVRCAIYTRKSSEEGLEQNFNSLDAQREACEAYIKSQMHEGWFLLDKQYNDGGFSGGTMERPAFEELLKDIENDKIDIVVVYKVDRLTRSLMDFSKIIDVFDRHETSFVSITQQFNTTTSMGRLTLNILLSFAQLEREVTGERIRDKIAASKKKGMWMGGKVPLGYLKEDKKLVVHNEDAQKVQMLFDKYLELKSVPKLMHYLKENEIKTKTDKYFSKGQLYHLLSNRVYIGKITHKDKVYDGEHEAIICDDFFEKVQKLLYENKVDKTCGVKSSSNSLLAGLIFDDKNNLMTPSHSNSHKRRYRYYISTALKNYSDNEVGTLSKIPAGEVEKFVVETTREFLQDKGQIQKLVKDFKVSKQNKFIYTAQNIEDYSDPKLIRAIICKIVISKNLIEITLNENSLINVLNTLSNNQKFVIPDKREKFNPITITKKIKITQSSRNDNILILNAKEYNTPEPNPYLVNAIVKCHYYHKQLQKGKTIKYLQTEEGLKDSKYIRNILNLKYISPKLTEQILDGNQDEGLNLQKLIIQVN

SEQ ID NO: 470 - protein, 570 aa, unidentified
  source 1..570: note = uncultivated organism
MDKVFAIYSRKSRFTGKGESVENQIEMCREYLRIHFDEECANNAVVYEDEGFSGKNLDRPQFKAMFEDIKAGKISAVLCYRLDRISRNIGDFANLITELTSMGVAFISIKEQFDTNSPMGRAMMYIASVFSQLERETIAERIRDNLHELSKTGRWLGGVTPTGYKSIGETSVNINGKTKKAYHLSTVDDEAELVKLIYSLFLEHNSLTKTESYLLAHNYKTKNGRDFTRFSIKGILTNPVYMIADNNALEYFKKSSVELYSNDNEFDGIHGMMVYNRTQQEQGKATKVKPMDEWIVSVGKHEGFINGADWVKIQKMLDSNKSKSYRKPKSHTALLSGILKCGECGEYMRPHMTTRLNKDNEYTYYYSCNLKLRSKGSRCNIKNINGNEIDKEVIEAIKSLSANGDEYFSTLKKSLDSNKIKNDNLAKEQDKIKADIEKAEQDIDVLVETLANSSGTGAEKYILDKINALSEQVENNKARISAMDEEKDNTLGLTESIDLMKNMLSSFSSAVDIMTIEQKRQTIRTFVKEVIWDGEYAHIVFFGSDYEYPFKSGEILADSDTLYPLGEHRK

SEQ ID NO: 471 - protein, 525 aa, unidentified
  source 1..525: note = uncultivated organism
MSQSTQLPRIAAIYCRVSTTAQSEEGTSLASQEAACRAHAASLGYSIGPIFTDVHSGADLFGRDGMVAMLHAVKQREVGIVIAYALDRLSRSQIHFGLIYSEANHAGVPIDLVTEKLDDSPVGRFVMAANSFSAEIEREKIRERSMRGKKTRIQSGKLHNHSAELYGYRRDKDVGIRLVYAPEAAVVRRIFDAVASDGMAVRTLARTLNADDVPAPSAGKRAYKDGRVCKWNPSTLYRILTEPAYKGETILWRRRSRGSGKMWAYRDESEWVLLPEGTTPPIVAGEAWDAAQARLAATTAAQTRNTARPYLLRGMLYCSVCGCRMHSSPEHGRLTYRCSSRDRLGAPCGGSRVPGADVEAWAWEHIEAILRDPSTIIAEVERRRLNGPDVTLLATRETASRMLAKLERQRERLVRRYAEAENDTFPWELVEREISRVESERRTAQAALAEIDARIAEQERSIVQLDEVRTYFDRVGVNLGGADFATKRNAVEALVERIEANGREWTLIGSIPTGAIGGVLSHSSS

SEQ ID NO: 472 - protein, 510 aa, unidentified
  source 1..510: note = uncultivated organism
MDKKIAIYARKSVFREDSISIESQIEMCEYEARGEDYLVYQDNGYSGKNTDRPDFQRMVSDIEEGLISKVIVYKLDRVSRSVLDFSGLMDLFQKYNVDFVSATEHFDTSNPMGRAMLNICVVFAQLERETIQQRVIDAYASRSKKGFFMGGKIPYGFGKKPIIIDGVKTSMYVQEPNEAADISLIYELYSRPSATLGDVLRELTARGLNTNRRGQHWNTARLSEMMRNPIYTTNDISIYDFFKAQGSNLINPPEQFNGVTSQYLFSGTNTNRKTWDLSGQNVVIAPHQGFIPPDVWLACRRKLLANHQVKTCKAKNSFLSGKIKCGNCGYAIVVRFSQRSKGHVRYFIDTGWTENHCCAHKLPTIHADDFEAVIIDKIREKLSELTIQADTNAKDELFEKINIIEAQISKIEREIEGLVDKIMLQDIDKTTVKYINERISKLDGQKVELSREADKLRTERQKRSETDYNVLHDVMSKWDELSFNDKRSVVELLIEKILVFPDKIEIQWKV

SEQ ID NO: 473 - protein, 597 aa, unidentified
  source 1..597: note = uncultivated organism
MAESFKRCAVYTRKSTEDGLEQEFNSLDAQYEACAAYALSQKHEGWHLLPDRYDDGGFSGGNMERPGLKRLLEDVADGRVDIILVYKIDRLTRSLSDFAKIVDVLDMAKASFVSITQAFNTTTSMGRLTLNMLLSFAQFEREVTGERIRDKIAASKRKGLWMGGPLPLGYDVKDRRLVINKAEAELVRHIYARYLELGTVVELVDDLNAKGYKTKVKLGANGSQRGGGIFRRGMLYHLLANPIYQGNIAHKQDVYPGEHEAIVTDDIWQAVQDKLKANTAGSSRRLKGQQPSLLTGILIDSEGRAMTPSHASKAKGKGKSSVTGTTKGQGDGAPGSKGQTKRLRYRYYVTRPDLYKDQPAYRISAHDLEQIVTQRLAAYFSVPSNIAALTPSDIDAHALQQALAKAGVAAATLRNGSVQAKHQIITQILAQAVLHEDRVELTLSQSGLAQALSIPANPLSAPTTLSVAANRLRHGRQIRLVIEGDGPPPTAPVKQACPVASSPQRQRDTKLITLLAEAHAARKLVLAHPDTALADLAKQQGTSSKHLAKLIELSCLAPDIVTAVLAGKQTSSLTTTKLRTVAMPVSWAEQRTLFQIS

SEQ ID NO: 474 - protein, 520 aa, unidentified
  source 1..520: note = uncultivated organism
MSQRAKSRPVNRCAIYTRKSSEEGLEQEFNSLDAQREAGEAYVKSQTAEGWTCLPDRYDDGGYTGGNMERPALQRLMKDIEAGRVDTVVVYKVDRLSRSLLDFARMMQVFESRSVSFVSVTQSFNTSDSMGRLMLNVLLSFAQFEREIISERTRDKMAAARRKGKWVGGRPILGYDVDPNGFRLVINEPEAKRVRAIFELYLKHESLIPTVRALNERGWLTKQWTSRKGKALGGRPFEKGSLYALLTNVAYLGKIRFKDELYEGEHQGIIDADVWQKAQHLLTRNGRTGGSIVRNKYGAILKGLLHCTACRRTMGHSYSCKKGRVAYRYYVCNGAARRGWDSCPSKSIPAAEIERIVVDQVRAIGKNRRLIEATLRHARQKTDDARGELLKEQTALDRQMRRHHAEVGKLAADAANRNGGTAARLGDLHERIRSGEERLAQIRSDIQAQEANRIDENAVRQALTEFDAVWENLAPKEQARVLRLLIERVEYDGAKGKVAITFRPGGPTAPAGAGNHEEAA

SEQ ID NO: 475 - protein, 533 aa, unidentified
  source 1..533: note = uncultivated organism
MARKADRQTLRCAIYTRKSTEEGLEQSFNSLDAQREACAAYILSQTHEGWEAVAERYDDGGWSGGNMDRPALRQLLDDVRAGTIDIIVVYKVDRLTRSLTDFAKIVEILDAHGASFVSVTQASNTTNSMGRLTLNVLLSFAQFEREVTAERIRDKIAASKAKGMWMGGPIPIGYALEDRKLVPAAQEAATVRLIFERYVELRSIGALVEELYERGIRTKQRTYCDGRIVGGIPFTKGPLAALLQNPIYIGKVRHRDQIYDGQHEAIIELELFAKVQAILDANRQDRRLGRNAKNPSLLTSMLFDPDDRLMSPSHANKGTRRYRYYQTRLAPGETDQVWRLPAGEIERLVIASAVDHLRKQRPGQNAQASARELAEVLSNRSGLAERLPQLPTAQQRRALIALQVRIDLQETAIVISIGTDKITLASKLVKRGNDVRLVIAEHRIASPDPILCKLVAQGFAARDYLMTGNLHHCIREYSRRYLKGLARISWLAPDMISAILDGTQPPQLTGRRLIRANAISLDWPSQRRMFGFG

SEQ ID NO: 476 - protein, 511 aa, unidentified
  source 1..511: note = uncultivated organism
MRAGIYARISSDKDGEALGVERQLQDCRALCAKRGWTVAPDAEYVDNDISAAKPGKKRPEHERLMGDIRAGRLDAVVVWDVDRLYRQPRELEPFVDACEAVGLRTLASVGGDMDLNDENALFMLRMKVNVAAMEVAKIRKRVRRQKQERAEKGLNHGGKRAFGFEKDGVTIRENEAELIRAACNRILEGGSITGICRDWNRQGVPTVMGTGGWTSTRMRQMLLSPRLAGIRQYHGEEVGKAVWDPILQEDDWRRMCAILKDPSRQPPNVSGVEGRVYMLRGVLRCGECGNALTAMHRSGQHDRVYGCRKVVGRRGCGHVYIRAITIESWVRERLVPWADDPRMRDALSAVAGAQAEEIRALVLENAGDEARLSEAASAYAAGDISLPVLTKVTKPLEKAIGERLARIAAMRGQSTLDRFGGSVVEKWDEMTADDQRSVVLALVEHIRVDRANGRSPQAVAMRFRVQWREGIAILENAIYTDWGEVWRYEPEVDEESAAMAEQWTKAQAARS

SEQ ID NO: 477 - protein, 525 aa, unidentified
  source 1..525: note = uncultivated organism
MTTRRQPAGTPPLAETKRCAVYTRKSTTAGLEQDFNSLDAQREACEQYIRSQASLGWQLIPEPYDDGGFSGANIERPAFARLMQDVEASKIDVVVVYKVDRLSRSLLDFAKVMDRFNRAGAAFVSITQNFSTADAIGRLTLNMLMSFAEFEREMIAERTRDKMSAARRKGKWTGGPPPLGYDVVDHKLVVNQAEAALVRRLYDLYLDLRSALAVAGALNAESRTTKHHVSTSGRSHGAREWDRNSVLHVLRNPIPAGLMACHGEVHEGQHQAIIDRVTYQRVQNLLDERVGQRNRWGRNPDYLLTGSIYCALCGQPYSPASTRKGNREHRYYRCSKRNKGGLDGCQAAPLPARAIEEFVVERVRAALADGRLAADVTQAVKERLAGQRAGLVAERKELPGKIAALSSDGQRVVELAGNLTGAGRRLLDTKLQDVGDQLGRLEARLRDVERRLCLLDDCEVEAEWVSQCLADFNQVWDTLNPANRGRLVRAVVERVEVDEPNSDVRVFIANLNSSPAAVRAIAVNS

SEQ ID NO: 478 - protein, 549 aa, unidentified
  source 1..549: note = uncultivated organism
MKIAIYSRKSKFTGKGESIENQITLCREYIERNIPEAKDGEIFVYEDEGFSAKNLDRPQFRLMMQRARKEPFDYIVVYRLDRISRNVGDFAGLIEELNEMHTAFICIKEQFDTSTPMGRAMMNIAAVFAQLERETIAERVRDNLILLARTGRWLGGDTPLGYTGEKTEITDDEGKKRSAFKLKQIPSEVKTVKLIYEKFLELRSLTKTAAWLIQHDIKTREGSEFRMRAVKDILKNPVYCIADNAVYDYFKELGSSVCFELSETDGKRGIMPFRRSAQSGKQQHRTSPDEWIIALGKHTGIIPSDTWLKAQSLIGENASKTFYRPVRNQVSIFSGLVRCANCGSIMRPRVNSNKRLDPDGTQTFSYMCEFKERSHKSKCAMKNVNGNVLDKLVCDELLKFNQPKSTVGRQLDTLIKQSNRETEDNSARLAELKKQTDEKRRMISNLMDALARSEDGSAMLSYTTKEVERLDNEIKALENEIAELSFLGEENLERQRQVDAIVKSIERFKDVFDTLTVVEKRDYMHRIIDRIEWDGENAHIFIKRADDQT

SEQ ID NO: 479 - protein, 514 aa, unidentified
  source 1..514: note = uncultivated organism
MKGVIFLAIAIYARKSVEKENSISCETQLEYCRAMLKPDERNEKIITFVDNGFSGGNTDREGFQKMMRKVEQGKISKVLVYRLDRISRSLGDFIRILKVFKEFGVEFVSTQEAFDTSSPYGELIVKILAVFAEFERNSIIQRVTQAYEHRSEMGFYMGGRKPIGYDLEPTVINNIKTKRLKPVPEELEQVKYIYEAYAVEQVSLGRLLKNLVENDIKPLSGGGWTTAKLSTIIKNPIYVKADNKVYEYFQLHNAQIISSPEAFDGVHGIQVYGRRKHQSDNEDWSDIKVVVMTHEGAVDSDTWLKCQHKLQKNKQIRNAVSNKTSWLGGLIKCGCCDRGMTTIKGKTGSGEVRRYFSCIGKSHFKDCKGTKSTIYAESLEDMVYEEIGKKLETLKNVKTNERKRAHPELNELRNKLKTIELSQNKIADMLMNPDANADLIEIMSQRATKLKNERIALLERIEEIESTKVDVKQVVNLSKKWKTASFEEKRGVSSILINRIVIDRDGNVEIIWNI

SEQ ID NO: 480 - protein, 562 aa, unidentified
  source 1..562: note = uncultivated organism
MARQKNRFNAIGNDLYSQESSSAEAIWRTALYARLSVENERNNKDSIETQLCILRTYLDGRKEFRIVKEYIDYGYSGTNFKRPAFEEMMEAARDGKVNCIITKDLSRLGRNYLETSNLVETIFPFLGVRYISVNDHFDTLLNHNGNKELEIALKNLVNDMYARDISKRLVVTRKMDQKSGKFVGSNAPYGYKVDEQDSMRHYVVDEKAATVVRQIFEWVLNGVTLRKVSLKLQEQRLRIPAEYYRTGKLYLAEDDEQQVWYIGTISGILHNEAYIGNLVQGKRKTRLFKGEKQHFTDEDEWIVVQDAHEPIVSKEVFYAVRDILENKSSSTSFQSVRTNGITIKPNKYAGLLFCGMCGMKLAYKSYVPKDSVVRTYYFVCENDYRLGKKRCKGISIPEATLDGIMNQLFGDLLRTFNGDEDRIMEISKQRMEKVLAGYQAEISRFQQKIDVVENESADAYEAYVLGESTREEFSANEEKNRQILRKWKDMLEAKETERDAFAGSMNDRIDWMLALDQTSDRPLDADLLRILVTRINLYPGHEVEVIYPFAKPDVFPPEEEDV

SEQ ID NO: 481 - protein, 572 aa, unidentified
  source 1..572: note = uncultivated organism
MTHNKPKETRVAIYIRVSTLHQIDKDSLPMQKKDLLAYAKLILNTDDCIIFEDAGYSGKNTGRPNYQKMMTQIRAGLFSHLLVWKIDRVSRNLLDFAVMYNELKELGVIFVSKNEQFDTSTAMGEAMLKIILVFAELERNMTSERVTATMISRANNGQWNGGRIPYGYNWNSEKQEFTLNNQEYPIVKYIHEQYEKEQSLIRLTRIMNSKGYKTRVGGEWHRASIFKILRSIFYCGDYLYNVSKDGRKLKDESEWITIQNHHIPIIDREQKNRIIAILDSNKRINKQKNNYNSSKYTHIFSGLCICGVCKKPMGASPTSVKPNGQRYSKYACPTTRKNIYICNNKTTSDPVIGEFILNYILNILNAQRNFKNIYSKEILQAYLLSGDTFYNIEKIDSEGLDDLYNMLSLGITKGEIFGKNTNFKQSRKLSSELDSIQAEKQKTERALDRLRNLYLYSEDAMSEKEYLIQREILLEKLEEINEEIGLIQTDDWQQTVTDETFIIKASEFIITQKLTNRNYVNYKLLAQSVDAKVLHNFLISIIDSITITHGKIEKIIFKNGLSHSFIFKKSSV

SEQ ID NO: 482 - protein, 553 aa, unidentified
  source 1..553: note = uncultivated organism
MSRVRCAIYTRKSSEEGLEQDFNSLDAQHESCAAYIKSQTGEGWQLVRDRYDDGGISGGTLKRPGLQRLLADINASQIDIVVVYKVDRLTRSLLDFSKLVEAFDKAGVSFVSVTQSFNTTSSMGRLTLNMLLSFAQFEREVTAERIRDKIAQSKARGMWMGGTPPIGYRPDGRSLAIVEEHAAIVRHIFSRYAELRNVRLLADELNDRGIKCPQRATAAGHRFGGGAFTRGQLYKLLPNPTYIGRIDHGGRSHKANHPPIIEQALWDEAQAVLASNINGVRGPAPVESSLLAGKLVDDRGVSMVAVHACKGKVRYRYYVSRDLHHSGNARNNHGWRLPAREIEPLVRARVAALLNDPIEVLASQATMLSPDQLNASIELGKAAAGKLAGPRAPGAKLLRDLVSEVRLGSDRVIIFLNPATIASLLGIAGLAKAIELEVASSLKRSGCVMRLIMQNGRAAVPSVDTTLMKAIARARNWWDQLCHDALTVTAIAQREKLTRSYVTRVLRLAFLSPNVLKSLLDGKAPAHLTTDRLTGTDAVSARWKDQHKIFNIA

SEQ ID NO: 483 - protein, 528 aa, unidentified
  source 1..528: note = uncultivated organism
MAARDRLRSDTKRVGIWVRVSTEDQAQGDSPAHHEARARLYAQAKGWDVRDVYNLAGVSGKSVSEHPQTKRMLADITSGRISGLIFSKLARLARNTRELLDFSDMFQAHGADLVSLEESIDTSSPAGRMFYTMIAALSQWEREEIAARVRASVPIRAKLGKPLSGQLPYGYMRKDGKVVPNPSEAPVRKLMYELFAETRRKKAVARLLNERGYKSPSGKEWTYTTVNRLLRDPSAKGQYRQNYTTSGRKPGSVEYKPENEWVVHEIEPIVPVELWESCNAILEGQRTARNAPGRSANHLFSGLTYCADCEQKMYVPSRQPYAYRCWKCNIRVPADDLEAIYHAQLKGFLFSDKDIAVQMDALDGVISAKEEQINHLERERAAVKKEMDKAYQLYLADEISASGFGERNRPLEARLAKIDEELPAEQASIDVLRINRLSRDQILAEARSLHTRWPELPRDQKRQIVETITDRITIGREDIDILLHYVPTTAVGTNGPDGQAVQPGKPRESGSAANALNKATQELGFVRG

SEQ ID NO: 484 - protein, 536 aa, unidentified
  source 1..536: note = uncultivated organism
MSAQNVTVIPIKPELARKSSIRQERVAAYCRVSTEEEEQQNSYENQCMYYTDLIMKNPAWSMAGIFADEGISGTQTKKRDDFMRMIKACKKGKIDMILTKSISRFSRNTVDCLHYIRLLKSWGVAVSFEKENINTLQEDSEFLITLHGAFAQQEVESISANVTWGVQQSMREGKTRIQYKKLYGYRRGADDKPEIVPEQAEVVKEIYARYLAGASLRMIQEWLTKNGFLNAQGKTEWTHGSIKGILINEKYCGDVLMQKTYTTDCITHKTVKNHGERPMYLVQNNHEGIVDRETYDAVQAEMARRAALRSPSKNAPTGQSCYTSKYALSDRVYCGECGTRYKRTTWARNGKKRIVWRCVSRLDYGTKYCHSSPTVDEDKLQAAILAAINSAMSDKKVLINQIAGAMEIELLPALDSTMSLADITKRLVELEQEFQTLLAKAAGDFSDDSYTDHFRALAEEMADLKEKRKNIEAHRTGSETDLRIKQALEIMENSSSAITAWEESTIRQLVDWVKILSAEEILACLHGGIEIRQRME

SEQ ID NO: 485 - protein, 535 aa, unidentified
  source 1..535: note = uncultivated organism
MRVATYTRISTDEDHQPYSLEAQAERLGNYVASQDGWELVRRFTDQASGATTERPGLQRALSEAKAGRFDLLLVYRVDRFARSVRGLAQLLEELDTAGVAFRSATEPFDTTTPAGRMMVQMLGVFAEFERATIVDRVIAGMERKAARGGWCGGSRPFGYLPDPATGFLVPMDAEAPLVPLVFDRYAHSREGARSVANWLNEAGHRTKTGQPWSHTSVLTLLRNPVYIGQVYFRGALHPAPHEHLVEAKLFDRVQALLTERGENYSKRASATSDYLLAGLIICAHCGKHFVGNSAVGSRYRYRYYTCGTRQRYGTKHCDAERLPADELDAAILDALRRTYERSDLIERAVLAARERAEGMRDQHERELAFTDTEAAKAEEAIERYLGAFEAGTLSEAQCGARLAKLGAKITDLRTRREGLLAAMDQASAEVPSDAELSALRAQISAALANGATPARKALLQALVHEVRAESRDKVVPWFRVRGGEPEKVRALGGLAPPAGLEPAPPPPEGGALSAELRGHEQVTIVAVGNLSWSRA

SEQ ID NO: 486 - protein, 513 aa, unidentified
  source 1..513: note = uncultivated organism
MQKPKLITPVASQSEKQTRVAAYCRVSTNSADQQNSYANQIRTYTKMINQRPDWELVDIFADEGLSGMKANNRTEFQRMIRMCELHQIDLIITKSVSRFGRNVMDSLTYARKLKLLGIGIQFEENGINTLALGDEMLLSTFAAIAQEESQAISQNVRLTNRKLMEKGEYIAINAPYGFRLVDKELVIYEPEAKVVRTIYDLYLNGWSMSEIARELVRLDIPSKSGAGVWSSQTISYILTNERYIGDSLFQKKIRETTVPFKQHVNRGEEDMFYARNTHPAIVEKEKFEKVQSLIAKRQEKFSHPGACIPYPLTSRIRCAECGSFYHRKISKGTIKWVCTRHERNAKACDSFYFAEERIYDGFISMINKLRFGEEDILGQVIAKLENATLLYKQNNRKAQEASQSIAELNAKLLMLEQLRSKGYLATDIFQSQSREIQAQISNLRAERQSSFESRLLEMLKDVRKLKALIFEIEEPLEEFDERLFQEIVRDITINKSDEMTVAFLGGLSFTEII

SEQ ID NO: 487 - protein, 519 aa, unidentified
  source 1..519: note = uncultivated organism
MQLKAAIYGRVSTDRQSELSIEAQIEACERYCEQQGWDVYDHYCDFGLSATSADKRPALQRMIRDAKAQCFNVVVAHKVDRAFRNMRDYENIKYELQKHDVVMAFTDSGPVEGVQGEFFTGLMALMAQQYSMNLSREVKKTMRKNVEQGNFLGGLPPLGYKIVDRKYTVDPETAPIAQEIFRRYAKGQSMREVADYLNSKGYRTSRGGPYQVTTLHGILKNEKYIGIYVHNRNQYNRFGKRKGKKSNDDTEVIRMQGVIPAIIDKKTWKAVQARMEDNKKLGRAKSKNRRQYLLSGIITCGECGSSFVGQPSKNSRGYETVYYTCSGRKRKNGCTNKPIARDWIEEKAIECVAAMCDALDAEKLMEDANRILKKMRDDQDQERKRQEALLAQKRREETNLVSSIARMGGNRALEERLLETQIEIENLEDYIESLAPRIITEYKADAIAAAMQSVINGMRTGTPEARKEALQSVVEGVEVYKDRIVIKIKAGLDETSFPRTKVVSAMVAEAGFEPATSGL

SEQ ID NO: 488 - protein, 568 aa, unidentified
  source 1..568: note = uncultivated organism
MNDSRKIAIYSRKSKFTGKGESIGNQIEICMQYLNIHNPNIDENDILVFEDEGFSGGNTNRPQFQTMMKACREKKIQQVICYRLDRISRNTGDFIRLIEEMDQLNIEFVSIRDNFETTSPTGRAMMLMTSVFAQLERETIAERIRDNMYELAKTGRWLGGNPPTGYQSVETIGSITVDGKTRKAHKLECIPQEAELVKTIFSKFLELRSITKLETFFIQSNILTKKGNFFTRFTIKNILRNPVYLIADEQAWSYFEKNETEVFSEKTEFDGTHGIMAYNKTSQQPGRKNEIRDMKDWVISVGQHEGIISGHDWVETQKLLEQNKSKSYRKPKSNAALLSGLLFCGKCGSYMRPKLTQRRNKDGELIYDYLCELKEKSKSQNCDMKRPNGNELDKLVCQEIQKLTEDKSVFMTILKKEQKALNVNDTSYQEKLKSLRKAKSEQEAKIKTFVQTLVNAEGSAAHTYIVAEINTLDEKVKALQAQIQEYEDLAKTDVMSDIGIEELADLLLSFANTFDAMPMEQKRSALRAFIKKIVWDGENVQMYLFGSEENEIDLSGEEISKPQGEGCK

SEQ ID NO: 489 - protein, 557 aa, unidentified
  source 1..557: note = uncultivated organism
MKEHIVFFVAIYLRLSRDDEDIDGSVKSESDSISSQRELVRSYVRDHDDMELFDIYVDDGYSGTNFDRPEFKRMMTDIEAGNVNCVIVKDLSRLGRDYIEAGRLIQKTFPAFHVRFIAITDNFDSQTADYNTKSLVLPVKNFINDSYCRDISQKVRSSQKMKREQGKYIAPFAMYGYCKSAEDKNKLCPDDYAADIVRKIFAWKLEGMSALAISERLNELGILSPMEYKKARGEKFASSFQTNAVAKWSPVAVKRILVNEVYTGVMVQGKYQQVNYKVKKSVVKPQKEWTRVKGTHEAIISREDFDTVQALLAVDMRAGTGKKRAHIFSGILFCGDCKEPMAHRINRYKGTSKVYFICPTRNKSQGCTRHSISEDELKEVVFQTLQAHISVFLDVCSQLEHIQKMEINFEEVARFDKEMERLRKEQDKYLDLRAGLYEDLKTGLITEADFKSFRAIYEKQYEETKEALGKQEEMLKTLFRNGVASGVKLERFKEAMKLTELNRDALLSFISRIEIYEGKKVYVEFRWKEEFDKMLVLQEYLESKKQDRGSCGREGKR

SEQ ID NO: 490 - protein, 508 aa, unidentified
  source 1..508: note = uncultivated organism
MAIALYARKSIERENSISCETQLEYCKAMIKPDERGEKILTFVDNGFSGGNTDRDGFQSMMRKIEQGKITKVIVYRLDRISRSLVDFINILDTFKKCGVEFVSTQELFDTSNPSSKLILTILACFAAYERDAIIARVTQAYEHRSEMGFYMGGRKPYGFDLEPTVIHNIKTKRLKPIPDEIEQVKYIYDTYAVEQVSLGRLLKNLVENDIKTLSGGGWTTAKLSTIIKNPIYVRADSRVYEYFQMHNAQIISPPEAFDGIHGIQIYGKTKHEADNSDWSDIKVVVMTHEGVIDSDTWLKCQQKLSKNKQIRNAVSNKTSWLGGKIICGRCGRTMTTIKGKTGSGEIRRYFTCTGKTHFKDCKGTKGTIYAESLEDMVYTEIAKKLETLKNIRTSERKNVHPEINELRNKVKSIELSQNKIADMLMQPEANADLLELMSQRATKLKAEKTELLLKIEELENTEIDVKQAINLSKKWKTASFEEKRGVCGIIINRIIIDEDGNAEIVWNI

SEQ ID NO: 491 - protein, 561 aa, unidentified
  source 1..561: note = uncultivated organism
MEQSKPKARRCAIYTRKSSEEGLEQDFNSLHAQREACEAFIKSQTSEGWKLIKTAYDDGGLSGGTMERPALRRLLADVGEGLVDVVVVYKVDRLTRSLADFAKMVELFDAHGVSFVAVTQQFNTTTSMGRLTLNVLLSFAQFEREVTGERIRDKIAASKRKGMWMGGVPPLGYDVRERRLVINPAEADTVKHIYERYLELGRVRQLSKDLEKRGIVSKVRVSQKGIKSGGCRFSRGALYELLANPIYIGEIRHKEERHPGQHEAILPREVWERVQQRLRENAARGRGTSNRSISSPLAGKLFDADGQPLYVQGATKGRRRYRYYVSKCLVNGSASDNGKGWRLAAPEIERAVAIAARHILSDRAGLLEALEKSGIVSPDVRATLESASNLLQRLQKEADSAASLVESIERAELRDDGISVTLRMEVPCSRAGVRTSSILNLSRFVPLKMKRRGVETRIIIAAGDDLPRRVDPALLKAVARSRAWFEELASGRVRSLADIARREGIAQRYVERLSRLAFAAPRIVEAICQGRQPADLNAETLLNRIDLPLEWSAQLNALGLD

SEQ ID NO: 492 - protein, 542 aa, unidentified
  source 1..542: note = uncultivated organism
MSEKIFRTAIYARLSKEDGDKEESNSIVSQKEICRKYISEHEDLKLVKIYVDDGYSGVSADRPGFIEMLDAVRSKKIDAVICKDLSRFARNYIDGGKYLEKVFPSLGVRFIAVNDGYDSVTGNQSTNSIIVPFKNLMNDSYCSDISVKIRTNLNAKRHRGEFVGAFAPYGYMKDPTDKNHLVVDEYAGDIVRKIFSLFKDGYSVGRIAEWLNDNGVMSPMEYKISSGLNYFSAFRRRTEARWSYITVRRILMNEVYIGMLVQGKRGTPNYKVKIIQERDESEWVSVENNHEPLVSYEDFMSVKEMLGRDMRSASNDTEDNVFSGFLFCGDCGQPMIRNAVKSKGKKYYYYICSTNRRREGCKSHSISAGLLEKAVLGAVKTQIGEVLDISEALDYIDRLPSTDRAGFNYETQIERLEDEIDKSKRLKRRTYEDLTDGVITKKEYFEFRKQYDCFIEEKSEALARVIKERDEASLAGDTERAWVALFREYDGIEKLTHRVLMALVDKIFIYEDHTVEVEFKYGDEFCRARDVVKRHGDMSALA

SEQ ID NO: 493 - protein, 538 aa, unidentified
  source 1..538: note = uncultivated organism
MVEKRVVKVIPATPQLHTVVNGEKKHLKRVAAYCRVSTDSEEQASSYEAQVEYYTNYIKHRSDWEFAGIFADDGISGTNTKKRTEFNRMIQACVDGQINMIVTKSISRFARNTLDCLKYIRQLKEYNVPVFFEKENINTMDSKGEVLLTIMASLAQQESESISKNVKMGIQYRYQKGEIRINHNRFLGYTKDAEGKLVIDPVEAEVVKRIFREYINGKSLQKIAEGLMADGIKTAANKDLWRGETIRKILANEKYMGDALLQKTYTVDVLNKKRVVNNGIVPQYYVENSHEAIISKELFHKVQAELQNRAAPRNHRKERTIYSSKYFLSNILTCEKCGNCFRRVVGTVNGKKYVNWRCKTRVTKGVKCCDAESISEETLHNYIVRAINRLIGKRENVLDDLNTCISETISNTIDLEKIDMQIEKLQSELEERVYQNIDYSDITTELDKLISLKTSQEPKNDVDEITQSRLSEIREYVDNQSTLLENYDEDLARKLLSKVVVGDSEVEIVLKTGKSIRLPKVKSFCPKIVDFVPRKVYH

SEQ ID NO: 494 - protein, 504 aa, unidentified
  source 1..504: note = uncultivated organism
MNTKIDAIYARQSVDKKDSISIESQIDFCKYELKGGNSKEYTDKGYSGKNTDRPHFKELINDIEQGLIARVVVYKLDRISRSIIDFANMMELFQKYNVEFISSTEKFDTSTPMGRAMLNICIVFAQLERETIQKRVTDAYYSRCTKGFHMSGRPPYGYKLAPTVVNGIRTNMYEEDTEAAERVKLMFEMYAEPETSFGDIARYFSGEGIGSDGKEFSRNMISQLLKNPVYAQADIDVYEFFKSQGAAIVNDAADFTGLNGCYLYQGRDVAESKKTSLKEQILVVAPHEGLVSSDTWLAVRKKLMNNTNSTFRSGRKAATTWLAGKIKCGRCGTGLNCICSPLDVLYFRCRKRADRKSCEGCGTLHVKEVEYFIYDEMCRKMDEFKTLTDGNPAKANSKLTAHKVELAQVEAEIEKLFISLTGANAVLMSYANGMIEELDAKRQSLMKAIADMTAGVVSPNKLNQISGYLNDWANIDITDRRFVVDGLINQIYITSETVKIEWKI

SEQ ID NO: 495 - protein, 734 aa, unidentified
  source 1..734: note = uncultivated organism
MISVASYCRVSTDKEDQANSFAAQQRYFSQYIRQHPQWELYRIYADEGITGTSTKRRAAFQRMIQDAQAGKFRIILTKEVSRFSRNLLDTIAYTRKLKALGVSVLFLTDGINTMDPDAELRLSIMASIAQEESRRTSARVKWGQTRQMERGVVFGRSMLGYDVKDGVLSINPEGARLVQRIFHLYGVEKLGTTQIARMLEREGVRTCSGNPHWSSSYLVKLLKNEKYVGDLVQKKTYTPDYLSHVKRQNHGEEPLVTLKDHHPPIISRELWNTVQQELAQRSKHTSQSRSVHYALSGKIKCGVCGATFVARRRKRPDGSVTLRWSCASSVRGGCKIARILRDDDARQMFRQALFALELSPSSLLTSMTHLLHGENPNREQMEREQVHILDRKTVLLDAYASGHITKEELALMKETYDRKLTNLEQRLQAPSPDIIPEEAVEHILQHPEASDALCKLLVEEITVCPQRIVELKLSHLPMRFQFRDGTSLASGQEKDYTSGILRKGGGTVDTPIVQRLFALQDLTYQKFQCKLMPTVNPDVVIGVRMPELRRLAKQLRGTPEAEHFLNQLPHTYYEENNLHGLLLCEYKEYEETVEALNRFLPYVDNWATCDLLSPKAFVKHPEALPHQAWTWMQSNHTYTVRFGLGVLLRFYLDRYFSPEYLDWAAEVRAEDYYVQMMVAWYFAEALVKQWDAALPYLTQHRLSPWIHNKTIQKATESFRIDPEQKAFLRSLRVK

SEQ ID NO: 496 - protein, 554 aa, unidentified
  source 1..554: note = uncultivated organism
MDADKKGPRAAVYSRKSRFTGRGESIENQVELCLRYLQEHGGGADGILIYEDEGFSGGSLDRPQFRKMMRDARAGDFSSLVCYRLDRISRNIGDFAKLIEELNRLHISFVSVREQFDTSSPMGRAMMYIASVFSQLERETIAERIRDNMLELAKTGRWLGGTTPTGYASEAVRSVTADGKTRKSCKLKLVPEEAEIVRLIFHKFSELNSLTKTETFLMQNGVKTRKGNWFSRFAIRNILENPVYMTADSDAYRCLKESGAEIFAGEKDFDGRHGIMAYNKTTQAGKGKQARDKSDWIVTTGKHPGIVTGAQWAEAQRLLQQNRSKAFHKPRSGVALLSGLLRCSGCGSFMRPKLTRRLSPSGEPVYTYLCEMKERSHGQNCSMKNVCGNDLDQAICDEVKKLPEDSESFLALLDKEYRSAESLTSEPDAEAERLHKALLENDRDVSALIAALAEAGSTPAREDILHRINELHEQGNEVKNQLDKVENASRVRALSAAECSSVVRRMSSFPEMFDTMTAEQKRAALRDLLEKVVWDGETAHVYLSGKEPLCDRRK

SEQ ID NO: 497 - protein, 590 aa, unidentified
  source 1..590: note = uncultivated organism
MSVRVIKATKHPNAKSGKSGKRLRVAAYCRVSTDMKEQESSYEAQCRHYTDFIRANPEWELAGIFADEGISGTSTKGRTQFHAMIKACDRGEIDMIITKSISRFARNTLDCLTYIRKLKDLGIPILFEKEGINTMDAKGEILLTIMASIAQQESQSISQNVRIGIQYRMQEGKGRLDTTRFLGLTQQDGKLVIVPEEAELVRRIYRDYLEGYSPLLIAKRLAAEGVAAPAGGEMWYASTVAHILSNEKYCGDLLLQKYYTVDFLSHKIAKNTGQLPQYYIEDDHEPIVPKQLFYQVQGELLRRASLKNSPKVRCSSKMALCGRLICDKCGRTLKRFTKQDGRETDWRCRKRGGEVKEKHRDTKSGCGCRFVPESQAKGAIVAAFNALPEHVPRLKALRTQIWEVDIARIDALVREYDAAEQRLDEQLEKSSAGDQRILLESELARLRSEQTRAMLERAELCSRELQIRLLLELTDQMAEIEKRWRGAPTEADLREYEAISGHMSDGCGPPPQYGPACRDYDEFFIRTHKSLPSCIFNAYGRVQQFNDDMVVRYIDRITVTDEGFDVHFKVDVKIRITARDIALNPPLQQA

SEQ ID NO: 498 - protein, 512 aa, unidentified
  source 1..512: note = uncultivated organism
MANKNNGNGTPARTTVRCAIYTRKSTEEGLGQDFNSLDAQRDSGEAYIRSQAGEGWTLLPEQYDDGGYTGANMERPAIRRLLADVQAKKVDCVLVYKVDRLSRSIRDFAKIMEILDKHGTTFVSVTQQFNTTTSLGRLTLNILLSFAQFEREIISERTRDKQVLARKRGKWTGGHLPLGYNLEAGCLVVNAEEADRVRQIFEWYLEGQTVYGIVAKCADLGWHNKQWTTKDGKLYGGHPMCKCHVYNMLANPLYAARIRADSEVVAANHARAVDDRTFDLVQEKLKENTRNSGTHHRPRLESLLRGLLYCTCCGSAMSPSYSSSKDRRYRYYVCIRANQRKGEGCATRAVSAPVVEEAVIESVRHFALAPEVVEEAARAARQRLTEELNRHREELKTVNVKVRNAKSQVARATAMDATREAELRELIDVGEAKAGELRKAVARGERLRFDDSMVRQHLGDFDEVWKMMTIEEQCRLLRHLVERVGYDARGDKVKVTYNSNGISEYCQKGPAK

SEQ ID NO: 499 - protein, 739 aa, unidentified
  source 1..739: note = uncultivated organism
MKKLFKIGLYVRVSTEEQAENPEGSIKNQEERLREFVKLKTMVSPFGEIREVFTDAGISAKDMNRPSLQRLLTKIESKEIDLVLVTELSRFTRSIKDFSILWEFLEKHDCKFLSIKDNFDTSTAAGEMVMYMMANVAQFERKQTAERISLSFLARAKRGLYNGGSLPLGYEVDPEKPGHLKIVPDEAETVRELFATFLKQETLVNTAKSLNGRGITAPKTPRSGGQPRTGIFRIDMVQTILRNKSYIGVRTYRTKDGIEECPAMWEPIVSEDVFRKAQEMLDKNRYRKRSHLDKRHPYTLSGICYCKTCGDRMSGKSAHGRTRKVPYYEHARATKQQASLSKRLNKCEPHRLQADKIEPMVWQEVKRFLSVEETTRQMLAVAEQLRPKDERKTEEEKLRRKVQALDLQMEALAERIARLPKGVDERVFMNQMAKLQEAKTAAEAALVEVQNHAPADEVVAYEDFVSFTAHLRDLVKKADGQPEIQTAIIKKLVHRVEVAPQGFELEFYVGHNRIKREVGTTPTERVKHGTNVTNALQSTAEGQGRPSVGLRAFRPSSPPLSKFLKSGGSKRLTNGGREVTTNEPLYSHDFIELFPRTPSRIYEECAPLYESGLSIRDIEERTGIPKSTVRETLKKSGMALRNPLNGNAIHIDRLHTKRGGHTPYGYAYLDGQLIIDPKEQIYVRKIMKLHESGLSGNAIAKELNRQKIPSRIGKSWSPCVVRRIIKFNHSKQPNNRRTK

SEQ ID NO: 500 - protein, 533 aa, unidentified
  source 1..533: note = uncultivated organism
MVTIRAVSYSRFSSNNQRTESIDAQQRAIYKYIAENKYTPVGDYVDEALTGTNLQRPGFQSMLEDAEKGMFDVVIVHKMDRLSRDVYDALDVQRKLAIYGVRIESVIERFEETPEGQLQKVIQLGVGQYYSQNLAREVIKGLKENAYKAIHNGGIPPYGFDVDPETKKYIVNEHEANAVRIMFEKVVQGWSYRELAEYLNLLGYRTKIGNKFSANSSFYDLLTNPKYKGEYVFNRSISKPKQIGLKRSHRKNKREEEIIRIPNGVPAIVDEETFELVQKLLKQRRRSKGQHKAKEVYLLSGLVECAECGSAYHGSSRIGGRNKSKYVSYRCSRRKKIENPCKCKEINKTLLDEFVVNQLYTTLLNPTNLQQLLDDINIKLKQKYEDMNQDLPQLQKQLDEVNQKISNLVQAIAIGGLNSLDTITQEIQRLEQDKIKLIELIQENQVKKESLTLTLEQLKQVLDESKQYMLSNHDDMIKYILSRFIYKIIIGNETIIVNYNYGGFYFDFKSILLIETITYKRNDVYTSSLKGAI

SEQ ID NO: 501 - protein, 525 aa, unidentified
  source 1..525: note = uncultivated organism
MIIAIYARKSIYSDKSDSTQAQYNIALDYCRNHYTDYEILRYEDEGYTGANTDRPSFNLLVNDICDKKIDVLVCYKIDRLSRDVKDFSNFFSMLQKHNVEFVSIKEQIDTSTPLGRAMMYICSVFAQMERETIAERVKDSMIELSKTGKWAGGRAPLGYKRKRITISGKSHTILVEDKETSKILNYISDTFLQCNYSLNGLETYFKKIGFKTVAGKYFSSTQIWNILCNPTYCTADQAAYDYFESLGCIMAVDKNRFDGTHAVMSYARTSGGKKKTHVSNPPEKWIISVGQHKPLWSSEKFIAIQNRFNNNRIDKTRKYKIGILKGIVKCSCGWMMRVKHKVDKTYNKVYDHYFCPNRARRGIEFCDCKFVSVASIDDSVINILKQIKLDKNMIDNYSSTEKENNISLHYRSRSDVQQHIYSLESKISNLTNTLGTNSESSAAKYIISEIEKIDCELSRLRYELLEISSKEKKQKQIVHDKESKYNMICNIVDNLGNADYDELNSTLKCLFKECIWDGTTLHIKL

SEQ ID NO: 502 - protein, 515 aa, unidentified
  source 1..515: note = uncultivated organism
MPQIQVIAPLHVSEPAKLRVCAYARVSSDSADQLNSFASQVRYYTNLISGNEDWTLVDIYADRGITGTSTAKRTEFQRMMEDCRKGKIDRILVKSLSRFARNTQDCIAALRELRQLGVTVVFEKEHINTGTMANEMLISMMSAFAQEESVSISKNMRKGAVMRMQNGTFRISMPPYGYRYDASGSLAIEPSEAAIVQEIFAAFLNGTNIAKIAEAMQVRSVPKLRGACKWSKHGIRYILTNERYMGDQRFRKSFRTDTLPYKKVDNRGQMPQFYLADSHPAIIEQEIFQKAQTLLAQHGQQFGHDPVKHDSPWAGMLYCAVCGAPLYHRLINGRECWVCSRHLKDNQSCTLPAVAETDLVACFYAMIEKLQQNSCRILEDHLERLEQIQERLLASVPGRSHLQQQMADLLSQSHTLSRLLANGCVDSAFFIAQNNCIQKKLAEIKDQIQQQQCENDLEEVIDRTRDLIAYIQDIQLPHENNLLLEPVITKAVVKDSGVAFTLVNGLEFEERWSKP

SEQ ID NO: 503 - protein, 522 aa, unidentified
  source 1..522: note = uncultivated organism
MSTKSKVAIYCRLSEEDRNKQSETDDSNSIQNQKSMLLQYSLEQGWEVTGIYSDDDYAGADRRRPEFNRLLADAREHKFDIILCKTQSRFTRELELVEKYIHGLFPIWGIRFISIVDNADTANKGNKKSRQINGLVNEWYLEDMSDNIKSVLTDRRKNGHHIGAFALYGYKKDPDIKGHLIIDEEAAQVVREVFTLFSQGYGKTAIARMLNDRGVPNPTEYKRIHGLRYQQPKRKNSTLWKYFAISDMLANEIYIGNMVQGKYGSVSYKTKQNKPRPKNQWYIVEETHEPIIDRELWEKVQALIAQKAKPFTEGKIGLFARKARCMNCGYTMCSNKQRDGRRYLRCSNRHVAKDACIGSFISVPKLEQAVIEELNKLSAAYLNKDELEQNVVFNSDLRGNKETLQKEIAAYQKKIMEYIKSIRELYLDKVKGVITEQDYMDLSKDFSKEKDRLEKLVADMQKQLDVIERKIQAGDNRRQLIEQYTNLEHLDRETVEKLIDYILVGKKDPVTKEVPVEIHWNF

SEQ ID NO: 504 - protein, 526 aa, unidentified
  source 1..526: note = uncultivated organism
MKITEITAEKKENKIQRLAAYCRVSSDSADQLHSFAAQLRYYSNYEKQHPEFELVGIYADEGLSGTSMKKRAEMNRLIQDCEQGKIDRVIVKSISRFARNTHDLLQTLRLLKSYGVTVFFEEQGIDTSQLNSEMFLTFPGMIAQQESESISGNMRWSIRKRMESGDFNCCAPAYGFNMVDGELSVNEEEATVIRRIYDMYLQGVGKQAIANTLNSEHIPTKLGNYKWHHTSILQILNNERYMGDALLQKRFRTDTLPYRRVVNRGQKPKYYVENSNPSIVSKEVYEAVQRMQKDRSFCRNNNVNHILTQMLFCPVCGKAFRRLDNNGKHYWISSVVEKNECNCTKIRLKESSIFEVFSRMTYKLKDNRESLVESTLRYFERMQNRFSGNQDIICDIDREIAQLSAQNHVLAKLHNNGILNAAEYAEKTSEISNKITDLRIKRKKVLSADSDDVLIDELSELNQIIEGCTPKTDFDEKLFEQIIKKIEVKNNAQLQFRLLGDLEVTETIKGRARCKIREKANSVVRI

SEQ ID NO: 505 - protein, 515 aa, unidentified
  source 1..515: note = uncultivated organism
MSTLRVATYTRISTDESNQPYSLEAQRERLTAYVASQPEWRIVARYVDRASGKSLERPSLRQAREAAAAGAYDLLLTYRVDRLSRNLGQLAALVEELQRHGVAFRSATEPFDTANAAGKMLLQLLGAFAEFERASIIDRIGAGMERKAQRGEWIGGTYPFGYRRPEGGSGGLAVDPAAAPLVREMFRRYTEERVGARVIASWLNGEQIPTRYGGRWATQSVLAVLRNRIYLGEVSFRRTWYAGHHAPIVEATVFDQAQAILAERAARPGLRRTNPTDFLLSGLPLVCDRCGHPMVGASARGHTGQRYAYYTCATRNRYGPTVCDQGRLPKQALEDAILGQMGEVYRDTTLVAAAIEQAQAQLRAGQAEQATVRAARQAEAADLRRRIERYYTAFETGDLDPKQVRERVGALQARLDELETELAAPAQPIVPAAPVDAAEISWVLSEALALVLRIVPAPRAKAILRLLIEEVRVVSPSDIRPAYRVPLEVRTPTELVSRLGFEPRTRGLKAPCSDR

SEQ ID NO: 506 - protein, 528 aa, unidentified
  source 1..528: note = uncultivated organism
MAAYRSEARTPDAPTRVVRAAIYTRKSTSAGLEQEFSSLDAQREACEGYIRSQASLGWRMVPDSYDDGGFTGANLERPAFQRLLADIEAGHIDVVVVYKVDRLSRSLLDFAQVMDRFNRSGAAFVSVTQNFSTTDAMGRLTLNMLMSFAEFEREMISERTRDKIAASRRRGKWTGGRIPYGYGVRDRKLIVNRVEALVVRDAFDAYLATQSLLGVIHALTEKGWLPRPQTSRRKGWRTDHVIRMLRNPLYAGLIASGGELHDAEHEPLISRVIWDRVQILLGRRHDADRPEGRRRSQAYLLTGLLRCGSCGAALTPATSRAHGQTYRYYRCLTRDKQGRGGCPARPLPAQALEDFVVDRIHQATSGATGKVLATDVVSAIRVKVAREQADLNLERRGLPSRIQGVGAEKARLARSLQRIRNQASRTAIEEQINHLSNEQATREQRLADIDARLATLDATRVEAGWIAAALRDFKVLWDAMTPENRIRLVRAIVERVEVDEKAATIEVHLVSLAGMVPMRRGVTARVAR

SEQ ID NO: 507 - protein, 530 aa, unidentified
  source 1..530: note = uncultivated organism
MITEEKHYTAALYCRLSQDDGNTSESVSIGTQKSLLTRYCTENGFQIYDYYIDDGYSGTNFDRPDFSRMMTDVENGKVNLVIVKDLSRFGREYAMMGIYLNYTFEDYNVRFIAVTDGVDTLKNPDDLVMPIKNVVNAQYARECGRKTKAARIALARDGKYIGSRPPYGYMKDPADRHHLIPDPVTAPIVKRIYSMYCSGEGIKRIASVLREEKILTPQAYSGFSSPRDSVWRREYDWHITTVKAILTNEEYTGCVINCKKQVRGSVKKKREDTPEEGRIVVHGTHEAIITEEQFELAQSVMKNRYRPDRTGERQIFSGLVRCASCGSAMNLSTSHGKKKSFACTVYRNYGKDRCTSHRISYNALYRIVLDDIREYASIAQYRKVEFYDRLVSGSRDKDEEERRRLETEVQKNEQRISDLNTVLNRLYEDYALGRITGDRYRSLSESYEKELKEKTVAKESVERRLETMSERKINADRFFEIIRKYTDITELTAPILNELIDRIIIYEKEEIDGEAVQNVVIFYKFAGRIE

SEQ ID NO: 508 - protein, 533 aa, unidentified
  source 1..533: note = uncultivated organism
MKRKVAIYARVSTEHEAQLSALDNQVQYYDDILKKNPDWILYDRYIDEGITGTSIKKRKNFMRMIEDAKAGRFDLIVTREVSRFARNTVDTLQETRKLKNIGVEVYFVEDNIWTFNDQDGELKLTIMATFAQNESKKTSQRVKAGQMISFQNGIFYGTGNILGYDKVGKDLVINEEQAEIVRYIYSEYLNGKGTVKIADELTERGAITSTGLSRWSAAYVSRVLRNPFYSGTIVYRKSYIPDYLEQKPKMNYGEVEQVVVEGRHEPIISKEDFKKVQQIMDSHSKPIKLGRRQANGVAKNIWSKKLVCECGSNFNRKIYHKNKNNTTYCYVCYNKKMHPKNRFKESCEVKEVQEWKLQYMSEAIFRNLTQDMGNRKELYDRLMKGIDIEEHPEKKIKQRINDLNRLVEKETAKLDKLIDSYLDQTIDLTMYDIFQKKLSSRIEKYKIEISELEKKYQSIEPLGVRVEKAKASIRKLLDINYNGVDEKIIEEFIEKIIVYKDYFEWKLNFMNDTIKLKISGKNKSDCVVLEYQD

SEQ ID NO: 509 - protein, 528 aa, unidentified
  source 1..528: note = uncultivated organism
MQQTNLAPVMPPKITVITAKKHEVAKLRVAAYARVSSDSDDQLNSYVAQVDYYTRHIASHEDWELADIYADEGISGLVASKRDNFNRLIQDCRDGKVDRILVKSISRFARNTKEYIQYVRELLRLGISIYFEKENIDTGKMTSEQVATIYGAFSQMESTNHANNMRISVRIRMEKGDFVSPSTPYGYRLNDRTLEVIPEEADIVRYIYSAYLRGQGQYDIAKDLNELGIPRSNGREVWHHSTVAYILTNISYTGDMIWQKSFATDDIPFRQLRNNGQKPKYFVENCHEPIISKEDFERVQTLMQSRWTQAKSGGQAGMSLLAKKIYCENCGTLFRRKIDSGKVYWTCRKHNRYKENCPVSQIPEAQITAAILRMYHKLKGRYRQILTPLLEQLRSLREKELRSNRKINDIDRELSQLTEQNLVLVRLQSKGYVDSALYLSQVQEIDFRLKELRSQRRRILDLSGEDEQIKATEAMLDYLEGSSDLLEELTEDIFETLVEKVIVVSEEQLKICLYNGLELSEAIERTVR

SEQ ID NO: 510 - protein, 546 aa, unidentified
  source 1..546: note = uncultivated organism
MKIAIYSRKSKFTGKGESIGNQIQLCREYISLHFPEARDDEIFVYEDEGFSAKNLDRPQFRAMMANARKSPFDCIVVYRLDRISRNVGDFASLIEELNGMHTAFICIKEQFDTSTSMGRAMMNIAAVFAQLERETIAERIRDNLILLARTGRWLGGVTPLGYVGEKTEIIDGEGKKRSAYKLKQVPAEVKTVKLIFEKFLEFQSMTKVATWLIQHDIKTREGCEFRLRAVKDILKNPVYCIADKAALDYFTELGSSVCFELSETDGKRGLMPFRRTTQSGKQQHRTTPDEWIIALGKHTGIIPSDVWLKAQSLIGENAHKTFYRPIRNEISIFSGLVRCANCGSIMRPRVNSNKRRNADGTQTFSYMCEFKERSRKSKCEMKNVNGNVLDKLVCDEILKFNQPKSAVGKQLSTLVKQLDKSAESSSEKLTELKNQVAAKQKMISNLMDALAKSENSAAMLSYTTKEVERLDSEIKTLQTEISELSFIDDEHIERKKQIENIIKALERFKECFDTLTVVEKRDFMRQVIDRIEWDGENAHIFIKAAP

SEQ ID NO: 511 - protein, 682 aa, unidentified
  source 1..682: note = uncultivated organism
MAVAVYVRVSTEEQRERQSIVTQREFGDRFCALHGYEIFQVYPDDGVSGTVPIEDRPAGSDLLRDARLKRFDQILVYRLDRLGRETRLILNAVAEFERCGVRVKSMTEEFDTATATGRLMLTLLSGFAAHERDVIRERSVAGTNRKAEAGVWLGGVVPYGYVKEGAKGQWRIAVNDEPIPGLNLSEADVVRTIYRMCAGEKQSCQRIADYLNRVGVPCGSAENTRVEGGKRTRRRASVWRPAYVRNMIVSRTYMGEHLFGKRTKNRSRKVIARAVPSIVSEQEWLKARAVLRSNRIIPLRQREDPYLLRGFIKCGLCGLTFSGMRMKAPQRDHYYRCNGRQQARSLYGRFGHKCTAKSLNGDYVERVVWADIECFLRNPSEIVERLKERLAAQDGDRPRKQKELENFQERLSDKTAERDRVLGLFRRGRIDDATLDQQLDVIDAEAGGLQAEIEVRSRALSAVDQVAQLRSAEELLAALRKRLDGPVAPDLKRRIVETLMESIQANTVEKWGVQQSELVITYRFSEPAEAAALVIPRFHRLNIRNQPPEQLVTMGDHLLRRRLVLKLLQRQVAEQIGVDKASIANWEHDRSQPGVEYMPAIIRFLGYNPLPPPEDWASRLVQCRTVLGLTQKESAHRMGVDPSTLAKWERGERVPMGDYAVRAERLLDTVEAACAPTSARLA

SEQ ID NO: 512 - protein, 545 aa, unidentified
  source 1..545: note = uncultivated organism
MPQNDIYSAAIYLRLSKEDCSSSISAAKTESNSITNQRELAMRFIKQHPDIHFVKEYVDDGFSGTNFDRPAFQSLLDDIRANRINCVIVKDLSRFGRDYIDAGKYVEKVFPQLGVRFIAINDNYDSADRYNGADFILPFKNLINDSYSRDISTKIRSHLEIRRQNGELVANHPPYGYLFDSTEHRHFIIDEQAASVVRDIFRMKLDGSSASEIATYLNSIGVPSPAEYKRAIGSNYATGFQSHQKATWCAKTVLRILSNETYIGTLIQGKRTTPNHKIRTTYVKDESLWARQENAHEAIIEPNLFYTIQSLLSQKTHKPPKANTIYPLSGYIFCADCGSPLIRKKVPSGQQTYSYYVCSENKKNTATCSPHRIRVNDVEAAVLATLQLHINLLLDLDAVFDSIQACSWEQKEIDKITTRIQTLKADIEKDKRLKVELYEDFSSDLIDRSEYDSLRVAFNERIEAAEGAIKKLSQEKLLLEQGSHTDGNWFSQFRKYKNLQSLTRNVVVHLIKSIKVDQNKEIHITLRYSDMISDAQDFLQNQEVG

SEQ ID NO: 513 - protein, 524 aa, unidentified
  source 1..524: note = uncultivated organism
MPYEKTKTINCAIYTRKSTDEGLEMDFNTLDAQREACEAYIASQRGEGWRALKQKYDDGGFSGGSMERPALKCLMQDIKAGQVDIVVVYKIDRLTRSLMDFAKLVDVFDAHNVTFVSVTQSFNTTTSMGRLTLNVLLSFAQFEREVSAERIRDKIAASKKKGMWMGGVPPLGYKVEKRQLLLDPPNMPLAQRIFKDYLKLGSVVDLKEALDNEGITSPVRLTAKGNARGGRPFSRGALHHMLRNPIYNGKIRHKDETYDGQHAALIEDELWQAVQNKLDTQAAFRQGEVKKVKSKSPLKGLIYTPGGILYTPPRTKKGKTSYRYYTSQELINKRGHPSTALGRLPAHEVEQHLLKGLRKELTKDEALYSWLGLDPMMDKDTAHHIRKHIEVLGEGLVACLKRVEVHSKKLVATVSIASYAQLIGQRLDVNVEAMVDEAQVDISYYVRRAYKGTVVIKPTGKTAQALDSLPQVQLQNLVRGIVWRDEHFAGMTIKAVAEREGLSEAGIRKIIMQSFDQLASLYSQ

SEQ ID NO: 514 - protein, 604 aa, unidentified
  source 1..604: note = uncultivated organism
MKDKDIGIAIYSRKSKYTGKGESIGNQIELCKEYIRTHYGEDHLARCIVYEDEGFSGGNLNRPAFKRMMKAAKACTLDTIIVYRLDRISRNISDFSALIQELEQLNIAFVSIREQFDTSTPMGRAMMYITSVFSQLERETIAERIRDNMHELAKTGRWLGGTTPTGYASESTQWVTVDGKAKKACKLKLIPEEAEVVKTIFQLFMETDSLALTEAELMRRRIVTKNNKDYTRFSIKNILQNPVYMMADQAAYAYFFEQEAELFSDPADFDGIHGIMTYNRTDQTKGKSTLYLPIREWIISVGQHPGLIPGKTWVSVQASLERNKSKSYRKPRSNEALLTGVLYCRCGSRMYPKLSKRKTATGTPVYTYVCKLKERSQGSRCAGKNANGNMLDTAVIEQIKLLESDSNALTGQLEQSRKLYTGNSTQYEAQQEVLRQEHGAQQKKIDALVDSLADLRSSPAKDQILRRIEQLNAAQQSIQSRIQELEGLAARQTLSNEEFDTLRQLLSSFSSGMETLSVEQLRAAIRTVVRKVIWDGTNAHMLLFGAPEDEIEYPDLSGLYAQNKKSTSVNPAEDSHDPHHRVPGERGRGAPGERAKPHWGEDCK

SEQ ID NO: 515 - protein, 554 aa, unidentified
  source 1..554: note = uncultivated organism
MSLSKPVTVPEENQRNAVLYARFSSERQTENSIDFQLRADRAYCEQKGFRVVGEYIDRAISGTTDNRPEFQRMIADAKKQQFAFVIVYRFDRFARNRYDSAIYKKTLERSGVRVLSTEESVGTGDEGIILESIYEAMAESYSRKLSRIVTEGMKQKAIAGLSTGGALPYAYKIVDHRLAIDEDKAPYVRRAFEMYADGNTKSVIAKELNACGCRTQFGNPLKIDFISRMLSNPTYKGENDYCGVKRESPAIVTPELFDKVQALLRKNKKQYGRKTGGAYFALTGKLFCGTCGAAMIGDSGTGKNGNTHYYYTCINRKNRRTCRKKSEQRDWLEKYVCTQTVDFILSGKNIDFIAQRVSACSEAEAGTAAIRALERQLSGINRELDEAADALIKTRSNSIIKRINEKVEVLEARQLSIEEELAALRLRQDLRVTAKDVSAYLGAFVGGDVNDPEYRRLLINTLVNAVYVWDNKILIYYNISGNREMQYADACLDTGIIPDANTDTSPDITTDTAANTLNATDSEITNPPPTVSDSLSNGPPKIPIAKAIGIFTCL

SEQ ID NO: 516 - protein, 505 aa, unidentified
  source 1..505: note = uncultivated organism
MARYLEYLRKSRMDTDYEETSVEETLSRHRQILEKFCKDKKLNVVEILEEVVSGESLASRPKMMRLLELVNTGMYDGVVCMDIERLSRGSSMESGYIMQVFQANACKIITPGKTYDLQNESDEQFTDMKFMFSRYELKTINKRLVRGRNQSASEGKFMGSMAPYGYEPYKLPGTKGNSLRIIPEEAEVVRMIFDMYAQKGMGYNAVAYKLNDLHIPSRTGKWGPNSIVNIINNEVYLGKIRWRREPVKRVVKDGMLAKKRILNDDYELYEGLHDPIITQEQWDLAKAVQAKRNHNPVNTDRQLQNPFAGILYCEKCGGIMKRTVPDKHRNPTPWFRCTTRGCDCKIIKCATVENDIRNAMDDWLKNYMIQIETDEPPAVDPVEAALKTVQTQLSGLQSQQESICEYLEKGIYTIDIFTKRNAALNKEIKQLQQAEADLLSRKAQGNQQKQAIAQIIPTTQHILENYPRLNTLEKNQLWKLVMKKATIYRSPDGEVSLHIYPNIPK

SEQ ID NO: 517 - protein, 582 aa, unidentified
  source 1..582: note = uncultivated organism
MKRVRCAIYTRKSSEEGLEQDFNSLDAQHAACSAYILSQASEGWVWLSNRYDDGGISGGTLQRPGLARLLADIAAGLVDIVVVYKVDRLTRNLLDFSKLVEAFDKAGVSFVSVTQSFNTTTSMGRLTLNMLLSFAQFEREVTAERIRDKIAASKQRGMWMGGTPPIGYRPDGRSLAVVEAEADLVRDLFSRYLEVGSVRALQEQLVLEGTHQPLRANLSGRRFGGGPFERGQLYRMLGNPIYRGLIRHRSHTYTGNHPAIIDQALWDQVQARLRDNTQGEQLAPSAADPSLLAGKLFDPAGEPLVATHANKRKVRYRYYVSRHLQHGLPAPVGAEQDSAVLGVTPAFAGLRIPAREIELLVLDAIRCRLADPITLGAELRLNLTAPDITATLVQSAGALANTLGTKRGAAVQALLTSIVGKVEVHPDHVTVHLVANALCHALGYGRNKHSEPPAEALCLHLPVRLTRSGKVVRLLLESGRPAVASAPDARLLAAIAKGRVWWQHLQANPDMTLADLARSQSLSKNYVDRTLRLAFLSPTIIQTILDGAKPADLTLDRLKDVTLISPRWDEQHRRLGITAAHP

SEQ ID NO: 518 - protein, 588 aa, unidentified
  source 1..588: note = uncultivated organism
MGSNILSGATAAAAIHPTPSLACAIYTRKSSEDGLEQEFNSLHAQREACEALVLSQKSLGWALLSDGYDDGGFSGGNVERPALKRLIADIQAGRIKVVVVYKVDRLTRSLADFAKLVDLFDTMGVSFVSVTQQFNTTTSMGRLTLNVLLSFAQFEREVTGERIRDKLGASRRKGMWMGGVAPVGYRAMGRTLIPAPIHADRIPEIYRLYLKLNCTGRLSKEVHALGWRTPERPTKREGIGGHKAFSRGHLRNILTNPIYAGFIRHKPDHYRGQHPALVSMDLWKEVQERIESNRQRHKLQSLLKNPSLLAGKLFDETGRRLFQTKTTRIKKRYRYYVTKADDPGESIRLPASDIEQKLIAALVNWAATPHQVLNAMGWSDAQNADHVLKQAQRLQLALQRIALGQPFTSPPSAQHELDIHYLRTFVSRVEVAPACMRIALDLVGCGLQTEGAQPEKTIIEIPLQRKRSGMEVRLVIGNEEPENQHPSKPDPGLGGLMTRGRAWMKLLTSGGRSIEAIAQQEGFSARYVSRVINVALLAPDIVWGLERGEHPTDVNVTKLITSVPFPICWAAQRKQLGVGTPEKAVSWG

SEQ ID NO: 519 - protein, 512 aa, unidentified
  source 1..512: note = uncultivated organism
MKRVAIYSRKSKETDKGESIKNQIQMCKDYFNKQYDECIFETFEDEGFSGGNTNRPEFQKMMLLAQHNKFDIVAVYKIDRIARNIIDFMNTFDILQRNEVSLVSITEGFDPNTPAGMMMMTMMAGFAEMERMNIAQRVKDNMLELAKLGRWSGGTPPTGYRSIEMCYDGKIAVYLEIVPELSEKIKMIFENIANGYTTFYVAKLFNMPNKTIYNIIQNPVYCKSDELSKLYLEKLGYTVYGDLTGKGYLPYNRRPRKKNGKKEYNYKDMFVSVSEHEGIVNSKTWIDANEAMISRGGNAHPRVSSKTFLAHLVKCKCGGGMHVDVSSHVKKDGSRLIYFRCSRKKYDKEICDSTRINILKLESDVLELLKEFGNNKTLLEKYINKVSNSDNNYDDEINKLKKSINKNKSSLNNLTEKLILLNDSAAKLIADKINEISNKINEENEKLFLLEAKKLSSSTNNELNVDALQKAISTLLSNWNNLSLEDKQIGIRRIIKEIKWVGGKDFKVVLNT

SEQ ID NO: 520 - protein, 512 aa, unidentified
  source 1..512: note = uncultivated organism
MKRAAIYARYSSDKQDELSIEAQVRACQEYADKNGYTITKVYADEAVSGKGSMTSRRRQYQSMLKDCAKGVFDTILIHKYDRIARNVGEHVNLEMRLSEHNVSLIAVAQDFGSTKEAKIMKTMMWALSEYYIDNLSEEVRKGMKEIALQGLHTGGYPPFGYDVVDQKYVINEEEAYYVRRIFECALNKTGFSDIISEMNSKGITGKRGKPIRYTQIYEMLRNRKYTGEYAYSLVEEKSRSTRRIKPNAIKIENALPKIIDKAVFEEVQKIMDGRKQTGKKSNYLCSGLVYCGNCGAKMHGVTSERRGHKYRRFVCSNKCGIGTIDMDFVDESVKNYIKNILSKENQETIAIALKWFAHNEKKKIEEHNQKIRDQIKELQDKIDSYLDIVARKDLPDEFIVDVSKKVTELKAEIKKLQEMPVPKDFTFKQVNDWLNNLNNSTDDRQTVEMLVERIDATKTAVHVTTTLPAVLGETGCGGAQHILPTILFEAHFILQGSRTIYVPPESKRKLAT

SEQ ID NO: 521 - protein, 610 aa, unidentified
  source 1..610: note = uncultivated organism
MNMEKIKNSVGYVRVSTSQQVESGTSVDDQKLKIKEESEKRKCNFVKMYSDEGISGKSTDRPMLKQMLQDAKKGKFEVIIFTKLDRLARNLRDTLNIYHEVEKLGIVLICIENPEINTDGPMGKMLLSIMATFAELERSMIRARTNAGRMIKWKSGESMMGNLPFGYIKNEKTKKIEIDNNKKEIIDNIYNYYLIERLSMIDIAKRLTDEGVSTPSLLNGNKIFTTKWNMNSVREILTNNHYTGEQITLNKNIYTCNKNNNSIKTKEEKSKENWIYMSFPIMIDSNTFNDAQSRIKHNRVIPKNTSTYFSEKLLTLHVLRCGECGAKLTRQATGTGKYIYYVCHWRRVSKKRLEAASKQKCNSPYYNHKSIDDSVFNKIIDSISDPNEFSNLFKKTVDQEELNIKIDELKNEKIKIGNEIRKIITIETGTDNEDLIKIYSEKRKNSEELFKNINNKLFFYNNQLSFNNKKNEQIENFKNTFPLEKLGDAIKAKIKIKKMLLNLPVSEKKKLIDAVISPETGGCVHVSRLSEHNLSPDDIIVSSESPLPNGAKENLKISKEDACSDENIVIELDFLLDPHRHSLIIQDIYKKLFKTDALLYGVAEIRSPSF

SEQ ID NO: 522 - protein, 542 aa, unidentified
  source 1..542: note = uncultivated organism
MIVALYARVSTTKQAEKDLSIPDQLKQMRDWCVARQYSVAMEYIEPGASATDDRRPVFQQMIAEACATPPPFQAVIVHSLSRFFRDMIEFGLYERRLKKHGVIVLSMTQQTSDDPAGEMARRIFSLFDEYQSKENGKHTLRAMKENARQGYFNGSRTPYGFKAVELDIKGNKGKKKRLEVDTDEAAIVNRIFRLYLDGHRGTALGVKGICAHLNEQGVFMRGKRWRKTCLHEMLSNRLYLGEYTFNKMEAKRRRCKPESEWITVTVEPIIDADLFTQVQQRLEIRSPAVTPPRVVSSPTLLTGLVKCGVCGATMTIATGKGGRYRYYKCTGRINDLRGGSSCTNGNVPMEKLDTLVLQAVAEQIFTPERVEGMLKDLQRNLKQSRSAHDEQLKKLKKELDDIKIQSDRLYEAVEKGLLPLDGTLHERVNKHKERRQEVLTEMAGLQRQKELPLAGLGIRRIRSFCSALKEKLLEKGSNFGKEYLKLLVTEICVDKIEVRLTGSYAALVGALTMSTKPDHFEMVPSFVSVWLPFTDSNHGQGD

SEQ ID NO: 523 - protein, 566 aa, unidentified
  source 1..566: note = uncultivated organism
MEKCLAMNKRLKVAIYTRVSTEDQAREGFSLQVQREYLLQHAKLMNWETFCSIEGCAIYEDDGYSAFSMDRPAFQMLRKDALEKKIDLVLVYKQDRLSRNLRELLIFLEELNDMGIGFKSATEPFDTTTSAGKMAIQMLGSYAEFERNRLIERVFPGMISGVKKGHWQGARYTPYGYAYNKEIKRLEINAKEAEVVKKIYKMYVAGVGTKLIARELLENKVCSREGHMFYPKLIRDILRSKVYLGMLVWNRKHYSKKMKTKTGKGYRSFANDPAEIIEVENAHDAIIDKKDYDLAQEKLALNRTTNIIRFKDNIYYLSGVVYCKQCGLPFRGNMLSRNSTTGEKRAWYRCSSISHVIRHCRNRGVTANALEIQVWAILEALAQSLHVIKNLKDAIIVAAAEPEEHYLRLVSQINQKKEKNLRSQKLLFKAHADDAISPEVFKEEAAGLRAEEKKLKKELQDAHVRLADNESGVDKNLRARNFLVRIQGLASAKEFTDHDIKEFVRVIFSRIEVENQLIVSFELNQPWKYCYETGIKECQNPLQITPKGKNPSRRSYVVFCEPSAVR

SEQ ID NO: 524 - protein, 527 aa, unidentified
  source 1..527: note = uncultivated organism
MKRVYTLYRVSSKGQVIENDIPMQKQAAREFADRNGWVIVKEFYEKGISGYKVSADDRDAIQDLKAAAERKEFDILLVYMFDRLGRKQNETPFVVEWFVSQGIEVWSTQEGQQRFENDVDYLMNYMRFWQANGESRKTSTRVKTRIRQLTAEGVYTGGVTPFGYTLVKSGRCNKKGKELMDIEIDETEAAVVRMIFEKTVREGFGSYRMADYLNGLGIKTHNGSQFQCNTINRILRNRMYCGYFVAGDVESPHIERIQIIEEPLFFQAQYILDQRANTEKEKQQIARTTKGKTLLSGNLYCAHCGSRMVATSYVDRYTRVDGSEYRVRKQRYICCNKAQKRGECDGQAAYIAATVDDAVIKILRDYLASIRVTPRDKALERRYKRDITSANEQQKRTASSLEKKKRRLVELSGEIAKSLMGESAFTPEMLSLAIENAKKEIQQDEQRLLEIDKILRDKESAMKDLDFYYSQFRSWAEEFDNATLEQKKMIACQLMREVRVSRGYELDIVFNINYQQFIDEAAGEAAS

SEQ ID NO: 525 - protein, 515 aa, unidentified
  source 1..515: note = uncultivated organism
MRKKAGIYVRVSTEHQAKEGYSLEEQIIKLQDLCKYRDYEIYKVYQDAGISAKDMNHRPEFNEMMEDVKKHNINVVVSFKLDRLTRSVRDLETIIVELEKHGCALECAMDDINTSSANGRFFVRMLTVLSQLEIERCSERTIFGLVGAIKDGHIPSRAPIGFTRIDKKLIPDPLTKTIIERMYDLYLKGNSYQSIANIFNEEKVLDKQWRDCSILKMIANPIYKGDYISNKGKKTEYYYENVCEPIVSKELWESCQEQKLKNSRNYSRRDDYIFVQKLICPNCKTIMACKAPGGKKKKYIYYKCKDCNTYFREDEIEKLLEKQLIGIINYDIVVRKYFAPLLKHKIENHTEVLNVKKEQIEKKLLKLKEAYLSEVITLKEYKSDKNDLDKELDKIKEKQLEEKELDNYNFSFQDIMLRSDTIAIDYIKDKYMINYLYYVWNNYSQAEKKDFIMTYIDTIEVYKNKETIKILKINYRKTFIEEYSRLLLNNAVNGIQIVYDDNLKKKKAVYTTFPQ

SEQ ID NO: 526 - protein, 538 aa, unidentified
  source 1..538: note = uncultivated organism
MDKCNINGHAALYVRLSKEDVDKENDTDLSQSIINQRLLLTDYSIENNFKIVEVYIDDDYSGLYDDRPEFDRLIRDSKTGKFDVVIAKSQSRFTRNMEHLEKYLHHDFVMLGIRFIGIVDGADTNVKGNKKTRQIYGLTNEWYSEDLSENIRAVFKHKMKAGQFIGSFAPYGYLRDPNDRHKFIIDEDAAETVRRIFHLYLQGYSAKSICHLLEDEGIPTPTQHKKHQRFTYENQKSIEFSQKYNFWSETTVKRFLRNETYIGKLIQGTQKKLSYKDKKVVSVPKEQWIVIDDHHAPIIDTETFYKVRSLLSSRRMVYPNQTGSKKVHVLAGKLCCKDCGSTLIKSGGVRGKDDWYMRCQLANKSRNRECTGHNITYSAIECVILKSIKQLVDPILSNDKKSLSEYIESIIYSNDQLKHKEKQKNNLQNQLNDQTKVLKTLYSDRVTGIISDDMFFELKNTLELENTAIKEKVTKITEEIDKYKKEQDNLQNADELINKYYDFSRLTHEMVADFIDYVEVGERDKETNDQEVIIHWNF

SEQ ID NO: 527 - protein, 616 aa, unidentified
  source 1..616: note = uncultivated organism
MVVLEVFVFMKGEDNRKIAIYSRKSKFTGKGESIHNQIEQCYEKIKKDNPNVDIDNDVIVYEDEGYSGKNTKRPNFQRMLTDVKNRKIKQIYFYRLDRISRSVIDLHTLINELERNKVTFTSATETIDTNTPAGRLHLGTLSLFAEFERAVIAERIRDNMYELAKTGRWLGGKTPTGYKSEKIVERINIDGKEMTAHKLVGIPLELELVKLVYSKFIEFNSLTKTETYFLQNRIKTKNGKDFTRFTIKTMLHNPVYMIADEDAWNYFQELGVEVFADKSAFDGKHGLIAYNKTEQQDGKANVTRDISEWIIAVGKHYGVISGADWIKAQRYLELNKDKSYRKPRSHTALLSGILVCRCGAFMRPKQYNREYTEGERRFGYLCERKEKSQRQLCDMKNPYGNVLDRAICEEIKKLGENSSEFIKKLDDVKRKIKTNNTDYETEYERLQKQIKDKRKEIENLIDSIAKGTSNISSEYINKHIEELDNEIRSYQDRLDKISELMNESSMSDSEFAVLKQMLQSFTKSFDEMSYEEKYQIIRTFVRRVVWDGENIHLYFYGSEDEGELFPFDDGSEKEPLRVYSKRNTYGSAGQQKEAKRSSTARPSRQRQGRQRDNSHR

SEQ ID NO: 528 - protein, 506 aa, unidentified
  source 1..506: note = uncultivated organism
MAELHVIAPTTIPETQKLRVGAYVRVSTDSEDQENSFLTQYDFYSQFIQSKSEWEFVDMYADEGITGTEMKKRDDFNRMVEDCQEGRLDLILTKSISRFARNTYDCISTVRELKKYGANVFFEKEGIDTRKMSSEVELTMLSSFAQEESISISKNVTVGITHRMMDGTYVYSKVGYGFRKEGTKIVVHEEEAKYVRLMFEMCIQGKTIYEIRDELIRIGARKTDGTTDWKESAVKFIIKNKMYMGDALLRKTYSEGFPFKRKNNYGQRDQFYITDYCPAIVSREMFAQANQVMKLRKISSAEHRYDGLFKRMVFCSTCGEQMKRTEYNSGWNCHNHSGRGKNSITDEMIRQGFITCYNKLYLNRENVLTPIINLAQEYKSWQSRTNYKLEEIKNRIAQITEQVLIIKKLEAQGCMEPAIYMQKSTELNKEITQLKMEKKYLTGNNECDRLIKHTTSLLRILETAGPIAEFDEGMFKAMVAKLWNSEDEITYELINGTNLKMKKEEV

SEQ ID NO: 529 - protein, 531 aa, unidentified
  source 1..531: note = uncultivated organism
MPTAYILTRYSTDNQNPDTTAVQVKKCAEYCRGHQLAILDIFSDEAVSGMRQHRPEYDRMMAQYRAGMGADVVVIYDQSRMFRDMVEWFTFRRELQALGARVVSVTQPLVGGDLLDPSVFINEGAMALFNQMHVLVTRQKVVEKMRFMAGQGRACGGTPPLGYDVDAEKRYVINEHEAETVRLIFQMHAAGASYNAIIDELARQGRTTKNGKAFGKNSLNTILKNEKYIGRLIYGTQPRAHGGAKRNSRCRPDARRMIVEDAVPQIISQELWEEVQSRMQKRTGEGGRYSAKNEYLLAGKVFCGECGGAMVVTGSNQSKDGKQYLYYNFVNKRQTHTCSAKGIGVGTLEHKVAEAVKEQLGKPESAERIIQVAIEYRDEIKKSAAPKSSAMDTELRALDKKIGNLVNALADGMSSEAVSAKLAELEERKAQIAASKRMLQAAEEQVGLTDRQIHEAVDKLSVANLDSPDGLRTLLSVVLRVNVYADHIEIYTIFGGNGKSGKGDVDVKNAAKDFINTIGAAPPAYRKAPGT

SEQ ID NO: 530 - protein, 531 aa, unidentified
  source 1..531: note = uncultivated organism
MGTEEKQEKKTITCAIYTRKSTSDGLEQDFTTLDAQREACENFIASQKNEGWLTLPEKYDDGGYTGANTDRPALQRLITNIKNGKINCVVVYKVDRLSRSLLDFAALLSLFEKHNVAFVSITQNFNSSTSMGRLTLNILLSFAQFEREIISERTRDKMAAAKKKGKWIGGRPPLGYDIDREKHKLYINPKEADMVREIFDLYLQKRSVMAVSSILNEKKYPTKTFSTPEGRKFGGKQFKGTSVGIILNNIIYTGKVTYKGEPFKGEHEPIISEETFYKVQKLLASQRPDWSMTKRNKHIGLLHGILRCKRCNCVMYYSYSLKANKYKYHYYLCMNAQKRGYKGCTVKMLSAQKIEDKVIELLRTIVSVPKLNETVWATLTILEKIDVIKPVLKTASYDGVNQTLELILCDNDKPHEFKVAIGELKNLPVPPNQVDIKKEPQLRQNLILAHQVRSLIDNGKAKGIKQAAEWINMDHQRLNQIMNLLLLAPQIQEEIICSENENISTIPEYKLRDVAFELDWQKQFAMWQGLG

SEQ ID NO: 531 - protein, 562 aa, unidentified
  source 1..562: note = uncultivated organism
MAKTSTITYSPIIGGQPLLIKTKRTAVYIRCSSDEAKKEGYSPEIQEEKLKEFIKNNKWSLEERHVYKDIGYSGGTDKRPELQRLLTDAKNREYEIILVYRLDRFFRRLRLLENTLSELINLGVGVKSITEPWADYSNPSSKLSLQILGAVAEWQREITLGSRNEGMVRAMKEGKWLSGTAPYGYKINKNTQKLEIDKKEVKVVKKVFDWLIKDKMSEYKIQQRINIMKIPTKFDLLGRKKKTGSQNWWNRRTIGRILRSEIYTGVFYYRRYKHLGRVGGENNLRPKEDWIKIEDGSLKIISRETFNRAQLQLKKNKELSPRNTKQVYILQHKIICGFDDYHYQCARRVYHSKKRGSSETKYYFCTGNRSSFTPKKCTVPTISESRIVPPVWDKLKEILTNPDIIMQELKGYINQKGRKNKIEGQLKNIKNAISSFNIKKEKYAELYAESSITKEFYDKKVWECETEIEAFKKEWEKLSQLLLTEDEKEKRIDSVKELYSRLKESLNNATYEIKREVLQRLVEKIVKTGKRLDIEFNIPFENSSLQPATVGCSDNRRMDRDF

SEQ ID NO: 532 - protein, 523 aa, unidentified
  source 1..523: note = uncultivated organism
MSRPLRRCALYTRKSSEEGLEQDFNSLDAQREACAAYVKSQASEGWRALGTRYDDGGFSGGSMARPALQRLLADIAAGRIDVVVVYKIDRLTRALTDFARIVEVFDRHEVSFVSVTQAFNTTSSMGRLTLNVLLSFAQFEREVTGERIRDKIAASKAKGMWMGGNLPLGYDLPVSGRTLVVNATEAETVRSIFAKYLELGSVRALQHWLTRQGIHSKRRTTAGGRVLGGQPFNRGALFHMLRNRTYLGMIAHRDRLHRGMHPAIVDADVFEAVQRQLDANARRQTAPRQPREPAPLKGRLFDAEGRPMSPTFACGRNGKRYRYYASRPGQPGRNPEPRAAIRRMPAPALEARLAEILRRLLPSDASDPLALLTRVEVYPETVQLLMPVDRMARLQSRLLAGEHLERDPADPSQLRLTLPVRLQFHGGRTRIVGGADAGARPDPVLIGALRAAHAMLGRNAAGEPFLAAAPTSSYDRRLVRLAFLAPELQRAILAGRQPPGLTLAGLMHARLPLLWSEQARRFG

SEQ ID NO: 533 - protein, 603 aa, unidentified
  source 1..603: note = uncultivated organism
MREKESGQFVIYSRKSKFTGKGESIGNQVELCKEYIRANYGNQTAENVVIYEDEGFSGGNLNRPDFKKMMKAARKKKFKAIVVYRLDRISRNISDFSALIEELSRLDIAFISIREQFDTGNPMGRAMMYIASVFSQLERETIAERIRDNMHELAKTGRWLGGTTPTGYTSESVKSVTVDGKSKKACKLKLIPEEAEIVKKIYDLYTETDSLTLTEAELLRQRIKTKNGRDFTRFSVKGILQNPVYLIADGDAYDYFMEREADVFSERSDFDGTHGILAYNRTDQEKGKTTVYLPVQEWIVSVGQHPGIIPAKTWISVQESLERNRSKAYRKPRSNEALLTGLLYCRCGNRMYPKLSKRKTADGRPIYTYVCKMKERSQRSICNLRNANGNTLDTAIIEQIKMLSEDRPGFIAQLEQSKKFYTGNREDYETKLSDLRAEQAENEKKIIALVDSLAELGDSAARGHVAKRVDELHRVNEEITARITELEGLTSQHALSEIEFDLMSQLLSVFKNSIDDMSIEQKRAAVRTVVRKVIWDGQYAHVILFGASEEEIEYPDTRDLLSAPESEDDAPEAPEPFADIDYGPEDEGCPNDDTKMRWGEDSK

SEQ ID NO: 534 - protein, 557 aa, unidentified
  source 1..557: note = uncultivated organism
MNRNRKTQSYKAAVYLRLSKEDEDLSQNVDKRESNSIVNQKALILKELKSMPDVTLYDIYIDDGFTGLNFERPEFRRMRNDIYDGNVNMVIVKDLSRLGRDYIESGRYIKKIFPSLNVRFVSVLDNFDSLTATQSDINLLVPVKNFVNDNYSRDISSKVRSTQEVKRDNGLYVGSYVAYGYKKMEEDKNRIEPDDYSADIVRRIFAWKLKGLNAPAIADKLNKLGVIAPSEYKRILGINYKSGFQKKTTAQWSTVTITKILKNKIYIGVLEQGKRKKINYKLDKIVEKPKEEWSVVENGHEPIISKADFENVARLLTLDTRMAPNEDRLYIFSGLLFCGECGCGMGRRVNKYKNKETIYYICSTYNKGKGCSRHSVEEDVIEKILLDAINRHIKNIVELDSLLNMISALEVKTEDVIANDKEILSKYEELNQCKRLELALHKDLLDNIISQDEFRQFKSIYEEKCVRIEATIAELTQEVERVLKNGVFSCEWIKRFAQMKSIDAFDRATVLTLIEQVVVHEDKRLKIKFRYQDEYKTMCKIVENTSLSKKCEVAELG

SEQ ID NO: 535 - protein, 629 aa, unidentified
  source 1..629: note = uncultivated organism
MTLQQTSTGDKAPVWIAVYTRKSNDENLTGEVTSLDSQKAACRAYINIQKEKGWREYPEAFDDPAESGKSLKRPAMKRLLQSIQEGKVNGVIVYKLDRLTRNSRDFHMLIELFEERNVAFVSATESIDTKSPQGRLMTAIMVQFAQYDREMDVERSKDFHLARARKGLWCAGLPPLGYDLKDKLLVVNEEEAQSVRRVFDLYFTHKSTFRVADDLNRQGFLRKTYRTKDGKTFGGKPFDPDTVTRILQRKIYIGLITNERTGQEFPGQHQPIVSPEVFETAQKLLASHNKREGELFYGVNKHGFLLKGLIRCGECRSAVVGYIQPQKKKTYRYYKCLAKVNGLPIRCHFTSIGAQKLEEYLIEKLAAVGYDRPLLEKVVHKVKMLVQEHLPPMEAERREIMGRLEIIRQEIRNLIGMAKGQGASSEATRELHKLEAVQRELEARVGELDARIGYRKRAVYDVDVIQGALQRFARFVYKMPLDQRIRTIRLLVRQVTVFKDRLRAELHELPIADLQRALDLKLAPGDLSKLSNPAVCPRREQTTNGKANGQGTGLMELRQNWRGRQGQSRKILIAQPVPKAEETHFIPSFDLTWTLEWGRITNGELVAIDALCAPTPSIPSLHAGHFSES

SEQ ID NO: 536 - protein, 553 aa, unidentified
  source 1..553: note = uncultivated organism
MTKAASYLRVSTNGQIDGESLNTQRSTIQSYCDTRGWKLVKVYEDAGISGVKDDRPALQALLSAVKAGEIEAVVVKDLSRFGRSARDLLNNIQTLKDCSVTFISLKEGIDGSGPYGQFMLTILAAIAELEMEMITSRMKENRLARWRDRRIFCGKPPYGYSWNAKEKRIEIVPDQGEVYSRVIREYLDLGKSLNDISIDLNAEGVPTRNGGSSRWSSGTISKILKCADYRGEITVNRFISDAKGKVIGNRPESEHIIFEAPPLITRDRWERLQERLNNANARSGRQSKVAQEFLLHDLCVCGICGAKMRSDYGTRRADGSRSRNYACYWHKATPKLLSIKGREKCSLPIIPAELLEWQIFYVELFKQLGLDPDQHYKPLLDEKSNGDNIIKELERKLSNLQAGSKRKEIVLRNLDSLLERDDFDSVAYSQKRNDFIAEIQALRRKMEETRQELDGLRKRKVDKAEFAKFMSEADAFKAVTHKIMNLSFSGKQRLLHGVLDGPITVGSSTLIPHVGRDPEDEMMKILGSCGLVVRHNQPLLLELLGDKHTMKSL

SEQ ID NO: 537 - protein, 524 aa, unidentified
  source 1..524: note = uncultivated organism
MRFATYGRKSVYSDKSDSVDNQERMCREYADLKFSGQIDSFEVYQDEGFTGANTDRPGLERLMEDVKDGLLDALIVYQLDRISRDVRDFSNIYALLEERHVMFISIKENIDTATPIGKAMMYVTMVFAQMERETIANRVTDNMNGLAKKGLWPIGTVPTGYVRKHITLGGKKHSTLEIEPEGAAYVRGIYEDFLSSEQSVRALATRYRNEGKKTLNGCFLPAATLYRILTTPTYCAGTAEAYDYWDGLGCQMDADSPREMWDGSRAVMVYGRRRNRNKNAKLTPKEEWMVCLGLHQPLIKASDWLAVQEKFSQNTFSKEMKYEVPLLKGVLRCARCGGGMSVARKKNKSGVWSAYFCLKRSHQGSSACDMPMIRCGDLDDEVVAIFRRIEADQEVVRQYAARSLPQKPAQDTSALERRIAAQASKIERLAASLAEAENSTAQKYIVAEIERQDLNLAALKRELGLAKAESRRADAAEKSLEERAKEIGNLVRAFDSLSDKDRNSIVREVVKECTWDGETLFLSL

SEQ ID NO: 538 - protein, 579 aa, unidentified
  source 1..579: note = uncultivated organism
MNEPRIQRCAVYTRKSTEEGLEQEFNSIDAQREAGEAYIKSQAHEGWRLIDKAYNDGGFTGGNMERPGLQELLKDIKAKKIDIVVIYKIDRLTRSLADFSRLIDVFDKYGVSFVSVTQQFSTSTSMGRLTLNVLLSFAQFEREMTSERIKDKILAAKRKGMFTGGCPPVGYKVVDHKLVIDETTAGIPRLIFSKYLELKNTMAVRRYLLETGVRTPPRNGRHGQALGRACYSHGHVLKILRNRVYNGEIFHKGIAYTGQHAAIIEPKIWDDVQLQLEANSRRHSMTKTKNICLLAGLIWDDQKNRMSPTYTKKKDAKGRPVRWWYYVSAPLVRSSKETKASLTRISQGEADRFVRRAVADHLRGRGEQAEAKILEKSDILVARDVLDKYVEKVILASSRVELHFLPILTKEGKLDVLDPVPTQIIKVDLRRPRGSVCFYHNDNATFKPPMRDTALIKAVSLAWDWQRRLDANPKITVAQLARDDGYSDSYLRHLLPLAKLCPRIMEAILDGACPHDFYLKSILERPIPEDLQAQWKFYGFHRKLSHTVEQAMNINSAMAKSAKLGRPRGRRIARVIQDL

SEQ ID NO: 539 - protein, 559 aa, unidentified
  source 1..559: note = uncultivated organism
MAKRGPRTASGATGSAASAGRQVRCAIYTRKSTEEGLEQEFNSLDAQHEACAAYVASQRHEGWTLVSARYDDGGFSGGTMERPGLKRLLADVDAGRVDVIVVYKVDRLTRALSDFAKIVEVLDARGASFVSITQAFNTTTSMGRLTLNVLLSFAQFEREVTGERIRDKIAASKKKGMWMGGPLPLGYDVHERKLLINETEAATVRLIFERHRALGSLSYLAADLAAAGIVSKLRRMRDGRVTGGVPYSAGALGHLLRNVLYTGRIPHGDQVYEGEHQAIVDRELWDASQALLDRSAPRPHTAHISLLAGMITDAHGRAMSPAHAIKGDRRYRYYVSRSRDGDAEQAWRIPAGDLETIVQQAVSGLLHDPMRMLAELGLGYVACSKLSARCSELAGQASRPAALRGLLEQFGAQATIHQDRIEVALDRRTLATLIGDPSTNQEQEPIRLSVPAAIKRRGHELRLVYAAADLRPAHRDDRLIRLIADGRAAYRELASGAAADDAVRRSHLTRLARLQFLAPDIVTTILAGRQPVELTSRSLLRIPELPLAWSEQRRVLGFG

SEQ ID NO: 540 - protein, 564 aa, unidentified
  source 1..564: note = uncultivated organism
MEDVKPSVRRCAVYTRKSSEEGLEQDFNSLHAQREACEAFIKSQAGEGWRLVRTAYDDGGLSGGTMDRPALTRLLDDIRHGLIDVIVVYKVDRLTRSLADFAKMVEIFDAQDVSFVAVTQQFNTTTSMGRLTLNVLLSFAQFEREVTGERIRDKFAASKRKGMWMGGVPPLGYDISERRLIVNEPEAVIVREIFERYLVLGSVRLLRNDLERRGVVSKVRVSRTGIKTGGRSFSRGALYELLSNPIYIGEVRHKQERHPGQHEAILERELWERVQHHLREQAAQHRKRPTKASPSPLAGKLFDENGAPLYAQGAMKDGRRYRYYVSRELVRGSGEQARAGWRLPAPELERAVVGAARSILDDKQTVLTELQESGIGLWEVDRIFEMTSACNGRLLAETESAAALVEVIEKVQLTAEGFRIVLKISIPCGSTAGHAGAKILRVSRFVPMKLKRRGVELRIILGSKDEIRRKVDPALLKAIARARRWFEEVASGHVPSLAAIARREHLAKRYVARLTKLAFITPSVVEAVVEGRAPAALNLQMLMDPRFSLPLSWKDQERLLEFQQ

SEQ ID NO: 541 - protein, 521 aa, unidentified
  source 1..521: note = uncultivated organism
MKRRPEPKSPTQIRCAIYTRKSTEEGLEQEFNSLDAQRESGEAYIASQKNEGWVCLADRYDDGGFTGGNMDRPALKRLMADIEAGKVDCIVVYKVDRLSRSLIDFARMMEIFERKKISFVSVTQQFNTTQSMGRLTLNILLSFAQFEREIISERTRDKIAAARRKGKWSGGRSVIGYDVDPVTKKLVVNREEAELVREIFGLYRAKRSLLDIARELNGRGLRTKAVRTPKGAAYGGREWDKPAVLKVLTNILYRGRVRYKAETFAGEHEAIVDDALWAKVNEMLRHNGRDGGMVARNKFGALLKGLIHCNPCGLTMGHTMTTKAGSRAYRYYVCYKAQKQGWDSCPCRSLPAEQIERFVVDQIRSIGKDPSLLSLTLAKCREQMASNRTAAESELSAVEREMARLQADLARVARDAATDAHAASRLADLHEKVRTCEDRAAVLNQRLAEASAGEITKADVDAALGEFDGVWSRLTPKEQARLMRMLVQRVDYDATKGSVSITFHPLGLRSIGQRGHEEEAA

SEQ ID NO: 542 - protein, 587 aa, unidentified
  source 1..587: note = uncultivated organism
MTSVTRAKTRSRHANPREIAALGAMIRVAFYVRVSSEEQTERATANNQIDFLRKKYQANFDPDSLEPMQFVGQFVDDGYSGALSLEDRPDGKRLLDLVRAGGVDVVISYRLDRLGRRLGVLLDIHEEFQQYDVAILSATEPFDTRTPIGQFVFQLLGSIAELERSTIVERFTLGRDRSARDGKFINGPVPIGYDIADDRLVPSLRPIAELDCTESDMVRQLFERAAVGESAAGLTVWLRAHGVPSTKRFIRRDGMERETVKSSWNAGRVQDVIHSPTYYGDRQLNYSGSVLHQDVPPLVTREIWDQANAYVSGRISKFNAGQNDGYVYLLSGKIFCTECGWRMVGNYRGPHPRWDKKERLYYRCSSAKAGRARRSTNPCTAGRNHDGWALEGFVLEAIDEYVAKPEAALKILREQARSRRGTSAEQEQRVKVLRERLADYERGKGSLLALVRRGQITQEEYLHETQAAADEATAVRHDLELLEAQDALSTVIETRLLESVRVLQELQGEWARARADNDRVALRAMVQRTLQEMYLSPDGEVRMAFAFSSPSALESSQSHYKHLWRTESGDSAGVVRLELFRSLSKPA

SEQ ID NO: 543 - protein, 545 aa, unidentified
  source 1..545: note = uncultivated organism
MKIAIYSRKSKFTGKGESIDNQIDMCKEYANKHFENIEEFFIYEDEGFSGGNTHRPEFQKLILDAKKKKYDALICYRLDRISRNVSDFSGTIESLNKYNIDFVSIKEQFDTSTPMGRAMMYIASVFAQLERETIAERIRDNMVQLAKTGRWLGGITPTGFDSKEVIFIDPSGKERRMFKLSPIPEEIAIIRLIFTKFLELDSLTQLESFCIQNNIKTKNNKDYSRFSLRNILNNPVYAMADKDTYNYFIDNGYDIYSDSNAFTENKGIMAYNKTIQKKNTSNKLRNRSEWIIAVGKHPGIISGRDWIKVQNMIDKNKSKTFRKVKNTESVLSGVLKCSNCNSFMRPKMGRINRDGIQVFYYLCEMKEKSKRKKCDIKNINGIKLDQLVIDELKKLSLQGSNLTSMLLKNKVNITSTESSLVSEIDQLRVNIRNNTKSINNLVNNLSKYEESRAAKYIINQIDNLDKNNTKIKERLQGLEEKANINKVKEENIEIVNDIINKVDHIISSADVIQKRNLIRSIVHKITWDGKNIDILMFGSKSRKIQ

SEQ ID NO: 544 - protein, 589 aa, unidentified
  source 1..589: note = uncultivated organism
MVDPRQSSSPARARLRCAVYTRKSSEEGLEQEFNSLDAQREACEAYVTSQKHEGWTVLPALYDDGAYSGATMERPALQRMLDDIRARKIDVVVVYKVDRLTRSLADFAKIVEVFDAQGVSFVSVTQAFNTTTSMGRLTLNVLLSFAQFEREVTGERIRDKIAASKRKGMWMGGLPALGYDVKDRKLVVNEAEAATVRHIFQRYLELGTVRSLQADLHAGGIVSKRRTASDGSPYGGERFYRGALYLILQNRIYRGEIVHKGKAFPGEHAAIVDEDLWWRVQRHLDENRLERRPGDNASEPNLLTGILFDAQSEPMTPTHAVKKGTRYRYYISRRLIARTDADNARDQPHGQRLPAAKLEALVTNRMRSFLVNPVEVLNAIAVGNHDAPAQRRMRDAAAALSARWDRMPTDSLHDLMRSLVIRAQVHADRIELDVSSARLARRLLVDAGADGVDGGPESNASNDSGEEELVRLSISARLKRTGKEMKFIVDGAADSAPADTSLIRLLVRAQKVGGRLFETGSPTLEDIAREENITASYASRIVRLTFLAPDIVAAILAGKQPPELTANKLMADTRLPLDWRDQRIALGLA

SEQ ID NO: 545 - protein, 513 aa, unidentified
  source 1..513: note = uncultivated organism
MTKDRNISSQPLKKIRCAIYTRKSTEEGLDQEFNSLDAQRESAESYILSQRHEGWYIVSDRYDDGGFSGGSMIRPALQRLLIDIENRKIDCVVVYKVDRLSRSLTDFCKIMDLFEQHHVSFVSVTQSFNTTSSMGRLTLNILLSFAQFEREVIAERIRDKVAALKRKGMYTGGMPVLGYDIDPKRKKLVVNEDESQLVRFIFKRFIQIRSGLNLVKELNQKGYKTKSWVTKKGILHNGQNWNKNHIYRLLNNPIYIGEVVHKEKIFPGEHEPIISQELWDKVHEIFKENSRSRGAKTRSKTHGILRGVIKCGNCGGSMGLTYTRKKERIYRYYQCIQASKNGYDSCPVKTVPAGDIENAVIEQLKKIFKSPEIISRTIKSAKQINSHEVEQLKAKKKEFDRKLLSADIKNNSGEYYQIKEYLDKITGELSILETIYPNESEIFAVFNDIAPIWDELFPAEQERIIQLLINKVIVYKNGIDILVKTDGLNSLVSELDVSQETISDKNEFASKVI

SEQ ID NO: 546 - protein, 520 aa, unidentified
  source 1..520: note = uncultivated organism
MKSESRRCAIYTRKSTEEGLDQAFNSLDAQREACEAYIKSQAHEGWKLVKTAYDDGGFSGGSMERPAVQRLMGDLKQGLIDIVVVYKVDRLTRSLADFAKIVEILDGHGASFVSVTQQFNTTTSMGRLTLNVLLSFAQFEREVTGERIRDKIAASKRKGMWMGGTPPFGYDVRERRLVVNDTEAESVRTIFRRYLDLGCVAALADDLRAKGVVSKATISKRGRNHGGLPFGRGALYHLLQNKLYLGMIVHKDQAHPGQHAAVVSKELWDRVQTALGSRRVDRRTTRSTGTPHLLVGRLRDEAGEPMVPVSTHKANGQRYRYYVSKPLTQGGAPSGLQRVSASAIEELVEEAVMQRRSERERRAWAGLAPTERRQKLRDCVASVSLRTGAVDIRLAPDDANPETTVTIAGRMRRSARGTFILPDDPLVAPAGKPDRALIQAVARAHHWRELLESGHARTPYDIARYENCRVSYVQRHLPLGFLSPALAKAILDGHQPAGCTLKDLVDHVALSWRLQATAVA

SEQ ID NO: 547 - protein, 512 aa, unidentified
  source 1..512: note = uncultivated organism
MPKVTRIEFANEPEKQKKRVAVYCRVSSGSADQLNSLANQEKYYTLYVKRHPDWTLVDVFADEAITGTRADIRPEFQRMIRMCELKQIDMIITKSMARFARNTKDSLEYTKKLKLLGVAVIFEKEGINTLSVGDEMLINTFAAIAEEESMSISQNLRLANKKRMENGEYVCSNAPYGYRLINKQLVIEPTEAGIVREIYELYLDGLSADDIADKLTGDNIKPAIGKRWSRTSVAYILSNEKYIGDSLYQKKYGLPTVPFTKKYNKGEVDQYYAEGTHEGIIEPDVFTRVRELMSSRGGSHNKGGDRAAYTLTGKIKCAECGSTYKRKLCKGNVSWVCALHAKGKELCDSNYVDEDYIYKAFMNMVNKLRFGSIPVLKNAERLLESAAMKGKRGNQSASILSEDISGLNSKLLMLEQLRTKGYLQPEVYQTQANAIRVALQKKKDERVRAMDSAYGKAIETIRNTIHQLEKLDEPIENFDAELFENIVDTVTIDKSDNVTFTLKRGLRFTERI

SEQ ID NO: 548 - protein, 522 aa, unidentified
  source 1..522: note = uncultivated organism
MESNITVIPARKHVGNTSKKQEEHTKLRVAAYCRVSTDTDEQETSYTAQVEHYTDFIQKHPDWKLAGIFADDGISGTNVKKREEFNRMIDECMDGSIDMIITKSISRFARNTLDCLKYIRKLRDKNIPVFFEKENINSMDSKGEVLLTIMASLAQQESQSLSKNVKLGIQFRYQSGKVQVNHHRFMGYTKDKDGHLIIDETEAKVIKRIFREYLEGKSLKEIGNGLEADGILTGAGKNKWRPETIKKMLRNEKYMGDALLQKTYTTDFIEKTRVKNNGIVPQYYVENCHDAIIPKDIFMRAQEEMVRRANLHSGVNRKKRVYSSKYALSSLVYCSKCGEIYRRIAWNNHGKHSIVWRCCTRVEHGPSACDAETIQEADLKMVTVRAINKVAQCSDSMLEILKENLASVVNSETEQELADITAELATQQQELLKATREKKPYDDIADAIDDMRDQKLKVMTEKAEEEGRKLRIEEMTTFMSGMSQELIEYDEQMVRKYFERITVYDTYYEVEFKAGIKVEIEK

SEQ ID NO: 549 - protein, 544 aa, unidentified
  source 1..544: note = uncultivated organism
MPQKRTIRCAIYTRKSSDEGLDQEFNSLDAQREACEAYIASQKHEGWKLLPQHYDDGGVSGATMERKGLRRLLDDIDAGIVDLVVVYKVDRLTRSLADFAKLIERLDASGSSFVSVTQAFNTSTSMGRLTLNVLLSFAQFEREVTAERIRDKIAQSKAKGMWMGGNVPLGYDVDGRSLKPHTEEAKIVVRLFELYDELDCLRQVEQRANKAGYRTKVRQMKNGRTTGGGPFSRGRIQHILRNPLYVGKVRHKNVVYDGLHDPVIDQDLFERVQAKLDAASKRIGKVRKARVPSPLAGRIFDEHGHRLTPSHTTRGPKRFRYYVSQSLVKKSGGVRNGVRLPAQTVEGAVASAIKTKITQNRAMLLSSADQTLEGVEKREQTLDLLANAEPERLLELATRVVVGPTHLGIKLRLPTDAWAGCDPVEILEPFTVRRRGVERKIILGDARPTPDETLQRTLGRALNWRDRILAGERMEALAEDAGVSSRFLRDRLQLAFLSPVIMTAILNGTQPVDLSTNTFVRSDIPLDWSEQEKMFGFNRPSLVR

SEQ ID NO: 550 - protein, 530 aa, unidentified
  source 1..530: note = uncultivated organism
MKAAIYTRKSKESDKGDSIENQVNMCITQLQFFGIKEYEIFEDYGISGKDTNRPAFQDMMTKIRNREFTHLVCYKLDRVARSVADFSALFEEISSFDTAFVSVKEQFDTSTPMGRAMMYMLSVFAQFERETISERVSDNMIEMAKNGKFLAGIAPVGYKREKIENEQGTVYTQLVVDDEYKDIPPLLYKKLFEIGSKSGVRKWLREKGYRTKRGAFYSDNSVTTILDNLVYLEATTKSSEYLEGLGYRVYNKQLLDKGYAFLHYNKQNFNSTKKYKIEDQVVAVSTHPYIITLEEYKKARSIIKNNNKFINNGKQINASLLTGLIKCSKCGKNYIIAYGRTKKYYRCWTKQKYNSKYCDSISLDAEKLEKIVINNLKTLLSDKETLLKKLNESNKDNTTVKNNIQKKIDQTKLEMQNLSNAIAKTGASDLLIEQYKLKEEYLENLEVEKAKSVTENLNYLLRKESISNFVNLIDTLDTPQKRMLLQDVVKCIYYDYDKEKIVIELFNDDFISDSDASLTTNHMDMGSSPL

SEQ ID NO: 551 - protein, 505 aa, unidentified
  source 1..505: note = uncultivated organism
MTVLSRIRCAIYTRKSSEEGLEQSFNSLDAQREACEAYIVSQRHEGWQLIHTQYDDGGFSGGDIERPALKRLLDDIAAKRVDTVVVYKVDRLTRSLADFAKIVEQFDKQGISFVSVTQQFNTTTSMGRLTLNVLLSFAQFEREVTGERIRDKIAASKRKGMWMGGVVPLGYDLEDRHLVPNPAEAEHVKDIYRAYLKLGCVTKLQENLEQRGILSKRRMSRTGRASGGASYSRGALYLILHNRIYLGEITHKGASYPGQHPAIIEQTLWDQVQLKFQSNLQAARKRPRATEQSLLMGLLYDERGNRFTPSHATKKGRRYRYYVSQAVIRNPGRRHNRPVRIPAAEIEELVRSELTLLLQSPQRMLDMIVESDASPAEMHAVTEASREWSSAGADKIQSLLQSTVKRIAVHNDRVEIHIIRSSLRQTVLGVSDDPVLVGDNLDDLVTIEAAAQLKRCGGEVRLILPPDSPGAKPHAVPSLIRAISRAHDWVDRILRGETVNQRSIA

SEQ ID NO: 552 - protein, 572 aa, unidentified
  source 1..572: note = uncultivated organism
MDKVFAIYSRKSKFTGKGESVENQIELCRDYLKTHFGEEEAQKAVVFEDEGFSGKNLDRPQFKKMMKAIKDKKICAVVCYRLDRISRNIGDFATLITELNAIEVGFISIREQFDTNSPMGRAMMYIASVFSQLERETIAERIRDNLHELAKTGRWLGGITPTGYISRGEETVNIDGKKKKAFRLAEKEDEKELVKLIFSKFKETDSLTATESYLLEHRFKTKNGKDFTRFSVKSILVNPVYMIADADAYKYLSECGIELYSDESEFDGVHGIMAYNRTHQEQGKATKIKPMEEWIVSVGKHPGFISGADFAAVQNMLHRNQSKAYRKERSHTALLSGLLKCGKCGEFMRPHMTKRINRDNELTYYYSCNLKLRSKKSRCNGKNAGGNEIDKKIIEAVKSLDLSGENYFASLKKTLSQNGIEKNDSESEAVKLQEEIEQAEKDIQKLVGSLTDSGGAEKYILQRIDELGRKVSNDKARLESIQSYNSKPFDRINAVKLMKDLIKHFANNVDKLSIEQKRLAVRAFVKEVIWDGEYAHIVFFGGEYDDSVSNTVKTTESPDENGIFYPSGTHRK

SEQ ID NO: 553 - protein, 544 aa, unidentified
  source 1..544: note = uncultivated organism
MTGQISKRNGQTLRSSVNDKRTALVYCRVSTAKQEEEGTSLDSQAAACVTHAEKLGYVVGRITKEVFSGAELFDRPLLSRDRADIRAGQFDAVVVYAIDRLSRDVAHLAILSEEVERAGAALIFVTEDLDDSPEGKLMTSVKAYVAEVERLKIRERCVRGKRQKALNGKVVRGGTDLYGYSYDKEHGIRAIKEDEAMVVRQIYRWILEGVSTRKVIQRLNEQGIPSPARGKRQYKDGRETFWGKGAIGRILSEPAYKGVAVAWRYKGVRGYEDGQKFYRIALRDESEWIQLPDGTTPAIVTAEMWDAVQKALESNRGEETRNETRPDLLRGYVFCGVCGRRMYGESEHGEHRIYRCPSRNTPTGNCGGKRIGAERSEILVWSKITDILRHPETIKLELERRKAEGEDGTTHLLADMESAKKALQNIESELQRLVRRAATADDELWEMFQGQINLKKTERQRLAGLVAETEARIATQNADAISLTALTEYCERVRGNLDNFGFDDKRLALKALNLRVIGNGSEYRLDVSFPISPAAGYSPQSFFS

SEQ ID NO: 554 - protein, 545 aa, unidentified
  source 1..545: note = uncultivated organism
MTVAMYLRLSSEDIDLKSSDKTESESISNQRGLLKEFLRGRPEFAGAEILEFCDDGWSGKNFERPAFLQMMEQVKTGKIHCIVVKDLSRFGRDYLVVGNYISRVFPFLGVRFIAVNDGFDSTRQADIDSLDTSFKTLIYDLYSRELSQKVKSAKRQRAAKGLFLSPFAPYGYRKDPRDKNHLIPDPEAATVVQRIFRLAAKKHAPKEIASILNAEGIPSPMRYKQENDCSRERWPSIHEHNFWTRNTLYAILRDERYLGTAVYGKRERDMVGLVHSVKKTRADWITVEAAHEGIIEPELFQAAQAELKAFSEKDSPAPNANPLRRKVICGCCGYAMQLVKAKAPYYRCCSAELGLPYGCKTEPVSQTDIQDAVLALIRTYAQCAVDLDHLQAEQRQRIRQAQKQAEKALTALQNRRQQLELLLQNLYEQLIDGSTDREAYLAQKQKITAQLQELTEKEAELKAAASASRTDTSPILERYRQYTELDTLTPAIAKELVQRVVVYPDSRLEVQLNCRDELEALLAGAISSDKTMNQETANYTGGGIR

SEQ ID NO: 555 - protein, 574 aa, unidentified
  source 1..574: note = uncultivated organism
MKYAIYSRKSVYTGKGESVENQIGMCKKYIFSKFDGVSESDITVYEDEGFSAQNTNRPRFQQMLKDIKQKKFDYVVCYRLDRISRNVSDFSSLIEDLNDRNISFICIKEEFDTSKPMGKAMMYIASVFAQLERETIAERVRDNMLMLARAGRWLGGTTPTGYTSEKIQEIVIDGKIKTACKLQDNPEELRVIDLMFEKFLEYRTVSGVSKYLIRQNIKSRAGNFYSWLGIKEILQNPVYCIADQDAFSYFTDHNADVCFEGKDCSAEFGLISYNKRDYKKKHAPRQAIDKWIIAIGKHRGRVTGNKWVTVQRILEDNIPDGKKPSKIHNGYSLLSGLIYCEKCGCRIFAKPRGSRLRINKKGGGTITKTSSLYEPSVCGEGGASCAKRANPELFDYICQSKLRGGVELCGCQNINGCLADDMVCEYLISYTNENSDIYRLLEKLKHGLQSQANKDPIEIVNTSIKKRYDEIGNLINTLSQNNFGNAFVQCVSARISELDNEIAQLNEERDRLQKDVNLIADKETQIDMIIAALSNLKDNFKSLSVYDKRSLIKLLVKKIVWDGNDFHIFIDEAQ

SEQ ID NO: 556 - protein, 512 aa, unidentified
  source 1..512: note = uncultivated organism
MANVTVIPAKPRQELQGLGATAKLRVCAYCRVSTDNEEQLSSYEAQVSHYTDYIKRNQEWTYGGIYADEGISGTNTKKRVEFNRMIEDCMAGKIDMVITKSISRFARNTLDTLQYVRQLKEKNIAIFFEKENVNTLDSKGEFLITLLGSLAQEESSNISQITRMGIAYRFQEGKVIVNHNRFLGYTKDEKGDLVIVPEEAEVIRRIFREFMEGKSPYKIATNLQRDGIITGSGGSRWYDSTVSKILKNEKYMGEALLQKTFTVDFLTKKRVKNNGQAAQYYVENSHPPIVSKEEFAAVQIEFERRSSMRGYSKTGKSKFTSDYAFSGKLFCQNCGSKFRRTKWGKGKNQQILWICINHQMGGNEACDMKTVKEKALEQAFLRVMNRLIMSERTGNAAHKCSIEDNDARLAELQQRSMSLVRKTGVDNNEYLVLTAEIESLQEGKKRLKDALVEKVWGDKRIEEIMAYLEAQDSLLDKYDGDSFRRLIEKVKVLSMVEVVFVFKTGIEAREVL

SEQ ID NO: 557 - protein, 502 aa, unidentified
  source 1..502: note = uncultivated organism
MKIATYTRISTDEKHQPYSLDAQSHRLAAYAESQEDWQIVRRFTDQKSGATLERPGLERALCEADAKRFDLLLVYRVDRLARSVRGLAQILERLDTANVLFRSATEPFDTSSSAGRMMVQMLGVFAEFERATIVERIVAGMERKAARGEWTAGRIPYGYQLDDDRRFLTPNSAEAPVIGLIFERYAQQRDGSAAIAHWLTDRGYRTRQGKPFSFKAVLEIPRNRTYLGEIYFRDTYYPGPHPPLVEPLLFQRVQTILGERGEDASQRRSNQSDYLLTGRIRCAHCGKRYLGAAAHGNGGRYSYYVCFSRQRYGRQRCQGDRLPAEQLEAAILDQLVALLHRSDFVRDAIAEALAEGNAERPDRQAEIESAAAEIKSTDAALERYFAAFESGSLPESACGERIAELNRRLTGLRARHHELLLDQQDDPNPEPPTDEDLQALQTHVGDVIRDGDPPARKALLQALVSEIRVVSRAEIYPTFSLPVVRPPTPLVPPTGFEPVLPP

SEQ ID NO: 558 - protein, 509 aa, unidentified
  source 1..509: note = uncultivated organism
MSRLVNRLSAAPSAPLRRVAAYCRVSSDRDEQLRSLENQRSYFARRAAGEPDWELVEIYCEAGVSGTHQATRPELQRLLGDCRRARIDLILVKSISRFARNATECLALVRELNGLGVALIFEKEKLRTDRGEGELLLSILASLAESESRSIALNCRWAVQKRFQNGSFKLSRPPYGYDLKGGQLCINPQEAEIVRHIFSRVVAGDGTPTIARTLNERGVPTKRGGQWQAGTLLAMIKNELFVGDLLMQKTYRDEEYRARPNRGERDRFLIPDHHEALVSRELFAAANKALARRAAKGEETREVEEQPRHCFSGKLFCAACGEPLKRQITHRLDGPHPYWICRRHLKSAASCPGEKVWEEEVENRFATLFNKLLFSYKKLLLPLWEEEQDRRSSDCRLASIDTELEELVRRFSAGELEPSVYHTRRAELLKQSQNLRAEEQLMAASFYTALDDLRRALLFRSPVSRFYPEDFTRFADFITVDSPRKLCFHLACGLDLVEPLASPGEQEGR

SEQ ID NO: 559 - protein, 535 aa, unidentified
  source 1..535: note = uncultivated organism
MRPEKRQKENGNGSAGHQSIRCAIYTRKSTEEGLDQSFNTLDAQRDAAESFINSQHQEGWIALPQKYDDGGYTGANMDRPALKRLLSDVKSGVANCVVVYKVDRLTRSLLDFARIIEVLDTNNATFVSVTQQFNTTSSLGRLTLNILLSFAQFEREMISERTHDKMAAARRRGKWVGGNPVLGYDVAPQGGALVVNQEEAQRVREVFALYLEFGSLIPVVEELDRRGWQMKAWTTREGRKAGGKPIAKNSLYNLLTNMIYIGKVEYGGQVYEGEHERIVEDEVWNKVQTTLSRNGRHGGRNIGNKHGALLKGLVRCATCDVGMIHTYVQKKNRAYRYYVCVKAHQRGWAQCETRCVSAPALESAVLEQIRGITGNPTVLGKVLHQIEDHRQQDASAATKEKTDIEGELKRIAQEMGGVVSMAGKAEFTTNRLVVLQDRVTHLNDRLTELRQQLVAINAEHTDPRDIEAALHEFDPLWGQLSTWEQERFIRTLVEQVRYDGKTGTVTLGFRSHGIKDLCNWAPAITEKYEHAQQRG

SEQ ID NO: 560 - protein, 631 aa, unidentified
  source 1..631: note = uncultivated organism
MPLSAFLYNLIFLWGKIKKYRAKSKGLGAKSKSVGKIKKYRAKSKSTKAKSNCIKDSVYIDEGFSGKNTKRPQFQKMMKDMKERHFDYLVCYKLDRLGRNLADLANLMEDLNRSGTSFISIKEKFDTTTPIGKAMLYFSGVLAQMEREQIAERVKDNMIMLARSGRWLGGNTPLGYSSVKIEKEVSALKKKSMYCLAQNPAEIDIARYIFASFMEYRSITKVLKKLLTNDIKTRQGKEFVVSGIRDILVNPVYCKADMDAYQYFYDLGCQVCIDEEELDGHSGLMGYAKTTSAHYKNQSQPCESWIISKGRHEGIVTGEEFVRVQKLLECNRSKGDSFRNTTNSIALLSGLLYCSCGHSMRPKNYPASRLTEKGERTFSYRCPYKDMTHREKCDTKNVHGNTLDARVCEEIIGLTAPDTGMIPMLEAMLKKIRDTDVEVLSEKDLMQQEYIRKKEEIQKLVASIKNLEADSAAVKYINDEIKRLDDVCKDLQKKINLIQNDEKENGDLTDYVKDWLEKLNHFPQIFDELSVVQKRDFLREIIEKIVWDGEIAHIFIRNPVPDRHRDIFVRLKETVMRSWYPKFPIWNHRIATSAWADYSHEASFRNLQTDVGKGGRFSLEIVIGVGNVLQR

SEQ ID NO: 561 - protein, 646 aa, unidentified
  source 1..646: note = uncultivated organism
MVRRATIMKKQKRNNEDNRGVAIYARKSRITNKGDSIGVQFKQCAEYAKRELRLDENYNFMEYEDKGLSSYYSDHPDFQRMLHDIEMGKIHAVVCYKLDRIGRKTSDLLRLLDFLEKHKVDLLICSNNINTASGVSKIFIQIFAVVAEFERDTLTERITDNMMELAKDGRWLGGNTPTGFTVKRVKTGSGKNKSAYSYLESIPEEKAMIQKLYAVFSETRSIKKTADRMNELGYRTKIGSKFNTSTTRLLLKNPVYCVADEIAYNYFYENGGGVCADLSEFDGQHGLSAYNKTDQEKFEDADSTFISPKFVQLMSAKPVSKWIISVGRREVFIPSQQWIDTQNMLDSIAEKYNRPHRKTNALLAGLVYCPHCGKRLRVISESNRWTNGKPRFKYVCPGYRAGECTFRAVDGVLLDEFVVKQLSDLSDEGSEYFVKLLNQKASDIFKNTQNEQELIELKKKKVQLEAAVSNKVKNLREAGENLKRFIQEDVKGLTDELSGTEKLLQKLEDSRQSQMYAVRYIEEIKERLLSFEKYAKDAQPDVLVLVTLIQSFVERIYIVDKNDERYCHIFIKGCTKEDYDDFFRATGYISGTRETGAITSKLPLCDSDECSKCKKTTHTTTVADIFLYIRHCLYFKFYNRPFSPSS

SEQ ID NO: 562 - protein, 526 aa, unidentified
  source 1..526: note = uncultivated organism
MIASNEKTKPVRCAIYTRKSHEEGLEQEFNSLDAQRESCEAYIASQKHEGWKALATRYDDGGFTGGNMERPGLKALLADIEAGGVDVVMVYKVDRLSRSLMDFSKLVALFEKHNVAFVSVTQRFDTTSSMGRLTLNILLSFAQFERELCGERIRDKIASAKRKGKYVGGRPLLGYDVDHKRMRLLVNEAEAKLVRHIFDRFCRLGSCMLVARELNEQGHRMKAWVTKKSKPMGGGMWKKTDVHHLLTNRRYLGEVMYKGESYDGEHEAIVDRKVWDRVQRILSENRAARANQTRSKTSAVLKGLIRCECCDAAMAPTYTTRRGKRYHYYVCHAAAKKGYDTCEVRSVPGGQIEQAVFTYLREIFADPAMVARTFRATRAQAAGQRRALTRQKTALDKRLAELRKGIGRLVRAAGDKDDGPLADELQKLNDEYTDVEARVQQIEAQLDQQEEVPTERDVADALRTVEPLWAELFPAEKKRIVRLLVETVGVRPDGLTIRLRPTGLVTLAAEVAPQESEEPQPQEATV

SEQ ID NO: 563 - protein, 558 aa, unidentified
  source 1..558: note = uncultivated organism
MARLSKYEQNAVAAPQAEIWNAGLYIRLSREDGDKLESESVSSQRAITEQFVSSHYGIKIYDYYIDDGWSGTDFERPDFKRMFDDITAKRINCVIVKDLSRFGRNYVESGKYLEVVFPMLKVRFIAVNDMIDSIENPSSMNTMMVPIKNIMNDEYCRDISTKVRSSLDIRRRQGKFIGSFAAYGYKKDEGNHNKLVIDEEAAAVVRQIYDMFISGYSMIGIARLLNEQGVLNPSEYKKRKGLNYKHSHKAQDCRLWCDTTVRRILTNELYIGNLIQKKNEVVSYKVHVCKSVDKDKYIRVENTHEPIISEEDFYKVQSLLLRDTRVSPKASRLSVFAGFLKCADCGRAMQKKTITQPYKKYDYYVCSTFRKLDRNKCTKHAIRSDILEETVLSVINKYIQIAVDFDKMISDINKRKSRDNRSAMLLSAIDGKKAEIDTAKKLLLDIYPDYKAGILSLENYLALKEKYENQVQKAEQSIAELQTQIERQAHGIDESNEFIMRFKKHKGLTELSREVLVELVENIYIHESGAIEIHLKCRNEFLLATEYIYENTGLKESV

SEQ ID NO: 564 - protein, 518 aa, unidentified
  source 1..518: note = uncultivated organism
MNTAPEVKKIILGSVSNIQKQEKPRLRVAAYCRVSTDMEEQQTSFEGQVNTYTEMIRTKPGWTLAGIYADPGISGTSVKKRPEFQRMLSDCENGKIDLIITKSISRFARNTLECLTYVRHLQSIGVDLIFESNHIDTRTTYSEMLLTVLAAFAQEESRSISENTKWGIRKRFENGTIRWCKIYGYTKEGDTSYLIVPKEAAVIQKIFTLYEEGSTLLEISKYLESQNIPSPSGCPVWSASAIMRLLKNEKYMGDILLQKFITKDHIGRKSIRNDCTEVPAYYIENHHAPIVSRKTFERVQKILELRSQGSCTGRKESKCIQYPFGTMLKCPHCGSTLYQRTLKLQVSGSGKGWCCEVGENACKNFIIRSEIVEKAVLQAYGQIREEGSPIYNRVDYYWVDEWIDHIEFGAHRMQPANYREMCTERTVNYREIPIERTANHQENSEKEEVDSKDRVITVFWKSGQKTTVFSGIERERDMPSYLAGLYHIYLNQNEAYRKKAEAQTIYENHESTKKTRPS

SEQ ID NO: 565 - protein, 557 aa, unidentified
  source 1..557: note = uncultivated organism
MSKEEKRKRVAIYCRVSTTEQAEEGYSIGEQERLIREYCTKQGYEVYKVFSDAGISGKDIVHRPAIQELLKDATEKKFDMVMSWKINRLSRKLEDAIKIVNILDRYGFSYQSYSERFESDTPAGKMQFQMMALVGEFERNTIAQNVKMGMKAKARAGEWCGGIAPLGYRWVSMEGTEHSVRKKSRLEIDEKEAETVQLIFELYASGKGYKAIVNQINQMGCKTKRGNAFSVAQLRTILTNPVYIGKVRFNVRRDWNEKRRNNINPDPIIVDGIHKAIIEEEQWNQVQFLISQKSGKPSRIYDGEYPLTGIMKCPECGAGMVISRVINKKADGSKRKLTYYACGNWKNKGIAVCHSNMIRVEKANSVVYQRIEELLNNDRVFHEVFSRVNREHNILKKNACMEQNLQEKERKKLENRMSRNHEAYEDGLITREEFLTRKNQLEQQMEQVRERTNESRLILLEEERREMPKEAVRAILQNFSLALSGDIEHTIRKRLLHLLIKEITIDRDRNIDSIKIRLSDDLIRFLQNNGGTPPDGAPSVFMFREFGMRSLELELVI

SEQ ID NO: 566 - protein, 564 aa, unidentified
  source 1..564: note = uncultivated organism
MDIFQDSTQKRRVAIYKRVSTTEQKIDGYSLESQDKKLKAYVRDNKGLNFTTRSEWCFEDVHTGGDLSRPALNRLRELVKEKKIDAILVWKIDRLSRSLKHLLGLFEEFESHDVSFISIQENIDFKGPIGRLVFQIFGAIAQFERSLIKGRTHMGKVASAEMGNYTGSSVPYGYRPIKNPGGRGKKLEVVAEEKKWVKEIFDWYIYEGMGYGAITRKLNKLGVPKGAYSAARRKTSKWVEKNVRTILHNPIYYGIHISNRKDEEGKLLEEKDWTIVGFPPCVSEIAYLQAQSVGKGRTGGRRKFEYLLSGKLWDVMFDRPRSFSGAQRTKGGFSYRRKQFKDKEGTHHPVFEFPGKQLDAFVWGKIMEALNDPEIFVKKYLSEQYCEPKKIEKIESHLSSLRQKKANLELALDRVEEAYERGAYDEDKLNQKTIEKTQAITDCELQIQELQDELSFIGSIDLEVAKLKEASEKVKYRLGSLDLKQKKIIVSLFVDHIEMSRIPKECRKDGRVKNWNISAEVSFRFNPNKFKASSIGDRTVKSHMKAKKEASIPQIHSSGAGGQD

SEQ ID NO: 567 - protein, 525 aa, unidentified
  source 1..525: note = uncultivated organism
MSVSVAIYVRLSDEDRVKKNKTDESESIQNQKSMLISYCEERCWDIYDIYVDEDYSGTDRNRPAFNRMLKDCEDGKINIVLCKDLSRFSRDIVTVETYINDKFIEWGVRFIGAADNSDSDNEMYDMMRIMQGGFNEWYVKDISNKIRKTLKHKREQGQFTGSFAPYGYIVDPDDKNHLLVDANVSQNVVKVFEMYAQGYGYRKIVLTLNEMGIPSPTAYKEQCKSRFHNHNVQNSSSKGLWTVSTIYTMLRNEVYTGTLVQGKSHFVSYKNKKKKKVAKEDWIRVTNTHEAIIERELWETVQQRLESRLRVSKVTTELSVLGGKVRCSCCGKPMKRCVYYNKDKTKQYYSLVCATYKVGAMNCSNTKAMRGSELEGIVVEQLNALIEAYCKADDIVIRDKHKERIEAAKRTINTLEAKQRETETKLTRLYEDRLSGIIDIDQYKLFSDRFTAEINDIKAKITAANEQLKQAENEKSIQENADALIARYTHIDSLTREIVDSFIDTIHIGEYIEGQLREIAIDWKI

SEQ ID NO: 568 - protein, 524 aa, unidentified
  source 1..524: note = uncultivated organism
MWPSLFRGTIAVAASMTKPVRCAIYTRKSTEHGLELEFNSLDAQRDACEAYIKSQASQGWKALPQHYDDPAYSGGNLDRPALQQLLKDIDAGRIDVIVVYKIDRLTRSLADFAKLVEAFDAKSISFVAVTQQFNTTTSMGRLTLNVLLSFAQFERELSSERVRDKVAASRRKGKWTGGTVPLGYDAKDKKLVINKAEAETVRYIFKRYLELQSFGKLVEDLDAKGIITKRRNTKVKKFNGGIPFTYGPLAYLLKNRIYVGDTGHKEKWFPGEHAAIVDRKIFDQVQQLLASQPADRKARRTASEALLMGKLYDDRGNRMSPSFSAKNGVHYRFYVSSALLRGRKADVGSVGRVPAAEIESAVLAALKTHQQQGQSDSAPASIGGVERVVIARDHLLITTAGTTDGDGANQEFRIAWSTKAKDAAAAMEDNGVPEVARNESLIQSIVRAHAWVDGLRDGAYESIEQLAEANRLHPKVVRQALRLAFLSPDITSAILEGRQPAGLSLAQIPKLLPLPWTAHESLFG

SEQ ID NO: 569 - protein, 530 aa, unidentified
  source 1..530: note = uncultivated organism
MKPSLAAPARTGVNGRRVRRRIQAEAAATVRVAIYTRKSVEAGAEERFTSLEAQRAAVEAYVTSQAANGWTALPTRYDDNGFTGAHTDRPAFQKLLADIEAGLVDAVGVYRLDRLSRSTLDTLNLLQHFAERGITVVSVTEQFSTATPAGNLMVTIISSLNQYERETIAERTRDKMLASRKQGMWTGGQPVLGYDAVDKRLVINREEAETVREIFQLYLELGSTRKVAKELRDRGVINKRWKTQGGAMRGGKPFQLSTLLRVLANPLYVGRVRAGDDVVDGQHEAILDEEVWQAAQDRMAGNRQAEPSSFRNRHEALLKGILRCGQCGRAMTHVHTKKGDRRYAYYRCQTSQKVGAAACPGARVAARHVEGFVVDRVRAIGRDPELLEQVVAEAGRQAKAKKARAASEARRWDAERERLEGEVAGLLQVAAGGGAAARAAERRIAEIETAAADATQRADAARAEIAATEGLAADRARLKAALASWDEVWAEVDHRERVRLLRLVLEEVVYDAAAGEVELAFRPGGLGVDG

SEQ ID NO: 570 - protein, 517 aa, unidentified
  source 1..517: note = uncultivated organism
MPAAALYARVSTRNQEKEATIESQLALVEAYAQTQGYTIEERHRFIDEAVSGSRLARPGLDRLRDAAKAQAFAVVLCLEPARLARNLGVQQVVLEELKRWGISVIFVDQPEMAKDAHSQFWLQLRGAVAEYERTLISDRMRRGRLHRLREGQTVPTQAPYGYVYVAASREQANHWQIVEAEAEIVRQLFVWYATGDQSLGDLARRLNAQGVRSPEEAAWQAPTLGRLLRQPAYKGSAYYNRQQSDPTAIGLPRQIGRGHLSHPRYQERPADEWIHCPVPPLITEALWSQVQEQLTMQQRFAQRNSQRPYLLRSLLVCHICGHTLQGRSQTNGHPRYVCPYGGKHCPPGVPTHRTSVRADVVEPLVWTALRHLLDHPQPITDAWQRLHQTPARDLSDQRFWQNRLAALAKERERLLDAFQAGLLPLDELTRRSNPLTEERRILEARLANVAQPVPWQLSLPLFTQRIQRAFDASDFATRQDVIRLLIERIIVSDDALTIEHIVPLHDTSRLDLTCRDS

SEQ ID NO: 571 - protein, 645 aa, unidentified
  source 1..645: note = uncultivated organism
MKNTSNVIAIYSRKSKFTGKGESIGNQVELCREYIRTHYGDEAAENAVVFEDEGFSGGNINRPAFKKMMAHIERGEFKALVVYRLDRVSRNVSDFSSLIENLNRRDIVFVSIREQFDTATPMGRAMMYIASVFAQLERETIAERIRDNMHELAKTGRWLGGNTPTGYCSESVKSVTVDGKTKKACKLKLIPEEAETVKLIFDLFIKTGSLTLTEAELIKQRIMTKNGNHFTRFSIKSILQNPVYMIADEEAYEFFKLKDADLFSSIEEFDGVHGILAYNRTDQEKGKATVFNPVSDWIVSVGRHQGIIPGKVWIGVQDNLEKNKSKSFRRPRKNEALLTGLLFCSCGSRMYPKLSKRKTADGDIIYTYVCKMKERSKKELCNKRNANGNTLDLAVIEKIKQLSSEKSDFVKQLEKSKIFYTGNREQYEEKLGAMKKEKADLEKKVSSLIDTLAELEENSAKKSIVARINEMNAEIDKISQSIDEMISLTAEHAFSDIEFDVLRQMLSVFGNTIDDMSYEQKRAAIQSIVRRVIWDGENAHVILFGSEDGDIEFPDITPYIKHIEIDTDDDEELIKFSDVDYGEDFRSDTKTDLGEDSKRDTYVFQRSQKNGAGRLYQRPYRHRQGRQHADADRRSDRRHQHSGRS

SEQ ID NO: 572 - protein, 540 aa, unidentified
  source 1..540: note = uncultivated organism
MAERSKLRCAVYTRKSTEEGLEQAFNSLDAQREACVAYIESQRHEGWSLIPEYYDDGGYSGGSMDRPALRQLMADVAAGKVDTIVVYKVDRLTRSLADFAKIVEVLDKAGASFVSVTQAFNTTTSMGRLTLNVLLSFAQFEREVTGERIRDKVAASKAKGMWMGGQVPLGYDLQDRKLVINDAEAAIVRRIFTRYCELRSIGDLVAELARDGVKTKLRPYKDGRTVGGIAFTKGPLAYLLQNRTYAGEVSHKGKVYLGEHDALIDLALWEQAQAILAGNRVERRLGSKGRAPSLLTSLLSDDYGRPMMATVTIKEARRYRYYVTRDAARGTRGVEGRLRLPAGAIEALVTSQMADWLEAVTPTEEMDPLVAELTVSKAHQHAHMLRNGTQREQRTVLLELEAHVRAHADRVTITFTTDYLPQSVLLDVPAKLVDRGSDLRLAIGPDGTDVHAAVDPVMLKLVALGAAARQHLVTGKPDSLVDTYSQQHLTRLARLGYLAPDIVTAIVEGRQPPSLTGRGLLRCANLPIEWAQQRRVLGFI

SEQ ID NO: 573 - protein, 557 aa, unidentified
  source 1..557: note = uncultivated organism
MTKKSSKKVYRASIYLRLSKEDGDVTTGSKNESNSISNQKSLIMDYLKDKHDIQVVSIREDDGYSGVNFDRPGFQLMLEDVKKDVIDCIIVKDLSRFGRNYIEVGRYLEKLFPLLGVRFIAVNDNYDSLDVDTAHDIVMPFKNLINDSYCRDLSVKIRSHLAIKRKNGEFIGAFACYGYLKDPESKNRLIIDTYAGSVVQDIFRMKINGFSQYRIADILNEQGILSPMEYKRSIGERFETSFKVNTKALWSAKAVSRILTNEIYTGVLTQGKQTTPNHKIKVRQAVEEKDWIRIENAHAPLIDSCLFEIVQALMERDTRTSPKADSVFPLSGLIYCGDCGQPMVRKTTTYSLKGVGDLPAQKYSYFVCQGRSSDKACSWHRIKEKELMDAVFQAVNIHIKNVLDTEQALKAIDTAPSIQFLIHRYEEHIAKKQDELAKAEKLKISIYEDLKDGLLDRQEYMKLKQEFEQRIQSALQSIQSLKQEILALNENHSEYYAWMDYFKEFGELQELTRWAAAITINRILVYEDNRIKIIFNFEDAFAQAQELLKGIGKERKA

SEQ ID NO: 574 - protein, 509 aa, unidentified
  source 1..509: note = uncultivated organism
MKAIYARQSLDKKDSLSIEGQISECKMFLGVNEEYKEYQDKGFSGKNTERPALKELMNDIESGKIDTVIVYKVDRFSRNIIDFFEMYKVLEKYNCRFVSKSETFDTSTAMGEAMLTILIAFAQMERKNIQQRVKDNYYYRTATTGSWAGGPAPFGFKNGRTNTNVPTLVVEPAEMEIVKLIFHLFHEEINMSLGKVAKYLSDNGYKSRRTNGAWDSSTISKILQNPIYVQADKKLHLYFKMKGIKFLNEEENWNGLTSCHIVGKRVGNANIRSYADLKEQSVYLTNFPPVIESRIYIDIMNRLANNEQITSSNKAGVLQELGGKLKCSCGYAIKSYSKSTNGRPYLDCYGNRSLHICNHKFANFNFYEIQETVAVEIQKQLDGINDILKQKEEIIKNKLHEIDNLNKRLSALFEMSSTSELLAQATIKEIEKIQYQINELELELKMNNDIGDPLVIDHFMPTEPNRVKKTPRLYYPVLTTEEKKYVVNQFIDKIILNEETSEIEIIWKI

SEQ ID NO: 575 - protein, 550 aa, unidentified
  source 1..550: note = uncultivated organism
MKRKIAIYARVSTEHEAQLSALENQVQYYDGILKQHPDWILYDRYIDEGISGTSTKKRKNFIRMLEDAKEGRFDLIVTREVSRFARNTVDTLQETRKLKKIGVEVYFTEDNIWTFNDEDGELKLTIMATLAQNESKKTSQRVKTGQMISFQNGVFYGTGNILGYDKVDKNLVVNEEQAEIVKFIYSEYLNGKGTVVIANELTRREAKTSTGLTNWSPSYISRVLRNPFYSGTIVYRKSYIPDYLEQKPKMNYGEVEQVIVEGKHEPLVSKEEFKKVQQIMDSHSKPIKLGRRQANGVAKNIWSKKLVCECGSNFNRKIYHKNKYNTTYCYVCYNKKIHPKNRFKESCEVKEVQEWKLQYMAEAIFRNLTQDINNRKELYDRLIRGIDMEEHPEKKIKQRISELKQLVENETAKLDKLIDSYLDQTIDLTVYDIFQRKLSSKIEKYKIEISELEKKYESIEPLDVRVEKAKASIRKLLDINYNGVDEKIIEEFVEKIIVHKDYFEWKLNFMNDTIKLEISGKSKSDCFLVEHKEWWKVNKCVKIVVGGNYG

SEQ ID NO: 576 - protein, 545 aa, unidentified
  source 1..545: note = uncultivated organism
MKIAIYSRKSKYTGKGDSIGNQIQMCKDYIETHYRDKDHEFVIYEDEGFSGGNINRPKFQALLSDIKKEKFDILICYRLDRISRNVSDFSATLEELQSYGVDFISIKEQFDTTTPMGRAMIYIASVFAQLERETIAERVKDNMVELAKSGKWSGGTPPLGYKSESETYIDENGKERTAVRLTINDDEVPLVNHIFDTYLKEGSLYKTEAALAVEKLTSKNGIRFQMATIKIILENPIYAISTQEVKQWLEDNSWNVYGDPDGIHSYISYNKTKVVQRKGKTTKVRGNIEDRIASISNFKGIIEASKWIQVQQQLKGNKKLFPKKGKTHDARLVGKIFCEKCGRYMSIYHGRILPETQKRQLYYVCSYKKLTKSQLCNSKNVKVDELEDLVLYKLEEIGKNKKDFIAKLKKKNESAKKKNSAKEKQRLLEKDITTKETILNNLIDKLAMSSDIEDLLIERIKSTKLEIQELQNELDELNKELGKTDYTNINLEIIESLIDKCANIRNMELNEQILLIGLLIDKVYWNSDTKNITVHFIGSEFNKKK

SEQ ID NO: 577 - protein, 525 aa, unidentified
  source 1..525: note = uncultivated organism
MSNSMNAVIYARYSSHSQNERSIDGQLQDCYAYAERCGYKVIDEYIDKALTGTNDARPGFQKMITDAKKKQFQYVLVYKLDRFARNRYDSAIYKSQLKKYGIRIVSAMEQLSDSPESIILESVLEGMAEYYSANLSQNVKRGQRVALQNKTFTGGRPPYGYKINNKVPELDGKTAPVARWIFEQYADGVTRKEIIQSLNAKGIKSHTGASFTVNSLQHMLSNKKYIGIHVYGNEEIEGIWPPIIDVELFERVQKRIVHARRAPAAVKAKVRYSLQGKLFCGHCGANMVGDSGKNRHGTVYNYYACNSRKKKLKDCDKKREKKDFIEWYVVEQTLQYILAPERIKYVAERVVKAYNDEFDDRKIKEVEKRIKQINIEIDKTVQSAINTTLDKLREKIEEQAEKLFAEKEDLEISLSKLKIANKVQLTKEDVLKWLKSFCNGDLLDEEFRQKIIDTFINAVYLFDDKVVLYYNIKDSKQVAYIDMLEDLEESPEENKKEEHSSECSSNVRILNPLAEREGFEPSERY

SEQ ID NO: 578 - protein, 534 aa, unidentified
  source 1..534: note = uncultivated organism
MADDLIPAHISGRKLTVLHDPKETISQEFISIGGYIRVSTPKEAQASSIEYQKDILKQWAEVEKYNLVKVYTDIKSGEYKYLRNELNEMLNDVKNGKIKGVVAKEISRTSRDVMDILELKREISSYGGFFISIKESYDSRTDDDEFLLILHAALAQKERKQTAGRVKLTQMMKAKEGKTNSANPAYGYMLSEDGQHYVKNPETYPTLRFIVEKYIDGWGQQKLAKHLNNEGIPGPRGKRWHTNSIKTIISNPVYLGITMYNVTTTVRTADGKRKLVVRPREEWVVRENTHEPLITQEEWDKIQQIAEQRRKKYEHEWSCEKKYLGSAILRCAECGGKIYGTRMDKKKRGVKQEGYYYRYFCNGKNGKCPPPMKSWRMEEVDKAIVNLVKKLFGNKERLMNSIKKQLSFHETKNEKILNKRTNIAEEIEQINKAIKKQQIAYEADVINLKEYKERLSELRSEKQHYSEILMELDNELTSIDSVVERFNRMFNYIKEKIDCFESMPLKEQAFFIESVFEKIYLTADYKIEKVEFRV

SEQ ID NO: 579 - protein, 505 aa, unidentified
  source 1..505: note = uncultivated organism
MKAVIYARYSSDNQREESIEGQLRECMEYANYNDIQVMGNYIDRALSAKTDNRPEFQRMIKDSYKHAFDCIIVWKLDRFARNRYDSAHYKSLLKKNGVRVISAKETISEGSEGILLESVLEGMAEFYSAELAEKVTRGMKENALKGLWNGGNVPFGYVINKERKLDIDPKAAPIVAEIFKLSNDGKTVKEIYNIMSERKVARSNGKELRYNAIRYMLSNRVYIGEYRHMDVVIKDSVPPIVSEELFNAVQIELAKNAHAPARHTAEEDYLLTTKLFCGRCGAMMVAQAGTSGTKGVVYRYYACVRQKKHICEKKPINKVKLENFIVYKTMEFLKQDSVIEKLSAKLYELQYNESTLLPKLQEQLRQKEKEIENIVNAVQKGYATEILLKKLGELEKERNEINDAIAKEQLTAPIFSQDHFKMALNNFRKIDISKQDGKRKIIDTFINAIYMFDDHIKIVYNGNGKEEIVSLEELESSTLFSDGAPEQAKRSFLRSFSPFFCDFLR

SEQ ID NO: 580 - protein, 529 aa, unidentified
  source 1..529: note = uncultivated organism
METAKSVTVIPATKGRFAAPQNTAPKKRRVAGYARVSTDSEEQLTSYKAQVDYYTKYIQERSDWVLIEVYTDEGISAVNTKRREGFNRMVRDALAGKIDLIVTKSVSRFARNTVDSLTTVRKLKEKGVEVYFQKENIWTLDSKGELLITIMSSLAQEESRSISENVTWSQRKRFADGKVSLPYKSFLGYRKGADGLPEVVPEEADTVRFIYRLFMQGMTPNAIARRLTESGVPTPAGKDVWQFSTVESILTNEKYKGSALLQKKYTVDFLSKRMKPNEGEVPQYYVENSHPPIIQPEEWDAVQAELRRRKCMGKHHNCLSPFSAKLVCADCGEFFGSKTWHSTDQYRRTVWQCNAKFKGESKCTTPHLYEAGIQSAFLQALSKLYVDREPILADCRTMQTLLTDCTQIDAEAEELRCEMEVVTGLIQRLIEDNASQPLDQAEYRKRYDAYAERFERMQKRYDALLAEREARHNKADVIGGFMFELRELDVLPFAFDGKLWRSLVDHVTVHADGRMVFRFKNGVEIEKNA

SEQ ID NO: 581 - protein, 532 aa, unidentified
  source 1..532: note = uncultivated organism
MLSIAIYSRKSIFTGRGESIENQIELCKNYCNSYISDTHTLKYTIYEDEGFSGKNTNRPEFQRMINDIKNNKINILICYRLDRISRNVSDFSTTLELLQKYNVSFISIKERFDTSTPLGRAMIYISSVFAQLERETIAERIRDNMIQLAKSGRWLGGNIPYGFNTEKKIYLTEDFKEKSLSILTPNENELKVVKLIYSSYMNKHSIREVERMLNVNSITGKLGGHIDTTAIRRMLRNPIYVMSDKSSHQYLLNTGINVYGEPNGNGYITYNKNKHYYSSSNNSECIAAVSNHKGIISSSEWLQIQYQLNINKTKLPRSGTGKNHALLAGILKCKKCGSNMVVKFSGKDKNNKPYEYYVCSGKQNKYITKCSTENVRVNLLDKKVLNVLDGYNKEILLSTLRKSLNDTNKTFDNNQVSNIKEKIAENELSINTLIKQLSKSNSHSVSNRIMNEINILDKNIQDLNKQLAFFTSKESSYCERPIDIKHLITSLTNLGTTIANIDDTSQKRFLIQTIIKSAIWDSENNNVKIILY

SEQ ID NO: 582 - protein, 517 aa, unidentified
  source 1..517: note = uncultivated organism
MKVAIYCRLSEEDRNKQFETDDSNSIQNQKAMLLQYAMEQGWELYNIYSDDDYTGADRRRPEFNRLLKDAEQHRFDIILCKTQSRFTRELELVEKYIHGLFPIWGIRFISIVDNADTANKGNKKSRQINGLVNEWYLEDMSENIRSVLTNRRKNGFHIGAFALYGYKKDPDQKGHLLIDEEAAVVVREVFTLFSQGYGKTAIARMLNDRGIPNPTEYKRLHGLRYKQPKMKNSTLWKYSAISDMLINEIYIGNMVQGKYGSVSYKTKQNKPRPKSEWYIVEGTHEPIIDRELWDKVQALIAQRAKPFIIGKIGIFAKKARCANCGYTMRSSKNRNKYYLQCSNRHVAKDSCIGSFISVAKLESMVIGEINKLAAEYLDKDELEQNLEFCNNLQGQRKRLLTDIAVYKKKVAEFSKGIRDLYMDKVKGLISESDYVEISKEFRTERNRLECVIAGEEKQLAEIEEKIAAGDDRRQIIEQYSNLEHLTREIVEILIDYVSVGKRIPGTKDVPIEIHWNF

SEQ ID NO: 583 - protein, 534 aa, unidentified
  source 1..534: note = uncultivated organism
MKTTKPQIRRCAVYTRKSSEEGLEQDFNSLHAQREACEAFIRSQKSEGWKLVEAPYDDGGISGGTMERPALQRLLADIAMKKIDVVVVYKVDRLTRSLADFAKMVEVFDAHGVSFVAVTQQFNTTSSMGRLTLNILLSFAQFEREVTGERIRDKIAASKRKGMWMGGNVPLGYDVTERKLVVNEPEAETVRTIFRRYLDLGCVRRLKEELDRDGIRSKAGQSFARGALYALLANPLYVGEIRHKELRHPGQHEAIVDRALWDEVQQRLADNGPDREGRPGKVEASPLAGKLYDEAGARLCPSHAVKNSRRYRYYVSQPLVTGIAGQQQGWRLPAHDIERVVTDAVRAFLADRAATSTAAREAGIEAERIPAVLDGIAQWEGEPVDLVRRVDLGPDGPLLTLALDIPAGEPGLTVTRQVPMTIKRRGVEMRLVIDGAGAASPKADPALMKAVARARGWFDDLVTGRATSITAIARRDGINDSYVSHLLPLAFLAPDIVELIAAGRHPVDLTAETLVRRIDLPLGWNEQKVLLDIA

SEQ ID NO: 584 - protein, 514 aa, unidentified
  source 1..514: note = uncultivated organism
MASSPHKTFRCAIYTRKSTEHGLELEFNSLDAQREACEAYIKSQASLGWKVLAQPYDDPAFSGGNLDRPALKKLLKDIDAGKVDVVVVYKIDRLTRSLADFAKLVEAFDARSISFVAVTQQFNTTTSMGRLTLNVLLSFAQFERELSSERVRDKIAASRAKGKWTGGGVPLGYDVKDKKLVPNPKERETVNLIFRSYLELGSFQKLVDELDRRNILSKKRATIKRPDGGGVPFTYGPLAYLLKNRIYIGEMGHKDKWYAGEHEPIVDRKLFDRVQQQLGDNAVERKARRSESGALLMGRLFDERGNVMSPSFSSKNGVRYKFYVSSALLRGRKLEAGSIARVSATDIELVVVNALCERLKIDKAVLDADVIGTYVARAELSSGAVQITTTPPARIRSNHFTVPWQPRPTGSASIVEVNGTRQPDPKLAQAVVRAHAWLRDLQKCKFDTVEALAASANLHPKAVRQELRYAFLAPGIIEAILNGDHPATLALARIPKTLPLAWSEQCRALGFRST

SEQ ID NO: 585 - protein, 550 aa, unidentified
  source 1..550: note = uncultivated organism
MAQDEIKPQTPTRLRCAIYTRKSSDEGLDQSFNSLDAQYEACEAYIASQRQEGWIKVKTRYDDGGISGGTLDRPALQALLEEVDAGRVDMIVVYKIDRLTRSLADFAKLVERLEAKTCSFVSVTQAFNTSSSMGRLTLNVLLSFAQFEREVTAERIRDKIAASKAKGIWMGGPVPLGYQSYRNGTERGLSIAPEEVNVIRAVFDTYEASRGVYQTVAALRVRGIRGRSAPLNRGQIHNILKNPIYIGQIRHKDARYPGRHEAIISTEQFDRVQALLSKRSGAGPERRPNSPARAPFKGKLQDATGDRLTPTWTKKRSGQMYHYYISSRSLRGDSDADCLRISAKALEATCKAAILQHLRTWLETDLLQTESRAEDLEHWQSRITDLAQAFDGGAQSLLSKLITSGKVSPTLLQLTLDETTLSDILGCPAPTTLLSLSRPIRLRKHWKEAKVFLAETCPDPDQPLIKALHKAHLWVQALKDGTSVRSVAKSHELTDSDLRKRIYLAFLSPDLQKAILEGRFPEYISLTSLTCQKLPLSWDAQHALLRFPNP

SEQ ID NO: 586 - protein, 507 aa, unidentified
  source 1..507: note = uncultivated organism
MRAVIYSRYSAGPEQTVQSIEGQLRVCKNYIASHGWEFVRYYADEHISGRTDKRPQFQEMISAAERGEFDVLVVYSTDRFSRNKFDSINYKKKLKDLGIRIAYAAENIPDGPEGILLESLMEGWAEYYSEELSRKVKRGMQETARKGKSNGGRRTFGYRTDAEGNLVIDEEEARAVREVFKIVADGQMIKTAVEWLHDNGYVSTIGKPHTHNSVKKMLTNKRYLGIYTWDQVEIEGGCPAIIDRTTFNEVQQRFEENKRVMPKNRIKFLLSGKLYCGKCGKPMSGCSGTSKTGAVYAYYRCRGKDIKNIPKEALEDAVASQASAFFSSPSEMDQLVDMLYYYLARKNAPEEKYGTPKMRISELKRQKDNLVTIIAQTGNASLVSKLSEVEAELTRLEELQEQEKKRKKTFTKEELRLSLEAFLDRVDRLDPETSDHRIIDALVKEVWVYEDRLEIIFNIQIGPDDPGQQKSLTIDSSSSLIYGGAKRSLGELLIFAGGYFGIKAKRP

SEQ ID NO: 587 - protein, 560 aa, unidentified
  source 1..560: note = uncultivated organism
MQDAMQLYRVAIYLRLSKDDGDISFSETRKSESNSIHNQRELLMSFLKQHPEMELYDEYKDDGWTGTNFDRPDFLRMMDDVRAGKVNCILVKDLSRFGRDYIECGKYIEKIFPQLGIRFIALNDGYDTKSSSSTDSIVIPFKNLINDSYSRDISIKVRSNLEVKRRQGEFISNFAVYGYQKDKENKNHLVIDDYAAGIVHDIFKWAIEGLSPGSIASRLDQLGVLSPMEYKKSQGSKYKSRFKTSAQAKWSHVAVRRILQNEVYTGTLVQGKRTTPNHKTKKFIYKDQDDWVRVEGTHEAIISRPQFDLVQQLLQEDTRASTEKSAVHPYCGRIFCGDCGAPAVRKTAVSGGRRYVYYVCGANKADSHICSKHSIREEALNSAVLVTIQRQIEVALDMDRALSQIEELTWEKSELRKIDANIEVQNQLIQKNNELRLGIYEDLQSGILSRDEFMTLKEEFSARIAAAKLVIEQLNSSRSEIQHGLSKQQSWLSQFREYENVTAITRPLIVSLVERINLYENSEIEVIFRQRDQFTHIMDFLKNERTISEKIQVFPKREVG

SEQ ID NO: 588 - protein, 563 aa, unidentified
  source 1..563: note = uncultivated organism
MSGQRIRCAIYTRKSSEEGLEQSFNSLEAQHEACRAFILSQQHEGWTVLNDRYDDGGFSGGSMNRPALEQLLRDVKDQKVDAVVVYKVDRLTRSLLDFAKIIEILDSARVSFVSVTQQFNTTSSMGRLTLNVLLSFAQFEREITGERIRDKIAASKKKGMWMGGVVPLGYDCLDHRLIINRAEAAKVRMIFRQYLRLGCVQKLKRYLDGRQIRSKVRTNAAGKIYGGASFSRGALYQLLSNRTYTGKITHRQLAYPGQHPAIVSSKLWDQVAQRLKANNQAQRTGKSQSTASLLSGILFDTSGIRLTPTHSLKDGKRYRYYTSQSVIHGSETKPQISRFPAQELEHFVRSQIHRLLQTPAKCTAGLVHGPESELIQERAQVLAGKWMKLEIAKQDEFLRKILRRVVVSSTAVAIEVEKSNLFAPLLGRAPGSPSHSGAVMKLTGKFQVQRRAGALQILSPDQSPGETTASVPVAKAVIQARDWYEHILSGEARTIKELAKKSGFSPSYVKRLFRCASLSPKVSHALLTGRHRNLTLKTLLRRVPLDWREQEKTILQTRSVSSE

SEQ ID NO: 589 - protein, 506 aa, unidentified
  source 1..506: note = uncultivated organism
MSKRAQPPPPEVKRCAIYTRKSTTMGLEQEFNSLDAQREACLSYIRQQGWTLVDERYDDGGFTGKNIERPAFQRLLADIDARKVDVVVVYKVDRLSRSLLDFAKVMERLNAAGASFVSVTQNFSTADAMGRLTLNMLMSFAEFEREMIAERTRDKIAASRRKGKWTGGYTPFGYDKADKKLVINEAEAHIVREAFSTYIEVRRMTSVAELLNARKLYGRGTKKKPGNVGWTKVGITKLLRNPIYAGLISYGLERHPGEHKAIIDLATWELAERIGKERATSPMLRGLNDAFLLRGLLFCGVCSGHMTPASTRARKVEHRYYRCSTRDKEGRKSCSVTALPAKAIEAYVVERIGTAVRERGLVEEVRNKVEGRLRARAEEIARVQQSLPKEITQQTARIGELVATMGTGDGKARELAQAAFQSESAKLAALEQRQRELARDHQSLAGSQVELEWVASTLSKFSAVWGELSNANRARLLQALLKSVRVDQVSGEVEMEFYSPVAQEAA

SEQ ID NO: 590 - protein, 500 aa, unidentified
  source 1..500: note = uncultivated organism
MYLRKSRMDTDFEEVSVTETLSRHRTILENLCKNMKLNVVEVLEEVVSGESLYTRPQMMRLLDMINTGMYAGVVCMDIERLSRGSSMESGQIMQILQVNGCKIITPGKIYDLQNDSDEQFTDMKFMFSRYELKTITKRLVRGRNQSASEGKFMGSMAPYGYRAFKLPGEKGNSLRIDPEEAKVVQMIFDMYGQQGMGYNAIAYKLNDLHIPARKGKWSQTSIVNILTNEVYLGKIRWRKEPVKKVVKDGMLAKKRFINDDYDLYDGLHEPIITQEQWDRVKAAQAKKNHNPVNTDRQLKNPFAGILVCGKCGAIMKRTVPDKKRNPTPWYRCSSRDCDCKIIKCTTVEQSIYDAMDEWLEEYMIHLESDDQPQEDPVATALEAVRGQLAGLQLQQENICEYLEKGIYTIDMFTKRNAALSKEIKQLQISEAELLRQQAEGNQKSQTTSQIIPVTQQILASYPILTPLEKNQLWKLVMKKATVYRSQEDELTIRIHPNLPK

SEQ ID NO: 591 - protein, 535 aa, unidentified
  source 1..535: note = uncultivated organism
MVEKQPTKGNLALRNNAPRVIVINPAKKPESIKLRVAAYARVSSASEDQLNSFAAQNRYYTKLISEQENWSLVDVYADKGITGTSAEKRGDFQRLMSDCRRGLIDRVLVKSISRFARNTKECLEAVRELKTLGVSVCFEKEHIDTGTMSGEMVTALFATFAQAESQSISSNMRWSYQKRMQSGTFVPSRQPFGYRLVEKKIVVDLPKAKFVCEIFSLYLSGWNTREIAEYLNSLQPDHPELCDRVWSVAAVSRILKNEKYIGDSLWQKTYQTDTFPPKECPNRGERNQYYVAETHPAIIDKKCYAAAQHLLAKRNLTRKSPALSLQNPLYCVVICGHCGSYLREKSVRGYVYRTCRTHDITREQCPMTPVPEKELKKAFLCLYYNLKHYGGPILSEMITSLQTIRSWRMLWSLDIVELNKRISELSSQNQMLAALKQQGLIDPDIFISQSNELTEQLRAAKLDKERLLAADSDTTIERTQELMDILEAGPDFLDHFDGELFSELIDKIIVDSNERVRFRLKNGLELTETIERMVR

SEQ ID NO: 592 - protein, 511 aa, unidentified
  source 1..511: note = uncultivated organism
MKCAVYCRLSREDGDGTRESESIQNQRALLTEYAAERGWEVYAAYCDDDYSGADRARPAFNRMLRDARDQKFEIILCKTQSRFTRDLELVEKYIHGLFPVWGIRFIAVVDHVDTALRGSKKARQINGLVNEWYLEDLSENIRAVFAQKRRAGQYIGSFPAYGYEKDPADRNHLVIDAQAAETVRLIFSLCLSGMGKQKIAAELNRRGILNPTAYKRARGWIRPGGKSELWSRATVGRILHNELYTGTMVQGVKHKISYKSDLCVSVPREAWIRVPGTHEAIIDPQVFQTVQSVLARRTRSDGSGQTHPLAGLVRCGACGAAMIRVSHTYKGKKRSYLQCGRYASDRAGALCTRHSIRLDILTDAVKRELREQIARWYTPGSSIRDLPQKSRAAAASGQLAALRTQLARREAALRTLYLDRADGTVTPEQFAALGASFQAEADTLRAHLAALEAQAAQAHDAPPACTAQNIRELLSPGRFFRSLAALLIDRIEIDERDPLQDTQAVRIFWKF

SEQ ID NO: 593 - protein, 512 aa, unidentified
  source 1..512: note = uncultivated organism
MRQCAIYTRVSTEEQVERYSLEAQKEVLTRWAEVLGYEVAATYTDPGYSGAQEDRPALTRLLADAQEGRFAVVLVYRLDRLARKVRLAYDLIERLEQCGVGLMSYSEPNINTTTSIGKAVLGIMAVFAEWERDTFAERSRLGLRKAAQSGRYLGGIVPYGYTVEDGRLTPQPEEAAVVRQIFTWVAERGWSTERVAQELNRLGVPPKYRREGRGVRGRRTAGVWRGGGVLRILKNRTYIGEYTYGKRTRKPQPDLVPVAVPPLVEPALFQAAQEQLARNALFAARNARSVYLLKGLIRCGVCGRAYVGSSDYYACVGRVNRQASPIPSMRCTAPHVRRAELEESIWQDIRTFLLNPGEALQAFVNEESPERNEVSLLEKRLQALIEARARLLDLFLEGGIDKQTYYARIEDLEARIQEVQASLEAARERSIAERQRKEALHSLESLSARLRDRIDRLTPEEKQAVARELVEKVTVRPGEGEVEIEVRYRFGQIAPHTGKGSWPPPARSGPGR

SEQ ID NO: 594 - protein, 516 aa, unidentified
  source 1..516: note = uncultivated organism
MTTHVRCAIYTRKSTAEGLEQEFNSLDAQRDAGEAYITSQKHAGWVCLPEHYDDGGYSGGNVDRPAFQQLMAAVEEGKVNCIVVYKIDRLSRSLMDFAKIMEALERRSVSLVSVTQQFNTTTSMGRLTLNILLSFAQFEREIISERTRDKIAAARRKGKWTGGPLVLGYDCARARTGGKLIVNKAEAERVREIFEMYLKEGTLSATIKAMRTLGWKTKRYQTTEGKNRGGLEFEKSALQKMLTSVIYLGKMSYKGEVFDGEHAAIVDEDLFGRVQGLLRRNRVSGGKECRNKHGAMLKGLVRCKHCGCAMSHHFSTRGNKRYRYYVCIRAQKLGWKECPAPSLPAKELEDFVVERIKGLGKDHTILADALRATQARLTDETAELKRQREEIEEKVRGLSREIGTLASRAGFDEGATREIGRLQNEMREKQEMIVGINERMAGIRQRMLDPDELAGAVEAFDPMWNAMSPTQQTKLIHLLVDCIEYDGEMESISITFHPTGIKTLGRNHKEVACKTA

SEQ ID NO: 595 - protein, 522 aa, unidentified
  source 1..522: note = uncultivated organism
MRFATYGRKSVYSDKSDSVGNQERMCREYADLKFAGLIDSFEVYQDEGFTGANTDRPGLERLIADVKDGLIDALIVYQLDRISRDVRDFSNIYALLEEHHVMFLSIKENIDTATPIGKAMMYVTMVFAQMERETIAARVTDNMIGLAKKGYWTGGNPPYGYVRERILVDGKKHVTIVPDPEAARYVESIFDTFLENGYSLQGMETAFKRQGIRTPRGAFFSTTQLHKILTMPFCAPATKAVRDFYTDQGCRVEGSEEEWDGEHGVMIYGRSTQKNKKHQLQPRSEWVVCPGAHKPFLSEEKWLAAQEQFRKNTFEKKQKYDIPLLKGTLRCAKCGGLMQVSRKKKKVGVTSHYYCLKRMRQGPSACDMSMIRCDLLDQEVVGIFRRIQADPAIVRKYAAADQPMDFGRDISVLNKKIAAQSAKIERLAASLAEAENSSAQKYIVAEIERQDLNLAALKRELELAKAEKRKADLKGKSLEAKAQEIGNLVRAFDSLSAADRNGIVREVVQECTWDGETLFLKL

SEQ ID NO: 596 - protein, 538 aa, unidentified
  source 1..538: note = uncultivated organism
MTKHATKRCAIYTRKSTDEGLEQDFNSLDAQREACSAYILSQAGEGWEQINEHYDDGGWSGGTMERPAIKQLMEDVQAGRVDIIVVYKVDRLTRSLADFAKIVEILDDKGASFISVTQAFNTTTSMGRLTLNVLLSFAQFEREVTGERIRDKIAASKRKGMWMGGTVPHGYYVHERKLLVSAEEAEQVRYIFARYLELGSTLKLVDDLAAKGIKTRQRTYSCGRKIGNVHFGPGPLGHLLKNQVYIGKTKHKNAVYDGEHAPVVDLETFEKVQALIASNNNDRRTSKNAKLPSLLAGLIADSDGRPMSPSRGQKGDKVYCYYVTRFKAGEDKSTICRLPAGEVDKLVLDALGQMLKAGPSADNQSCKVQWQHDFGRSAVMADSLSDLSRHELKALLIQYNAKVEVKDSSINVFFTTNEITSTTSIPATLVRRGNELRLALQPHSKESGASNVDPALVRLITQSFAAREHLVAGKYPEQVGSYDRKHLLRLARVAWLAPDIILAILDGKQPLQLTARHLLRCADIPMEWQQQRSFLGFG

SEQ ID NO: 597 - protein, 568 aa, unidentified
  source 1..568: note = uncultivated organism
MPSEATNGHGPERVALCLRVSSEEQRDHETIEIQRDFLKEYCRLYRYEVTDTYADDGVSGTIPLHERPEGRRLLEDAKGGKFSTLLVYRLDRLGRSLLVIVDAVERLEAAGVALRSATEPIDTSTPSGRLIFQMLASFAEYERETIRERTRAGLHRAYRNGKHTGRIPYGYRLTTDEHSLEIVEEEARVVREIIGNVAGGSTLYGESKRLNDEGVPSPGMRFKSGERRPGGLWSPPTVAAIVHQSAYSGTHRVKINGGKSIISREVPAIAEDGLQERAEAVLAENKRYPNRELDRKYLLRGLIKCEVCGFACTGRTSTSNGKKYSYYGCTGNRGDRGSVANVTRVPPHRAPSVSAPWLEDLVWQDAKRFLENPGETLERVREQLAGSGRSGELEARHAGLTKRIAARQAEKDRYVRLYAQGHISEDELETYLLDLKNQIGNLRLLTESVEADLSRSAEDRLTAESTEAWLLALRERMAEIEEDTPEAFAKRRQLVGLLVEGIALGRDETGQTSVEITYRFGPPSEAGPSEGDRFAASDQNSFGNLAAKRNPSGETSRHFCTVERRGVP

SEQ ID NO: 598 - protein, 518 aa, unidentified
  source 1..518: note = uncultivated organism
MAAQGNLVRKPIYIPATQPVEEPSLRVAAYCRVSSDSDDQLNSFAAQQSHYYDFIHSHDHWELADIYADEGITGTAAAKRDDFQRMLSDCRKGRIDKILVKSVSRFARNTTDCLEALRELKALGISVYFEEQNIDTKIASSEMMTAVIASCAQAESESISQNMRWGVQKRMREGTYISSSVPYGYRLQGKMLVVDEREAAVVMRIYTAYLEGKTPLEIAQMLVQEGNTDREWRESTIRYILRNERYTGDAILQKTYTTEVLPYRRKTNRGECDKYYVEGYNPPVIEKDIFEAVQRLFQERYKLRGSKPGEHPLAGTVVCGICGSPCMVRNNKGKAYVSCRTHGQNTQLCGIKPVRVDTIYHAFLRLHYNLIHTPEILAYYLRQLYAIRKGQMLWGMDIVGLNTRISEILNQTHTLTMLNKQGLVDPDMYITTSNQLAEQLRKAKQQRERLLDREKNTIIEQTQTIMDVLRDYPDVVDEFNEELFCELIDKIIVESNTKIRFRLKNGLELPEAIERTVR

SEQ ID NO: 599 - protein, 589 aa, unidentified
  source 1..589: note = uncultivated organism
MYNNDLQKLRDDNRKYLIYSRKSKFTGKGESVENQIEICKKYIRDHFDVNVKEEDIIIKQDEGFSGKDVKRPQYKEMMKLVEDKQIKLIICYKLDRISRNTLDFGEFYESISNYGIKFVSCTEQFDDTTPTGRLMLQMSIVFAQFERETIVERIRDNMMELAKTGRWLGGNTPMGFESEKIEKLNINDKKVSLYKLSPINDELEIIKLIYDKYLELKSLTTLETFLLNNNLKTRRNCDFARWGLKKILTNPVYAIADVDTLNYFKDNDMDVYNEDSEWNGTHGVMSYNKTMKTKTGSVKNKDKELWINAIGKHKGIIKGKDWVEVQTLLTSNQNKAYRKPVKNNSILAGILRCEHCGNLMRPKLKDTSLPNGDRKFNYICDLKMRSRGKQCNCPNVNGNEADKLVIDGIKQLAKPTSKFYQELAKVIKDENYGKNSQTNEIEVLEKKHNQNLASIKNYISRIEYVDEELLDDVQKKIKDLKQKDKEVVAKLQELKAEQPDSYTDQETAKMLVYILDNYMNNFTELDLLSQRNFLKLFIGSCSTDGKDIHINLIGSRNHTTTIQPVFEGSETSETGTHGGQIVLLSDSSE

SEQ ID NO: 600 - protein, 576 aa, unidentified
  source 1..576: note = uncultivated organism
MKRVRMLLRVSSEQQLEEDGDLSVQRQILVEFIEKQKEWLLDKKEYFEGSKSAYKNTSSQREVLQKILKDAQSGEFDILVPYKDDRVGRLMWDTPQYIMRLKELGVDVYTVKDGCISPESDDIIGQMMLAFRYANAQKSSADTGMRVKDTAQKLVEQGKFMGGCAPYGYRLEYSGKISKHGRALKKLVIVPEEAQVVTAIYDLSLNRAYGSVKIAKELNLSEKYRKLAPGGVWKSGTITSILTNPIYAGYTAYKRREKKNGKYHRLDSKNWVISHEANEEIRIIEENVWNCTQEKRKMRGSRYIKNTENDDRVVIRRNDGMLPLIDVIYCGYCGCKLSNGSRYNYWTIKETGEKRASKVFVYRCPGEARGVPHEEKAQFRAERIEPAIFELLAEFVEKLLKDEDVYSEIGKNRELEKETLEREIKKKKQELDDTQGKIEVLEERIPQAMSGSYPLSLEELTALIRKQKEKREEQHEEIMEKEAELKNITDSVHDREERKQETPTWKEIFLHGDSAVKRVLVNQLIERIDVTREEVAIRFKINMELLVQNGISYTEKSISKSSDSEPRKNGDSGVPE

SEQ ID NO: 601 - protein, 564 aa, unidentified
  source 1..564: note = uncultivated organism
MSEKRSIRCAIYTRKSTEEGLDQDFNSLDAQREACEAYIVSQRHEGWKLVRGHFDDGGFSGGNMDRPALADLLASIDRGEIDVIVVYKVDRLTRSLADFAKIVERLDARGVSFVSVTQQFNTTSSMGRLTLNVLLSFAQFEREVTAERIRDKIAASRKKGMWTGGPTPIGYDVIDKKLVVNEQEAQTVRMLFNLFLELGNVRALKDEADRRGIATKRRTQKNGRVVGGRPFSRGNLYQLLSNPIYIGRVRYQDETYEGEQDAIIDQATWEAVQDLLSGNAPDRSNDTNTKSASLLTGLICDETGDRLSPVHATKSGKRYRYYISKRLMHHADRHKNGWRIPAREIERAVVNQITELLSDQHRMMGFFPKDEITIDAAANLDARAAALIEQLAGGSGTEAQLLIQQVIQKIDIGNGTIDVTYDKSELGNVLGLPASDSNEDDQLITTTAPFEIRRRGVEAKLVIPGSSTGSNEPDANLVRLVAQTRFWFEELATGKTASVYDIAELERLNTADVSRVLPLAFLAPDIITKILSGDQPAELTAYKLKTIKALPSDWQAQRLALGFE

SEQ ID NO: 602 - protein, 524 aa, unidentified
  source 1..524: note = uncultivated organism
MSKATEKPPTVRCAIYTRKSTEDGLEQEFNSLDAQRQAGELFIASQVSEGWVCLPDRYDDGGFTGGNMDRPALQRLMADIEAGQVDSIVVYKVDRLSRSLIDFSKIMDVLERHKVAFVSVTQQFNTSTSMGRLMLNVLLSFAQFEREMISERTRDKIAATRRKGKWTGGCPMLGYDVVEGGGRLRVNEDEAARVRDIFELYLDRQSLLATATELETRGWTTKRWVSTRGREMGGRPLGKNTLFQILTNRIYLGKITYKDEIYDGEHPAIVDAEIFDRAQHLLKRNGRTGGAHVKNRHGALLKGLVRCVTCDCAMAPSHTVKRLSDNGGKVYRYYCCTNAQKRGWQSCPTPSVPAPELERFVVDQVKSIGRDTNLLNETLAECRRQREEAIGKLDAEKRTLERELGRHNADLRKLIGKDGQATDRLADVQERIRNAEQRATEVREQILALSRELVDAREVGEACSLFDPLWETLSAREQARILHLLIERVDYDGPNGTVEITFHPTGIKTLADELKRQEATTCDR

SEQ ID NO: 603 - protein, 562 aa, unidentified
  source 1..562: note = uncultivated organism
MEHAQPKVRRCAIYTRKSSEEGLEQDFTSLQAQREACEAFIRSQAGEGWRLIPTAYDDGGYSGGTMERPALQQLLGDIGQRLIDVIVVYKVDRLTRSLADFAKMVDVFDAHGVSFVAVTQQFNTTTSMGRLTLNVLLSFAQFEREVTGERIRDKIAASKRKGMWMGGVAPLGYDLHERRLVVNRAEAETVQGIFRRYLKLGCVRRLQGDLARRGIVSKVRISRNGKRSGGKAFSRGALYALLSNPVYIGEVRHKHERYPGQHEALMDRKLWERVHERLRNQAVRRGGQRLSQTPRSALAGKLFDEGGGPLYVQGTAKGARHYRYYVSRGLVRGSKEHRERGWRIPAPELEGVVRTVAEQLLTDRAALAEAAEAAAIDTSRLPSIFTAAQGWSDHLRAATDAASALEQLIDRVDLTPDGLRVSLTVPLPGGDEGTAASSKGLVLMRFAPLRLRRRGIEMRLVLDDTAVPLRVDRTLLKTVARAYRWADDLLTGRAQSVGEIARREGVSDRYVWRLMRLGFLAPSIVEAIVEGRQPAELTASALSQRLDLPALWQTQEEALGLA

SEQ ID NO: 604 - protein, 515 aa, unidentified
  source 1..515: note = uncultivated organism
MSVQTKNRSGIYLRVSDDREGRELGVGRQEEDCLSLSNRLHRIVYGLYKDNDISASTRSRKIRPDYQRLLADARAGLIDTIIAYTSSRLTRRPREHEDLIELAEQYGVQFYYVASPSFDLNTAAGRRIARMLSANDAGEAEDTAERVARAKLANAVRGQYMGGARAYGFEGPIKENGIVINRGRINVEVLEDEKAIWLDCVSRIIAGEREMELVRDLNQRGIPTPNGAKWRIGNLKQLLTRKRYVAFDATGHPADCPCLGNPEGNGTLVHRGVEHRAVWPAFITPERHEQLLAAFKETSQPWAHGLVKGRTYLLSGFTVCGACGAPMYGKRRKIASDAYQRRYVCCGQDNHGARRGCGKVFRDAAALEAFVTAAVFARFDSPEAARVLAPKEDEDRAHELGQQLAGYKAHRQRLLAEYGRGEHKPADYKIMLAAADDAIETAQAELAKLHASKVAGAIPVNGLLEEVWGTSSLDWRRNVIRLLVEQVVVRPGAPGARMWNGHRFNPDDIAIEWRA

SEQ ID NO: 605 - protein, 534 aa, unidentified
  source 1..534: note = uncultivated organism
MIQEANGRSLITHQKQLRCCIYVRKSTERGLEKDFNSLDAQHEACAAFIASQAAEGWTLIDEEYSDGGYSGATSERPALERLLRDVESGKVDCVVVHRVDRLSRSLLDFAKIIEALNRRGVAFVSVTQQFNTSTSMGRLTLHILLSFAQFEREMIAERTRDKIAASKRRGAFCGGHPPMGLDVDPKGGRLVVNEDEARLVTEIFDLYVAKGSLLAVVDELRRRGVTTKEWTSRSGRVWRGRLFDKTALSRLLRNRVVIGEITYRSEVFKAQHQAIVPIETWQRVQEMLARNARSGGTETRNKSNALLKQVLKCAACQCSMTPTHTTRKGRKYKYYSCVRSQKLGATMCPTRSVAAGDIEAFVVERIRGIASDPALVAETVAQARLQQRAEVAALEAERDRRAADVRDVNEEIRRLVADAGTRPGDRISGKLADLQERLRVAEGALGEAEEKRRAAGDAEIDEADLTTALSGFDEIWAALFPRERERVVRLLFESIEYDGATEQIHFNFRPSGIRALSGEFASGREAGAAADGGR

SEQ ID NO: 606 - protein, 566 aa, unidentified
  source 1..566: note = uncultivated organism
MEQKTIRCAVYTRKSTEEGLDKEFNTLEAQREAGENYIKSQKQQGWVLLPQHYDDGGYSGGTLKRPALQRLLSDVQNGNVDMIVVYKIDRLTRSLLDFSQLIKTLDAHNCSFVSVTQNFNTCDSMGKLTLNILLSFAQFEREVSAERIRDKIAATKKKGMWTGGSVPLGYDVKNKKLVVNQEEAKIVRYLFEEYLRCRSEVQVSRNANEMGYHSKARKVRNSQGEVALSFNHAMINNLLRNPIYIGKIPYKTELFDGLHKAIIPMDLWNQVQELKRLNRRERFAPSRSVKNSLLKGLVECECCGTMTPTRCKRKNKYYEYYTSSKAVKEGHHLCRTGSVPAGELDRFVLDKVRNAFKSPEIIQELVHQIKPYKPEYGVREIFDIVQSVDKVFEHFEPATLQSIIKQLVDKVIIHKGKVVIRFNSFGVSLLDDNIKFQNEFNKKTLEFTYNVTLARKRGRVKIVNPLPSETPEKDEILINAVSKAFKWQDLLERTNLTIAELARREKIDRTYMGRILKLCSLAPEIINAIIEGKQPRLLNLQVFTRNQIPLLWSEQLKKYGFVYDSH

SEQ ID NO: 607 - protein, 540 aa, unidentified
  source 1..540: note = uncultivated organism
MNKVKVAAYCRVSTDFQDQLNSLSVQIAYFTEYISSQESWELIEVYYDEGITGTSTKKRDGFNRMIADCEAGKINLVLTKEVSRFARNTVDTLTYTRKLTDLRIRVIFMNDGIDTNDKDGELRLSIMASIAQEESRKMSERIKWGMKRRMENGQVLGCGRIYGFKIIDGKLEIVLEEAEIVKDIYNMYLYDGMGSSAIAHELDNRGIPTLKNRVWSSQLVLKILKNEKYCGDLTQWKVYKPNVLSEKMLTNRGDNPDAPLITVKNHHEPIVSKEMWEQVQAELARRSNLSMLGKKHSHSFWLSGKIQCGKCGYSYVRCSTKSKKSLAASCRNRIVYGKERRSAPNGDLIGCDNHRVDERIVVKAMETIVLQISELRVLLEQEMLSEVRRLEKCKKDFDPAPLRAEIESYENKKRKAIDLVLDGLISKDDLTKQTTFYDSEIARLTEEITKLQNIAENQRNQLSEIEKAIEYIGKLSDADADGDNKELYRSMINKIIVPEYPVLQIYLNGVPFAYKVVYSVKNVPLAGIFDIMIDTCEVMS

SEQ ID NO: 608 - protein, 510 aa, unidentified
  source 1..510: note = uncultivated organism
MTAIRRCAVYTRKSTEEGLEQAFNSLHAQREACEAYIKSQAHEGWKLVKTAYDDGGLSGGSMERPALQRLLADVAAGRIQVIVVYKVDRLTRSLADFARIVETLDGLGASFVSITQQFNTTTSMGRLTLNVLLSFAQFEREVTGERIRDKIAASRRKGMWMGGSIPLGYEVSNRELVVNEAEATTVREIFEAYIRAGTLSGVQHDLRQRCILSKRWTSSTGRTWGGVNFSRGALYWLLRNPVYVGQVAHKGQIYEGRQQAIVDREVWDKAQEILAAKRTARERRPIIPGGRPLAGRLFDDRGNAMSPTYSVGKQGRRYSYYVSQALLQNEKERAGSVARVPAEEIERLVGNVLGASKGEASIEEAFQKRLERVTVRNDRVEVIAIGSTGANGDEAPERETIVVQAKLAHRNRARVLDDGSAGPNPILMRALGRAHEWRGWMERGDAISYRAIAKKAGVDPSYVQTILPLAFLAPALTRELLDGRRQLNGPLMARMREGIPAAWSQQIDWL

SEQ ID NO: 609 - protein, 565 aa, unidentified
  source 1..565: note = uncultivated organism
MKPRDIKTKRAVGYIRVSTAAQVDGESPKTQETSITEYCSSQEWNLVSIERDLGISGHKTENRPGWRKIMSMVKSGEVDVVICLKLSRIARNTREALNIEHELRARGVALVSLKEKFDTTAPSGKLNFQVLSMIAEFEREVIKEQMNDNKMSKWRRLEMFNGHLPYGYLWDKAAAEIKKHPHESEVLNKIMRLYVNAGMSMKDITIKLNSEGVRGRRAEWSNGSLSGIFGNPVYGSQQLVTNQYVYDEDGKRTKELKPDSEWITYEVPRIISLDLWQKVQARREFNKRKQKHTTWQQDYWLRDNLFCAHCGGKIIAKRGSSRKDGSFPKYYACFWGTTSQKDLMSAKREKCDSTYIYADNLEDYIWKRLTGSIVGNWHSKDEKTQRKAAESRFNQLFGSENIDKRITETQNSIQLAQKKTNGKLLANQRFAAEIEKDDTDISFFMNQIRKNQAEIALLKGLINELENNLLELDNLRQEKEFFLKNSDLLFDVWRDMQYFLPAEKKRFLESLVPDGIKIVTNPHIITMLGPTTVKMEIIFNSDIFQEFIGEGKFVLLGKNGSDDSA

SEQ ID NO: 610 - protein, 539 aa, unidentified
  source 1..539: note = uncultivated organism
MSKPAKLRCAIYTRKSSEEGLGQEFNSLHAQRESCEAYVCSQAGEGWSLVKTAYDDGGFSGGSMDRPAVKALMADIEAGHIDVVVVYKVDRLTRSLADFARIVEAFDKHSVSFVSITQAFNTTTSMGRLTLNVLLSFAQFEREVTGERIRDKIAASKAKGMWMGGNLPLGYDVRDRQLFINEAEADTVRMMFRRYLELGSVKALLQELERQGVRSKAWTTRAGAQAGGYIFNRGGLFHVLNSRLYLGEIPHKELSYPGKHAPIVDHATFDAVQAKLKANAVVRREWPKQTDVARLKGRVFDEDGGPMSPSFGYGKGGRKYCYYVSTARITKGVGTGSKGSVYRVSAPQLDAVVLDRLGRLLHPKDAEDWDEVGAPLRQVEVRSESLHLILRPETIIDKRPGTLEANDQVVIDSDGAIRIVLGIRPVFRGGRTWLITPQGVAAVRKTRIDATLVGGLRRAHECLAQHNASPGAKLDALLEASSPADSYARMLMHLAFLAPDIQKALVEGRQPPGLTLQQMLDRGIPPAWVDQRVKFGFAA

SEQ ID NO: 611 - protein, 515 aa, unidentified
  source 1..515: note = uncultivated organism
MPNVKTLLPETQEETKRIRVAAYCRVSTESDDQKDSFSAQVEYYTNLIDANPAWELVDIYADEGISGVSMTRRDEFNRLLRDCRQGKIDRVITKSVSRFARNTIDCLSSVRMLSELGVSVLFEKEKIDTAKMSGEMLLALSGTQAQDESISISGNVRWSYERRMRNGDFVGNVAPFGYRLVSGTLVVNEPEAEIVRKIFDMYLSGVSKVRIAIWLNENRPVRQWQNGTVDYILNNERYIGDALLQKKYTTETFPYTKKRNKGEKSMYYVSNNHPPIIPREQYEAVQSLQKIRYRKKRRQRYELSKLLICGECGHPFHRVDGFNKAFWQCSRLSSGFSDCKRYIVREEDVCDAVLRMMSLLHNSYGAIIKPAVQALEDLQSRLNGTRHKVFEIDKAIADTSVQIHLLTQRQSQGILEAADFASQSQELSNKISRLRGERMKLLRQNEHDERLAQLRDTAQIIEYFDETQVDFDYSIIREVVEKIIIHSDTDIEIHLFGGLVFNEHLPSVKRRAGST

SEQ ID NO: 612 - protein, 555 aa, unidentified
  source 1..555: note = uncultivated organism
MKPVRCAIYTRKSSEDGLEQDFNSLDAQREACAAYVLSQASEGWTLLPLKYDDGGLSGGTLERPALQRLLADVAAGKVDIIVIYKLDRLTRSLLDFAKLVEALDEAGTSFVSVTQSFNTTTSMGRLTLNMLLSFAQFEREVTAERIRDKIAASKAKGMWMGGIPPLGYKPHGRTLVVVEEHAALVCSIFERYRELGNVRLVAESLESDGLHSPRRKTVSGKAYGGGPFRRGQLYAILRNPVYIGRILHRGEQHEGQHPGIIDPTLWDVVQQQLTSHIQGTRGGRSRKVSILAGRIVDAAGEPLIAVHTRKGKRRYRYYVSKALHHEGRSAASDAMRIPAAEIEQTVAQECARLLQDPLHLVERAALSAQPQELERLLKHSKALATDLTEGRHALLTSIIHKVRVEATGLRIEISVTGVAVAVGLAASDASPVLIERDCPVRLTRTGRALRLVDDKGAAATEEGIDLTLVRLIVKARSWWQRIAETGIDPSTLAALEDVSPSYIVRVLRLAFLSPAVVDAVLDGRLRAGIDSSALLNIRAIDPSWESQERRCMLRK

SEQ ID NO: 613 - protein, 551 aa, unidentified
  source 1..551: note = uncultivated organism
MRSNTINSNKAACYLRLSREDGDKSESDSISNQRSLINDFVNQKTGIKLIKEYVDDGYSGTNFDRPSFKRMMEDVKAGKINCIIVKDLSRLGRNYIETGRYLERIFPFIGVRFISVLDRYDSADESNDADQIIIPFKNLINDSYCRDISTKIRSQLDVKRKSGKFIGSFACYGYCKDPKDNNHLIVDPVAADIVRQIFQMKLDGFNSQRIADALNAMGVLPPAEYKRSNGLNYDSGFRIGSGVGWSPTSVNRILANEIYIGTMVQGTNRKISYKIKQTRAVPKEDWIRVENTHEPIVSKEIFEEVQRLLLFDTRTSPDEDAVYLFSGLVVCGDCWQNMVRRRVSKGGKKYSYFHCSTYKSGKGCSSHLFSAKQLEEIVTETVQKQISLFLKAQSIIETIDQIPQEQSRVKVIVQQMEELQKEIDRYRGFKTKAYEDMLEGIIDKDEFVFMKRTFTDKINAAEARYKHLQIEKATAISDKQRMKPWVENLKQYQNIEKLERPIVVALIEKIIVYDKENIVIKMHFEDEMQDVIRMAEAASEEFASEEMKGCV

SEQ ID NO: 614 - protein, 507 aa, unidentified
  source 1..507: note = uncultivated organism
MSNRNRNGLRPAEQGQCRRCAIYTRKSTSAGLEQEFNTLDAQREVCERYIQSQMGAGWTVLPKHYDDGGFTGANLERPAFSELMADLEAGKVDIIVVYKVDRLSRSLLDFARVMDHLSTHGVDFVSVTQNFSTADAMGRLTLNMLMSFSEFEREMIAERTRDKIAAARRRGMWTGGSVPLGYDVVNKKLMVNDAEAALVRELFDLYLEYKSTMATVRELNRRGRTTKRHQAKSGNVRGGGQWHKNAVLSILRNPLYAGYMPHGQKLFDGVHSPIINRDLFHRTQVVLNNWRTRGPSGTRNPAYILRGVLRCSCGSALTSASTRTNGTEYRYYRCVTRDSRGSETCAARQVPAKAIEEFVVERIRDALAGNELTHAYAQSLTRIQEMKDYAAADRQALQQQLAQSEGATPDTEDSLRVRQHEMNLRIAELEQMSIDTEWVARVIQDFNQSWELLTPENRGRLIRAVVQRIVMNDNEGTVTVEMTDPATGLIPTGDSLCTEDEKAGVEQ

SEQ ID NO: 615 - protein, 564 aa, unidentified
  source 1..564: note = uncultivated organism
MMRKKRVRMLLRVSSNQQLEADGDLSVQRQLVKDYVENHEDWVLDKKEYFEGSNSGYKNAVSERDVLQEALADAQRQEYDILVAYKDDRFGRRMWEMGGYIMALKSYGVDTYTVKDGCISPEMDDIMGQMILALRYGNAQKSSSDTGMRVKDTALKLVEKGKFMGGNPPYGYELVMSGELSKHGRVLHTLQIIPEQAEVVQYIYHLSLYKEYGSGKIANALNNDEYYRKMAPRDIWKSGTITSILSNPVYTGCVAYKRRERINGKYHRMDQADWIKSARPDETIRVIEDEIWNKVQEKRKIRAEKYAKKQETKESYIIGRSNGMLPLIGVIYCGYCGGKMINGSKYNYWTIKKTGEKRSSRIPIYRCQNAKQGMPHSGSSQFHAVKLEKIIFDFIGLYINGLQKQEDILSEILKNQQKEAERRKTDLRKEQQRLEKIQKEIEILERSIPEAMEGNYALTLEELAGILRRHQQIEEKQKEKIEAINIRLNEEEFLNKERKENYPDWQQILREADIGTKRALVNKMIERIEITREEIVICFMITKEEYLSRITDGSDTTPYTPGSE

SEQ ID NO: 616 - protein, 539 aa, unidentified
  source 1..539: note = uncultivated organism
MLTNRVYCLYRVSLEKQVDHVSQDGKMIADIPMQKTACRQYCAERGWTVAGEFQEAGVSGYKNSAFKRVAVKEIIAAAHQHLFNILLVYTIDRLSRRDSELPMLLEEMTACGIAVWSVEDGEIRYKTSTDRLMAYLYGWKANGESERISQRISTIQRQMVARGEYRGGTVPYGYCLIETGKQNKQGKKQRVLSVYEPEAAVIRMIFKRIATEGCSMYQLTKELASMPVPEGAREMAWRSATLHVIIRNQIYIGRQRFNNELSLPYTQLQIIDPLVFQQVQQLTQRKRENNKSSKLQKTPPPEYHDIVFCGHCGSHLVYNHAVQPRQHGQHTIRYLYRCYNKERFVTPCDGACTYSARIVDQNAHEHTDTLVSLFLSISRETFINNALEFSRVQLLSTRDTIKQKITALDAQLADVQQGIAEGLRLFGVSATSSLQLLFEDMRAQRCGLEHQLKKSTEIMQTASSIARQKQNELNEVVLLCKAWKSASHDERNALIPRFFSRIHVHKEYRILYEIRPELQQFIVIDDENSLGYLPKSTGS

SEQ ID NO: 617 - protein, 515 aa, unidentified
  source 1..515: note = uncultivated organism
MARKADRGVLRCAIYTRKSTEEGLEQAFNSLDAQREACTAYLMSQTHEGWRLVPDLYDDGGYSGGNMDRPGLVQLLEDVRAGKVDVIIVYKVDRLTRSLADFAKIVEVLDKHDASFVSVTQAFNTTTSMGRLTLNVLLSFAQFEREVTGERIRDKIAASKARGMWMGGVVALGYKVEDRKLAVVPEDAQRVRHIFHRYLELGSVLALETELAAQGLRSRVRTGRTGKQHGGRPFSRGALYLMLRNHLYLGEICHKGVAHPGEHEAILDRELFDRVGRLLDQNGIDHANAIYAEHSSLLCGLVWDGEGRRMSPEHATKKGGIRYRYYVSAKCVGVATTKAWRVPAGELEALVINCLRQKGHDLPGPDRTSLAMLVKRIVVHRDTVEIHPMGSDSNESITIAASLIRCGKETRLLVAASDLVAPRPDPALIKLVVNAHRVRAAVFSGQHGSIHHAAGALGYRRDYFAVLLRLGFLAPDIVAAILDGRQPASLNRQRLARISGLPIDWQAQRELLGFA

SEQ ID NO: 618 - protein, 521 aa, unidentified
  source 1..521: note = uncultivated organism
MKSITKIEPSAARPTAARIRVAAYCRVSTGMDDQLVSLETQKTHYEELISGNPDWEYAGLYYDEGISGTSKEKRPALLRMIADCEAGKIDRIMTKSLSRFARNTTDCLELTRKLLDLGVTIFFEKENLDTGSMESELLLSIMSSLAESESVSMSENNKWSVRHRFENGTYTIASPPYGYDNKDGELVINEEEAEWVRWIFAQALSGKTSGWIARELNDRNLTTKKKATWRAGTIRGILRNEKYTGACLFQKSYTDFRFKRHKNYGEKDQFLVEDHHEPIISKEDFEAVAALMRQRAQEKNIQRGDPRYQNRYPFSGKLICGECGNPFKRHVNSTGSSRYPVWVCRQHMDDVRTCSMKSVREADLERAFTTMLNKLIYAKKDVLDTLLVTLRGDVQKENLRQIDQIDRKLELNAERRKTLTTLMTRGYLEPAIFAQENNDITAEADALMAEKERLVKDVSGSIHQADSLNDLIRYVAHAQPSTEFNGDLFGRFVNQVTVRTRTEIIFHLKCGLNLTERIGVK

SEQ ID NO: 619 - protein, 507 aa, unidentified
  source 1..507: note = uncultivated organism
MRCAIYARVSTDRQGESVDHQVSLLREFAKRRGQDWEVLEHLVFEDEGVSATKVSIWTRPAMKRLMEAAERSEVDVVLFKGISRLARNTQEALDVLDRLRARGLRVLSYEESYDSAKENSNFMFTMHAAIAEYEAEKIGVRVRLGNKEKAKSGRWVGGTPPDGYYVGRDGHLVPDDARAGLIRSIFERYALDGSSCAAIARELNARGETTSTGNGFSQTAVARILDNEVYAGHLVYNRRTDRTVRDYDSEVPGKKKERRMPNVRTEWVVVHCAHPPLVTPDLVQMAQMRRGRVRSQAPRTTHLLTGVLSCGRCRAPLIAQVKRTAKRVYRYYVCRTYHQAGRQACAQGSVPADDLESYVLTRLSERLREVSINVLAPALQSACAQGEEQAKRERERINRQLTRLTDAWIAAQVDDVLAGQAASIRGRIARLTAERDALYKRLTQAGLHRHKRAQEIYARLVDLAQDEPAMKRYWVQMLISSLVVHDRTLLIQYTFSSSGDTPIDGNV

SEQ ID NO: 620 - protein, 527 aa, unidentified
  source 1..527: note = uncultivated organism
MNVLKTRSELLLGKTIFDMKLNVGYYARVSTDKDDQLNSLENQSNYFREMIKENKNWNLVGEYIDEGISGTSVKNRGEFLKMLEDSRLGKLDLIVTKEISRFSRNVVDSIKYTEELLNNGTVVFFISDNINTIYPDSEFRLALMSSLAQDEVRKLSERVRFGIKRMIKDGKIIGGNLTGYYKRNGRMIINEEERPIIEILFNLYATGKYSFESISNFLYKRGYKNKNGNAYSGTTLKKFLINPRYKGYYTANLTRVENYKTHKKVKIPKSEQIIYKTDLIDPIVSEELWNKANELYKKRYNKRKMNITTSQKIINESKYTNKIFCSAHNMIFIRCAGSNRKSNPTWICKKYKEEGVSACNSPIIREKAFDKVIENILTEYLNNNVLSIKNELINLYNKVFFEIDNKLRISLQKELNELKIKRDKLINLNILNIISNDELERKLNRNTIEIDKLVSIINNTSVNKDNHKRLKNIELEIDNISSIHNNLNIYINLFIDKIIVKKLLTRYKMNLDVYFNDGSIRNIYYEN

SEQ ID NO: 621 - protein, 517 aa, unidentified
  source 1..517: note = uncultivated organism
MNNRVAIYCRLSEEDKDKKNRTDDSMSIENQKIMLLDYAKKQDWLIYDIYSDDNYSGADRDRPDFNRMISNAKERKFNIILCKTQSRFSRELEMVELYIHNLFPQWGIRFVSIVDNIDTDIVGNKKTRQINGLVNEWYLEDMSESIKSALRTRIKSGYFIGSVAPYGYKKDPEIKGHLIIDDESANIVREIFNMYIDGMGRTQIARTLNLRGVPNPSQYKCQSGIKSKIGGKKLSDKWTDYTIGNILKNEVYIGNLIQGKTYNPTYKSKHTIPAPKDHWVKVEHTHEPIIDMNVWYLASKMLSERTRPCYVTDDIHIFTGKIVCKYCGYNATVAYNKHQRYYRCTRKKFDKNSCQGATAFESTIKKAVLSELQKIIQKFVDEEKLQDGISIKDEISKKIEYKQIELKNIIKKIDETDMCLKNLYMDKLKGIIKSSQFAVLSEQFEKDKTELIHQQIILESDIQYFIGLKNKQQTKQEIVMNFLKLDCLTRQMVEQLIEKIEIGGTRKNREIIIHWNF

SEQ ID NO: 622 - protein, 535 aa, unidentified
  source 1..535: note = uncultivated organism
MRVLRVERISRDTEDSSSLERQDLELTSAITSGGHTEAGRVRDVTVSGSVNLDERPSLSRWLTEPLVHQWEALMVTTQDRISRDDLHWWAFVGWCLKNKKDVLVLDDPSFDITTEDGRMIAGIKATQAAKYRKAVQEKRRNQTEYFREEELWPGGTWPFGYRQKRIIHNGRPRWRLVIDSFTSGLDREAFEYLVNQNRSMGSVRDEWNGRKILTAIDYQRFVNAQEGREGVSTKVRGTEWSTSALTSVLTNPALMGYAVHKGEIRKKDGLPVRWAEPIFTREEFDALQAVIKGRGAHRVGVKTSSYALLHVVYCACGEPLYANSSTRRGKKYLYVMCKTGQSSKPCPNVKSWNRDFIEDALEEMFLHELSDAEITRKKFIPGHDRSSEIRDLKAAIDNLSQAIAQAQSAVVIESLGKTMEAHAKNLEELESEPVIPSSWEEIGTGKTFGEVWKTKGWTDRGTLLRNAGVRLYVAGNPQIPDLHLYVPEDLQRRAEDVLGGTVDPSFVEKWDEQVREWRSEDKSNNRGQYFKPPGV

SEQ ID NO: 623 - protein, 583 aa, unidentified
  source 1..583: note = uncultivated organism
MENVKDRKVAGIYIRVSTEDQEAGISAKDMENRPAFKEMLEDMKSGKINYIVAYKLDRVTRSVRDLEELITQLEKYNTYLVCDRDDVNTSTANGRFFVRMLTVLSQLEIEIVSERTKFGLNGAIKAGHIPGPCPLGYKRDKDKVLRVDNGTKDIVLGIFKLYLEGKSVWQIANILTTDKVLNKKWNDSSIASIINNRIYVGDYEKNKTKNKEPEVYMDVAEPLISRAMWDDIQIQKEKNKQAFCRDRVYIFFQKLQCPECGSIMTCKGSGGEKKKYMYYHCNKCKIYYREDLIEDCLIEYILDLVEYDFHVKKFFYPLLAEKKDNELKGIEEEITNLTNQKNRLKKAYMQGILEAEDIAEDYKLIENKLATLETQRLNALDFEKDTFNPQHIMAERDIEIERLSVDNFYQSVLLKLWTMKTKEEKQELISKFIDTAVLIKNSDWSYCIQKVNFRNSFIEQLDKLDKQGVIDFPTTIINEEGKRENLRTIWNMNEEQLQNYMERLKQELDAEYIDLGEYYFHDDVFDKSYDNKSQIAKLTDHAIEFKIKKNQKLVRAVVLKKPQNFLAKPDLKFKMGVVARRIS

SEQ ID NO: 624 - protein, 555 aa, unidentified
  source 1..555: note = uncultivated organism
MRNPTPSIAPPKIRCAIYTRKSTEEGLEQSFNSLDAQREACAAYIVSQRNEGWELVPEYYDDGGFSGGTLDRPGLKQLLAHIANGKVDVIVVYKVDRLTRSLADFAKIVDVLDDAKASFVSVTQSFNTTTSMGRLTLNVLLSFAQFEREVTGERIRDKIAASKAKGMWMGGPVPLGYDLEDRALVINETEAATVRRIFSRYLELGSGRLLQTELEGEGVRGKERMWRGTRAIGGKPISRGALYSILQNQLYVGEVTHKGKTYPGNQPAIIERTLFDRVQAQLEVSRTDRKHQTNADEPSPLAGLLRDALGRQMSPTHAAKGQRRYRYYTSQNDGEDRQHPSWRLSAPDVELAVCWQLRDTLSNEVRYRIQRGDLDTHQIERLQRAREAFVVDLATFKGAALRELLLRHVSEIVIYQDRLEMTVGLAGIDENLQSSTDIGVSAPLANVRCGNRVRMTIPAANDPRDRAPNPALVKLVAQAATARSQMMDEAGSQPAPTPYSRDYAITLTRLRYLAPDIISAILAGSQPPSLTRDKLVRATRLPLVWCEQRAMLGFS

SEQ ID NO: 625 - protein, 556 aa, unidentified
  source 1..556: note = uncultivated organism
MKKKIRCAIYTRKSSEEGLDQDFNSLDAQREACAAYITSQKAEGWVLLPEQYDDGGVSGGTLKRPALQRLLADLDAGHVDQIVVYKIDRLSRSLSDFAKIVDRLDEAGASFVSVTQSFNTATSMGRLTLNMLLSFAQFEREVTAERIRDKIAASKRKGLWMGGSVPLGYDPDGRTLVINTAEAKTIRRIYDLYTEHGTVREVKEQAAILGLRTKQRVTKTGKTQGGIPFDRGHLYRILSNPIYAGKIRHHKKVFEGQHPAIIEPYIWEKVQNKLTAVSAKVRGQSNVAHPSPLAGKLFDETGDRLTPSHTNKNGRRMRYYISRRLVIDKSNKHPDAWRLPAPQLEQAIAQAVRERLISHGILPNLVENLKANEADHLGKKINILARMFTSQNPVQNWNAVIAKANISPGMLTIELDASAIAKYLDLPPERLNPDALTINTPCQLRRRGVETKLVLGNTPPEVDLTLIRNIVKAMEWYGAVKSGKSFTQIAVNAGVNTDRVRSVMDLAFLAPDIIEQMIIGTLPLHVTSDYLIRTGVPSDWNAQRKMLENVGTRSVR

SEQ ID NO: 626 - protein, 548 aa, unidentified
  source 1..548: note = uncultivated organism
MAKQTENNVGIYMRLSKEDMLDGDSLSIENQKMMLTKFVREKGWNLISEYVDDGYSGTDFERPGIQRLLSDAQLGKINTVVVKDLSRFGRNYIEVGRNIDYIFPMNHIRFIAINDGVDTADRSSTALDMMPIINLFNEWHSSSTSKKIKAVFEVNAKAGKYLGSKVPYGYNRGDDPNHLPVINPETAPIVKRIFDMRVQGMSPLKICAVLNEEGIPSPAEYYYQQRGENDPQNNKHLWGRTTLNHILHNPMYLGHLVQLKQTSVSHKNHQKIMKDESEWTVVENTHEPIISQEIWDRCREIDAEHTTGRVSSNKTVKPLSSLLYCADCGFRMTSARSTNKVGYTTGNPHIVVWEFYKCGTYTRYGKDYCSTHYIDQGKIEKIVLDDIRSLMHMVADDEETARRAFLARKQKTISHQTSADKEKLQTAKKRITELDKLMQSAYADKVSGEMPTSVCAKLLEQYEAEQNALISQVQEIENRMLTMRQDERNVDEFIVRLKKYQNAEVLTREMSLALIDAITIDECVRGKQERDIHIYYKFIDKSYSGKTE

SEQ ID NO: 627 - protein, 573 aa, unidentified
  source 1..573: note = uncultivated organism
MSRVASRSAQAQIRKLRCAIYTRVSSDAGLEQEFNSLDNQREAAEAHIRAQQFEGWQLIPTQYDDGGFSGGSMERPGLLRLLDDVRAGMIDIIVVYKVDRLTRSLADFAKLVELFDAHGVSFVSVTQSFNTTTSMGRLTLNVLLSFAQFEREVTGERIRDKIAASKKKGIWMGGNVPYGYRVESRKLLIAPEEAAGVRMIFERYLALASVPALVSELAEKGFITRHRKLTSGRIIGGVPLTNGPLAAILKNRIYLGEISHRGQSFPGEHEPLIDQELFAAVQNTLAGNNRRSVEKQRASGALLVRRIFDDRDNRMTPAHANKYPGGRTGNAGRVRYRYYVSSAVLQGRKQECGTVPRVAAHEVEELVVSALNEFAARHQGIGGTRANEVGGISSPEALPGHSSLSTAADLIENHLDRVIVGPKVLTIHLRPEYEGALMPPPIALPWTRPVHTRKREMILPTDGEVTKGHPIRAEARARLVAAIARARGWVAELSSDPRVTITALAARENLSERSLRMTLPLAFLSPAIVRAAIDGTLPFGTGVMALADLPMDWAQQARAVAGAGRLDPRRAIS

SEQ ID NO: 628 - protein, 572 aa, unidentified
  source 1..572: note = uncultivated organism
MARKSPLPNRVGANGGENRPIRCAIYTRVSVDEKTLDEHGVLKGRKEDHSLKMQEDFCRRYLDVRKDDGYVISEVFVDDGYSAKDQKRPALQRLFRAIEAGEVDAVVVYKIDRLTRSVADFYDISRSWFERDLRFVSASQSFDTSSVGGRLMLNILLTFAQFEREMISERTQHTLWMNIAEGKWTGGSVPFGYQLEGGGLVIDEVQRKIVLRIFDEAAEGRSAGDIAAALNADRVRRPTKQCPDGRTWDAGVVRAIIERPRYRGVHVFNGGEFQTQHPAIVSKELWELANARLPEKAEPVRQLLKREYALVGPGVCGICGQPLAAYLSKGRSKGYHFYTCRRARKKLGGKPCSLGHIRVDYLESLVIDALAVLGKHPAIIQATVDASEGKRSSEYQKRQGNLSELRAKLTKLTAEIERLEELVLDTERGALAERMIDRLNKKLIEEGKLKDEIRIQSLTLQHEDEKANNRELITKALSDLGRVIEVLPAAQKRELLQALVSRVVVKPWDGQNTGIGGGEITIAPQIGTKRYLVKISLSESSLLSGTLTDSVDESTLRGKWLPGLGSNQRPSD

SEQ ID NO: 629 - protein, 536 aa, unidentified
  source 1..536: note = uncultivated organism
MKAPSVKPVRCAIYTRVSTEHGLDQEFNSLDAQYDAASAYIKSQAHAGWTLIRSRYDDGGYSGGSTDRPDLQRLLDDIRSRKIDVIVVYKVDRLTRSLADFAKLVELFDAHGVSFVSVTQQFNTTTSMGRLTLNVLLSFAQFEREVTSERIRDKIAASKRKGIWVGGTLPLGYEIKDGKIAIIEEEAELVRSIFRRYLELSSVNELLRDLRERNIRTKARRLSTGVTRGGIPFGRGALYYVLSNHFYIGEVKYKNEILPGEQPPIMDRALFEAVRQKSLDQWSHRTVVRNKSDQLLAGLLFDDAGHRMIPTHATKAGVRYRYYVSTPVLHGEAKTASAGSVSRAPAADIEDVIVKSLKAHLFAEQDKSTASAVRIDDHGALARLVAGIVVHKDRLIVRLRSDNASDSPDERSLTIPWQKPPSRRSRQILLPHNASPSKVRPEQFERRARLVSAIARGRRWLDDVVSGRVTTVAELCVREKCSIRQVNMTISLAFLAPNLVKAAVEGRLPRGIGVERLRDPPTEWSQQFEALGLNPE

SEQ ID NO: 630 - protein, 658 aa, unidentified
  source 1..658: note = uncultivated organism
MEDTYCSRKGKKCVIYIRVSSERQVKGYSLEGQKRYLKEWAEFEGMTVSNIYVEPGKSGKSITGREVFQMMLNDISSGSVEADYVLVFKLSRFGRNAKDILNSLTYIKRYGVNLICKEDGLDSSTSMGKMMITILGAVAEMERENILAQTMLGREEKAKQGGWNGGFAPYGYELSDGKLHIKEDEAAIVRLVFDKFVNGGMGYSTIAGYLNRQDIPKMPSKNSHGRKFVDWSIHHIKRMLDNPVYTGRIAFGRTRLERVEGTENEYRRVKSDDYILSDEVVHEPIISDELFEAAKRKRQETTTTGNPRVGRYAKHLLSGILKCPMCGSSMYADIVQWKNKDGKVMQKNKYQCGHYAKSKFGQCQKNTISAEWIEGEVIAYTKLLVRNKQFAEEIQSKLGNKTDVTEIDKELDNYHKLIKKLEKSKSNLERDIDAIYDDDKYAERKRQDMNNRLNKIYEEIYDIEDRITDSEKKKEAAQQDVLTKENVFKMLLVFDKIFDKMNDVDKRKLIESMIAEVHLHPKETWEEGKNPIKEIKYAFPVSKEVMDALRENVASVETVVLLSKGEVDSKKIRVEFSLEDMDMSEFQDGATYTQIKDYVLEHSGLKVSNLYISQIKRKCGIGVGKNYNLPKSEDSRQPQCPPEKEKAIREAFKYFGII

SEQ ID NO: 631 - protein, 607 aa, unidentified
  source 1..607: note = uncultivated organism
MKKNAAIYCRVSTEDQAREGYSLGEQLEKLKDLCKFRDYNVYGVYEDAGISAKDMEHRPQFKKMLEDVKNHNVNVIVAYKLDRLTRSVRDLEVLITELEKYECSLECAMDDINTSTANGRFFVRMLTVLSQLEIERVSERTKFGMVGAIKDGHVPVRKTLGFMRDNKKLIINPAESEIVERIFDLYLKGNSYQKISNMFNEEKVLNKKWYDTTIQKILANPLYKGDFISGGRNGTPVLYENVVEPIISKKLWEDCQEQSRKNTRNYTRRNDYIFFQKIICPHCHKIMACKAPGGKKKKYIYYQCNECKAYIREDKLIKLLIEQITTIIEYDITVRQFFAPLLKHKVENTNELLTKEINNLKDKITRLKDAYLNKIIDMEEYKQDKEYLETRIKDIEKKQQEEQELDQYNFTFEDIVLKRDLESIKCLINPLYQSSFEIKWNELTISEKQDLIMSYIESIEVIKKEDNELEIKNINFRKTFIEEYANLFNKGAINRFQDINANGETIQVEVCAPMTRKEVENHIKRLQVNYPIDYQEIKKEKYNDHQFCLKYTRENPFNEPLKLIPLVNKKGINKVDSFGVIEVPVPPITYIYADKVGIEKWVMRYLE

SEQ ID NO: 632 - protein, 569 aa, unidentified
  source 1..569: note = uncultivated organism
MEVQVIEKIQGRIDRATGLQINRKLKVAAYARVSTDSEDQLNSFESQVKYYNEKISKNIEWSFVEVYADESISGTQDYKRSNFMRMIQDSMNGKIDLILTKSISRFARNTLDTLKYVRMLKEKNVAILFEEENINTLEMAGELLLTILSSVAQQESETISSHVKLGLKMKQQRGELIGYNGCLGYTYDKENKSISINQEEAEIVKYIFNRYAQGMGSSIIARELTNMKYLTPKGLTRWSDSTVRRILKNEKYKGDVLQGKTYTTDPITHKRVINMGEENQYYIKDHHQAIIEPELFEKVQHILEKRAGVRGKGKIKANYSRKYPFSSRIYCGFCGTILTRRNWNSGTKNQTAVWHCMKFVKKGKQECPKCKAIRESIIEKCFIEVYQILCNDKGDIINKFILRMNNIITQNSTEKLIKNIETEKENLKSKINKLIDLSIENAIDRETFLERKEKIQNKINQLNTEQEKLILEEENKQSKELSLNKLKKYLENGKIITEFDKDAFEILVKQVIVGGYDEKNNSDPKSITFVLRNESNINYKDYLQVSNEENKNNLQINSDTCGVRMCSKS

SEQ ID NO: 633 - protein, 593 aa, unidentified
  source 1..593: note = uncultivated organism
MVTVTQKIYHAAIYVRLSKEDGDVAAAGKAESNSISNQKNLIKEFLKGREDIEVVSERVDDGYSGSDFERPAFQMMLEDIKRGVVDCVIVKDLSRFGREYIDSGMYIERLFPALGVRFIAVNDGYDSLDRKDSSDDIIIPFKNLINDAYCRDISVKIRSHLEIKRRNGEFIGSFAAYGYRKKEDDRHKLEADAYAAGVVQDIFRMKLHGMSQDAIANRLNESGILPPAEYKASMGSNYQTSFKVKEKSGWTSVAVRRILTNEIYIGNLVQGRQTTPNHKVKQAYQKEESDWVRIEKSHEPIVSDRDFEVVQRLLAMDTRTAPGNGEVYPLSGLVVCGGCGMPMIRKTTKAGGKAYSYYICATNKATKECSPHSMSTDKLESAVLELLRRHIENIMDLQRILAFIGMVPFQQMDIKKLEERKAEKQAEVERCTHLRSMLYEDLKDGMISREEYRELHAAYEDRRKNAQLAIRQIELEMEEILERKSKGFVWLDYFTEHRNIEKLTRNVAVSLIREVRVIDKNSIEVTFDFDDCYRECMDNLDRIGYEIGCGGNENPDVPFRGTEILAEENIVQEDTGQVSDGAVGAVEMERRAV

SEQ ID NO: 634 - protein, 503 aa, unidentified
  source 1..503: note = uncultivated organism
MREDAIYARQSVDRTDSISIESQIEYCKYETRGEPFRVYQDKGYSGKNTQRPEFQEMLAAIGRGEIKRVICYKLDRCSRSILDFANMMEEFQRHQVEFVSCTEKFDTSTPMGRAMLNICIVFAQLERETIQQRVTDAYRSRSQRGFYMGGRIPYGFRLEPYLLQGKKTSRYAICQEEAEVIRQIYTRYANPQVSVGDIVKFLWENEIPNSRTKDHRWSKSYIVSILKNPIYVKADLDIYHFFKEQGSKVLNDPGDFVGQNGCYLFTDAGGARKSLRLEGHTLVLAPHAGIVPSDLWLQCRRKCLNHPQAAKPIKAKNTWLAGKIKCSRCGYALVIRKWNHNRYYMCSRHLNQKAACEGVGALHAGEIENAVLDAIREKISALGPLFPPRAEQMDPKIGELKIKAAQCQKEIDLYLSKLRTSNRAVTDYINKKVSELDAKKQFCQQEIAELENQAQCCPVRPRAIQNGMAYWEQLSNPEKMTVVDALIGSVTASKAHITIQWKL

SEQ ID NO: 635 - protein, 594 aa, unidentified
  source 1..594: note = uncultivated organism
MEELYSSRKGKRCIIYIRVSSERQVQGYSLEGQKRFLKEWAEFEGMTVIDIYVEPGKSGKSISGRDVFQRMLDDISTGNISVDYVVVFKLSRFGRNAKDILNSLTFIQRFGVNLICKEDGLDSSTSMGKMMITILGAVAEMERENILIQTMLGREEKAKQGGWNGGFAPYGYELVNGHLEIKEDEAAIVRLIFHKFLVENMGYSTIAGYLNKQGIPKSASKNSHGRKFTDWSIHMIKRMLSNPLYTGRVVFGRTRLERVEGTESDYRRRKSKEYIQSEELAHEPIITEEIYEQAQVKLQEKATTGHPGLGRPAKHLLSGILKCPMCGSNMYSDASVWTNSDGTRRYKMKYQCGHYARSKYGQCKKNVIDADWVESEVIAYTKLLVQNEQFAEDIQKQIGEKVDVSEIGTEIVNYNKRLKQLERSKANLERDIDDITDDDKNSERKRKDMNRRLNSIYDEIAEVEVSIADCEQMKESAEHDVLTAEAVYQMLLGFDKFFDKMDASDRRKLIETLISEVHLYPKETWEKGKSPVKEIKYAFPVSDEVLGKITEKVATVESCVLLERVSNRKADSYVKLNVKMEDYYRIKDNKQSKK

SEQ ID NO: 636 - protein, 537 aa, unidentified
  source 1..537: note = uncultivated organism
MKFAIYSRKSKYTGIGESIENQITMCREYIEKNFKVDEVLIYEDEGFSGGNVDRPKFQKMLRDAIANMFDAVVCYRLDRISRNISDFSNLINTLQEYNISFISIREQFDTSTPLGRAMMYIASVFAQLERETIAERIRDNMLQLARSGRWTGGITPTGFRSEAVPYFDNEMNEKKMYMLTDIPEELELVKKLYSQYLNLGSISKLETWCNENGVKSKNGKYFDKSALKLILSNPVYAVADELLYEYLASNNVDIASDKSEFDGSHGVLSYNKTQEIKRKRNRIKDMSEWVVAVSRHKGIIPSSDWIRVQKIIEQNKDKAPRYETSKIGLLSGLIRCSCGALMRLGYGSKSTKPERNYYYICTKRERSNGVRCANKNVVGKDADKLIVDELMKLSMGRSEFSEALKKNKSASSKQVKEQSKRILSLNKELDDTNKAIENLTMQLSLNSGSAAAKHIINQIEKLDQKATELKAKIENLKVEKEATLIEQMNIELVNQAIKDFPTIFNGLDINEKRKYLKNIIKDITWDGNAIHISIHGA

SEQ ID NO: 637 - protein, 558 aa, unidentified
  source 1..558: note = uncultivated organism
MSKKRVRTLLRVSSKQQLHDDDIPIQRAEVQGYIDKHPDWVFDKEYIEGAVSAYKNSAEDRELLQQILLDAKAHEFDVLLAYMSDRIGRKDEYSAYVVQLNSMGIEVWTINDGQLKTEEHIDKLMNYIRFWQNEGESKKTSARVRDAQREMVKAGKFVGGKAPFGYRLVPSGEISNHGRLLKKLEVVEKDAEIVRKIYSYVINQGFGYERIAKALNAEGIPAVTTDKWKAGTIGSILKNPIYMGYYSINRRINHGSFTRLDRKDWIYSEKQIPEIVIISQSDWERAQEIREARKNKINASKEEGLKMYMEQYNVPFSTKGKLALIGLAYCGYCGKRLKNGSYCNRWITKEGEEKVAFAGRYICQSKCAERNCYSQEYLEGIVFEVVEAYMEKLKKVDITEEIQKMQFQKKKRIDKELERIKKDSRNAKLDIETLEEKIPAAIRGDYFFSADKLASIIKEKEQELLSLEEERKAILEEAKQAELENSDMEMFVQMVPNWKEEFKNADVTTKQMLLAAMIEKIEVKGDGIKIKFKIQLDNFNSIPKTIGSSTTLYTRDSA

SEQ ID NO: 638 - protein, 518 aa, unidentified
  source 1..518: note = uncultivated organism
MASRRRDAIYARYSSHAQDQSQTIEIQLEACRRMAGPSPLEYVDRAITGRTMHRPAFNQMLEAAEQGEFDRLILYRFDRIGRSAHTHAVVSDLEDMGIEVISTAEGKDALTRGISLVVGESFSRHLGKRIYDSQLLRFSKHQWTGGPPPFGYRTEKREGHQYLIVDPEESKTVRFVIDTYLGSTAGVKEIARRLREKNYGTRHGAPWSFTTVRQILINTATKGEIHFGKKRMKRNKATGRRVPVYNDASTHKVYTDESLRIITDQEWDRVQAKMNSRAQNRGITRARRCIRPFSGLIHCECCGSLYYAQRDGRTGRYYYTCSTCQRQGRLMCPNSPNLREDQLMADVHALYSAIFEDADWLIRETLKELDLGIAQRRGDTTRLKAEIAEIDRTAMGITRLLVDPEITKGAKDALSRQLAETEGKRTQLQIAFEDLAGEADRSAGRAAGYIEKGLERARESFQNIGTPEELHAFVERFVGPSTALREGHLLPQSNPDHVGANADVAHSNIAATGVEPVT

SEQ ID NO: 639 - protein, 516 aa, unidentified
  source 1..516: note = uncultivated organism
MATIRVIPASVRKPDILRVAAYCRVSSSSEDQLHSYAAQIRNYTETISRHRGWKLIDVYADEGLSATGMEKRDDFNRMLNDCRRGKIDRILVKSISRFARNTRDCLVVLRELATLGIAVYFEKENIGTDTLTTEFMVSVYSSLAQEESVSISQNQRMSYQRRMERGEFITCKPPFGYRMPDRKNLEVIPEEAEIVRWIYEAYLNGKSSDKIARELTERNVPTTDGKPFWRQNAVVYILTNEKYVGDTLCRKKYSTGFPFKKKLNRGEKEQYYVEQSHPAIITPETFERTRELLKERAQRERNPHREYPLTGKIRCGNCGAVFSRQASKSGRVVWVCRKHGRKASDCPVGPIPETSFYATFIHMYNKLRANIDTALKPAAAQLESLNDILQRKNPEILAVNRAIAEANEQARNINRLRRDGLLDADICEGKLRQIAARLLELRRARRLVLQNDDVEDTAAVLRETVAKLNKSPERLETFDETLFAGLVETIIADSATFLRFRMYGGYELPERIREGR

SEQ ID NO: 640 - protein, 509 aa, unidentified
  source 1..509: note = uncultivated organism
MIKEDSIYARQSVDKADSISIESQIEFCKYETRGGPYRVYKDKGYSGKNTDRPEFQQMLTAIRNGEIKRVICYKLDRCSRSILDFANLMEEFQKYDVEFVSCTEKFDTSSPMGRAMLNICIVFAQLERETIQQRVFDAYHSRNKKGFFMGGKIPMGFKTEPYYLEGKKTARYTIKEDEANILQFMYSVYQDPLASLGDVVKALNDAGIKHPKKADGRWTRTHIGRMLHNPAYVKADLAIYEFFKENGVIIHNPPEDFIGTNGCYLYSEKGKTHPNYRLEGHHLVLAPHQGFVPSDIWLKCRKKQKHTGETVRQNKIKNTWLAGKLKCAKCGYALVIQKTVKPSGAVFRYVICSEANQAEKRCDGVHGLKADAVEAMIFEQIKIKLKEFSALSAPQEISIDPEITQLKTRIARLNQDIEIATQKAMEASGALIKYLSDKVTSLDEERTQCIIKLNELQSTQAAKKCDVAQIRNYISKWTELTLEDKMIVVDALIDKIRLSEHEISIKWNI

SEQ ID NO: 641 - protein, 558 aa, unidentified
  source 1..558: note = uncultivated organism
MNAKAKPALASPGRAALYLRVSTGRQAENDLSIPDQRRQLQAYCAAKGIPVVAEFVEPGASATDDRRPEFQKMMDAASAKPAPFEFIIVHSFSRFFRDQFQLEFYVRRLAKNGIRLTSITQDLGDDPMSVMMRQIMALFDEYQSKENAKHTLRAMRENARQGYWNGSRPPYGYRIVEAEQRGARTKKKIEPDPLQVENVRLMFRLARIGDGNGPMGSRQIADYLNQKGIRTQTGGRWGVGAVHHILTRETYIGRHRFNVGSWRKKEKKPESEVIEVAVTPIIEVDEFEEVQEVMRSRCPQLKAPRFVGGPTLLGGVSFCADCGGAMTLRTSGKGEQYRYYTCCTAARQGKTGCKGRTIPMDELNGLVVSYIEDRFLLPDRLEELLAGAFKRREEQAEHQRGRITELKNQAADAEAKLTRLYAAIENGVADPADSNLKSRIDELKRIRDAARADAERAEGRIDAAGAAITPAMLGRLAGEARSRLRGEDGGFSRHHLQTLVQRVEVGTDEIRIKGSRHRLLQTLVASGGKSGVETAGREFRSFNPKWLPGPDSNQRPTG

SEQ ID NO: 642 - protein, 563 aa, unidentified
  source 1..563: note = uncultivated organism
MASEKTINAGAYCRLSAEDGTQADSTNPRGESLSIENQKLLLQNYVREQGWNLVETYVDDGYSGTNFDRPAVQRMIADAKAGRINLIIVKDLSRFGRNYIEIGQFTEYLFPSIGCRFIALGNGVDTQTQSANNDMMGFLNLFNEFYSRDTSKKVRAVRKACAEQGMFMGTYAPYGYKKDPADPHRLMIDEDYAPMARRIFDLRCSGMSFSGIARLLNAEGVTSPTDLYYQQRGTANPRRVNHCWCATTVKQIIRSEIYIGNMVNGKCGTVSYKNKKIVQKDPEDWIRVEGTHEPLITQEMWAICAALDEAGFQKRKQPDEKASTLTGMVYCADCGFKMNISRQRQERKSGAVRYYNYFGCGSYRRSGKTACTLHSIREEILLDLVTADIREKARAVVFDKENVSQKILRLKSEESDSRLAGYERDLKAARARLPEVERLMMNLYEDRIKGTLPDAVFATLMRKYETQQAELNGQIPVLTEKVQQGRQSADNTAQWMRHIRQYTQLETLDEAILIELVERIEVAEPQVVDGKKLCDVKIIYRYVGYVDETLSQAEEVRDGAKAA

SEQ ID NO: 643 - protein, 530 aa, unidentified
  source 1..530: note = uncultivated organism
MEKAALYVRLSDEDEDKFQKEDLSQSIINQHELLIEYAKEHGFLIQNIYCDDDYSGLYDDRPGFQKLLADARNGKFNVIIAKSQSRFSRNTEHIEKYLHNEFINLGIRFIGVVDGTDTAIKSNKKTRQIYSLTNEWYCEELSDSIHAVFDTKIKQGKFIGSFAPYGYIKNPKDKNSLVVDSEAAKVVKRIFRLYISGNSIETICEILSNERIPSPAVYKKQQGLSYKFKQEYNYCEKYGLWSETTVRRILSNQSYIGHMVQGKTRKMNYKSKQMVSMEKEKWVIVYNTHEAIIDKDDFELVQKLLKVKVRRNKRSAKLQVLSGKLQCAQCGSTLVRSGRNHNSTRNYIRCQLAKKSKGEYCTTHKAVIEEIEQAVFEKVKSLINCIVENDGNVQELSELLKVNDRHLSQKKHLEKKISDIDKSIVDTKNTLKSLYIDKTKGIIEEYMFIEMNIDFKKTLDESISEQQRLNEKLQQIVDEENRVKDYCKLVLEYCDIQSLTREMVNKFIDYIELSEDENEENQELIIHWNI

SEQ ID NO: 644 - protein, 521 aa, unidentified
  source 1..521: note = uncultivated organism
MPRNRNPPEPPLKQIRCAIYTRKSTEEGLQQDFNSLDAQRESGEAYVASQKTEGWVYLPHRYDDGGYTGGNMERPALHRLLADIEAGKIDCVVVYKVDRLSRSLLDFARMMETFERHKVSFVSVTQHFNTTHSMGRLTLNILLSFAQFEREIISERTRDKIAAARRRGKWSGGKPLLGYDLVAMPGGSKLIVNEDEAARVRGIFELYLAHQRIAPVLQELDGRAWRTKEWITRKGASCGNRPFDKVTLYRLLTNPAYLGKVKHHDDLYDGEHAAIIDSGVWRRAQALLQRNGRTGGQAVKNKYGALLKGLLRCAPCDCGMVHSTSSKGPKRYRYYVCVQAQKRGWYTCPSKSVPAGEMERFVVEQIRAIGRDPVVMAETIRQVRAQSQKAIAELEREQKALERDLARRSKASRLHSAGAPTPNCPDLANRQDELRRLEIRLTEVRERHLALSREVVDEQEAVRALSLFDPLWESLTPGEQARMVRLLVERVDYDGQKCTVTVTFRPTGIKALAQRTTECAA

SEQ ID NO: 645 - protein, 545 aa, unidentified
  source 1..545: note = uncultivated organism
MVTKEKKRTYCAIYTRKSTSEGLDQDFTTLDAQRESAENYIASQKSEGWVPIQEQYNDGGFTGANIERPALQKLLSDIKEYKVNCVVVYKVDRLSRSLMDFSQLLEFFEKHNVTFVSVTQHFNTNSSMGRLTLNVLLSFAQFEREIISERTKDKMGAARRKGKWTGGRPPLGYDLDRENKRIVVNKEESNLVKEIFDLYIKERSLLQVAIIINDKGHRTKRMTYNSGKTYGGKKFGVTHVQFMISNVVYLGKVNYGGQIYEGQHDDIVSEDTFKQAQETMKQNRVERKVTKNHDCTGLLSKLLHCNTCNTFMFHTYTLKKSTHKYRYYLCCNAQKRGYASCPTKSINAQAVEDVTIDRLKTIFSDQNIEDHHHNNEIEALLSPVWDTLFPQEKRRVLKVLIKAVDYNAENKKMGITLRENNLRLEYDVDLKGVRPLKKWYKEREIDKEPKLKKNLVLAHQLQSLIDEGKIENPKQSSTWLNLSPARIDQLMNMLLLSPSIQEEIINMDNGKLDSIPEYKLREVTSEIDWNKQQVAWRELLESSKK

SEQ ID NO: 646 - protein, 506 aa, unidentified
  source 1..506: note = uncultivated organism
MAIAIYARQSIDKKDSLSIETQIQDCKNQIAREDKNANVVIFKDRGYSGKNTDRPELQKLISEIERENIEKVIVYKLDRISRNIVDFYNLYDFMEKHHCAFYSVKDAFDTASPMGRLLMGILINFAQMERENIQIRVQDSYYARAENDGRWLGGKTPYGFKLGKTKNKISTLKPTEDMEIVKLIYQKYAYDSNSSLHKIVRYLHEEKGIVKSARAIKIILSNPIYVKADERLYNYYKALGVEFLNDKEDWNGINACQVLNKTDQSQRKSVMKDKDEWKVFITNWEGVIDSRTFLMCQERLSENVALSRDNTSKGKFAELSGLVKCKKCGRAIKIKGKYGSMSCIGRSELRGVCDISFRGIRVKMVQEKVGIEMQKYLDNFMENQEKWKQKKEEYQSQIDKLSNEINNIVSLLAENPEVNKPLMSGIEERQKQLADVNYKMQIDVSPSDKIEYRVLKILQQINPELVNVKNVIYEELDEEQKQALLKIVVNKILLDETGNIEIEWKI

SEQ ID NO: 647 - protein, 591 aa, unidentified
  source 1..591: note = uncultivated organism
MRRSHNRTAASPSAADGRRRLRCAIYTRKSSDEGLEQAFNSLDAQRDACEAYVASQKHEGWGLIDESYDDGGFSGGSMERPALQRLLERASKGAVDVVVVYKVDRLTRSLADFARLTDLFDRHGVSFVSVTQQFNTSTSMGRLTLNVLLSFAQFERELAGERIRDKIALSKRRGMWMGGLPPLGYDGIDRKLVINDAEAETVRLIFRRYLDLGSVADLKRSLDGEGIVSKKRIFADGRIVGGNPISRGALYQILHNRLYRGEIAHRGEIHQGNHESIIDTELWDAVQARLADQAPAPAETGTTANSEGSLLAGLLFDANGNRLTPTHATRRGRRYRYYISASLVRGGRAADATNGIRVPAGDLERLILDALAERLRDPVWITEAVATTSATETVQLVDAAARLAGRMAASDDRFGDETRGTIRDAVHRAVVTPQEVRLTIDRHGLRRVLGPPLNETDSPAVPHDHPLDIVIPAQALRCGKQVKLVVGNVSTTPRKVDPVLLRLVSDAHRWFDGLRTGRFATIAEIARLEAQQVSHVSRTLPLAFLAPNIVEMIVAGRQPATLTAERLKERKRPLQMEWKRQSEALCGATAC

SEQ ID NO: 648 - protein, 532 aa, unidentified
  source 1..532: note = uncultivated organism
MVVLLLPQKSFADITERKCKMNVTEIKPIEAAGTQKIRLAIYCRVSSDSEDQLHSFANQIRYYSTYTREHPEYELVDIYADEGITGTSMERRDEMNRMLADCKGGRIDRILTKSVSRFARNTEELLLSVRMLKEIGVSVYFEEQGIDTAKLSAEMLLTMPGVVAQQESISISENMRWSYRRRMERGEFNCCKAAYGFRMIDGLLEIFEPEAKVVRWMFRLALRGIGRQSIANLLTAKNISTPSGGRIWSYTSVDQILRNPRYMGDAILQERYTTQTLPFKRKKNNGEMPKYYVENANPAIITGEIFEAVQILLEKRRGSSYAQRNRYPFSGILYCPDCGKTFRRQTTNGKAYWMCAARAAGKTNCRSIRFPEERLEDTFTLLLHKLRDNRESLVESLIQKTEEFYHTRHANTEVIQRIDKEVADLTAKNHLLVKLYQQQTMGAEDYHRRVNEINRRILALRRKRSGLLYCAEESQHLGELRELSDILKGSDDSWAFNGELFLELVDKMRVISKEKITFEILGGIPLTEHVAG

SEQ ID NO: 649 - protein, 570 aa, unidentified
  source 1..570: note = uncultivated organism
MTAGIRCAIYTRKSSEEGLEQSFNSLDAQREACESYIQSQRHEGWHALAAHYDDGGFSGGNMERPALKRLMADIQEGKINTVVVYKVDRLTRSLADFAKIIERFDAHKVSFVSVTQQFNTTTSMGRLTLNVLLSFAQFEREVTGERIRDKIAASKKRGMWMGGIVPLGYELRDRKLHIHPEEAAIVRTIYSNYLRLGCVMALKDYLDHNGIRSKPRSRFIGTKPAATSFSRGGLYLILRSHIYVGEIFHKGATYPGKHEAIIDRVQWNQVQELLRGNRQGKRRKARVTKASLFTGILFDAAGNLYTPTHAKKAGRRYRYYTSQAVIHKATETDVPARIPAHDLEVAATERILEFLNSPKQVLGALGPSGKHSRGGRYAELLSQASDKVSSWARASSDAKERFIRAILERVVIHQDEVEILIRTDALIHQLAGKMAPPSAAGHEVLRLQCPFRHAVQGKAVRLIVGDPQAPPAASTLAILKAIARARTWRDQIIAGQASGIRDLARLHKLNHSYVKRIYSFASFSPASIEAILNGGVPPDLSLDSLVRKVPLVWAEQGSVLASATGVPAEL

SEQ ID NO: 650 - protein, 560 aa, unidentified
  source 1..560: note = uncultivated organism
MRAAAYIRVSDEDQVNGFSLDAQRRAFYEFCAQKGWEVVGIYNEEGRSAWVESVAKRPTFREMLEDSQADKFDVVVTHTLDRFTRNLRVMLDAFHTFSQHNVTYVSITQDIDYTTPEGRLFMTMLGAFAQYFSDALSNHTKKGMKERAMQGMFNGEPPFGYQRCDANCIGIDENHTGCHIDPVAGPAMLETFEKYGSGSHSYRTLAEELNKQGFRTKGRRRPDPEIEGSHDDPDDAKGALFTAWSIRDLLSNRFFLGEVRHKGEYYPGRHQRLVPEGLFNEVQERIKENRSRKSVSVSRSSRNPHMLAGLLRCHKCGTKLWSQRQGRGGETYYIVPNKGTDRKCDHAGQSFVGYVFEGQVDQIFGGFTLRPDWVDWIIQNYVEGTDHNESLKKREAIQRKIERAQELYLEGDLTKERYLIIKENAEAELTTIYVPELDDAAEAVKILTDLKELWNSADPGQRNRLLLAVFHSIYMDLEHREVVGFRPMKAFNALLHAMDYREDVEVWSTPYGEFTRDGGDGGESHSPSRNSPERICYKLVRRFSLAAADSRRRDSATASR

SEQ ID NO: 651 - protein, 542 aa, unidentified
  source 1..542: note = uncultivated organism
MKEVRCAIYTRKSTEEGLDKEFNTLEAQREAGENYVLSQKHQGWKIIPEHYDDGGFSGGNMNRPALERLLEDINAGKVDMIVVYKIDRLTRSLTDFSKMIEILEKNNCSFVSVTQNFNTADSMGRLMLNILLSFAQFEREVSGERIRDKVAASKKKGMWMGGAVPTGYVAINKKLKIKPEEGEMIRFMFESYLKHKSITAVCKLVKDKYGIEYRREMIKRLLKNPVYLGKVKHKNELYDGQHPAIIDQDTFDKVAEIRASKDVAKRSCLYKKNEVGILRGILTCGCCHTRMTPTVSMGHGRRRYYYTSTKAKYYGYHTCHNGSVAVAILDEAIIQIITPMLKDAHILNGLIKQIAPDKTKELFKIMQHPEKVLAKMSELDKSLLVKELIENITVQCDNLEIKWTALALDILPDKYISQTKDDIMTIDVPLSRTHGVLQVTVPEALTQNSCPNKELIKALSKAFKYQKILTSGRMTIAELSLHEELDAGYLGRILRLTSLAPDIIKSVLAGTQPADFILKRLIREDIPPIWAEQRKKYNFPKI

SEQ ID NO: 652 - protein, 614 aa, unidentified
  source 1..614: note = uncultivated organism
MEEERKVAGIYIRVSTEDQAREGFSLGEQEEKLKQLCDYKGYEVYKVYCDAGISAKDMEHRPKFQEMLKDMKDGKINYIVAYKLDRVTRSVRDLEELISQLEKYNTYLVCDRDDVNTSTANGRFFVRMLTVLSQLEIEIVSERTKFGLNGAIKSGHLPGQVALGFKKDGNRKTIIDPATAPIVKRVFDLYLQGKTFLQISNIFNEEKVLNKNWKDTHIERIINNRLYMGDYEMYKRLKEWKNVEPVIYMNVVDPIIPRYIWEECQAQKIINQRTYTRDRVYTFFQKLKCPKCGKIMKCKGSGGKRKKYVYYNCEDCHENIRESYVEEEFEKIVGQLLRFDNEYNELFLPLFADKEKSVDKSDIEREIINLTKQKERIKKAYMSEVVELDDFKEDLKVINEKLDILTKQLEKEQELKNRNRFTPEKVMADRDLQRIFMQNGNDVSLFLTEWQTMTKEDKQEFIAKYIESLTFEKDDRYPNGIHLIDIKLKSLFTEKVSRLSELGLSQVPVEFISNDKSVILNVSYPLKESQVKDYMKEFKDIKGIKLHIHPTFNYSFEDMPNEIVFDLDKNDKVLKLIPIIKDIDNPENISNKFKLGIITSTIETIKNNHDSDHN

SEQ ID NO: 653 - protein, 548 aa, unidentified
  source 1..548: note = uncultivated organism
MKRVLCLYRVSTKGQVDPKDDLPMQRRECLEFIKRMPDWIYYDERLEKGVSGYKVSAAKRDVILEIKALAEEKRFDVLLVFMFDRLGRKEDETPFLVQWFIEHGIEVWSTREGQQRLDSRADKLINYIRFWQAGGESEKTSIRVKAAQTQMTADGIWRGGARPFGYKLIHKGRVGKKNRPLYDLEIDEVEGPIVKEIFDMVCYEGYGTLRLANFLNAKYPHLHKVWTAQTIRSLLRNILYTGRMHMNDTLSEPIESLRLIQDSQLEFAKYAIQSRIPRKYNQQRAAENLLLPDDAETKTSVYGATLLSGILYCAHCDHKLVGSYCTKQRPTGAYHRPIYRCYNGAVEAKRCNGQSVYSAKKIESAVLEIVHQYFNSINQSVDGVWRAQVRRKFRAKQAAKLRAANAEMEKLKQQQIALREEVLKSLTGESSFSADLLRNMLDENKVATERARQQLETCKQESETEEAKLHHLESQYKSIASWAQEFDSAPIDTKKMILARIIQRITVDRNYHIVIRFFVSIDDFESTINVRDSDIHVEQTGSFIETIA

SEQ ID NO: 654 - protein, 527 aa, unidentified
  source 1..527: note = uncultivated organism
MKKQENKPVSNAAVRCAIYTRKSTDEGLEQEFNSLDAQREAAEAFIESQKREGWVCVPDRYDDGGFSGGTLERPALQRLLDDIEKGKVNCLVVYKVDRLSRSLLDFARIMGTLDRHEVSFVSVTQQFNTTHSMGRLTLNILLSFAQFEREIIAERTRDKMSAARRKGKWTGGMPVLGYDIDPRGGRLIVNHEEAANVRAIFELYLEYQSLRSTAQELNRRGYVTKRWVTKKGRMRGGDPFDKIKLFGLLNNIIYLGKTHFNGVLYEGEHDVIVNQEVFNRVQQILRRNGRNGGKDVRNKYGALLKELLYCGSCACPMVHTYVVKEKRMRYRYYVCSHAQKNGWNTCPTKSVPAAEIESFVVDRIRCIGRDPQVISMVSEQTRQEYTKKKEALENESRLLKGRFKQHNDDIRRLIDGASDNGHNAILSEKLARLQENIKGAEQKAIQIRDELSTLDKTMVTEEEFSTLLSRFDPLWEVLSPREKIRVIRLIVEQVVYDGHKQSITLAFWPNGIKTLLKEINSDNETQE

SEQ ID NO: 655 - protein, 569 aa, unidentified
  source 1..569: note = uncultivated organism
MMRKRCAIYTRKSSEEGLDKEFNSLDAQREAGKNKILSQRHEEWELISDHYDDGGISGGTMERPALQRLLDDIKANKIDIVVVYKIDRLSRSMLDFLGMIKFFDEHKVSFVSVTQDLNTDTAMGRLVLNVLQSFAQFEREIASERIKDKIALSKKRGMWMGGAIPLGYDAVDGKLHVNADETKIVRYLFESFIETSSPTDTIRKATEAGYKSKARRARNGKHYPARNFTKPSLYQILRNQLYIGKIEHKEKGEAYDGLHDAIITEDMFNQAQAILNTDAKYRQRKSKNDRPYLLKGLLKDPKGYSLTPTFSKKKDKIYRYYVSTHAIKTTYDNCPLKTISAPFLEEIILDQVKRALTNVEWVQRMQSQNNDHSIKLPDIRIALKNFENMWEELFPVEQARIIQLVIDGIIVHPDKIIITLHPSGMLSVLHQFMPDLKTHGDINEPMLMEIPVQFQRKAKRKHIIKPDGSHVIDMQNPNMDEALIKAIGRAHKWQAILDSGEVKSIREIAEKEKLSASYAEKVVRLTELAPDITTAILNGKQPQALQLKDLIKGQPLPLDWNDQRSRLGF

SEQ ID NO: 656 - protein, 538 aa, unidentified
  source 1..538: note = uncultivated organism
MAELKPVRCAIYTRKSSEEGLEQSFNSLHAQREACEAYIVSQKHEGWRLVPTAYDDGGFSGGSMERPGLKTLLADVEAGLVDTVVVYKVDRLTRSLADFAKMVDRFDAHSVSFVSVTQAFNTTTSMGRLTLNVLLSFAQFEREVTGERIRDKIAASKAKGMWMGGSVPLGYNVIDRQLIVNEPEAEQVRALFRLYLKLRAADDVVVAAHEAGIISKKRTSAGARTSGGTKLSRGSLYKILANPIYAGEIGHKGKRYPGQHDGIVEPGLFEAVQTLLETNRRKRRGTGTGASTPMLSGLVSDAAGERMTATHTGKANRRYRYYASAQTRVPAEELEELVTTAITGALASPAKLAGILPTMDLLSADLITSAAAVAQELADAPPDERRSLTLQLIGGVQVTDTGVTTTVKLAALGLTGGTALVTTPATIGRAKARLSLVVPGSAAPKPDHALIAAVAQARRWFEQLAGGSRPSLSAIAAADGVTPAYVRQLIGAAFLAPDLVTRIVEGRQPASLTLVRLKDLLPLPWAWPAQRALFAQEN

SEQ ID NO: 657 - protein, 506 aa, unidentified
  source 1..506: note = uncultivated organism
MMPDTIRCAIYTRKSTEENLELDFNSLDAQREAAQSYIASQRHEGWVCLPDRYDDGGFSGGTTERPAFQRLLADIEAGRVQCVVVYKIDRLSRSLLDFAKTMELFDRHQVSLVSVTQQFNTTTSMGRLTLNILLSFAQFEREIISERTRDKIALARRKGKWTGGPPVLGYDRHRDNTGSRLLVNEAEAMQVRVIFARYLELGSLLATVRWLDEHGWRNKQYTNGKGVVRGGRRFDKSTLQQLLINPVYKGQIVHKGQAFDGEHEAIVDEKVFDKVQAQLARNRNSGGTYHRNKYGALLKGLVRCKHCGCGMSHHFSSRGQVRYRYYVCMTAQKKGWSSCPYPSLPAGPLEQFVVERIKEACRDPRLRAEVVHRAKHDMDTQLRTLQQERGQWVARGRRCNARIKELVALNDPSILEELALRQEDLTATENQVRQIDKPIGDLERRRVDEDELCGAFESFEPMWDRLRPAERMRLIQLLVQCIEYDGASEEIAITYHAAGKEVASHA

SEQ ID NO: 658 - protein, 519 aa, unidentified
  source 1..519: note = uncultivated organism
MAWGTGPEQSMANANNGNGAPKPVRCAIYTRKSTDEGLNQDFNSLDAQRDAGEAYIRSQAGEGWTLLPDQYDDGGYTGANMDRPALRRLLADIQAKKVDCVVVYKVDRLSRSIRDFGKIMEILEKHGATFVSVTQQFNTTTSLGRLTLNILLSFAQFEREIISERTRDKQILARKRGKWTGGHLPLGYNLEDGNLVINEEEAARVRQIFEWYLEGHSVHGIVAKCEGLGWRNKEWATKEGKTFGGHPMRKCHIYTMLANPLYAARIRAGDEIVAATHPRIVDDNTFDLVQQKLKENTRNPGGQHGPKLEALLRGLLYCASCGSAMSPSYSSSKNRRYRYYVCLRTMQRNGDGCTTRAVSAPVVEEAVIESVRRFAMTPEVVEATARVARRRMAEELGRHREELKAVNVRVRNAKSQLVRAKNLDPDREAALREIVSSGEAKAEQLRSLVERGERLRFDDQMVRQRMATFDEVWKTMTIQQQAALLRQLIERVGYDARGDKVKVTYNSNGIREFCKGATK

SEQ ID NO: 659 - protein, 526 aa, unidentified
  source 1..526: note = uncultivated organism
MTRRNLNVVLQAPATAPLVRCAIYTRKSTSEGLDMDFNTLDAQRESCEAYIKSQQGAGWTALPDQYDDGGFTGGNTDRPAFQRMMADIKEGKIDCVVVYKVDRLSRSLLDFAKIMELFEKHDVSFVSITQEFNTSTSMGRLMLNILLSFAQFEREIISERTRDKIAAARKKGKWPGGSPVLGYDIDTLMHRLLVNEPEVAQVKKIFELYLEKQSVMATVQTLNEMDIRTKSWVTKKGKPLGGDPFDKPRLYRLLTNVAYIGKVPHKDQVYDGEHESILDMEIWEKTQMLLKTNGKTGGKHVRNKYGALLRGLVHCGSCGCAMVHTFTQKGDKHYRYYLCSNAQKRGWKTCPTKTVPAGDIEQFVVDRIRDIGKDSTVLEETIKSVLSQRRDKRPTLIAEKERLRKDLERLKAEGKRLVEALSHCNSGTSPIIGEQITRIEGAIEEKNRLLTEANERLIRLELESVDSADVRKALAAFDPIWDVLYVKEKIRIIQLLVQKVSYNGVEGTVEITFHPNGIKQLAKEMG

SEQ ID NO: 660 - protein, 537 aa, unidentified
  source 1..537: note = uncultivated organism
MREDRRMNAVIYARYSSNGQREESIEGQIKICEEYARKNGYTIIEQYCDRAYTGTNSRRPALIRLLKDSQKKAFQYVIVYSIDRFGRNLIQMLNNEHELGKNGAELISATEPFSNDATGRLCRNIMMSYSQYYSEELAQKINRGLDINAEKCIYNGGVVPLGYKIGDDRHFQIDENTAPIVRFIFERYVKGETVVKICESLNQSGFKSARGSVFNKNSLHTLLRNEKYIGVYTYRDTKVPNGMPRIISDELFYKVAAIMDKNKKAPARARAKEEYILTTKLFCGHCKEMMRGFSGTGKLGKVNRYYECKGRKGKKCDKKLVHKEYIEKVVLTECRNQLTTKNINKIVKEIVKIVNSEKDRSNLNHLKHLLVDYERKHNNLLDSVAECDISSVRQSLYKKLQENEKIIEQIKIEIKDEEKALSIMTAPQIKFFLCSLKKGDINDIKYQKLLINTFVNKIYLYDDRITIIFNASDTPYEIKDKLLSDIDVDNKEFIDEKGLFIDCKGPPIQMAVFREIGVQPFLLHKALRHLLRHLYSF

SEQ ID NO: 661 - protein, 549 aa, unidentified
  source 1..549: note = uncultivated organism
MKQDAHRTIRCAVYTRKSSDEGLDQAFNSLDAQREACEAYIASQRHEGWKLNLSRYDDGGLSGGNLERPALQQLLEDIAGGKVDMVVVYKIDRLTRSLADFARLIDVFDAADCSFVSVTQSFNTSTSMGRLTLNVLLSFAQFEREVTAERIRDKIAASKKKGFWMGGLLPLGYDQHPDPKMRTLVINESEARIVREIFHLYREHHCLRKVEEEVVLRGYRSKRRVFKTGKVTGARPLSRGQINFILRNPVYIGRIRHKQETHEGLHSSIVDRELWNDVQTLLDTKSPRKSQSPSKSGALLTGRIFDEADDTLTPSHAQKGNRRYRYYVSSRLLSGKGKDDTGWRLPARQTENAVVTAVTEHLKAKSGQLVVRQTVAEVKKVQVQLGDLSEIEVCRLIDRVEVMPGQLSTQLNKESLADFLGVEVSNLSSEQLQIGIPFQMRRRGVEAKLIIGTGTAHPDQALIRAISQAFVWLEDIKSGEQVRDIAARYNRPADKLLLRLRLAFLSPRIVEKILQGRQPPELTLTRLMKMKIPSDWNDQWRELDFDGVA

SEQ ID NO: 662 - protein, 523 aa, unidentified
  source 1..523: note = uncultivated organism
MKKAAEPIKTVRCAIYTRKSTEEGLEQEFNSLDAQREAAEAFITSQKAAGWMCNSERYDDGGFSGGNADRPALQRLIADIEGGLVDCVVVYKVDRLSRSLLDFARMMETFERHGVSFVSVTQQFNTAHSMGRLTLNILLSFAQFEREIISERTRDKIAAARKKGKWAGGKPVLGYNLVPGPGGSKLKINNSEAERVRDIFSLYLAERSLLRASEILNERGWTTKRWVSKNGEPQGGRRFDKAVLHKLLTNPVYLGKVRHHEDLYDGEHEAIVDEAVFREVGELLVSNSAKGGRSPCNKHGALLKGLVVCRSCGCGMSHHFATSKNANGGSKRYRYYVCGRAQKEGWSKCPGPSLPAEELETFVIGELRSLGEDSGLVRDAVLAAQVSLRERLASLNTDRDTLAVELDAARSELRDIVSEGRDRNGSAAVAAELRERIRDLDARGRRLDARVASMRDRVLDEDELVGALEAFDPLWEQLNTKERERLVHLLVKRVEWDAETETITVAFNAEAAEVIDEEAPCQN

SEQ ID NO: 663 - protein, 533 aa, unidentified
  source 1..533: note = uncultivated organism
MLFKQQYYYAAGYERLSDEDEREGESCSIDSQRKIIGQFCESKNIQLVDYYVDDGYSGTNFDRPGFQQLLADIKRGKINMVIVKDLSRFGRNYVDSGYYIENVFDEYNVRFIAVDDAVDTLQGENMVMPIKNMMNDFYAKDISKKTRSALNARAKSGSYIASKAAYGYMKDPNDHNKLIIDPMTAETVREIFYLASTTLGYHAIVNHLTRNGILTPQSYLVTQDPGYFKKKEFKPHCQWNNKTVVTILNNPVYLGNIVYGRTRSKKIRSKDRLERPEDEWITKDGTHEPIISQELWDAAHERLKTRKREKKCGEVHMFSGYIYCADCGAAMTFNNRDLRKDLNGEFLCGSYKRKGKHACTTHYVTYEMVYQMLLDDIRAKSREANKDEERFIKSLEQENELLASREISSTVQEEKQARIRIGELDRIISKLYEDSALGVIPTERFAGMFAHYDSEQRNLKAKIANADLLQQRQQQFGDKATVFTQFIKEVTNMTELTGDILRKLVKRISIGQSGINPVTGKKEQAIEVEFALC

SEQ ID NO: 664 - protein, 509 aa, unidentified
  source 1..509: note = uncultivated organism
MAIVLYARKSVERENSISCETQIEYCKMMIKPDERNEKIITLIDNGFSGGNVNREGFQKMMKLIRQGRVSKVIVYRLDRISRSLIDFVYMLQEFKNYHVEFISSQESFDTSTPYGELVVKILMVFAEFERTSIIDRVTQAYAHRSSMGFYMGGRQPYGFELIPTIINNIKTKKLSPIPSEIEQVRYIFEVYAQEDVSLRRLLDILIAEGKTPTNGSQWTTAKLSTLLKNPIYVKADSAVYDYYDKHGVHFINDPSSFTGEYAAQLYGHTKHKSDAPDWSDMKLVIAKHQGTIDSDIWIKCQKKLEKNRQVGNSCSNRTSWLAGKVICAKCGHSMTTIKGKINKDGEIRRYFNCTGKSHKKICTGPKVSIYAEDLENMVYDCITEKLVELKCAKSTTHKNSSSEINEIRLKIKTIEKAEEQLMDTMLTNGFDEALLALANQKATQFKRDKAALYERLEELKSTDEQSEVVINLAKSWKQADYRRKKAVAKILIHQININEDGSIQIIWNI

SEQ ID NO: 665 - protein, 604 aa, unidentified
  source 1..604: note = uncultivated organism
MSEKPRAKAYVYTRVSTAMQVDGFSLDAQRDEIRRFAELKKIDIVGEYCDEGKSGKNTKKRTEFNRMLADIKRKKDDVRYVLVFKLSRFARNAADTLENLRAMQNCGVDLLCTEDGLDSSSTSGKLIISIMSAFAEMELENIHTQTMAGRRQKAKEGKWNGGFAPYGYKLVDGFLTIVEDEAETVRYIFELFTTTPLGANGVAKRLNAEGIAKNERPNGKHTVFTGDFIKKTLDNPVYMGKIAYGRRKTEKVSGEDGRTHIVKETDESNIIISEGVHEPIVSEEVWNEAHEKRIRTGVKKEKLEKEHEYILSGLLRCPACGKPMYGIPSRKKRKDGTPYPVSYAYKCRQSKNLTGIDCSFNKQFNCREIDAEVSTAISMCFITPEIVERIRAEMNREYDVSELETKLETVKKNQKVLLARKKKLEQARDALDPLDRNFDMKFDSFTDSLDKVFDELREVERVIESIEIKIRTATNSKKTKEDAIQLLLEFGQMYPTLPEAEQKKIANVLIESIEIFPTKRAYGYLKTIHFSFPVLSGDEIKQTMSIWDTHPDILDEDGNFNGYNPEDDLPPVEMETGTIVVHDEGEVFPPKRITGESVVCLTRK

SEQ ID NO: 666 - protein, 565 aa, unidentified
  source 1..565: note = uncultivated organism
MKQTLPNCDEYTKRVGIWIRVSTEEQANGDSPQNHRSRAEGYALSRGWKILEVYDLAGVSGKSVADHPETKRMMADIKRGHIQALVFTKLARLTRNAKELMEFSDFFQAHHADLVSLGESIDTSSPAGRLFFNLVGCMAQWEREEITDRIRSSVLVRAKQGKPLSGSAPYGYIWKDKKLVVQADESPIRRLVYELFDEYKRLKTVARVLNERGYRTRNGKMWSDTTVRYMVRDPTAKGVHRQNFSASVGKRMVIKPESEHIFNGVEAIVSTELWERCNAHLDARYVKRDRRPGKTPSHIYSGFVTCHCGGKMYVPMKTAKYICQACRNKIGCQDLDEIFMEELKGYLVKAENVQAYLNKAGAALSEKQALLEQRRNETNKLEEDKQKMMRLYLDGHIGGEDFKKFNDPIVEQRGQLDEELERVQGEIDVLKIDSLSSEQIAAEALNLHSRWPEMTLEEKRRVAELTVRSIVVGDGTINFNLIQLPSYQDFTNRQSSHLAPSRGQTSRAHGKRSAKSDDMSLGVEYTAHPAGLVRCSRFSVSNDVRRHAKSVHNILESRHPGRLRV

SEQ ID NO: 667 - protein, 558 aa, unidentified
  source 1..558: note = uncultivated organism
MLQPSTATDTTKRWRCAAYVRLSQEDGDKAESDSVVNQRQLIREYVNNHAELTIVEEYADDGYSGVNFDRPGFVKMMEDVRNGAIDCIIVKDLSRLGRNYMEVGKYLESIFPSLHIRFIAINDNVDTGCTQTDADIFTIPFKILFNDMYSRDISLKVRSQLDVKRKRGDFVGNFACYGYKKDSENHNHLVVDPEAADVVRQIFVMTIQGISASHIADELNRQGVLCPLEYKRGQGLKVSTNFQTHDRAAWAPNTILRILKNEFYLGVTVQGKRTSPNHKSRKLTMKPESEWDRVEGTHEPIISQSQFEAVQALLRRDTRTAPDQESLYLFSGFLQCGDCGRNMVRRQRKYKDRTYGYYTCAGYHHKSGCSSHMISEDRLYGAVLCAIQAQFAAIIELDRLVQYANNLPDSPDSAHRFDVQLAQLDDEIRKNQKMKMFLLEHVHDGLLTEEEYEELRALYDERIRSNKISRTYVEKMRDNAQKMMQKNEWLARFKNHPRIVTLDRMLLSEFVDVIEVFDNKRITIHFKFEDQIRRIRNYLEIKIPEYADRGMNTINKEC

SEQ ID NO: 668 - protein, 509 aa, unidentified
  source 1..509: note = uncultivated organism
MSRPLRCAVYTRKSSEEGLEQAFNSLHAQREACEAYIKSQAHEGWRLVKTPYDDGGYSGGSMERPALQRLLAEVVQGQVNVVVVYKVDRLTRSLADFARIVEALDRHGASFVSVTQQFNTTTSMGRLTLNVLLSFAQFEREVTGERIRDKIAASRRKGMWMGGTVPLGYDVEQRSLVVNKTEAATVRDIFETYVRFGSVASLQQDLERRGVVSKRWTSSTGRTRGGVAFNRGALYWLLRNPIYIGRISHKGQLYDGRQPAIVDQALWDQAHALLSAKSASRERRPALPTGRPLAGRLFDDKGNAMSPAYTTKRNRQRYHYYVSQALLRGEKAKAGTVARVPAFEIERLVVQALAPTADRRASNELFEQIQRVLVHPDRIEIVRAPADGAGKDDEQQNAIVVVKARLAYRNRIMVLDEGRGAPDPVVLRALARAHEWRRWLEEGQAHSYQQIASKARVTHGHVQKVMPLAFLAPRLTRDLLDGRRRLSGGLMAQLRRGIPLDWDQQLDVF

SEQ ID NO: 669 - protein, 698 aa, unidentified
  source 1..698: note = uncultivated organism
MKKNDACIAIYSRKSKFTGKGESIGNQVELCREYIRIHYGEDVAEQALIFEDEGFSGGNLNRPDFRKMMDAAKKRKFRAIIVYRLDRISRNISDFASLIESLSRLDIDFVSIREQFDTSSPMGRAMMYIASVFSQLERETIAERIRDNMRELAKTGRWLGGTTPTGYASEAVKSVTIDGKTKKACKLKLIPEEAETVKTIYDLYVALDSQTLTETELLKRGIKTKNGKNFSRFAVKAILQNPVYMIADQDAYEYFMKKGTDLFASREKFDGLHGIMAYNRTDQEKGRATIPLPPDQWIVSVGQHPGLIPGKVWVGVQDSLERNKSKSYRKPRRNEALLTGLLYCSCGNRMYPKLSNRETADGQGIYSYVCSMKARSQRNVCGQRNANGNTLDLAIIAQIKGLADNNGDFLTQLEQSRKFYTSSQTEYETHLSALRQEKADAEKKIDGLVDSLADLGNSGAKDHIARRIEELNQVCQDLTERIKELETLTAQNSLGGIEFDVMKQLLSMFKNSIDEMSVEQKRAAIRSLVHKVVWDGENAHIVLFGSPEDEIDQTGLPSLITGLSQETDGQEDDCLGKEMPPDASKSRWGAGSILNTPGRIGRQAHVFIWPERGDALDEANGSDGDEIVLVGGRNVIFLQNVGDQAQVVLHQLVPGLQISLGRPGQILPFLLRAQGSGKRAVVPQAQGKTQRMDQQKCG

SEQ ID NO: 670 - protein, 559 aa, unidentified
  source 1..559: note = uncultivated organism
MSKQINNTKAGLYYRLSQEDERSGESLSIENQKLIVEKFARDNGFEIVDEYVDDGYSGTNFNRPGVQRLLEDAKNGRINAIIVKDMSRFGRNYIEVGQYTDYIFPTYNIRFIAVSDNHDSAKDDTCGMNMLPIMNVFNEWHAANTSKKIREVIEANARAGKYRVVEAPYGYVKGPDENRLPVRDEPAASNVLRMFEMRASGISPQHIADTLNDEGILAPADYKEQKFGFVNTRRSHHLWSCAVVKQILNNPTYLGHLVQMRTTNVSYKNKKVIKHDPDEMVTIYNTHEAIVSQELWNKCREMEASVSQGKKEKSGIVQPLSGLVCCADCGAKMYVGWNNTRHKRGGERTYFRQNYNCVTYQKFRNRLCPSHYIKLETLHQIVLTDIRDKIEMVQIDEKQAREEFLRRSEENSVAVTSADKRKITQGKKRLDELDKLIVAAYEDKVIGRIPEEICVNLLSKYQEERQMLREEVSEAEARIADAEKNRADVEEFIRRLKAYGDPTELTREMCMELIEFVTVDKCPGRYSKDPREIHIYYKLLDKRAAEENRGKPTKTCADK

SEQ ID NO: 671 - protein, 538 aa, unidentified
  source 1..538: note = uncultivated organism
MKYAIYSRKSVYTGKGESIENQIEMCKQYIFSKFSGAVKEDIAVYEDEGFSAKNTDRPQFQKMLADIKRKGCEYVVCYRLDRISRSVSDFSALIEDLNNRSISFICIKEEFDTSKPMGKAMMYIASVFAQLERETIAERVRDNMLMLARTGRWLGGPPPTGYVSEKVQEIIMDGKLKDSCQLKENPDEIKAIDIIFEKFLELRSLHGVSKHLIQQGIRTRSGKIYSSIVIKDILQNPVYSVADKHTLDYFTERNADVCFTEKDCGKKCGIIAYNKRDYKKKQAPRLSVEKWIIAVGKHKGRIAGQKWVAAQNYLKDNISDGKRPAKAQNDYSLLSGMIFCAECGNRMFAKTRNGRKDLYDYICHNKLRGGTHLCRSKNLSGVEADDTVCEYLMQYADVNSDIFKKLAELKSEAVGKADENPLTTIESLIKKYNDEMDNLVNSVSHGNIGQAFVQRVNLRISEIDKELTALNSEYEKLKNNINSANSNERELELIVDMLADFKTNYKNLTLHERRAFIKILTQKLSWDGRDLHIFINGG

SEQ ID NO: 672 - protein, 536 aa, unidentified
  source 1..536: note = uncultivated organism
MRSHSNYNVGIYCRLSRDDNNGSAESMSIANQKQMLAAYVDERGWTLQETYIDDGYSGTTFDRPDFQRMIGDIQNGKINMVITKDLSRLGRNYIMTGQYTDFYFPQNGVRYIAINDNVDTLNDDNDIAPFKNILNEMYAKDISKKIRSARAVNAKQGKFMGSKAPFGYVKSATDRYQLIVDEKTSNIVKRIFRLFASGESARHIANILNEEGIPSPRAYYYQSIGQVNPNVQESDTWSSAGVMQLMRNPVYIGNMVQGKRRVMSFKTKQREVTPKDEWVVVENTHEALIDAETWERVQERIISNQRARVSHTGEISLFSGIVRCGDCGAAMVFNKKSYSGRTYYIYKCSRYVDHGKSICTLHSISLSVLEESVLLDIQNSAKLAAYDQDLLLKRLINLSNQGQQKELSEAENILIEGTRKLEKVDVLARKLFEEKCSGNVPDSIFRKLMLDYEHEKEILKIDVDEAKKVMLKLRNQTQNVNACVERLKGYMHIESLDRKIVTDLIESIKVYEAKKVNGVKQQSITVHYRLIGNLTA

SEQ ID NO: 673 - protein, 572 aa, unidentified
  source 1..572: note = uncultivated organism
MKNGEMIAIYSRKSKFTGKGESIGNQVELCREYVKNMFGEEYVDRCVVFEDEGYSGGNLLRPDFKRMMEQVRKHRFKAIVVYRLDRISRNISDFTGLIDELTKLEVSFVSIREQFDTGTPMGRAMMFIISVFSQLERETIAERIRDNMHELAKTGRWLGGNAPTGFRSEAVSNVTVDGKTRKSFKLVPIPEEAEIPKLIFDLYTETDSLTAVEAELLRRRIKTKQGKDFTRFSIKSILQNPVYMTADEDAYHYFAQKEAEVCFPKEAFDGSRGIMAYNRTDQEKGKTTVLLPVKEWIIALGLHPGLIPAKQWISVQESLDRNKSKAYRKPRNNEALLTGLIYCACGERMYPKLTKRQTAHGEAVYSYVCRMKERSKGERCSRRNAGGNLLDAAIIEQIKTLTEHDSAFVAQLEQSRRFYTGSREQYESQLTSLRAEYAENEKTINGLIDSLGMLGDSVAKPRVLKRIEELTEINRQIENRIHELEGLTSANSLSDAQFDLLRQMLSMFRTSIDGMSVEEKRAAIRTVVRKVIWDGANAHVVLFDADEGEIEFPNEEFDADANPETPWGEDSK

SEQ ID NO: 674 - protein, 531 aa, unidentified
  source 1..531: note = uncultivated organism
MANIRVIPATAQVFSAQDKGVAIKRRVAFYARVSTDNEEQLTSYEAQVDYYTKLIASHPDWEFSGEYTDEGISAVNTKKREGFKQMLADGLAGKFDLLVTKSVSRFARNTVDSLTTVRELKEKGVEVWFEKENIYTLDSKGELLITIMSSLAQEESRSISENVTWGQRKRMADGKVSMPYKQFLGYEKGEDGLPQIVPEEADIIRLIYRQFMEGMTFSAIAKYLGSSGIPTPAGKSAWQVAVVRSILTNEKYKGHALLQKTYCENFLTKKIVKNTGQIQQYYVEDSHPAIIEPDEFDAVQAEIERRNSLGSIGRCGSTFSGKIICGECGGLFGKKVWGSYKGDKTYRREVYQCNDKYKHKNSGGRQCGTPFVTEDEVKARFLVAFNKLMANRDGLIEDCRLAQAAISDTAAIDAELAELRREIEVVTELSRKAIYENARTAQNQSDFNERNDGYLERHRVASERIDELEAAKRERVAKGKTLDRFIADIQKRPLALTEFDEAVWLATVDKVTVATDGTMTFMFRNGAEVAI

SEQ ID NO: 675 - protein, 562 aa, unidentified
  source 1..562: note = uncultivated organism
MADKRVRCAIYTRKSSEEGLEQSFNSLDAQREACRAYILSQKHEGWTALNTRYDDGGFSGGTMERPGLKQLLEDIKDDKVDTIVVYKVDRLTRSLADFAKMIELFDSRKISFVSVTQQFNTTTSMGRLTLNVLLSFAQFEREITGERIRDKFAASKKKGMWMGGIVPLGYNCVDRKLVVNRVEANMVRAVFRNYLRLRCVRKLKDLLHRRQIRSKVRTSIAGRTAGGRPFSRGALYHLLNNRIYLGEVVHKKACYPGQHDAIVSRGLWDKVATRLNENNQAHRTPKSLSASSVLTGKLFDTNGVRFTPTHAVKNGRRYRYYTSQAAVQHASVKPVITRFPAHQLECFVLSQIRKLLQSPEKWKIGLEKGPEAFAATKRARELGRAWLTLPMDKQHGLAREVIRRVVVGDGNAWIEIDRAKLLGAMMQDPDHSVEPARRLGILKLVGTFRVVHRSSELHIMPPDKEGSLEGAQIASLANAIARARYWYDQIVEGKVRSIRQLAAQDGLGPRHTRRILRCATLSPEIIEALVTGKHRPDLTLDQVLKQMPLDWQEQKRQILRVA

SEQ ID NO: 676 - protein, 557 aa, unidentified
  source 1..557: note = uncultivated organism
MATKKITVVQPTGRPRRQRVITKIEAAPRVKPKLKVAAYCRVSTARDGQLTSIENQRLHYEQVIGEKDEWELVDIYYEEGVSGTKKEIRPELKRMLADCRRGKIDLILTKSISRFARNTSDCLEMVRELTGMGVNIYFEKENIHTGSMESEFLLTILASLAEEESHNISGNEKWAIQKRFESGKFHISRAPYGYRLEKKKLVVNEEEAKIVRQIFASVLEGKGTSMIARELNEKGIPTGTTKRDGTPGEWTASRIQNMINNISYTGDMIFQKTFHDGERQRMNNYGDRPQYYVEDHHEAIIEKETFEKVQENNRQRGREKNNNPPADKRGRNSKYQNRYCMSGIVYCGNCGSVMKRQMTSLKSGKRYHWLCKQHLKDVTSCGQKKVLEEDIQNMFMSMLNRLYFAQGLILDNYIEEVHLMERQQHLEQEITLQNRLQENIDTRHRLMQLLTKECIEPILHKQKMIELEIEAAQIREELSELHDTEYLTEGARAFRRFVNKWGVEGERIPVGAKRLFPEEAFAEHVEKVVVYARLRFAFHLKCGLVFAESLLEGEEGN

SEQ ID NO: 677 - protein, 547 aa, unidentified
  source 1..547: note = uncultivated organism
MKKAAVYARYSSDKQTGESVQVQIDKCRDYCERQDILVCEVFVDEAKSGTTEGGREEYRRMLDMAGDGFLDVIIAYKYDRLGRSFLETLRSIGDLERLYDIEVCSATEPGNALVRNILLSVAEDFSRQLAGRVVDSMSNNAERGFHCGGVAPYGYISVKISDPSGRTNRKGAPIQHVVFELHPEQAPVAHRIFAAYGDGVSMKKIAASLNDEGITAPGGNTWDMSAVRYILYNEAYRGWRIWNKTKKVRKPDGKKTYRHRPREEWVIQEDAHPAIVDDDLWEAVEKTKQRRDNFRAGNTRKGGEKGAFSKYLLTGVLKCGQCGANYIAQISGGERAGQYAYYRCGYRQRRGESVCSNHTSLAMPRIEEAVIDLLQGEILTKQTVEVFIEDVLKHYKEQLRDPGQDELKKTVKELHKAERELTNLVQAIKATGISETLKTELERVEKRKASLEQTRQQLEQTKATKPTVPDKKAVLAALDGFRGLLESGTLQERKTVLEAHIEEIVVQPEGEVILKANPTGLLPLPDCSFDWCRGRGSNPYDLAAKGF

SEQ ID NO: 678 - protein, 538 aa, unidentified
  source 1..538: note = uncultivated organism
MQKHAALYCRLSVDDGSFGGSVSIETQKILLEQFCQAHSITEYEFYCDDGYSGTNFNRPAFQRMLSDINAGKINLVIVKDLSRFGRNYVEVGLQVEHFKEQNVRFIAADDHYDSTINEDDLMFPMRNVMNEMYARDVSKKTKAAKKAKAKAGQYIGSKPPFGYKLDPNDRHHLVIDEPAAEVVRRIFRLTADGAGYNKITRIFREEKVLNPITYFNQNNPDYFKADYWRKEFDWHVTSVRAILNNEVYLGMLIYGKYRNKSMKSTSKVKNPPEDWIIAENTHEPIISKELWDTAHKVMNSKRRPAKTGELQIFAGLIYCADYGYCLTYGQKQRKDGSYYGAYDCWMYRTHGKEYCPSHYINYDTVYNLVLINLRTVLWNYRNIAQQFKSILEKKFQTDSAKEAKKLQAEYEKKHRRFEEIDKILCKLYEDSAFGKIPESRYEAMSAQYESEQREIKEALPDLRQRIEQMKAESNATDKFVNLIKKYTVIDQLDAAILNELIDKIVVHHKEIAEDGRVFQQVEIYYRFIGKLEEAAESE

SEQ ID NO: 679 - protein, 507 aa, unidentified
  source 1..507: note = uncultivated organism
MAEITIIPAKNRSDEVVRTAAYARVSSSSEDQLNSFAAQIRYYTELLKDSTDAVFVDMYADEGISGTSAAKRAEFQRIMNDCRKGKIDRILAKSISRFARNTKDSLEAVRELKTLGVSVYFEKENIDTGEISSEMMLAIYSQFAQEESMSISRNCRMGVHKRMMDGTYKTASSPFGYDYVDGELKINPEKAEIVKQIFSWYVSGIGMNEIATRLNQLGVRKEIWRRGTIRCILTNEKYIGDTLLQKTFTTDILPFKGVKNRGEKEQYYVSGTHEPIIEKTVFDNAQKVLAKRDKPSGFAKERSPFSSKIVCGNCGSTFRRKPRKNCVCWVCRKHDEAAENCTIRQIRESEFHAAFVRLWNKMQAHYKAILYPMLRQLETLSEREKTGNTQLAVLRKEIADIKQQFYLLNTLNSQGTLDGAYFKERAQELDRKLLTSQKQLHASLDDKDGERLDKLRKLIGIFERAEPISEFDEIKFEQIVEKVTVLSETEIRFDLIGGIGFTERIVR

SEQ ID NO: 680 - protein, 567 aa, unidentified
  source 1..567: note = uncultivated organism
MTVPLRAALYLRVSTARQAEHDVSIPDQRKQGEAYCVARGYDLIETYVDAGASATNDRRPEFQRMIDAGISRPAAFDVVVVHSFSRFFRDHFELEFYVRKLAKNGVRLLSITQEMGDDPMHVMMRQIMALFDEYQSKENAKHVLRAMKENARQGFWNGSLPPIGYRVVAAEQRGAKIKKKLEIDPHHAETVRLAFSLALRGDGTSGPMGVKAITSHLNAKGILTRDGGRWGIGSLHKMLTRPAYIGRHEFNKRGKTKEIKPAEEVITVAVPPIIDEATFSTVQAQMKARNPKVTPPRVVSGPTLLTGLIHCAKCGGAMTIRTGKGGRYRYYTCSTKARQGPTACTGMTVPMEKLDALVATHLEKRLLNPKRLEEVLSTVLDRRQERSERKQKHIAELNKRAAETDLRLNRLYDAIEGGVANLDDPELKTRIATLKATRDQARVDADRASALLDTIRQKSITPQMLRKFASTARDRMRLPGGGYRRDHLRALAQRVEVTDGEVRIMGSKSDLLRTLAGAADPTGQVPSFVPKWRSERDSNPRDGSPPTHFPGVRLRPLGHRSVAVSYP

SEQ ID NO: 681 - protein, 505 aa, unidentified
  source 1..505: note = uncultivated organism
MESTTNGTPRVIRCAIYTRKSTEEGLDQNFNSLDAQRDAGEAYIRSQAGEGWTVLPTLYDDGGFTGANMERPAMKRLLADSQAGKVDCVVVYKVDRLSRNIRDFARIMDVFEKYGTTFVSVTQQFNTTTSLGRLTLNMLLSFAQFERELISERTKDKQSAARKRGKWTGGHLILGYDLDSVNSRLVINADEAERVRSIFNWYLGGESVFSIVAKVAQLGWRNKQWTTRADTLYGGLVLGRSHLYNLLANILYTGQLRVDNVLYPGEHEAIIDKETFDLVQARLKQNSVNGDKRHRTRMETLLRGLIYCSGCGSPMYQTYSSSNERRYRYYVCSRSQQPGDNSCAARSVSAPAVEDAIIASVQRVSVHQRVLEEAAQVIRQRAIEETTRLREELTGLQSRVKNFKSQVTRLHKSETSRRGELAEQISTGEARAIALKRELMIRERDYINGGEIHKTMESFEVLWKAMNIQEQGFLLRQLIEKVGYEGRTGKVTVSFKSAGLKELCK

SEQ ID NO: 682 - protein, 571 aa, unidentified
  source 1..571: note = uncultivated organism
MGRTSRKKTSPNEARLNVARDIFNTALYIRLSVEDNGKEDSDSLENQRDLLERFITEHPELHVVDIYIDNGHTGTDFKRPEFERMIDDIKKGKINCIVVKDFSRLGRNFAETGNYLERVFPFMGVRFFSVNDAYDSNSATASEQLALRLKNLANEMYAKDISKKLCSAMKTKREKGEYVGSYAPYGYLKDEKNPNQLVIDFQIAPIVVEIFELRAKGTGFATICRILNEKGYPSPGRLRYERGIITNNNKKGSELLWNKHVLKDILTNVVYIGHLAQGRSAQCLYKGEAFHRTSPEEWDYAENKHKPIISMELWNKVQEANQRGQKSAKENYGKYAHLPKRINPYGSVLVCADCGRVLKYVRSYSRPNKDGEIKDYYNYKCPNNIELGEQACSKKNIRADELDQIVLAVIKKQMDLFLKVNKDLDRLITMARKKAKMQAPNRTIESIQTELSYAKSMLTSLYTDHKEGVLSLDEYQYGKEKYQNDIDNLELELEQFLDEKTRPKKTYVSKKRLEALIKKYHSATTVTPEMVTAFIKEIRFYANKDIEIKFNFMDELNELIKECDRIREEVA

SEQ ID NO: 683 - protein, 524 aa, unidentified
  source 1..524: note = uncultivated organism
MSVAAQRGHANGAAAAKTATRRVAIYTRQSVDRGDEYGSTQAQREAVEAYVASQKHAGWVAVDARYDDLGFSGSNTDRPGFQRLLADVEAGRIDIIAVYKIDRLSRSLLDFTQLMKRFEEKGVEFVSVTQQFSTSTSVGRMTLNLLATFAQFERETIGERTRDKIGATRRRGMWTGGRPILGLDADDSKLVVNTREAEQVRAIFKLYLECGSLLQVAAEMRRRGWTTKSWTNRLGGKVVSAPLSKSSLHHLLRNVLYAGRITLGDEVFDAEHVAIVDATTFDAVQARLRALSADRGPRRNSKSGATLLGLLKCRCGASMTSHFAAKGGKRYASYVCTTIHKRGAAACPGSRVPQHVIEKHVVDHVRAIGRDPELVAETLAAARRQVEARRPALATEMEQAVADRKRLEDERANLVVVAGAGGDAPSAIVDRFAQVDRDLADLAAREQALRSEQAGLDGAAVNEADLRAALERFDEVWAALDPAERARALHLLIERIAYDGRDGSVAITFRANGLHTLSKEGSDS

SEQ ID NO: 684 - protein, 509 aa, unidentified
  source 1..509: note = uncultivated organism
MAIILYARKSVERENSISCETQLEYCKSVIKPDERDEKVLTFVDNCFSGGNVNRDGFQKMMKLVRQGKVKKVIVYKLDRISRSLSDFVNILQEFKEHKVEFVSSQESFDTSSPYGEMIVKLLMVFAEFERTSIINRVTQAYAHRSEMGFYMGGRQPYGFELTPTVIHNVKTKKLNPIPAEVEQVRYIFEVYAQESVSLRRLQDILVAEGKQPLNGSSWTTAKLSTLLKNPIYVKADSDVYDYYDRHGAQMITDVSMFTGENGAQLYGHTKHDPSSTDWSDMKLVLLTHPGVVDSDIWLRCQRKLEKNRQIGNSVSNPTSWLAGKVVCEKCGHTMTAIKGKVNKSGEVRRYFNCTGRSHKKTCTGPKVTIYAEDLENMVYECISAKLADLKEMNRTTRKGDTAEVNELKLKIKAIEKSEKQLLDSMLAGGFNDDLLALANQKATQLKRDRLALYERIEDLKSREDETDVVVNLAKSWKTADYKRKKAVAMIMIHKIVISEDGSTKVLWNI

SEQ ID NO: 685 - protein, 516 aa, unidentified
  source 1..516: note = uncultivated organism
MSRRPSSGGAAAPETKRVAIYTRKSTTMGLEQDFNSLDAQRDACLTYIERQPGWKLVDERYDDGGFTGANIDRPAFTRLMADIEAHKVDVIVVYKVDRLSRSLLDFVKVMERLNAAGASFVSITQNFSTADAMGRLTMNMLMSFAEFEREMISERTRDKIAGARRKGKWTGGPVPFGYSVKDKKLYINDVEAHVVREAFALFLQHRQMAVVARVLNRRGLQPRASRRQSKRGLLWTKDTIARVLRSPLYVGLMMHGDERFPGEHPPLIEQSTYQEAQRLLGESGRALRVHGTNPEYVLRGLLCCGTCGDPMTPASTTKKSGKSYRFYRCSRRDKYGKDLCPGKPLPAGAIEDFVVARLEGATADGTLAVRTKAKLEVRILKSRADYVTLRDSLNARIADHSAGASKLADEVARLEGRARELVEAKLRIEANNLEAAESQLRAVERDAVNLELDANHLDWFVGALRDFGKVWTNMTRENQGRLLRAIVAKVVVDDKQGKCRVELVNFDAAGDAMEAA

SEQ ID NO: 686 - protein, 517 aa, unidentified
  source 1..517: note = uncultivated organism
MEMRKNVMVIPAVKKYGNTVTKDEVKKLRVAAYCRVSTDTEEQATSYDTQVAHYEEYISKNPTWEFAGIYADDGISGTGTRKREEFLRMIDDCMAGKIDMLITKSISRFARNTIDCLKYIRQLKEKNIPVIFEKENINTLDAKGEVLITIMASLAQQESESLSKNVKLGLQFRYQQGKVQINTKWFLGYTKDENGELVIDPEQAKVVKRIYREYLEGKSCAAIAEGLQKDGISNGSGKKKWWDSNIMQILKNEKYMGDALLQKTYTNDVLTKKRIKNDGVVPQYYVENNHEAIISKEIFHAVQAEMERRSSLTDAGYCGKYALTGLMVCGECGAPYRRIIWSSKNRKEPVWRCRTRVQKGSNACLSPTIHEEDLQAAIVRAIKEAFGPQDQMMEVLKQNINNVIGDGLEANPEACDAKLKELQDQLVKCVNTGKNYEDLAEEIRRVKAIRDSALNQKAAQDEHAKQIQEIQQFIIEHINDRLEYDDSLVRKLINRVEVNSHSIVVEFKSGTKVEKYL

SEQ ID NO: 687 - protein, 589 aa, unidentified
  source 1..589: note = uncultivated organism
MFGTKHIVDIYVRVSTEDQAREGFSLSEQEERLRKLCEYKDYEINKVYVEPGISAKHGKNRPQFNLMMEDVKSQKVDLILVYKLDRLTRSIQDLENIVSLLEKHNCGLEAAVEEINTTTANGRFFIRMVTVLSQLEIERCSERTKVGNVGAIKEGHLSKIPFGYKKDGKKAIIDPVTAPIVREIVELYLKNKSAQTISEIINKKYGDMKELSSTNIERMVKNRLYSGDFQSKTMSKEQGKDVIFPNVVEPIIDKKTWELLQKKYERNQASRTKKETYLFSMKIRCPHCGSMMGGTHCHGQLKKRSYMYYNCNVCKKSGYIGEEIIENLVLEEINEIVDFFMMADVSMVAVKNKSLYQCEVKDYRDSINEMEDKKKRVLQTYYDGIIDERKMKSTIKEIDGKIRGYKLLIGKTEKKDIRIGKDIDLKKYATLSEIEKRKSISYLARTTYTWSKLSQEAKQIIIEDYIKEIAIDIKINPEAKQLCEKKIITLKQVVFYENKIEDMAYMFRENILDAIVKVNKKNILVSNVMTHDEINKFIDSIREKEKIKTFQVDLNNFDWNKIDKDKIVRIMPETVENSNEISKYVMLSV

SEQ ID NO: 688 - protein, 546 aa, unidentified
  source 1..546: note = uncultivated organism
MMIKRCAVYTRKSTEDGLEQEFNSLDAQREACEAFILSQKHEGWSLVHNRYDDGGFSGGSMERPGLKALLADVDAGLVDVIVVYKVDRLTRSLADFAKIVERLDANGASFVSVTQAFNTTTSMGRLTLNVLLSFAQFEREVIGERIRDKIAASKRKGLWMGGPVPLGYEVIERKLVPVPEEAERVRTILRRYVEIGSVPVLLEQLKAEGILTKVQVLTSTGHRGGIPFARGSLFHLLKNPIYRGKIVHKGQVFDGEHQAIVDEDLWEQVQMQLQERAPSRRRPTNEPQRALLQGLMFDPEGRPMVPTYGSNGTRRYTYYVSRKDLARKGDPRPTRFRRGEIENHITSQLIKLLNDEHALRRMSGAEEAETLQTLFERGLWLAQDLAQPGRSEDALRGFVNAIHVTKEAIRVDLKPEALGIDESGAWSCTIPRPTGGRPFREAKLRMDAKPKNDRYDDDLVSLIGEAMEVQRLVLQSPELSLNQLGKREGRCRTHLARLLRISWLSPRIVEAVVAGAQPKTITCKALLAAEIPLAWDEQERLFGLAA

SEQ ID NO: 689 - protein, 563 aa, unidentified
  source 1..563: note = uncultivated organism
MERAKGSIRRCAVYTRKSSDEGLEQDFNSLHAQREACEAFIKSQAGEGWRLIRTAYDDGGFSGGNMARPALKQLLSDIGEQKVDIVVVYKVDRLTRSLADFAKMVEQFEAREVSFVAVTQQFNTTTSMGRLTLNVLLSFAQFEREVTGERIRDKIAASKRKGMWMGGVTPLGYEVRERKLVINEREAERVKYIYQKYLELKSVRLLKQDLDKRGIHSRVQVWKSGPHGGGSFSRGALYEMLANPIYIGEIRHKQERYPGQHQAIIKRELWERVQRLLTEGAVRKGSPSYRSANMLVGKLFDEHGEPLYACGTSKAGRRYRYYVSRKLVRGAANGVSDGWRLAAPELERALTTALAQLLQDRTLLGEALHHAGASTDEIAATLKGMGALSESVEMLDAANPTVATVVKRVDLARDGFRLSLDLEPLIAPGVRLTDLGALKITRPVPLRLKRRGVETRLVLKGETNEVRERDPALLKVLARGYRWFKELTSGAVVNTLEIAKREKIDDGYVRRLVPLALLAPDVVEAICTGRQPLTLSSEELTRRLELSLDWQEQRQLIARLAPV

SEQ ID NO: 690 - protein, 573 aa, unidentified
  source 1..573: note = uncultivated organism
MPPAEDCRPHAVRCAVYTRKSTEEGLSQEFNSLDAQRECAEAYILSQRPAGWAVLPAHYDDGGCSGATLARPALQRLLADIQAGRVDCVVIYKVDRLSRSLFDFSRIMQILEKHAVSFVSVTQQLNSSTPMGRLTLHVLLSFAQFEREIISERTRDKQSAARRKGKWTGGYPVLGYDTDPSRSRLVVNDGEAEQIREIFGLFLRDGSLDATLAEMQQRGWRMKSWSTRKGQPHAGQPFDRAALVRLLSNVLYCGEVRHKGKIYAGEQAAILDRAVWRQAQDLLRRRRRGNGVKRPEVLLRDLLRCGVCGGRMVAGYSTKKKRRYGYYVCRKAQQQGAAACPGQSIPAARLEGSLLAGLEQLAEAGERQPLREALQGWSGLERAARQRRLASVVERIEYTGHQGEASVCWRVPLMNTAPVSIPIRNRASVQPSQASPESTAADTAGRLPRITRLLALAVRFEGLLRDGAVRDYAELARLGGVSRARVTQIMSLRMLAPVIQERILTLPALSSPAAVVNERRLRGVAQRWDWREQVRMWEELEAGLRKSTEGGRAAGNAGTASSTSPAAPQSRQW

SEQ ID NO: 691 - protein, 543 aa, unidentified
  source 1..543: note = uncultivated organism
MNKPSIRCAIYTRKSTEEGLEQEFNSLDAQHEACAAYIASQKAEGWIGLPNLYNDGGYSGGTLDRPALTQLLKDIEAGGVDVVVVYKIDRLSRSLLDFTKLIEVLDRKEVTFVSVTQSFNTTTSMGRLTLNVLLSFAQFEREVIGERIRDKFAASKKKGIWMGGNPPLGYDVADRKLVVNPAEAETVRLIYMRYLEMGCARLLAADLKERAIVSKSRKFRDGRPRGGISLNPSGLYCILKNRTYLGETGHKGNYYPGQHEAILSPELFEEVQKRLSELAPKIRVANSSAQITPFGGLLFDETGVQMVPSYTIKRGSIRYRYYVSRSAMKGGRSSASIYRVPAAPFEALVDNAFKRLSLPLGTRQRDYLQRIEILSNSIRMTLDRDATISAWREDSQRSIAERQIFQEKQQVLGGGEQLSLGEKNVVLVLPVRARFHGAQSTISDPAGPPSSLPDKTLLMAIARAHQWRKLLLSGDVGSVESLAQRFGMDRGHVRLTLNFAFINPALTRSIVRGERPHLRISHLAEAALPASWRQQGAKSMLGG

SEQ ID NO: 692 - protein, 531 aa, unidentified
  source 1..531: note = uncultivated organism
MNAVIYARFSSHQQNEQSIEGQLKVCYDYAQRNGYIIVGEYIDRALTGTSDKRPQFQKMINDSAKRQFEAIIVYQLDRFARNRYDSATYKAKLKKNGVRVVSARENIADDASGALMEAVLEGMAEYYSKELSQKVTRGMNINAEKCQYNGGVIPLGYYIDNDKKYQIDKDTAPIVTKIFEMYAGGSTVKQISDELNEKHIKTSRGAEFNKNSLHTMLANKKYLGIYTYNDIEIPNGMPRIISDELFDKVQEILAKNKKAPARAKATVEYILTTKLFCGHCRAMMTGVSGTSRTGTVFYYYTCNNYKKNVQKDYIENLILKMARAELTNENIEKISHEIEAFCEKEKDKSNLKRLNKELAEINKAIENLLKAIEEGKHINLLSDRITKKESEKAEIEKLIVLEKLQYVDLTASEIKFFLTRLKTGDINDMKYRKMLITVLVHSVYLYDDSKIMIIFNSSDRPITINAEQIDDFEGEFDTSGSFLNDVGSSTKFFHIVPKPPILRQVWEFDFYGEIDVGLCLVFILCFCASEV

SEQ ID NO: 693 - protein, 517 aa, unidentified
  source 1..517: note = uncultivated organism
MLRSKDIRPDAVALYIRWSTEEQGEGTTLEIQRERCSLFVRSQGWMVREDLTFIDEGFSGANLERPSLQRLRMAVEAGLVDCVVSYKLDRLSRNLVDTVTLVRQEWAGKCIYRSATEGFDTSGDSPTGGLIFNILASFAEFERAVIRDRTRAGTMRRMKEGMYISGTVPFGYERAGKGQLAIKPGESETVRRMFQMVIENVVASATYIAKKLNQEGLPGPTGNKWWSSAVERILRNPLYTGTVIYGRRNLPPTVPGGEGRFDANGEALAAVEDAVPAIIDRETFEKAHAMLRQRKEAKPRNTNRASGEYLLTTIATCKCGGPLGAIKDRYGSVYYRCQRKQQGVGCSEGSVAFRGAPVEEKVGTALKARFGGTRKQVALRVLRARFESSNRRLEIEQAIKDTERRKAEVLEDLARLRRQARQGELKASTYEDFKADAEAEMRDLEDRLRDLHLSHATSGKDVAVLQQMEDALNAVDEWDTLAGAERKELLRSLCSRLEVLYRGRAGGDILVEVTWKE

SEQ ID NO: 694 - protein, 553 aa, unidentified
  source 1..553: note = uncultivated organism
MRKKPEKPTVVKSVYKTAAYLRLSKGDGDVDGIEKSESNSISNQRLIIDRFLEEHPEMELVDTYIDDGYTGTNFKRPELKRLMYDVDDGRIDCIVCKDLSRWGRERIETGTYLSRIFKEKGVRFVAINDHYDSLTATGSDDHLIMPIKALTNDTFSRDISMKVRSSQSVKREKGEYIAPFAPYGYKKDPENKNHLIVDELAAQTVRRIFARKIEGVSANAIAGELTEEGILPPAAYKRRNGQKCGGFGKTRGTRWNASQVLHILRSEIYIGNMVQGKTSKVSYKVNRIINKPKEDWDIVEGTHEAIISRSDFLIVQSLLNRDTISSPNKTESYLFSGLLFCGDCGSAMNRRTSTWKEKQTVYYICSTYNNKSRGSPGCTRHSIRESDLIQIVRESLNRMIRKMCRFDELAKRLEDTQISMEDAFARDQEIQRLQQDLEKCRVLKSALYQDLKEGLISGQQFNNYREQYSERERRYQEAILRQKDLIRRIYENGIVAGDFLNRFREHPQIEELNHRLLVSLIDRILIYEDKTVDIVYRYTDEMQKCASILNNAS

SEQ ID NO: 695 - protein, 515 aa, unidentified
  source 1..515: note = uncultivated organism
MKRAKIYARYSSERQTEQSIEGQLRVCKEFAEKNDILIVDTYIDRAKTGTNDNRPAFQKMLRDSDKEKTWDILLVYAIDRFGRNAIEIAVNKQRLIKNGKLLISATQRTSTNIDGTKNLDGILLENVMIGLAEYYSAELSQKIRRGQNESRQKHQFTGGRHLYGYDIINKKYVINEQEAEVVRQVYSDYINGKTAKNIVSELNSRGLKNKEGRPFVDNYIYYMLRREQYTGIKRYGEEVFTDTIPAIIDKETFEKVQSIIEKNKKAPSKRKSYGKYLLSGKLYCGECGSTMSGECGTSRTGSVYYYYRCSGKKKLNDCTFPNVSKDDIENKVFEACGSVLQSGFIPTIVDIAYKQQLKDIETDSIIISLKSELAEKEKALSNLLKAIEDGIYTNSTKDRLQQLEKDIEEIKANYEAETIKKQSIASKEDYLDFLNQFIARQINNEDFKETIIRLLIRRIVVFKDKLRITFNLSPNGISDDEEVAFELSDAQEEYVERKSSDLVSLTPPERNVNYL

SEQ ID NO: 696 - protein, 519 aa, unidentified
  source 1..519: note = uncultivated organism
MPKIRVIQATKGALADKMPVAAYCRVSSDSEDQRNSFAAQVKEYTRQIESNEQWALAGIYADKGISGTSAHKRPEFLRLIEDCKQGKVKRILTKSISRFARNTVECLEYVRELKALGVSIYFEKEGLDTGGLSGELMLAIFGSIAQEESTSISGNMRWSYEKRMKAGEFIGTVAPYGYRWKDGSLEIYEPEAEIIRWIFESYLNGVGPTEITSRLKSSMAGQRKWIENHVRYILSNERYAGNSLVQKRYTSQTLPTRRIRNTGEVPQYFVENSHPAIIPIAMYEKAQRLREQRNLNASECAKKTVLHDRFRCAECGSSMKRKVSAAGNVSWVCRKHNRNSKECATLPVAETKVHMAFLLVYRIIKSNLDSILIPMANQLRLLGERAILQNEDINALNAQILKLTDQLHAASKLHSMNFLDTESYYEKANVMNAQLDEVQKKRQQLVKGITKDDGEALEKTERLIETLKAAPDNLSSLEEGDVFSNIAEKVLVNKNKRIIFRLINGLELTGWEGIEDGKE

SEQ ID NO: 697 - protein, 517 aa, unidentified
  source 1..517: note = uncultivated organism
MSKNVTIIPSSEDKPAILRVAAYCRVSTDSDEQATSYASQIRNYTELISQHEGWELVDIYADEAVTGTKTDKREDFNRMMADCRKGRIDRVLVKSISRFSRNTKDCLAALRELMRLGVTVQFEKENIDTGTLTTELMVSVSGSLAQQESISISQNQRISYKRRMERGEFITCKAPYGYRLVDGKDLEIVPEEAEIVRWVFDAYLGGQSARDIANELIRRGTLDRKGNVHWTTREIYYWLSNEKYVGDTLCQKTYKTGFPFVQKINQGEVIQFYVEGTHPAIVSREVYDRAQALRQMKKKQSKGPDAVYPLSRKMCCGICGFTVYRRVTRKGAGAWSCGRHLKSAANCPTGPIPEEDIYAAFLRMYSKLRLHEGVILRPALSQMEALETALQRDDPAMLEVNRAIAQATERGYKISRLRSNGLLDADACAGQMAANNAQLTQLRAKRRRLLKNDDIGEAAEALRQTVDAIRQGPERLEGFDEALFEELVEQVVVSPANLRFRLHGGIEVEERIGEGGK

SEQ ID NO: 698 - protein, 545 aa, unidentified
  source 1..545: note = uncultivated organism
MPTTIAIYARKSKFSESSESVANQIAMCREHCERIFPGASYLVYDEDEGYSGKNTNRPSFQRLVADIKARKVNVLCCYRLDRISRSIKDFCALLDDLQRYNVAFVSLRDQFDTSTPMGRAMMYIASVFSQLERETIAERVRDSLYEMAKTGRWLGGNTPNGFTATPIETQRDGVTRRMWMLTAQEEPLAQVIDMFMRFVEFGSVSKLFTYCLQHGIKSQNGKDFSRTTLRLLLTNPVYCCADAAAWEYFSAGDFNLCANREDFDGLHGIMPFNRTCKSSELTIKKDTSEWIIAVGRHPGAVPGSIWVRAQLILEENRDKGKTFQAPRTEAALLSGVIRCAHCGSYMRPKVYGKPLPDGSRRFNYICIRKLESHGQLCSVENAPGHIVDPLVLQQLRSLSSANLFSGGRTADQFAPDSVQDISTAIRRLEDDLAELQRKLDNVTDTIAEGVPASARAKLFQRMEELDSAIREKQKAIADLTESEMASRGQQDMLLYLQNMLASFSDTFSTLSHDEKRRLLRTVVDQVTWDGESIKIDIFGEKTIPK

SEQ ID NO: 699 - protein, 575 aa, unidentified
  source 1..575: note = uncultivated organism
MRCAIYTRVSTDEQAMSEYSSLKRQEEICTNYVDIHAEKGWKVAAVYEDAGYSGKDFQRPGIQELMEDVRAGKVDAIVTYKIDRISRSLKGFYDLWEVLKAHNVTFVSATQHFDTSDSMGMLILNILLSFAQFERELTRERTMSKMAGRAEKGLWNGGNVPLGFDYSKETQTLQPSQQEVPIIHFTYRRLIETRSPCAVANEANARGYRTRVRTFNRRDGSQEKVGGKRFDEDTVTAIVRNPVYKGFIRYNDMLYPAKHEAIIDEETWEQANRAIGNGRTDDTGLYFRDPHVHLLKGILRCGTCGLAMTPYRSGKKAKDGTPYLYYACVDYTKDGSLTTCPVKMLPAREFEGLIRHCLADLGNQPAILQACVDAANREAVQSVAELEVTLGRHRDELGRLTASIRRLIEVMKQEDFLADDIKEEYRQLVREKEQLQTRCEKLELDIERRRKRVLDADLIRRGLQDFERLVGLLPLEDQKELFQLLLREVVIWPFEPEREAPQEPPAGAAKRPGAKTVTTTIRTRWYRVRIALYQVPNVPNPSSVSHSGGSSGIGVVGSPGRIRTYDLAVNPPRRV

SEQ ID NO: 700 - protein, 502 aa, unidentified
  source 1..502: note = uncultivated organism
MAIYIRWSTEDQGQGHTLAIQQESCRYYCLSQGWTPSGDLTFIDDGYSGSTLHRPALTRLRDAVGAGKVSIVVVYKLDRLSRNIKDMINLVLDEWEDRCAVRSTQEPVDTTSDAGRMFFTMLGSFADFERATIRTRTWSGKRKSAELGRNPGMQYSYGYRKAEAGGWAVDEPEAAVVRRVYAEYLQGRSCRLIAFGLNAEGFRTRSGHLWAEAGISRLLRSPLYAGRLVYNRRTTGGRHPGPNPPDAVIAVDNALPAIISAEAWAQVEHVRNVRPRCGRPQSGSPRAHSSAYLLAGLLRCPCGKAWVGIQGGRRGERFYACAGARSGGPAACPSRSVRAAMLDQLVLEQVREQWPASGWVQSRVVEQLSEDLRGQEQAAEALRQRLRTVQAAEERYKRDYRRGSLPAELFTSLLQEAQQEREELQARVQEAEAAHRHMALSRADLGGAARAFARLDQWAALDLPQQQQILRSLIHSVSLSRPKGTRDIAVQFAWRLPEPVQA

SEQ ID NO: 701 - protein, 521 aa, unidentified
  source 1..521: note = uncultivated organism
MTQTPKITVIPQAGQGQKLMRVAAYCRVSSDSADQLHSYASQIQYYTDLIGGQPGWVLADIYADEGLTGTKVDKREDFLRMINDCRKGKIDRILTKSISRFARNTLDMIQYVRKLKEYGVTILFEAEQIDTAYLSSEMLLAISGARAQEESLSISKNLRMNCRARMREGTYIPSRVPYGYRMKNSGELEIVPEEAEVVQLIFTSFLSGMGKYKIADMLNERQAPKQAQYPKWHERSINYILKNERYMGDALLQKNYTTETLPFRKKKNKGELARYYVENANPPIISREQFETAQSLIRRNYKENAAPVAGPLTGKIRCSCGHIYTLAIVRGIRYWECRAHNQNSHSCDSRRIPETDMETAFINMVNKLRLLRSDILEPAITQLERLRTAHSGAQGKVHEIDRQIAELSGQNLVLARLHTKQILSSADYMAQSGGITQQVSLLRQERRRLIDQDESAEALDGLTELSRILSLTDCQTGFDENLFRQIVAEITAPTHTTLCFELLGGLKLTEAIPPQRRCGKR

SEQ ID NO: 702 - protein, 557 aa, unidentified
  source 1..557: note = uncultivated organism
MKKINCAVYVRKSTEKGLELQYNSLNNQEDACKSYIASQTFNAWEYFKTYEDGGISGGTMDRPGLQEMLKDIKAGFVNIVVVYKVDRLSRSIMDFHNMMQEFKKYGCDFVSITQAFDTSNSMGKLTLNMLLSFAQFEREVSSERVRDKLAATKAKGMWAGGMPPLGYDVIDKKLVVNPAEAEIVKALFAKYLEFGTLRGVIECVRTQGIKRKAWKKRNGDMKGGKDFNIARLHWLLTRKVYIGMMEHLRLKKAYPGQHEAIIDKETFEAVQTQLGRRYDKNEQRKRYLYSLGLFHSKLYTIENQPFGFTNSKKAGRRFNYYYTKGGGTYLPVEQIDNFAVKAISKILDFDFSSWNCFGQDIKIFLKKIPTLKQEHIKVFLNKGIYIKRENISELVIYLSIEEFTKFIKTHYDDSGFNEKNLPIDNNISLSSDGTELIIKTEFVIDNMTKTSLAQGPLKNVLTVTQMNEGLVRGLALGWKFMRMLEQGKTLRDIEKEVGQNYRTIDRYINLTYLSPNIVSDIFNNKNPKNLRLKDLKTLAYTHLNFKEQEQKWGYKYE

SEQ ID NO: 703 - protein, 523 aa, unidentified
  source 1..523: note = uncultivated organism
MATAQDNLARKQIYIPALQSEAVVLRVAAYCRVSTDSEDQLNSFAAQQSYYNDYIRKHDNWQLAEIYADEGITGTSATKRDDFQRMLSDCRKGRIDKILVKSISRFARNTKECLESIRELKALGISVFFEEHNIDTRMVTSEMLTAILASCAQAESESISKNMRWSYQKRMLSGTYIPSSVPYGYRLINKQIVVEPYEAVAVVQIFTLYLAGYSKLKIAAILNGRSILTRKGNPWDYCAIRYILRNERYAGNSLWQKTYKTEDFPPKKLRNYGERERYYAENTHPAIIEMDAFSAVKELLEERRSFYKEGIRTTNPVRDRLICGHCGSRFRGKTVEGIQYWCCRTHSNDASTCPTKAIPAEEIAEAFLRLWYKLKNQGNGMMQYLLKNLHTIRNRQMLWGADIIEVNKRISDIISQSHKLTAMQKSGNVDPDIFIAKSNQLAEQLRQAKQQKERLQHQEDDGIIEATLQLLDAINAGPAMLESFDEELFCELIDKIIVESNTRIRFRLKNGLELPETIERTGR

SEQ ID NO: 704 - protein, 555 aa, unidentified
  source 1..555: note = uncultivated organism
MAKTTIRCAIYTRKSHEEGLEQGFNSLDAQWEACKAYVESQKHEGWKLLTTRYDDGGISGGHMERPGLQTLLDDIDAGRIDMVVVYKIDRLTRSLADFARLVERFDKSDCSFVSVTQAFNTSTSMGRLTLNVLLSFAQFEREVTAERIRDKLAASAKRGLWMGGLAPLGYDPHPDPNKRELVLNKGEAETVRRLFALYDEHQCLGAVAREASLEGIRSKERTFKSGKSLGGCVMSRGAIHSLLTNPVYRGMVRHKENAYPSTHPAIINEMLWSRVQDRLKEKSARQRGQRGQKTNEGSPLTGRLYDETGERLTPTYANAKGRRWRYYVSRSLLNTKSEASSGWRLPAAKLEKAVTEALRNWLRTAPQHLLANPDAESFGRLSAGLAEIELLASSATPARSFRFLERIKVGVGELRLTLDDEALADAISIPASEFSAPALVHAEDFTLKKRGVETVLILGASAPQRDTTLINAIARSHVWMKTWRAGTSLADIASSIGWTPSPLRQRMKLAFLSPAIVKAILDGRQPADLSLEKILRSNLPLDWDRQADKFGFELP

SEQ ID NO: 705 - protein, 571 aa, unidentified
  source 1..571: note = uncultivated organism
MKGSKIAIYSRKSKFTGKGESIENQIEQCRQYLEVHYPELSDCDTEVYEDEGYSGKNLSRPKFQEMIKEIRSGNVCMLICYRLDRISRNVSDFSGIIEELKKYDTAFVSIKENFDTGTPMGKAMMYICSVFAELERETIAERIRDNMYELSKTGRWLGGTTPTGYESVPIEKVTIDGKIRTAYKLSVIEEEAGTVRLIYKKFLELNSQTKLETYLIQNAIYSKNGKKFTRCTLKAILENPEYVRADESTLAYFKDKGASIYSDESEFDGTHGIMTYNKTVQNGKAKKAKPIEEWIVTVGKHEPIIDSSDWIRVQKILDINKSKSYRKPRSHVALLSGLLRCGHCGDFMRPKLYNGVDENGNRKYGYLCHTKESSRQMNCSMNNAPGNILDEAICSEIKKLSENSSEFIKQLEKAKASLTDNTNEQKTQLEALKKTIADKDSEIKNLIGVLSHSDNNSAHDYILKEIDKLHKEKARAEKQLTSLDGLARQNELSDMEFDLIKDILVHFGETFDTMSVDEKRAALRVFVNKIVWDGENAHIYLFGSNEDTIEPLGRDCKRGSDVSAVGAEAQP

SEQ ID NO: 706 - protein, 516 aa, unidentified
  source 1..516: note = uncultivated organism
MPTIRTILPQKKDNEVPLLRVAAYCRVSSDSDDQLHSFGVQTDYYTKLIGENPLWTLVDIYADEGITGTSMKKRDDFNRMIADCKKGKIDRILTKSVSRFARNTVDCLETVRLLSGLGISILFEKEQIDTANMSSEVMLSFMSTQAQDESVSISGNMLWSYEKRMKNGTFLGCKAPFGYRLINGHLVIHDKEADTVRWIFRQYLSGQGASSIADALNARDTAEENRSAPWRVFTVQHILKNERYMGDALLQKTMTIGGVAHKKVNNKGEQTQYYVENSHPAIVSREDFLAVQEALKKYQQGKRRPNRKYAGLLKCPACGCAFTRLNTGYWVCGSRKRLGYNCPRISIDEVSLSLAIDRVLRTVDENPVLIGETVKYLDRLQQYLSKSQEKIKEIDRSIAETNAQLMMLTSLQAQGILDAADFVDQNRGLTEQISRLRSDRRVLLQAGDDETIDRLEELQDTAGDVRKDLQNGEYEILKTVIDHILVTGNEALEIHLRGGLVLPEGLPIIKRRCQRG

SEQ ID NO: 707 - protein, 554 aa, unidentified
  source 1..554: note = uncultivated organism
MRKVRCAIYTRKSSEEGLEQDFNSLDAQREACAAYILSQASEGWSQLPAVYDDGGISGGTLERPALQRLLADIAAGTIDIVVVYKVDRLTRSLLDFAKLVEAMDKAEVSFVSVTQSFNTTTSMGRLTLNMLLSFAQFEREVTAERIRDKIAASKAKGMWMGGVVPLGYRANGRTLTIDGEHAALIRSIFDRYLEVRNVRLLTAQLADEIIRVPKRMTGTGRKLGGKPLTRGQIYKILSNPIYIGKICHKGEIFEGQHDAIVDRETWDKVQMQLEANTQGEQQTRTASAPSLLAGKVFDSEGEALIASHANKGTTRYHYYIAKSGKGEAAEGQRMLRIPALELEKVVCKAVATEVEQPLGLLAKAGVEPTPDTVAILGDRAASLATSLRKRERTAVRTCIEKVTIGPAQVSVELTADDLCSLLSIAPTSQVTTNPAINIAATLRRSGRAVRLIQHGVSTSTEGEPQEHLLKLLHRARAWWQMMLDGKLTVSALAREQQVTSSYASRVVRLNFLAPKIVEAIVIGKQPIDLDAKKLLNLSDLPLAWNEQEELLFGR

SEQ ID NO: 708 - protein, 525 aa, unidentified
  source 1..525: note = uncultivated organism
MLRRREAEPEDSYVPEHPTRCAIYTRVSTDEGLSQEFNSLDAQREAAEAYIRSQRHEGWVALPESYNDGGFSGGTMDRPALKRLLADIEAGSIDCVIVYKVDRLSRSLLDFARIVATFEEHGVSFVSVTQQFNTTASLGRLTLNILLSFAQFEREIIAERTRDKMCAARRKGKWIGGHPVLGYDVDPQGGKLVVNEDEAQRVRTIFELYLKHQSLMSVVEELNHRGWTTKRWITKKGVERGGLPLNKDIVFRILSNVTYTGRVNHKGDIYPGEHPAIVERELWEKVNGLLRQNGVSGGQQIRNRHGALLRGLLHCEPCGTAMTHTFTAKNGRRYRYYVCTSAQKQGWDSCPSKSLPAAEIEEFVVDRVREIGKDPEIIAETFHEAQRQSRSESADLRSELTTLERKLRRLTNDTAKLLAAPGPRNGHRTDRMADLQDQILAAEARATEIQKELAALPADQISEADVAAALRDFDPVWKGLTTDERCRIIRTLIERVGYDGRTGKVAISFRSEGFKALCEGAGEKE

SEQ ID NO: 709 - protein, 505 aa, unidentified
  source 1..505: note = uncultivated organism
MPTVTVIQPKVTDNEHRLLRIAAYCRVSSNSDDQLNSYNSQLTYYTHKFENSETETLIDIYADEGITGTCEEKRTEFLRLIDDCRKGKIDRVYTKSISRFSRNTRDCLKNIRELKSLGITIMFEKENIDTANINDELMITIMGGLAQEESTSISQNLKWSIRRKMKSGDYSPVNAPLGYRLKNKTLVIEESEVKIVRDIFKKYVSGCGIKGTSDYINNKYGDTVKISYSSMRYILRNEKYIGDSLLQKFYTPDIIGAGCVPNKGEKDMYYIQNTHQPIISREIFETAQALMKNRLITKNDPVIYPFTRKLECALCGNHFYRKVCRDKYYWVCNKHDYSASLCSSKKITEESIINAFIKLFNKIYSNYTELLLPIQKSLQELMIKQTTGRSDIIEIRRSLLQLKEQLNVIASLRTKGFLNEAKYKEKSAEINNKIAKLNKNLRLLSQSDDTALKDIEMLIDYFEKRSNLMIEFEPQAFEFLIDKIVVKDNILEFHIMGGLIFTEEI

SEQ ID NO: 710 - protein, 552 aa, unidentified
  source 1..552: note = uncultivated organism
MRVKPAACQAAQKAYLYLRLSVDDEGGKALSIEAQRYAGHQYADRNGIVIIGEYVDSGLSGTLSKRPQFTRMIADATGPDRPVQMILIYRQARFARNMHLFVNTIHTLAQAGVEMVSVTENFGEGRTKRMGQTITAMVDEQRAIDDAIYTRKSRRANARKGFWNGGPVPFGFKTYVAQTDGKKQRMKLEIVPSEAAVVQQIFDWAEQGRGGRWIVKTLNDRRVTLRGARFTNGNLAGILGREIYTGLYYDRTADDDGNVPDREDWIPVECPAIITREQFERVAALRSSRAPTQMAPHVAAGTTLLTGIAKCGMPGCGSGMTIGSGTSRTKVKYYYYKCNERTNIGQRCRCPNLRREKLDEAVLGAVEKRILGKGRLELLLKDVLELTDQKRQLLEQELSQASAERTRRRTAIDRLLVLIEDGVMKASDPEFANRLTENREAVAALTSRIEVLESQLARGSRKITPEALRRFADQLREKLHDEDSTLRTAYLRMLVSRVEVSDKQIVISGPKSVLERGIAKGLPRLEGSVPIFDQRWCPEEDSNLHALASAAT

SEQ ID NO: 711 - protein, 500 aa, unidentified
  source 1..500: note = uncultivated organism
MKAATYTRVSTEEQADSGTSLETQREQACAYVTSRGWLLAHEFVDAGVSGTKAEAQRPGLRALMDAVRSGEVEVVVVTKVDRFSRSMAQFAQAVEELDTLGVKFVSVSEGFDSTTLTGQLLRNILASFAAFEHGRITERMTEGKRAVKAQGFWTGGRVPFGLKPVQDGAHKRLVLDEVNSETIRLAASLLVDQGCSTQETAERLNALGRPTAKGKRWNNMLLRHTMSRPIMVPLLLDEDRFAQVQEVLAQTSQVFRGRDQCYPLSLRIYGLCGARYHGVFRRDISTRFYSCNNKRWDNRDTRCDDAVIRADDIEVVVWEQVCDLLSRPERLVALAESYLGLRGQQIEVERDEYEEAKKKVTELDLAIKNLLVTSARAGLAPADIESAVLDLTHEREALSRHLAMIEGWRTESQHTSSRMRRLWELAELAHQRLPNMSQQEQKQVLELLDVRVTILKHARKTAGHRVLEPAQIRIEGVVNDQVLLSADETTRHIAQPPSLQ

SEQ ID NO: 712 - protein, 516 aa, unidentified
  source 1..516: note = uncultivated organism
MSYAMYLRKSRADMEAEAHGEGETLSRHEKALTALAEKSGIEITRIYREIISGETIAARPEIQKLIFEVEQGAYEGVLVMDADRLARGDSVDQGLVARAFRLTGTKIITPRKVYDPNSEFDEEYFEFELFMARREYKLINRRIQRGRMASVNEGRYIASAAPYGYDREKISGGKGYTLKPNKEADIVKYIFKQYLKCGGAGAVASALNVMGIPTKSGKSWSRATIAGILKNPVYIGKIRWSYRKNVKQSHRGQIVTKRKANDNCILAEGLHEPIIDRELFERVREKMSQNRKKPVSSSKALKNPFTGLLYCKLCGGRMTRMGKNSHTEYDALKCADVNCRCVSSPLSTVEKAVLEALEQWFDGFEVTVEPKAEKSENPFENILGELSGELQKISDSREKICEFLEQGIYTAEIFAERWESLKSRENGILTKIKQLEEIAKNDKMSAVARENIKPQIKNLTEAYCCCENAEEKNSFLKAILGRAEYSKTVPNRRGHTDNSSIIIKIYPTVEARGYKQ

SEQ ID NO: 713 - protein, 606 aa, unidentified
  source 1..606: note = uncultivated organism
MNNERMIAAVYIRVSTEDQAREGFSLGEQKEKLLQLCAFKEYEVFNVYEDAGISAKDMEHRPAFQEMLQDMRDGKINYIVAYKLDRVTRSVRDLEELILELEKYNCYLVCDRDDVNTSTANGRFFVRMLTVLSQLEIEIVSERTKFGLNGAIKSSHLPGPSPLGYKKDGNKKTIIDETTKPIIERIFKMYLEGKSFQQISNIFNEEKLLNPKKWKDTTIQKIIDNKIYMGDYEQYKRIAKKENKEPIIYMNVVEPIISRAMWEECQRQKEVNQRTYTRDRVYLFFQKIKCPTCGRIMKCKGSGGTKRKYMYYTCEHCRINFNEDHVECLLRDFIYDLLEYDMTVKNFFLPVLEDKTNNIDTTSIDKEIRDLEKQRNRIKNLYIKGIVEIDDFKEDYKLIEDKLANLESKKLELVNLETFNYSPHELLAERDLEKEKMIRLDTLNSVLKTKWNGMDKSEKQKFISKFIDTIEIKKDSKGNLILEKINFRNGFIRQLVKFYDAGIFDVAVPVMVGNKEKCIKGGRMNEEQLDKYLSKMNEHFETSFYEMYETIDEETNEVILEYQPKENEKIIRFVAISPKDKFPITVDNLKDKYGIISYKTNKLLEN

SEQ ID NO: 714 - protein, 572 aa, unidentified
  source 1..572: note = uncultivated organism
MKAKTDIKRKKAIYSRKSKYTGKGESIDNQIEICKNKIKSIFPDIDMENDIIIYEDEGFSGYYTKRPGFQKMMEAVKNREIDCIFFYKLDRISRNVKDFCEIKEELEYYDVNFYSASENFENITPSGKAMIMMTSVFAQLERDTIAERIRDNMIELAKTGRWLGGTTPTGYKSEQIENISIDGKKRKLFKLSPIDDEVRIVKLIFDKFLELKSQTKLETYMIQNDIKTRNGINFSRWGLKNILTNPVYAKADKDIYDYFKNQNVEVFNDIEDFNGKHGIMAYNKTEQKANKAKKERDISEWIISIGKHHGIVDGATWIKVQELLLANGDKRYRKPTKNNALLSGLIRCAKCGSYMRPKLKTTYMPNGDLRFDYMCELKEKSRKQKCDCKNVNGNEVDKLVMDEVKKLIEPNSTFRKKLSQLAKNKLNSASKDSIELQALEKTFNKNQTAIENLLDRIKFIDVALIEDITKEIKRLKADNQAIEKRIAEIKDIGSNNINTENQAQIVENIIETYFTTFDELDLPRKRSLLRLLISSVEVNENELEVNLLGVRNEKPQDIVPLCENSKRNINVF

SEQ ID NO: 715 - protein, 662 aa, unidentified
  source 1..662: note = uncultivated organism
MVNSTVQVRKATKQTVNRRKGAHLSTLRVAAYARVSTDSEEQLESYQSQVKHYTELINNNPEWQFVAVYADEAITGTQTAKRDDFNRMINDCMNGEIDLVIVKSISRFARNTVDTLQYVRALKEKGVAVMFEEENINTLTMDGELLLTILSSVAQQEVQNISEHVKLGLSMKMQRGEMVGFNGCLGYDYHKEDKTITVNEKEAETVRYIFNRYVDGAGGKVIARELKNLGYKNKRGESNFSEHGVVGIIKNEKYKGDLLMGKTFTTDPITKRRLDNMGEADQYYTENHHEPIVSRELWDKANEILNKRKGSHVRSNGKRDKYSRQFSFSCMLKCGFCGGNLTRRTWNSRTNYKKTIWQCVTATKHGKKECPYCKGIPEALVEEAFVRAYNALCTYDGEFIDGFLEHVKAGLQNNDTERDLKNLNKKIARLKERKSSLVDMRLDDKIDEEIYQEKIAEVNERMDDLLSKKKSLKDREKDQQDINKRLSEFQKVIHNHEVLRKFDRHVFESVVDRVVVGEKAESGEINPYKLKFIFKTGYEKDEVAGVQPFSFANSCSNTNNDCDIISLQGDNDTCGSRHMSTKGEFVEILEFDEGNEESSEETTGCKASVYAEFDDCPTTENLVEILRFTHFARVFRFNRNPGIGKKKEILHEIKVSVGFELV

SEQ ID NO: 716 - protein, 537 aa, unidentified
  source 1..537: note = uncultivated organism
MKKAAIYTRKSKFTEKGDSIESQIKLCSKYLDNINIKDYCIYTDEGFSGKNTDRPEFQRMLSDAKAKKFDVIICYKFDRISRNVSDFSNLINKLNELNISFISVVEQFDTNSAIGRAMMYLCTVFSQLERETISQRITDNMYSLATKGYWLGGETPTGFRSEKKFFNSNNKQKMYSSLVPIKEELDLVKLIFNKYLEFNSISKIEKYLLSNNIKTKRNKDWSKASISLILRNPAYVKADEETFKYIESTGSKVYGNPDGKHGLLIYKKNKGRKGAKHDISEWIYAVSEHEGIIDSDIWVAIQKQIKKNAILAPALGTSNIALLTGLIRCAKCNSPMRVAYGKRNPKTNKKNYYYVCTLKTKSGKTRCDSKNLPGLDLDNLILDKLKEMSLDKNTLLKELNKYKDTIESNFHNDVLKNIQNNISKNNSMIDNLLNNVALSTDSEVTAILLEKISKLKDENKLLTQKIDDLKSELEAQETLLNDCNSLITKLKYFSKFIDNSSIEEQKQLVSSVIEKVIADGDTGSIEIKFRPLLDFKI

SEQ ID NO: 717 - protein, 524 aa, unidentified
  source 1..524: note = uncultivated organism
MRFFLYSRKSVCTETGDSVGNQITLCKDYLRAHFADWDAAQLCLYEDEGFSAKTVNRPQFQVMLADLRREPPDYVVCYRLDRISRSVSDFSALIEELGRLGVAFLSIREEFDTARPMGKAMMYMASVFAQLERETIAQRVRDNMCLLARTGCWLGGTTPTGYVSEPCEELRPDGKRRTACRLAEHPAELCIVDRIFAGYRASKSVTGVCRALMRAGIRSRTGSFFSLPGIRNILQNPVYCTADADALAFFREKGAEVCVSASECGKGLGLIAYQKRGGAHPPAARREIREWIVAVGQHRGRIPGTVWVEVQESLLQGAQTSALHPHNEYALLSGMLRCGLCGARMFAKRRSRNPAHYDYLCANKLKGGCAVCALPNLDGAHTDALLWQALCARLPSAEPAAKTLSPLRRALLQRCGGESCVDGRKKACQAQMDRLTQALCLRDASPAFVRQVSERLSALEAELCALDDAESPAPCAPPDDLLALVCDDAWLTALTAAERRRIVRRLLGELWWDGVTLCVKAAAP

SEQ ID NO: 718 - protein, 513 aa, unidentified
  source 1..513: note = uncultivated organism
MSKNPTSIVPKSAVRCAVYTRKSTEEGLEQAFNSLDAQREAAEAYISSQKGEGWECLPTQYNDGGFSGGNMERPALKLLLDDVASGRIDCVIVYKVDRLSRSLLDFARLMEVFDRYNVTFVSVTQQFNTTNSMGRLTLNILLSFAQFERELITERTKDKMAASRRKGKWVGGHPFLGYDIAPAGGKLIVNEEEAKQVRTIFELYLKCEGLTELAKELNARGWHTKSWTSSTGKSYGGKPFAKNILHHMLHNYAYAGKVKYEGNVYDGEHEAIIDAETWNQVQAMLSRNGRTGGREVRSTYCAPLKGLLRCGACGCAMTHTSAKRGSRVYRYYVCQHSQQQGAETCPGGPLKASEIEQAVLNQIKSFTSNTSLVEAMLNKLQKQRDEETSLLAAEIKALQQSSSALSKELIESLSLGRQNVAEALQTRLRGEEQELSLVSAKLENAIHKYPTEEECRRALEGFFPVWEMLSPNEQTWTMRLLLESVTFDAAAGAVTLAYRSRGILEFVQKGGTK

SEQ ID NO: 719 - protein, 501 aa, unidentified
  source 1..501: note = uncultivated organism
MVKTTQAIYGRQSVDKADSVSIESQIEFCQYELKGESYKEYTDKGFSGKNTDRPKFQEMMRDIEQGLISKVVVYKLDRISRSIIDFARMMEIFGKHNVEFVSATEKFDTSTPMGRAMLNICIVFAQLERETIQQRVTDSYYARCTKGFHMSGRASYGFNLTPTIISGINANMYEEDPETANRVKMMFNMYADPPTSFGDIVRYLCDDGTNGKEFSRVSLATILKNPVYVQADLDVYEFFKSQGTQIINDVADFNGTNGCFLFQGRGVSERKVVSLKDQILVIAPHKGFISSETWLACRKKMMNNKTFKRGRKATTWTAGKLKCGRCGSGLTCLRSNNNSDVLYLRCRRRADRKSCVGCGTLHVVEVEKVLYAEMCHKMEEFQTLTGGNDIRVNPKLTELQMELAQIETEIEQLLDTLTGANAVLMSYANNKIEELDTKRQSLLGAVAEMTNDSLNQKQINKITGYLNDWENVELEDKRTVLDEMVLKVNLTSESFQIEWKI

SEQ ID NO: 720 - protein, 520 aa, unidentified
  source 1..520: note = uncultivated organism
MIAKAHAPDVARARTTPATKRVAAYCRVSVADSESPFSSLDAQRQAIEAFVASRKSDGWVASVARYDDGGYSGATIERPAFRRLMADVRAGIVDVVAVYKIDRLSRSLLDFTTLLKEFESRGVAFVSVTQQFDSSTALGRMVLAQLAIFAEFERETICERTRDKMRAARRQGRWTGGHVPLGYDLRDSRLHKNEEEARRVVEIFELFLARGTLAGTAAELVRRGWRPKQGAKRRVSEFSATRLARMLANPAYVARVHADGQLVEGQHEAIVDADLWNRVQEVLRGKRRNGPPQVHRAPKSLLGELLRCARCGAAMTSSSTAARGKRHRYYVCKTAQLRGAKACPGSSVPAQALEEFVVSRVAAMGRDPALAAEVVAGVKAALAERRAKTQAERAACARERERWERERERLAAVVAHGGDGAASARAKLADVAAALEALTAREQGALAARDALVGLRGDEGAVRGALGDFGPLWATLEPAEKASVLRELLDEIACDAAGGTVKLRPKSKTLAALLRQEVTP

SEQ ID NO: 721 - protein, 528 aa, unidentified
  source 1..528: note = uncultivated organism
MAKRVYCLYRVSTNQQVDKSENNQADIPMQRIECRRFSERMGWSIIKEAQENGVSGFKVSAENRDVIQEFKEDAAQKKFDVLLVYMFDRIGRISSETPFIVEWFANNGIEVWSTQEGQQRFDNHVDRLTNYIRFWQGEGESRKTSARVKTKMRQMVEDGYFKGGTAAFGYKLVKSDRVNKKGVVLHNLTINEDEAEIVRLIFDQYVNHGLGKLTLSKYLTDRGIHNRKGDVFHPNSISRILRNPLYYGVMTCGDIQSPVLPHLQIISKELYDKAQQYANERTPNWDPYNRKNPYFMKGKALLSGNLFCGHCGGKMTLSTARYHGGDEKHVRYTCYQKNRGLRKCDGQTTYSTDKLDAIIEKILAQIFAQFHTMPKSAIIEKAYSNKLELAKSEIKKHRAEQEKIAKQIKGLEAEILKVVTGESAFNPTTLNSLLEASKNEYQQKESTICEWETELDRLNTKLFDIESEYKTFVNWGQAFKDADMEARRMICNRIFERIEIRRGYELSITLNIGLEQFGVCIDSFVEIA

SEQ ID NO: 722 - protein, 521 aa, unidentified
  source 1..521: note = uncultivated organism
MSGKEKTNGSLAMAPKVITIPATSQESLRRLRVAAYARVSSNSEDQKHSFVAQNAYYSKLITDNPDWELVDVYADKGITGTSVEKREDFLRMMEDCRKGRIDRILVKSSSRFARNAKESLEAVRELKALGVSVYFEEQNIDTAQASGEILTAMFAALAQRESEAISERMRWSYRMRMQKGEFNTCQAPLGFRLNGQALEIIPEEAKIVRRIFEEYLSGSNSREIARNLNFDNTLGLTWNHKTIDYILQNERYAGNALLQKRYTSDTFPSKLKYNHGERPQYYVSDINDAIVPQEVFDKAQTLRKERNVLQGQVHSKMSRRMRCSCGSRIRAKRIHSKWYWVCCGHDEERTCSLMPIQEEQVEQAFLRLYFKLKCHGVEIFTQLISDLRTAKSGSLLWNEDIVELNKQISDIASQERLLAQLKQQGVVDPDIFISRSNLLAERRRELKLKKERILYAEEDHTIQRTQELIDVLESGPDWLEALDEELFGALVEKIVVEDNENLHFRLINGVEVTEPIERTKR

SEQ ID NO: 723 - protein, 525 aa, unidentified
  source 1..525: note = uncultivated organism
MNSVNVQGTSALTSKKEIIKINALKSETAKLRVAGYARVSSDSADQMNSFSTQVNYYQRIIDGNPMWQMTEVYADEGISGVSVNKRDDFTRMLADCKRGKIDRIITKSTSRFARNTLDAISVIRELKDIGVTVYFEKENLDTATLTSENLLTLYSLFAQEESMAISKNCKKGARMRMSKGTYVSSNPAFGYRLVDNELVIEESEAEVVRRIFREYLGGKGFYTIAKELMADKIPFKNGRMKWRYQTIGAILQNERYIGDMLLQKNFTEDALPYRKHINKGELPQYYVTNTHEPIVERIQFELVKILREERRENINTEYSEYPLSRKIKCAECGTTYRRKITNSIIYWVCKLHDNSKDYCGSQRLPEEKIYRAFVRMYNKLAKNYGNILIPLLSQLEKLQDLRTRNNPEISTLNKKIAELAEQNHVMNGLLSKGILDSALFISQTDELQKKIRKLKSAKLKLLEEQDADDAIDRTEDLIDILENGPDKITEFDENLLNDLIAKIIAYDNKTIAFELINGLVLKERL

SEQ ID NO: 724 - protein, 599 aa, unidentified
  source 1..599: note = uncultivated organism
MRCFLNIMGSSKTIEVCNVKKQFVIYSRKSRFTGKGESIENQIEMCRQYIATHYGQEEAEAALIYEDEGFSGGNLERPKFKKMMSDSQKIEFAAIVVYRLDRISRNIGDFAKLIEDLCNRHIDFISIREQFDTSSPMGRAMMYIASVFSQLERETIAERIRDNMHELSKTGRWLGGNTPTGYESESISHVTVDGKTRKACKLKMIPEEINLVNLIFDKFMETTSLTKTDEFLMNGHYKTKRGKAFTRFAIRAILSNPVYMIADEDAYNYLVENDVDLFADKEAFDGKHGIMAYNRTLQRPGKATLEKPMNEWIVSVGKHQGTISGATWVGVQKLLELNRSKNYRKPRSHVALLSGLLYCGKCGDYMRPKLSERKTATGETMYTYLCTKKERSRSHACSMKNANGNALDAKVLEAIKGFEKQSADLAKQITQTKKRISGNREGHEAELSKLRSQIEENENYIKSLVLSLGKSEGSNAEKYIMEQINELHEEGEALRKRLSEFEAIIEQHDLSDIEMDIIRQMLSNMGDTIDHYTVEQKRAAIRTFIRKIVWDGENAHLYLFQSDGDYEFPTPLDGNNSDFDKKPDEISGDFYEPLGEDSE

SEQ ID NO: 725 - protein, 571 aa, unidentified
  source 1..571: note = uncultivated organism
MADLRKTAIYSRKSKFTGKGESIESQVDSCKDYLKRFYPDTKEEDIVVFEDEGYSGGNTNRPQFQKMLNECRQNNIRRIVCYKLDRISRSLSDFMKLYDELEYYRIEFAAVNDSFDTHTSTGRAMLNMTMVFAQLERETIAERIRDNMLFLARDGRWLGGNPPLGYVSKETIGSTTTDGKTRKARMLLLVDEEARVVKTIFSKFLEYKSLTKTETYFIQNDILTKRNNSFSRFTLRSILRNPVYLIADEQAWNYFTAEGATIYADKEQFDCIHGMMIYNKTNQQTGRANLINDIKDWVISVGKHKGIIKGKDWVQVQKLLNQNNSKSYRKPRSNVALLSGLLICGNCGSFMRPKLSQRRNSGGELIYDYVCELKEKSKSQKCNMKRPNGNEIDRLICEEIKKLSSVESEFMKYLKQGIRNIDYNTETYQETLKDLRKSKVKYETQINNLLQSLAQAQDSAASTYILKQINDIDINIKAIEKQISEYMEILNTTASSEQDFEILSEMLSNTSNYIDNMTVEQKRNALRSIIHKIVWDGENAHIYFFGSDDSEIDLSDEPPPKAAAIGLQTRY

SEQ ID NO: 726 - protein, 559 aa, unidentified
  source 1..559: note = uncultivated organism
MARTKNRRLEEKISAPHIVRWKLGEYIRLSKEDLNKGKDKDDSNSVINQKALLDDYYQQHMDEFESVQPPYVDDGYTGTDTNRENFQRLLSDIYAKKVNCVIVKDLSRLSRNYTDAGSLIENLFVQMNVRFISLAEGIDSYLNPDSISNLIVPITNVINDNFCYQTSKKIRQVFDYKRRNGEFIGGFAAYGYLKDPKDKHALIIDEEAAEVVRNIYTWFLDGMSKNAIVHNLNGHGILCPSEYKKSKGLNYQNPHADKKPLWSAKTVSDILKNRLYVGDMVQGRQRVKSYKIHTQEQVPEGEWYVVENTHEPIIERPIFEKVQELLKRDTRTAPQKKKLYLFSGFLRCADCGKSMSRSQVKGTVYYFCRTYKDQSKTACTKHAIKHNRLEAAVLYAIQQQVYLAVHYANTLTYINTAPLQKSQSIRLETLIEAKEKELAKVMRYKQSIYQDWKDGEITHSDYRHMSEDYERQITAINTVLDNLNAERAELQNGINAESPCLIIFKKFENIDKLTREVLIELVDHIKVHENGNISVKFKVADQLRRVMEYIEINTQSEAV

SEQ ID NO: 727 - protein, 513 aa, unidentified
  source 1..513: note = uncultivated organism
MTAPVRVALYTRISTDETNQPYSLGAQRDRLEAFVASQPDWAIVEVYTDQASAKNLDRPALTAARAAAAAGQFELLLVYRIDRLSRNLGELLSLGDELARHAVAFRSATESFDTGNPAGRMLVQLLGSFAEFERATMLDRIRAGMERKASRGEWTGGVPPFGYQKARGESLLRPDPDTAPIVRSIFARYIQTRDGARSIAVWLDAQGVPTRSGVPWSTSGVLALLRNRAYIGEVSFRGVWRPSAHEPIVERELFDAAQSILHQRARSPGLRRSNPTDYLLSTLPLVCDRCGHPIVGASARGRGGKIYAYYTCSTRARRGPSGCNQERLPKVELEAAVLSQMTTVYADTSLVAAALEEAQAETRARDAERSAEHDRLQSHAAELRRKVDRYVAGFEAGELRAALFQSRVTALQTELAAVEAALAQQSAADPAEGKVDVGLVSWGLSKALGEVLASTSPRLTKELLRVLIQEIRVVSPMDIRPTYRVPASEVRILEGLVGEVGFEPTRRSRGTGT

SEQ ID NO: 728 - protein, 506 aa, unidentified
  source 1..506: note = uncultivated organism
MASNGTGTPTTIRCAIYTRKSTEEGLKQDFNSLDAQRDAATAYIRSQVGEGWKLLPEFYDDGGFTGANMLRPALRRLLADVEAKKVDCVVVYKVDRLSRSIRDFAKIMDTLEKSGATFVSVTQQFNTTTSLGRLTLNILLSFAQFEREIISERTKDKQTLARKRGRWTGGHLPLGYDLEAGKLVVNPEEAPRVRQIFEWYMEDHSVFGIVAKCGDLSWRNKQWTTREGPVYGGHALRKCHLYTMLANPLYAGRIRAEAEVVKATHDAIIDDKTFDLVQQKLKANTRNHGTEHRPRTDSLLRGLLYCSSCGAAMSASYTSSKHRKYRYYVCSQAAQSRASVCSTRSVSAPVVESAVIESVKRFAITPEVVEAAARTARIRLTEELSHQRKELKEINVIVRNTRSQMTRTRDVDPERETALREKADAAQRKADALRESIARGERLRFDEATVRQRLGNFEEVWKVMTIEEQVRLLRALIERVGYDAQGERVRVTYHSNGVREFCKGVA

SEQ ID NO: 729 - protein, 516 aa, unidentified
  source 1..516: note = uncultivated organism
MRAAIYCRVSTEKQGEEGASLETQEAACKRYCADEGWEIAGLYSEQYTGSKRERPELSKLRVAVRSREVNVVVVYAVDRLSRNQTDTTILVDEMERNKVALACVSEPFEATTVGKMVLSVRAFAAELEREKIVERTQRGKRARVQQGKIHRHGPELYGYRRDKEAGVRIVYEPEAAVVRQIFRWVATEHVPLRTVAARLNTEGTPSPAVGKLHYNDPQRIPRWGKPQIARMLSNPAYKGETIAWRWQNNKHHNSTLRSQEEWIPLPDGVTPPIVPSTLWQAAQDILENNRAADATRNESRPYLLRSHVHCAVCGRRMRAEPEHGRRIYRCSSRHTPTGTCGASRVPADEVEAWSWDLVENLLRNPDVIAAEIKRQQKQAPNANLLADRIAVQKALDKVTHQQEKWVRRFTEGADHSFPWELVEREIIRLDAEKKNLQANLADLDKIIKERQTAIIRLDAIAAYCQRVAVNLSALGFDEKRLALEALSIKVIANGREWQIQGTIPIENAGVSSPTSL

SEQ ID NO: 730 - protein, 618 aa, unidentified
  source 1..618: note = uncultivated organism
MEEMYSSRKGKKCVIYIRVSSERQVQGYSLEGQKRYLKEWAEFEGMTVSEIYVEPGKSGKSITGREVFQKMLNDISTGQVEVDYVVVFKLSRFGRNAKDILNSLTYIKRYGVNLICKEDGLDSSTSMGKMMITILGAVAEMERENILAQTMLGREEKAKQGGWNGGFAPYGYELIDGKLHIKEDEAPIVELIFDKFVNGGMGYSTIAGYLNRQGIPKLPSRNSHGRKFVDWNVHHIKRMLDNPVYTGRIAFGRTKMERIDGTENEYRRVKSDEYIVSDDIVHEPIISDELFEAAKRKRQETTTTGNPKIGRGTKHLLSGILKCPMCGSSMYADIVKWTNKDGQVMRKIKYQCGHYAKSKFGQCQKNTIPAEWIEAEVIEYTKLLVRNRQFTEDIKNQIGHKTDVSEIDAELENYHKLIKKLEKSKSNLEKDIDAIYDDDKHAERKRKDMNNRLNKIYEEIYNIEDMITDCEKKKEAAKQDVLTKENVFKMLLVFDKIFDKMNDADKRKLLESMIAEVHLHPKDTWQEGKNPIKEIKYAFPVSQEVMEALRENVASVETVCLLSKLHEAKHHVNVKLDIDEMDLTAAESVHPQVAPAPQELQDKHYFRKHGANAYYGQN

SEQ ID NO: 731 - protein, 520 aa, unidentified
  source 1..520: note = uncultivated organism
MAVAETRGATNARNRTVRCAIYTRKSTEEGLDQEYNTLDAQRDSAEAFIRSQRHEGWIALPERYDDGGYTGANMDRPALKKLLDDVRAGLVDCVMVYKVDRLTRALLDFSRIVEVLDKNGVSFVSVTQQFNTTSSLGRLTLNILLSFAQFEREMISERTRDKMSAARRKGRWVGGHLPLGYDLAEKGGALVVNPEEAARVREIFRLYLQHGSLIPTVQDLNNRGWRMKEWGTRRGKQTGGKEFGKNRLYNLLTNMVYVGKVEFGGQIYEGEHDGIVEPTVWQTVHDRLRSNGRTGGMEVRNKYGALLKGILKCASCQGGMFHTYTQKTPTKLYRYYVCVTAHQRGYGECPTRSVSAPAIEQAVVDQVRGISRNPFVVAEVLRELEDSQTANIESTQRERRLLEKELSRVGDEIAGLIPLGGKLATDRMAELQDRATMLEGKLRESRAQLAAAAGSPIDAEGVRQAMEEFDGLWAEMSPREQEKFVKTLVEGVTYNGETAEVTVGFRSKGIRNLCLGGINQ

SEQ ID NO: 732 - protein, 682 aa, unidentified
  source 1..682: note = uncultivated organism
MSLTRLLPAWLHAIADYAVGAGLIVIALAAGGSGKAVAAGVVVGATILAASVFTRYPLGVVKVLPFTVHSAGDYLAAALLLVAPFALNFHGTDGGLTAVYIVAGLAVLGVSLITNYQYSDKRAASRRETTSKARASRPIRPRAGIYTRLSSDPDGTSTATERQRQDCRRLADARGYEVVDVYEDNDTSAYKRGVVRPAFERMVTDLAGGAIDAVVVWRTDRLARQPRDLERFIDAAETHQGGLLSVTEPDFSGSSGLLILRMLTAFANHESGVKAERVARKMKELAERGDPRTGGQRTFGDNRDMTPNVREAEVFVASVFLILKGESYSSVMAQWTAAGITTPTGKQWRLSNWRRMLTAPVFAGLRSYHGEVLPGNWQGLITPELREQLIAVIGGRHQEQRRRVSVHLLTGIAHCSCGAPMNGISRPGYGGKSPYAEYRCNVLRGGCGCTTIRANKLEPAVVEQFFELVSSLKERAAVDPTAVLLALRDDEANLAQLVRDHYVERIIGRGAFMAAKKQLDERIDQRRALVARAGPMSWLRAVGAVHAEWERRDLTWRREMLRAVVGVVVAPAGRDRYKDRVTISPAMQQTCPSPLERTSRLGSPHPSSDGSNSLADILRLMVKARGTARPDAASASMCSSISTTAIARVALGDGRPSVRRANRRAHSGSYGVALVGALTIGG

SEQ ID NO: 733 - protein, 528 aa, unidentified
  source 1..528: note = uncultivated organism
MNGIIYARYSSDSQREESIEGQLRECTAYCQKNDITIVGSYIDRALSAKTDNRPEFQRMVKDSAKGVFDTIVVWKLDRFARNRYDSAHYKQLLRKRGVKVVSATENISDGPEGIILESMLEGMAEYYSAELAEKVVRGQTENALKCKYNGGKLAFGYKIDENKDYQIDTVNAPIVLEIFQRYAEGATMNEIREELNRRGLTNAKGAPLDTNFVPTLLHNRRYIGEYKYRDIVIPQGVPAIVPQELFDRVQARLEKNRKSPARYKASEPYLLVNKLICGTCGGMMVGESGKGGHNKQVYHYYRCTNSKKRKTCTSSRKTVRKQAIEDAVVHAVMARIADDSFVQYVADRVMEVQQQESSLLPTLRKQLADTERGITNMLNAIEAGIITDSTKQRLIDLENAKKKIEMDIMQEELQHPIIPRDEIVFWICRFRKMDITDMQQRQQLIDSFVNAVVIYDDRILITFNYKDGEKTIKFSELSGSNLDCNAPPTKPLTSVSGFLFSKILSADKRKPSCRPPSAVVSEKRYVYV

SEQ ID NO: 734 - protein, 650 aa, unidentified
  source 1..650: note = uncultivated organism
MITIAQNQMPRQAIAAIRCAVYTRKSTDENLDSDFNSLDAQRESAENYIKSQAHEGWSIIPTRYDDGAYSGATMERPGVQKLFQDVAAGKIDVVIVYKLDRLSRNLLEFNQTLKFFEQHDVSFVSVTEQFNTNTPMGRFGMNMISSFSQMEREVIAERIRDKVAASKRRGKWMGGVPPLGYDVNRKEKKLIVNAKEAILVRLIFRRYLELKSATALLKELNEQGHRTKTWVTKKGIRREGICFDKNKVYKILKNVTYLGLTKHKDKTYPGEHEAIIEQSLFDEVQKLLSENTVNRGNVTRSKTAAMLRGVLICGYCGRTMVPTYSLKKSHGLKGRKYRYYVCQTATKRSYDECKLKSVSADKLEAPIKEAIRKLISNPEMVKQTLDKAGYQMVDEIQRLVTSEKQISEELATVKANAKRLLAKELQSADIVNSFVRDELSRLESQTLNLEYELEEVRNRLAYYKDHPLDENAILAAFADLDALFDELFPAEQERLVQMIVEKIRVFRDHMEATFKPDALLDIANELGANSLGDWQLKTECIDDKGKAGNLAKTTVLIPLILETYRPQKQILLAGNRPWQPVQTVNENQNSASTHLNISLAHRWMKLLETGQVKSIVDLADLLGRDISKLRKILKLADLDPVEVEKVMGNQ

SEQ ID NO: 735 - protein, 588 aa, unidentified
  source 1..588: note = uncultivated organism
MEDKKRKKAIYARKSKYTGKGESIDNQIYTCKHYLKTYFDINITDNDIIIYKDEGYTGANTERPNFKKMMEAVKNNTIDTIICYRLDRISRNVLDFANLYDNWQEHNINFISVSERFDTTTPMGKAMLFIAITFAQLERDTIAERIRDNMYKLAKTGRWLGGNVPLGFISEKVEKLNINGKKTVLYKLTPINNEIEIIKTIFRKFLEFKSLTQVESYLIQNDYKTKRNCEFSRWSIKSILRNPVYAIADQDILNYFLNNGVEIYNEYNQFDGSHGIIGYCKTEKTKTGHIKYKNLQDWIIATGEHKGIISGKDWIEVQNLLKINSDKNYRKPIKNNAILVGILHCKYCKSLMRAKLRQNSTSNGDLRFDYICDLKMKSNGKKCACKNINGNNADNLIIKEIENLMQPTNEFYQAIQSISNNKNYNINKKADEISTLERNYTKNEVDIKNLINRISLIDNDILGDVQSKIRELKKKNEEIFVNIQKLKKLQITNQVISEQEITKIVFKIFNSYMNKFNELDIIRKRNFIKSLVNSMETDGENIYMSLFGSDNNTLITENQLIDDEIVYKQNELSAKHNFNIVLSSDNSK

SEQ ID NO: 736 - protein, 542 aa, unidentified
  source 1..542: note = uncultivated organism
MTTDSKSVRCAIYTRVSTDAGLDQEFNSLDAQYDAASAYIRSQAHARWSLVRTRYDDGGFSGGSTDRPALQSLLADVKARRVNIIVVYKVDRLTRSLADFAKLVELFDTHGVSFVSVTQQFNTTTSMGRLTLNVLLSFAQFEREVTSERIRDKVAASKRKGLWVGGMVPLGYELADGKLTIVEQEAELVRTIFQRYLELGSVNRLVADLSDRNARSRVRVLSNGRIRGGVPFTQGPLFYMLRNRFYVGEVKFKDEICPGPQPALLDRDLFDAVQTRLTEQRSHRTITRTRSASLLAGMLFDDAGHPMIATHATKNRVRYRYYVSRPNLRGSASAGSITRVPASDIEAVVIEAVGDNGGSPGIAKADQNLRNILVSKIARIEVRKNELAMTLINPVAHDAVDQKSSPPLATFDAADNGMLLLSWRKPLSKKAREILLPANLSRHQVRTIKPERRATLVKSIARGRAWLDELIGTATSTEQIAVRNNCSVRHVNMTISLAFVAPTLVKAAIEGRLPRGVSAASLSDAPAEWSQQLKRLGLDLSA

SEQ ID NO: 737 - protein, 515 aa, unidentified
  source 1..515: note = uncultivated organism
MRLLPYVRLSVLDDASTSPERQLEKIHYYARFGDHELVPITEADYDLDVSGSVSPFERPGLAPWLQDNRLSSWDAICVAKLDRLTRSLIDFVSLTAWLEANGKTLVCLDPQLDLTTPSGRAFAQVLVTFAEYERETIAARVRDAWHKLRAGGQYTGGQVPFGYRPVKLDKGWGYEPDPGYGPVVAEMYDRYVRYESLGSIARWLNETGVLTPWNVTRRRNGKPVKDTTWTSTSVRKILGSRATLGATVKTDGTPVRDAEGVVVYRADALVSRDVWERVQARLQANPVSAKVNTWTLTGIAFCAACGAPMYSAGAVYLGKRYSYYGCVHALRRDGQCVARRVKAAELETAISRELLVLVGEVELTESKPVAGHDYFEEMKRVAEQIAHLSGEVALGAVSGRDVRADQETLQRAHAELARLADLKPVAARSEPVKTGQTFRQKWAALDVRGRNEFLRATRVRAVVSRDEMPPIEKQAGPVTTAGIPRIALITDPGLHAVVYLGSLGDMLAATAPVTP

SEQ ID NO: 738 - protein, 522 aa, unidentified
  source 1..522: note = uncultivated organism
MEHSQTATGNLALTPVPRVITIAATQAPETKKLRVAAYARVSSKSEEQLNSFAAQNAYYTELITKNPDWEFVDVYADEGVTGTSTAKRDDFNRMMADCKRGRIDKILVKSTSRFARNIKDCLEATRQLKEIGVGVCFEEQNIDSSMLSGEMLVAFFSALSQKESQSISADMRWSVRRRMRAGKFNTCRAPYGFRLGKGTLEITPEEAEIVRDIYERYLRGQSSRDIARELTLAHDKCWNRQSIEYILKNERYCGNAVMPKRYATDTFPVQMKRNRGEREMYYVSGINEPIITVEQFESVQRLMKRKESTRERREHSFSGMIKCGRCGTTFRQKQVNHIWYWSCRTHEEVSGSCEITQIPESVIENAFLRLYDELKYHLDILTQMQKDLQAAHKGRLLWSLDIVELNSKISDITRQDRLLTELKKQGIVDPDIFISRRNALAEQLRTAKIEKERILNADEDTTIAQTQALIDILDEGPDFLDTFDGELFSELVDKIIVESNEQLRFRLINGLELTGSIERTVL

SEQ ID NO: 739 - protein, 516 aa, unidentified
  source 1..516: note = uncultivated organism
MNIAAIYCRLSDEDRNKANKNEESESIQNQKKLLLEYAAENKWDVYRIYCDEDYSGLDSERPEFNRLISDAKAGKFNIVLCKSQSRFTRDMELVEKYLHNKFIEWGIRFVGITDNADTLEKGNKKSRQINGLVNEWYCEDISENIKAVLDVKRKKGEFIGSFAPYGYKKDPLNKNKLLIDKEAAETVKQIFNWYIEGYGVQQIVSMLNRKGIPNPSKYKELNGLKYSNPFKTDDYGLWNKTTVKRILRNETYIGHMVQGKRKKVSYKSKRIITTSCDKWIKVEDTHQPIVDKVVFLAVQRRMNGRIKTIENGKPHLFASKVRCLDCGSTMLKVTSGKYSYLRCKLYSISQGEKLCTGHYIRLNELSESVASKIKEYLRKYIDIQSVAERLEKEQRMESSDKKYIDELRKIEKDISEKEYIIKNLYADKIKGIIDENQFVELNRAFSEEKRKLLIRQEIIQKEMKLNKKVEIDYRERVINLLNFTELSHGIVNGMIDRIEIGEKTLKGQKIKIHWLF

SEQ ID NO: 740 - protein, 527 aa, unidentified
  source 1..527: note = uncultivated organism
MKFVVYSRKSVFTGKGESVENQIEMCRAYIFENFAGSVDSDLSIYEDEGFSGKNLDRPQFQRMLRDMEEERPDCLVCYRLDRISRNVGDFAALIEWLDRRDVAFVCIREKFDTGTPMGKAMMYIASVFAQLERETIAERVRDNMLMLARTGRWLGGTTPTGYTSEKAQEIVLDGKIKTACRLRAVPGELRSVEIIYRKFLEVQSLYSLRKYLHERGIRSRTGREFSLPGLREILQNPVYCTADREALAYFTKRNADVCFTEAECARRGLLAYNKRDYTKSRISRNPVEKWIVAVGRHEGLISGRDWSAVQRYLEKGRSAAPGENPRNGYALLSGLMFCTACGQRMFSKARSGRAGQYDYICETKLQFGREACHSQNLQGPAADALVYHRLRPYARLDGGAARRLEGLRRELTAGEGRTEIQGTRREAIGRELENLARAVGDCEPGGVFAQKIAARAAGLEEELLQLEETDRQTETGGEEDVDALCAQLLDFPGNPGRMTVEEKRALVRLLVRRCEWDGKDLHIYLRG

SEQ ID NO: 741 - protein, 518 aa, unidentified
  source 1..518: note = uncultivated organism
MNERSTAPRKAAIYLRISQDREMDGLAIERQREDCENLARFRRWEVVETYVDQSKSATDRTAIRPDYDRMVADYQLGRFDAIICYDLDRLTRQPRQLEDWIDAAELRGLALVTANGDADLSTDGGRMYARIKAAVARAEMERKSARQSAAQRQRAMQGRAPKGMRPLGYAVDGEVIPHEAEAVRAIYDLFTRIEHPESLRSLARALSGSEKIEGLSPLPKHTHTVSVERAAAREKQGLEPRPVVEDGPWSPSTVLGILRNPRYAALSTYTPKFAQADGKRRRMWKAQILRDNAGEPIRGQWERVVSDETWWKAQQVLDDTERVTNTSGSTKRKHLGSGLYRCGYADEKTGEVCGRKVTGAPRGYKCAGHIVRSGAAIDDFVMSVIAKRLARKDARAMVEIPDGGPHAAGIDSAISDQRARILRAEADYDAEIIEARDLKRVRDAAEARIQELEAEKLMQGRAGALSPILGVDDPAAAFREASLDLRRQTIDALATITLLPQPRGRKGFRTESVVVNWR

SEQ ID NO: 742 - protein, 506 aa, unidentified
  source 1..506: note = uncultivated organism
MKQNNCAIYIRKSSEKGLEQDFNSLHNQEDACKAYILSQAYNGWQHYKTYEDGGLSGGSMKRPALQALLKDMENGIIQTVVVYKVDRLSRSILDFYKMMQTFDKHNCSFVSITQSFDTSNSMGKLTLNMLLSFAQFEREVSSERIRDKIQASKAKGLWMGGPCPLGYTLAEKKLQIHSQDANLVRQIFTHYLKLQTVSNMKQWLKENGYKGKKGVSFSTSGLHRILSNPLYTGKIVHKRLGKIYDGQHEPIISEAVFEQVQNQLKQRFKDNEARKVYTLQTNLLKGVFYTKAGELFKYSNAKKHQKRFNYYAVKGCYLPAEQIDEPVLQALAFLNLTPDTLKSSIAKVIYTKQKDIGKLEIHLTLDETLGKLKLPPQAILSMDQKTLILSTSILINNQAQTTLRGHRNKRILSIHEMNEQLIQGLSLAWYYRTQWKQGVSIQDMTRSEASGKRKIQKYLALTLLSPPIIESILNYQNPQQLTLTQLIDLAESTSDFEQQALAWFGS

SEQ ID NO: 743 - protein, 605 aa, unidentified
  source 1..605: note = uncultivated organism
MNGNLEEVQLRVAPYLRVSTEDQAEKFGLKAQMSAIEGFIKSKGTLKDGKTQAMVLAGKAYEYIDTDISGGKELDERPEFRRLKEDILYAPEGSKPFDVVAVFKIDRFARKLRILMDVIKFFEVYKIEFISATESIDTSTPFGRAMLGIMGVIAELELETIKERTQKGREQAVKEGVYMGSHPPFGYQKDKDGHLTPFEKEAAVIRRIFHLFTIEKRSPQIIADILTQDEVLSPDASAVKYKKRKGVSKKKNNPYFWRAEAVRAILSDEIYTGINHYGKHKGRKRLPKSEWKVVDCRHKDIIHTYIFELARQQLESISERKVLTRKKEESHIYLLSGLLKCDFCKQSIPSGKTEMLGWTGGKKKIGKQPLRYSYYYFCNKKNRKKFDVICPVVPIPAEALEEYVKNFVKDLLSDPKAVYEYQKSLESSILNTQHLESRKDHFTELLNSLPQTRKNILYQHEIGAIDKTTLEKKLQELEKKEGELKEKINELDFQLSQITLSKGYEASLELYAEKYKKVLENEFKDEKELFNLVHMLVYQIVVYARPTTSRDKIAGRKKEGQVIPNKIDIYLNLPQNLLRSLYSHRFGVRSDNLWGHRDSNPEPIA

SEQ ID NO: 744 - protein, 518 aa, unidentified
  source 1..518: note = uncultivated organism
MYAIYCRQSIDKKDSISIESQIEFCKKEIGDQPFKIYTDRGYSGKNTDRPQFILLMKDIESGLVKKVVVYRLDRISRSVLDFSKMIDIFEKNKVDFISTTEKFDTSTAIGKAMLQIIIVFAELERSTIQQRITDNYYARGRRGFFMGGSAPYGFDIDKIFINGKKSSVFIENKDQVEHLKYMFETYAYTDTSLGRIVAHLNENKITTKSGTVWDNAKLSSILKNPSYVKADSDIYTYYKNKNCIINNEIVDFIGENGCFLFGKRPSNERKYTNVENHTLSIGLHKGIIDSHTFLLCQYKMDNNKQIKNTGKGKNSWLSGVLKCGFCHYSMSALVDKRYNNKYFICRKKSINVCKGHSKVIYMDKIETIIEKAMYEKIKLLKNQNIDININKNINLQINKIKLQIAEKNKQIENMINQLINANEIVTKYMNDKISELDREKQILIKQMEQEQLKNIEQIPIDDLYKRINNWNNLDFENKKLTCKSIIKKMWLFDDNEFEIEWFLDNEKNIVYNEETSNE

SEQ ID NO: 745 - protein, 626 aa, unidentified
  source 1..626: note = uncultivated organism
MLRQRLQPVAWTGASARAVQQEAFAGAWATETQQRYALGMRLLAVVRLSDLTDETTSPERQRNKIDTYARLHEHEVVGLAEDLDVSGSVSPFDRPKLGPWLARPDDWDGLIVAKYDRLTRSLLDFLVLYKWLTDHGKTLIWIDPPLDFSTPFGKAMANVLITFAELELAVISDRIREAWHALREAGKWPGGTVPFGRIPARAEPNGWRLAPDPEYAPVVAEMVRRYLAGHSFHMLSRWLNAEGIPSSRDAQRRRGGKPARDKGWTPATVQKVLASPSLAGHILSRGEPLRDRDGLIVSIDPLIPPEDYERLQAALQDRANGRRVNASRLLQVAYCALCSSPLHSTTTTNRRHQFRYYICSGARRATCRTWRIPAEYLEDLAARLFLSLVGNQEILERVYIPAADSSAELAAVEEAMQHLEGQYATGSVYRGEHGAARFAAMMTRLEERRDRLAALPSTPARIDYRPTGRTFADRWEEDNEAGRRQLMVNAGFQVRIARTPITPADIATEIRRVGVTGNAEQLRHQANRIRYMTTKTTKPERLAELGTRLAAVEAERQRLRAIRKYDEVVSFALDDNLARRAGLAAAGKPVAIPDLSQAWDQALEPLREVFEADAARAADQLMTPAQ

SEQ ID NO: 746 - protein, 607 aa, unidentified
  source 1..607: note = uncultivated organism
MTHTKKTDPGQIAIYSRKSKFTGKGESIENQIELCKQYIRTHYPDSSDENIMIYEDEGFSGGNTDRPKFKKMMADAKSKEFTAVVCYRLDRISRNIGDFAKLIEELETLKVAFVSIKEQFDTSSPMGRAMMYISSVFSQLERETIAERIRDNMHELSKTGRWLGGTSPTGYISESVQNVTLDGKIKKACKLKLVPGEAETIRQIFKVFLETNSLTQTERYFMLNGYKTKNAKTFTRFALRNILTNPVYMIADEDAYRYLNENKVDLFSGKSDFNGKDGIMAYNRTIQKKGQPNQIRPMSEWIVSVGKHSGLISGAEWVRAQECLDQNRSKSFRKPRSNTALLSGLLFCANCGDFMRPKLSKRLDAHGELIYTYLCAMKEKSRSQICKMKNINGNTLDKAVCEEIKRLGEDSSEFIRQLEEGKKRLECNRGEYNDNLERLYGALAENAKEIAALVSSLTTASGTSAEGYIVKQIDELHDKGKMLESRIKELESLTASHGLSDIEFDIIRQMLASFRDTLDDMSVEQKRAALRTFVKKISWDGVNVHIYLFGSDDSGGIDLPPDDFTPNGGGFADKDSNDSKDRLSSGVFTNSQNRVGDLMEPQCGNSK

SEQ ID NO: 747 - protein, 622 aa, unidentified
  source 1..622: note = uncultivated organism
MKQPPTPPQTINAAIYCRVSTYEQGKGDFSSLDSQEKMLRQYCETKSYAIYEVYRDTESGTTLERKFLQNLLVDATARKFNVLVVTKLDRISRNVKDFLDLDETLNKLGIDIIVTTQNIDTTTPQGAMMRTIMVAFAQFERDMIAERTREKLYNQAKSGYWGGGHVLLGYDAIDKKLVVNHEEAELVRKTLEQYLHLPSTKKVAAWLNEQGYRTKIRTTKSGKTTGGKEFNHQLIHDLLRNRIYTGQITFRGEHFKGLHEAIVTEDLFEKVQKRLDQSARDPYATYEDSPLLLLGLTRCGFCDAQLTTYFPGRKKSGPSYYYYQCTTNSKSGPRRCQSRNLPARELERFTEQLALHTAKDQGFFDAVVRQVKGNAQTSLGEKRIERDAVVLNQVSIKKQLDTFISNLTLAHVDVSQSTEVKSKVESLTTRIKELDGNLNELDREIEMLKNQQIDRTQLKQVFDGFEEMYVEATPEIKRRLLNTIIEEIRCSVKHGEKTGEIEFRLRGDGSIMKKWELAKKKEHGEPGKPPERHFDSPCSLAPRAGLEPATLRLRLVPKLSLRSGLSHHPPTRPASRNLSRMPGALGAYRRESSSPSLCTFPATGFSLRGASLRITLSATDRS

SEQ ID NO: 748 - protein, 531 aa, unidentified
  source 1..531: note = uncultivated organism
MKRIVAIYARVSTEHEAQLSALDNQVQYYDEILAKHPDWVLYDKYIDEGITGTSTKKRPNFLRMMDDAKDGKFDLIITREVSRFARNTVDTLQETRNLKKIGVEVYFTEDNIWTFNDEDGELKLTLMATLAQNESKKTSTRVKAGMQIAFQNGVIMGTGNILGYYKVDKNKIVVDDDQAEVVRFIFREYINGKGTTAIAKELARKNIPTSTGVGTWSPSYITRVLRNPFYCGTIIYRKQYVPDYLEQRRVKNNGNVEQVIVEGDYEPIISKEDFEKAQKILDSHSKAIKVGLRQAKGIPRSMWSKKLICECGSTFNRRTYHRNKYGTTYSYECYKRKNSLEKECKVKGIQEWKLDYMAKYIFTCLTKDKENREELTKLLMNGVKIEENEEKLIQNEIKRYKNLIDDENTKLDRILDMYLEGTVDLNTFEGYQKKTNSKIETFKVEIDELEKKLKRLEPLQVRKENALKSVRKILDVGYNGIDERLIEEVVEKIIVHENYFEWKLNFYDETFKLKITGKGQKDCFIEEYNGK

SEQ ID NO: 749 - protein, 555 aa, unidentified
  source 1..555: note = uncultivated organism
MKKIRCAIYTRKSSEEGLEQEFNSLDAQYEACAAFITSQKAEGWVLLPERYDDGGLSGGSMDRPGLQRLLADIDRGMIDQILVYKIDRLTRSLADFAKMVERLDAAGTSFVSVTQSFNTATSMGRLTLNMLLSFAQFEREVTAERIRDKIAASKKRGLWMGATVPLGYAADGRSLKIAEPDADVIRTIYDLYLKHRNTRVVKDAVVALGLRTPVRTLISGRMKGGAPFSFGHIHYILTNPVYAGRIRHHAKVYPGQHPPLIEPDVWDGIQEQLEDNSAKGRTFTKRNRNGAKASASPLAGKIFDQTGDRLTPSHSRTSTGRKLRYYVSHRLVRGTAPRDPSGWRLPAPELEDTVADLVRGHLTRPETRAAILVDQTTDETATISGRLSGFATAKNDATSGPCLDVVGRIDIAPGEVRIALSGERLECYLEMEAGRIDETVLSFTTPFRHRKRGVEIRLVIGDEPAAVDETLFRNIARAYRYFDLVRSGKTFNEIAEAEGASKRRVQQLIELAFLAPDVIKAVRDGRQPDGMTSDWLRRHAVSPIWTEQREAFAAL

SEQ ID NO: 750 - protein, 515 aa, unidentified
  source 1..515: note = uncultivated organism
MSLLPKITRIDPKTMRELEKKKVCAYCRVSRSTTDQLNSYARQIRVYTDLINKNPEWQMVEIFADEGITGTSADKRPEFQRMLKMCEEKQIDLIITKSISRFARNTMEALEIVRKLKLLGIGVQFEKEGIYTLSLGDEMLLNTFTAIAQEESIAISERVRYSNTKRMASGEFIDGNAPFGYRMVDRVLIPDETEAEIVRDIFNRYLAGESTHEIAKSLNEKAIPTKVGGRWKATGIRYILRNEKYIGDTLCQKTYHTNTLPFRQKRNRGEVDQYYVEGSHNGIVDKAIFDKAQEIINARKTKYLTDAEITKYPLTSKMHCTECGAFFIRKKKKDYVDWVCTNHGIGKENCPTHYIREIRIYDAFVCMVNKLRFGREQILEGIIRRLDEAVKRYKMNNADAYAVSQQISEINAKLLMMEQLHQKNYIATDVYRMQTNDLQAELAKLKEKRFAMLSSKLEDTKNEIQKVHEEIGKISEPLEEFDEKLFSEIIESISIDKNDNITFTLKGNISFTEVL

SEQ ID NO: 751 - protein, 525 aa, unidentified
  source 1..525: note = uncultivated organism
MSISVAIYVRLSDEDRNKKYKGDESESIQNQKSLLKDFCRERNWEIYDIYNDEDYSGTDSSRPEFNRMIADCESGRVNLVLCKHQDRFARDNEVVNHYIHDKFLEWGVRFKSVIDHIDTDDENTKKQSQILALTSEWYCEDTSKKIKSVLQHKREQGQFTGSFAPYGYAIDPKNKNHLIIDPVAAENVRLIFDLYAQGNGYRAIVIELNSRGIPSPTLYKQMCGSKFYNANVQDSHSKGLWTHSTIFTMIRNEIYTGTLVQGKSHNVSYKNHKKKRVNESEWIRVPDTHDAIIDPLTWQKVQERLQGRVRVDTITQTLSPLAGKVKCAVCGKPMKRNVYYNKKRTIQYYGLQCGTYKIGAMNCANTKSISGMQLEAFLIQQINTHIRQFCYTNKLTLLDKHQEKIDTLTGTINLYKEQITDKENKVTKMYEDYLDGTISAEQYKIISNKFTDSIAELKAKCENIQGQIAHIESIKSEEADKKAIIDKYLYVDKLTREIVDDFIDTVYIGEYEAGKDRKITIDWKI

SEQ ID NO: 752 - protein, 555 aa, unidentified
  source 1..555: note = uncultivated organism
MDQEFNSLHAQREACAAYIASQKHEGWVALPEHYDDGGISGGTLERAGLKKLLQHVDEGLVDQIVVYKIDRLTRSLADFAKLVDRLDAADASFVSVTQSFNTATSMGRLTLNVLLSFAQFEREVTAERIRDKIAASKKKGLWMGGTIPLGYEPDGRTLKIVPEEAETVRTLYDLYLKHRSILAVVDHANRLGLRGKAKARKRKEVNKRSDEDGADAATHSINPGACGVTFERAALHYLLTNPVYAGRIRHKETIHEGQHPPIIDPDVWVRVQEHMKESAGRKRGEGKDGSIISPLAGTLVDETGDKLTPSHASKKGKRYRYYVSNRLLNTAAKNESNTKTGGWRLPAKALEDQIAKATLSHLRNRLPVDLLINPAAEAMSNISSHLDLLDAQSSTKGPKSILSCIEKGTVRPGAIEISLNPEAIADTIAISEDELNQDGLVLRLPFQFRKRGVETKLTIGSDTSKPADTTLIRSIAKAHQYYDAIKNGQTFEEIAESENLSKRRIMQVIDLAFLAPDIVKLIVQGDQPDGLTAKWLGINPLPSDWQAQRRILATL

SEQ ID NO: 753 - protein, 509 aa, unidentified
  source 1..509: note = uncultivated organism
MTFFLSTEMNGSLIAIYARQSVDRADSISIEQQIELCRYEAKGEVCKTYTDRGYSGKNTNRPQFSQMMNDIRNGLINTVIVYKLDRISRSILDFSNMMELFENHEVKFISATEKFDTSSPMGNAMLNICIVFAQLERETIQKRVADAYYSRSQRGFYMGGPIPYGFRKVPTVIDGINTSMYEPVPEEAEVVRLIYEMYSHPCTSYGDIVEHINKLEIKKRRKNWTRPRIRELILNPIYVRADLDIYNFFVSKGAEVFAHPADFIGENGCYSYKNKNDKKKDTVSLEGSHIVLAPHKGIVDSEVWLKCREKCSSRSLMITSQKASNSWLCGKIKCGECGYALIAKQFNTRKGRYLFCSNKMNSKSCCGAGTLYTDEVEQLLCNMIRKKLSMFPTLSNYRDDVPDKMVTELETELAETEVEINSLLEKVSCSDTVLFRYINERINTLDKKRAEIIKSLTDLKSKKKIQSHEIDYHLALWEELSFNDKRQVADTLIRVIYASEKKLTIQWRV

SEQ ID NO: 754 - protein, 673 aa, unidentified
  source 1..673: note = uncultivated organism
MKKRTNRSESTANRCAIYTRKSTNEGLDQDFNTLDAQRESGEAYIASMKNEGWVCIATRYDDGGFTGGNMERPAIQRLMADIEAGKIDCVIVYKVDRLSRSLLDFSRIIETFDNHGVSFVSVTQQFNTTSSMGRLTLNILLSFAQFEREIISERTRDKMAAARRRGKYVGGAPILGYDIDRDVSRLVVNETEANRVRQIFKLYLEHQSLLSTIAELDRRGWTTKRWTTKKGKERGGRPFNKNTLYGLLTNVTYLGKIRYKDEVYEGEHEAIVDPETFEDVQRLLTEDTEANRRIEREFSRWSQTIGLAEKLRTLRMGCAADGETFAILINNEHLSTSIKLDLRLVEADQITTPDLSILTNDNAVDGIVFDAAGNPVEYHVLRTHPGDPRGTARLDYDHIPAESVIHLFRGDRPGQRRGVPEITPALPLFAMLRDYSLATLDAAKAAAYFAGILYTDAPASGEAESVEPLDSIELDRNLLLTMPGGWKMSQLKAEHPSGTYAEFKHEILNEIARCLNMPFNIAAGNSSGYNYASGRLDHQTYFKAIRINQAHIESVVLDRLLAAWFDEAVLLPGLLPAGVGPIAEWPHQWFWDGHEHVDPAKEANAQATRLANHTTTLADEYARRGQDWENQLRQRATEIGLMRELGLTPAEVTPANDTEESVDEEETETAKTA

SEQ ID NO: 755 - protein, 509 aa, unidentified
  source 1..509: note = uncultivated organism
MPQVQVIQPIQQQPKRLRVAAYARVSSDSTDQLNSLSVQVDYYTHLIQENPNWDFAGIYADEGITGTSTKHREQFNRLLDDCRAGLIDRVLVKSASRFARNTADALASVREMKSLGVTVVFEKEGFDTETANGEMILSMICAVAQEESLSISQNTKWGIRKKMHDGTYITSLTPFGYKKIDRQLFPDEKEAATVKEIFNLFLDGFSTAEIANYLNTNHPKPAVIWRSASVRFILRNEKYIGDSLFQKNYTPDTLPLKSCCNTGQLPKYYVEGTHPGIISKDEFERVQSLLTQKNINSTNSRACILSKVVFCALCGHVCSRKVRKSQTFVWCCRTHLQSAALCPLKPVSETEIQQAFLSVYNKLQANQSYILQPIIDTLLQLRFLQEQANSARQTARDDVQRLAKQRHNLTRIHTLGYIDNAQFLERSIALDQQLREKKKFLSKRTTDNSFERVLFQTRSIQQQLGSSPPLETFDGTIFTKLVNRVQVSPTTIEFKFMNGMTLSEKRSSL

SEQ ID NO: 756 - protein, 563 aa, unidentified
  source 1..563: note = uncultivated organism
MKKVRMLLRVSSNQQLEADGDLSVQREILIDFIKRQPDWTLDEKEYFEGSKSAYKNTASQRDVLQEILQDAEKKEFDILVPYKDDRVGRLMWDTPQYIMSLKKFGVDVFSAKDGCITPELNDITGQIVLAIRYGNAQKSSVDTSMRVKDTAQKLVQKGKFMGGKSPYGYTLEYSGEISKHGRALKHLVIAPEQAKVVQHIYDLSLNKEFGSQKIASILNNDDDYKHTAPNEYWKGGTITSILTNPIYAGFTAYKRRESSGGKVHRLSSEDWIIAEEQNPEIAIIDIDIWNKVQEKRKRRVNEYTHSLDEQDITVITRNDGGLPLIDVAYCGYCGKKLTNGTKYSYWTIKDTGEKRASKTPAYKCQNAWQGVPHDKNKQFRADVIEKVVFSTISEYIAKLQENDDIFDEIQKNLTTDKRQTEKELKKKRAELKKIKDKISVMEDNLPDAMTGEYIIPLEQLYQLILTQKANYTALLADIDAKESELKETAVSIKEWDFIRKKINSWEDVFINSDSASKRVLVNRLVERIDIKKDEIKIRFRINLNDFFTQPRMSGGLAVQKQRL

SEQ ID NO: 757 - protein, 556 aa, unidentified
  source 1..556: note = uncultivated organism
MSQTRRCAIYTRKSSEEGLEQGFNSLDAQRDACASFVASQHHEGWRIVKTHFDDGGVSGGSLERPALQELLAEIDAGRIDIVVVYKIDRLTRSLTDFTKLVDRFDAAECSFVSVTQAFNTSSSMGRLTLNVLLSFAQFEREVTAERIRDKIAASKKKGLWMGGKPPLGYDPHPDPTRRELIVNEAEAQTVRTLFELHQETSNLRKTAERAEARGLRSKLRPSRSGSARGGRVMDRGHIHRILTNPIYRGLIAHKSKTYPGKHRAVIEEALWSDVQSKLQATAAKRRGSADTNVLPPDQAPLIGRLCDDSGDRLTPSHTTKSGKRYRYYVSHRLIAGTKDPTGWRLPARDLELVLGTGIATHLRHHAEAHSLLKTPDVRGDANLQSLLSPACKSLSNGDENLLRRFVSSGRMSAKEIHLNLNLQALSEALKLEEFALSTDVKHLVIPIEFRKRGVEMKLITGTPCATPDPKLINALNNAHRWAARIHSGTSLAALAKETEHTERYLSRIALLALMSPKIQQAILLGTAPPHLTLDRLITATKPLSWTEQETLAEVVG

SEQ ID NO: 758 - protein, 650 aa, unidentified
  source 1..650: note = uncultivated organism
MEDYLGTYKNRPRTVVFYGRVSTEHEQQISALGNQMEWYANLAERNPNWIVVAQYIDEGITGTQMKKRPSFMQMMDHARQRQFDLIVTRELSRFARNTVDALKATRELKQYGVEVYFVNDGIWTMDGDGEVRLTIMASIAQDESRKTSERVKAGQKISRENGVLYGNGNVLGYDLDKVNKTYTINEEQADTVRRVYELYANGYGETAVANMLMAEGRKDGGGGCTWTASKVSRVLRKPVYKGYKAYNQSHVKDYLSQERIYHSERDYSLVKGDFPPIVSEKLWDTCFAIRKNRAAHNVDKEGRTYGFGTGFPQNKWAKVLYCECGARYQCEGHDKRRNGRSDVRLMCSATKKLSKRVRDEKGFGVPCPLPYTWDWKMEMIAKKMYQTIWVTHNDDLRKLGEELNEYLQNNTESPEVISLKKQLEDLNGEMDKLVQGRAQSRISLAEFMKMSTQVNEKVMATEKALQEAEQQNSAEEQLDLEKLEASLCDSADFSGGEINEYFLDVYVRRIIKSGERYIWLLSLTEKIKPKPPETKEKPRIQQIRTYKAGELVNPETTPDIVEQKKGEKPYVVPPMRTHGFLLQEGDAKRRRHLDYRYEDCQSLHMSFLAEPIPLAREIIDFEEASDWQRKAGVKLHPARWRDISVEIYLV

SEQ ID NO: 759 - protein, 581 aa, unidentified
  source 1..581: note = uncultivated organism
MKEIIKRCHASRDSLLNKKEIEKKVYAAAVYLRLSKEDGDVCDEGRREESNSITNQKRLIYDFLKGREDIHVFREYVDDGYTGSDFLRPSFQEMIKDMEAGKVNLIIVKDLSRFGREYIEAGRYLQKIFPAAGVRFIAVTDHYDSLTADQTEKNIVIPVKNFVNDAYSADLSVKIKSHLEIKRGNGEYTGAYVSYGFMKDSSDHNKLVADPVAGENVKLIFQWKLDGMSNSRIAEKLNALGIPAPADYKRSLGIRYQSGFQKNLYSKWSPVAVGRILSNPLCKGLVVQGKKERINHKIKKMVAKPESEQSRYKQEDLVLIGEKQFDTMQGLLKKDTRTNPGQEGAYLFSGILYCPDCGRQMIRRKTTHKGKQTIFYICKTYNVEKTCTRHSIKEQELISLVTEAVKAQVQMAADEEEILKAAEEAMEGVQPVTLTDTRLPELEKELAENASMLSGLYTDWMEGILSEEEYGEMKVFYSGRCEELEGQIRNRKERAGKAGEAVREARQWLGSLKETGSLFSGTDGGIRRSLICSRYEKIWGSDGTRVAISFLCQARMAEVYSLCGRCQEILQEQPLCEKGAV

SEQ ID NO: 760 - protein, 503 aa, unidentified
  source 1..503: note = uncultivated organism
MKCAIYTRKSTDKGLEQDFNSLDAQREACLAYIASQKHEGWSPVKKIYDDGGYSGGNIDRPALQELIEDIKSGNINIVVVYKIDRLTRSLADFAKLVEVFDQHNVSFVSVTQSFNTTTSMGRLTLNVLLSFAQFEREVIGERIRDKIAASKKKGMWMGGCPPLGYDVKDRQLIINDAEAKKVELIFDSYLRLQTIPKLKEYLDAEGIKSKAWISRNGREYKGQSHGIGALHHLLSNPVYAGYTRHRKELNEGMHNAIIPREKWLQVQECLKNRSATERGKRKQSLQYAFKGKIFDVDGVIYTPMRSNKGNKRYYYYVSQNYVQNRKSVKDAISRLPAHEIEELIENAILKEISSVDRLQSILGCEVDYKSLSYISENIKGNGINCCVIKVIIDVGNIKVEASVSKLVELINKSVNTNVSCINTPMVHRVDIPYHTKRAQRGAVVLRLGDGKDPLDLPNNKLEALVKGVIWREEHFKGKSFRQIAKADNVNESYVRQLINRSFI

SEQ ID NO: 761 - protein, 815 aa, unidentified
  source 1..815: note = uncultivated organism
MARRARTRTVAAAAETGLRVAIYVRRSTDEEHQPFSIEAQDSRLRSYVKSQPGWSLVARFEDDASGAKLDRPGLENALAAARAGRFDVLLVYRVDRFTRRIRDLVTLLDELDRAGVVFRSATEPFDTSTPAGRMLVQMLGVFAEFEREMIIDRVINGMERKASKGKWTLGQVPYGFALEPTEHTLVPIDGEIEIVQRIFRLYTRRRLGCRAIAAHLNERGLLRRCAHRKTATQPRTQPWSHKTVADVLTNRVYLGEVHFREVIAVDAHKAVIDPATFDLAQQILAERGETPAKKANAASDYHLTGKITCPECTRRYIGTNAYGRSRTYRYYTCWTRNRYGVDHCDAPRIDADALDAKVLEAIQDFYTNRLDEALDAIIASRTAHHLARASYQRELTTVETQLAAKEDVVDRYLTEYEDNKIDRDTVARRIEKISEQIRQLRHRRDELIFLMDVDEDDPTIAHLIEIRDQIAKIIATGGVQERKSMCEALLAELRIDDGIATPVIRIPISRDDTPLILQIEARTAQDAVRARPPSVEPRGLEPLTPTLPVWCATSCATAPTRPRGAGTRAIVHTLAAGGHLGMPVVAQSRSIQGGVGREVGDGGHDPALAPQHHRPEIIGPGHEGVARQGVEDEPGPDGDLRLQLARSPARVPGEHPDALDRVAQALRIPGQVDRADRAGHRVEATGVRHSPGPRPAQADRRLRLHRSALEDHRRVARQRAPAVEHLGDRYLGGPVQDQAERPALLVRHEQDHGALEVGIAQRGRGDQQAPRQRPHRLSLGHSRLPVHQRLPYRARPTATTVKAMPRTIACPWPSG

SEQ ID NO: 762 - protein, 512 aa, unidentified
  source 1..512: note = uncultivated organism
MIGAMRTVPRVAFYTRISTDEDHQKFSLDAQRDRLEAYCKSQYGDDWTLHKLFRDTESGTHMNRPGLEKMLFDAEARAFDVLLVFRVDRLSRKVRELALMVDELTKFGVTLKSITEPFDTSNAAGKMMLQMLGVFAEFEHATIVERTRVGLERKAKTGSFVGGHIPYGYRLDDDKRLVIHEEEALIVRKMFTMYALGREGASTICTKLNDAGLRNRNGRKWGRRVVLYMLKNPVYVGKIRWRDVLYQGHHDPIVSDVLFEKAREVLDDRHEDLKGRQWHNGDERLLTGVIKCGLCHSHMFGGGGQKNGHYIPYYVCSKRFNDHACKQDYVRAELLESAIVQDIKAMFRDEDFMARVWEEANRRLGAEKPDLEKEIARVEAEAAKVRASIERYFEAFEAGSLKAELCNQKVADLQGRIEALETEKRDLEARRERLELPAIDREMLAALVDNFEEVLAAAPVPQKKHLLHRLVKKVLIHDRRTVAVWYALPNARRFEDWNKKLPEQVSNLQPSG

SEQ ID NO: 763 - protein, 523 aa, unidentified
  source 1..523: note = uncultivated organism
MAERSVTILPPRLNRKAKEVKAEEKAKLRVAAYCRVSTDSDEQATSYEAQIEHYTLFIQNNPEWKLAGIFADDGISGTNTKKRDEFNRMIEECKAGNIDMIITKSISRFARNTIDCLKYIRQLKALNISVFFEKENINTMDSKGEVLLTIMASLAQQESESLSQNVKMGIQFRYQQGIVQVNHNRFLGYTKDAEKNLVIVPEEAEIIKRIYREYLEGANYKEISAGLEADGVLTAAGNPRWHASTLKKILTNEKYMGDALLQKTYTVDCLTKKRVANDGTVPQYYVNNDHEAIIPRELFARVQEEMKRRANIRQGMNGKRRVYSSKYALSSIVFCGHCGDMYRRTHWNNHGKKLIVWRCVTRLNAPGVECPARTLSEIQLQNLVLEAINKVLGGKQRAIKVLETNISEVVGNAHIEELERIKQQIEKQQTLLVKMTAASEDYSKVVDKIYALQREQEEAMAANVNYKAGKERIQEMIEYLKSQPKRVTAYDEHLVRKLIEKITVYDDHLDFLFKSGIQIEIKG

SEQ ID NO: 764 - protein, 647 aa, unidentified
  source 1..647: note = uncultivated organism
MRAPAKCYIYTRVSTAVQVDGYSLDAQKEKLRKYAEYQGFVIAGEYSDEGFSGKNIQGRFEFQRMMKDIQEEKDHVQYVLVFKLSRFGRNAADVLNSLQIMQDFGANLICVEDGIDSSKDAGKLMISVLSAVAEIERENIRVQTMAGREQKAREGRWNGGFAPYGYKLVDGNLEIAEDEVEIIRIIFDRFIHTSEGINGVANYLNNHGYRKKLRQNNTIEGFSTTFVKKVIDNPIYMGKIAYGRRRTEKKLGSRNEMHVVAQSEYPIYEGQHEGIVSEEDWELAQAKRKKTSGRRVLTGKTSNISILSTIVKCPCCGKSMYSNTQRPTKKDPKTRFYYYCKNTSTATGHKCTFRTNIEQSQIDNFVAAVISAMVHDPKFEIAIKDKIGTVVDTSDLVKELDTLKGKLRQALSIKGRLEQQLDTLPYDDPHYDRKILDLQRRYDDQYDIIELLESQIEDIETQIRDIRQEQISGENVYELLRSFDELYEELDNSDKRDLMRAIIERVELFPERRKDGCWVKSIVFNFPVPVNGRSLKELSLENETTLETVVLLSQRKADDYIEIDLDLDEMDITSAETKATYQEVQQYVLQTTGLMVSNLNIAQIKDKCGFDKRENYNKPRTANSRQPKCTPEKEKAIMDAFRHFGMI

SEQ ID NO: 765 - protein, 570 aa, unidentified
  source 1..570: note = uncultivated organism
MKSKDITRIAIYSRKSRFTGKGESIANQVDECRKYCLYMLHKPEESIEFVVYEDEGYSGKDFERPAMKKLLGELAQYDYFVCYRLDRVSRSVSDFSNFIKKLEMADVAFVSVSESFDTTKPMGRAMMNITSAFAELERDTITERIVDNMTALAKTGRWLGGTTPLGFESEKISFERQGKVRSYFKLTEKPEELDTVRRIYNKYLELGSLTKLSGFLMNHDIRSRNGVNFSNYSLKFILMNPVYCTADADAYEYLLENEYSIYTDKEAFTGEHGLIGYNKTNEHHRNGARRFNEKSDWIIAVGEHIPVIESGLWIQVQERLKSQSKYAFRRARTNQALLSGLVYCSCGSPMRPKSTGTRTEKRERRFSYLCETKSRSKGGLCRQKNVQGNLLDEAVVSYLFKMYRRFQAEDDSILDAIKSELDSPVLADSEEMLLKHAIEGNRRKLDRLVKSMENATSEEVEAVLFQRMEEISAEIKNQKRELEALQQKKETPGTSKLREYLNTLLHFDEKLWSRLDYDTRKSIVQLLIDHIEWDGTTAAIFPSGFSFLAGDDFSSATHLATPDASTMNSL

SEQ ID NO: 766 - protein, 535 aa, unidentified
  source 1..535: note = uncultivated organism
MPKINCAIYTRKSTEHGLDMEFNSLQNQEESCKAYILSQAFNGWEYTKTYSDGGISGGTMERPGLQTLLNDIREGLIQVVVVYKVDRLSRSIIDFHKMMQEFDKYGCNFVSITQSFDTSNSMGKLTLNMLLSFAQFEREVSAERVRDKIAASKAKGLWMGGTPPLGYDLKDKQLIPNPQEAELVNLIFNKYLELENMLAVAEWLNQNGYYTKCWMPRGSHLRGGKAFQKSSIQRILTNPVYIGKVAHQAKNKIYMGRHAPIVPKNVWEVVQDTVRRRIMNPNAFSHYQTHKTVLAGKLYDDKGQTFRLTSSKKKGKKFLYYYNGVGGHYLPVEQLDSFVLKTLKMTDFGDLEPLADRDRLTDSQMQNWIEKAICQSMDKTHYLSIFLNEKQVKADLSACPRVSGPAESRTISAERLDGTLYIRNTFVVDNVSSVKLQNGTARNILTIRQLNESLVRGLTRGWQLKKRMEQGLNIRELEKEMHMTKRTIARYVNLCYLSPRIVADILEYNNPRTMSLKELMNLAERESNFEAQEKA

SEQ ID NO: 767 - protein, 551 aa, unidentified
  source 1..551: note = uncultivated organism
MKRKLYKAAIYLRLSKGDDDLRSYEKSESNSITNQRLITLNYIQKQSDIKFVKEYQDDGYTGMNFNRPGLEEMMNDIDAGVINCIIVKDLSRFGRERIEAGTYLLKTFKEKGVRFISVNDCYDSLTASGSETHVILPIKALTNDNYSRDISMKVRSSKEVKMKRGDYIGPYAPYGYVKSSENKNKLVIDEEAAEVVRSIFAKKLDGKSSNAIAKELTEAGVMTPSEYQKNKRGKKSGYKRTCSGRWSARTVIRILENEIYTGTLIQGKTAKVSYKVNKVIYKPEDEWIRIENAMDSIVSKVDFRTVQNLMVRDMVMAPDSDTSYIYNGILFCGDCKTPMIRKIYKGKKGEVIYYQCSNYKRSGGCTNHRIYHDDLDEIVKKQLTKMLNEYSNYDKVIEKLNMAEINFDEAVSHDKKIAKLSQELVRYNSILKTLESDREEGLVDEEQYYEYRKSYETRKENIQKAIDNQKNIISRIYDEGVLAGEKLDNLRDGLKVGIIEKRILVTFVDKIEVYADNSIKIMFRYQPEIEKLKELDELSELIITAVRQKEA

SEQ ID NO: 768 - protein, 551 aa, unidentified
  source 1..551: note = uncultivated organism
MSSGSRDRYFSPTVVLLALQGGLRRYPPSLIGGRHMPQIRAIQPLVYAQERKLRVAAYARVSSDSADQRNSFAAQVEYYTQFIQNHSDWEFVDIYADEGITGTRADKREDFQRLIADCRAGKIDRILVKSLSRFARNSKDCIQAVRELQTLGISVIFEKEQIDTGHLQNEMILSMMSAFAQEESISISQNMRRGALMRMRNGTFRLSQIPYGYRIDTSGRLSPQPDEAYIVQKIFDDYLSGKGIATIARDLEAQQIPKLRGLSKWSKHGIIYILTNERYAGNEMFRKSYRTDHIPFKKVENRGQKSRFFAEQTHPSIVPTETFERTQNLLKKKSLQFGKPQPTQPYSFTRKIRCGSCGAYYYRRVTTHGIQWVCRNHLQGHCSNKGIPEESLKETFLLFLHRLQEHQDTILLPFVKQVEALQDKERRFHSNLFTYHQQMADLLSQSHVLAQLRAQECIDSGFFLSRSHEIQQELAKVKVQMKHERTQNNYHHILQITQTILEQLNQPLPQSFVPEVFCQTVTFITADEQNVHFHLPNGLVFQENLLGYGHE

SEQ ID NO: 769 - protein, 501 aa, unidentified
  source 1..501: note = uncultivated organism
MKRINAIYARQSVDRADSISIESQIEFCKYELKGGTFKEYKDKGYSGKNTIRPQLQQLLTDIRRGEVEKVIVYKLDRISRSILDFSNMMELFQQYQVEFVSSTEKFDTSTPMGRAMLNICIVFAQLERETIQKRVSDAYYSRSQKGFHMGGKPPYGYRLEEILMDGIHTKKLVEEPQEAEIVREIFEMYEKPDTSYGDITRYYAEKGIQFYGKELIRPMLAQLLRNPVYVRADMDVYRFFKSQGTNIVSGQEMFDGVHGCYLYQGRDVTTDKLQNLKGHMLVAAPHEGLVSSEQWLNCRIKLFGNKTIQANRKAVNTWLAGKVKCGHCGYALMSIKIQSGKQYLRCTKRLNNKACLGCGKVYTEDVENYVYQAMVQKLRESQTPLGYAKLKENPQVQRIYGEIEEIEREISVLVESLLGAGETLTNYINQRVDQLDQLRQEKVEEMVVLAENHATPEQMEKVVSNISLWNQIGFDEKRFTVDKMITLLKVLPGSIQIQWKF

SEQ ID NO: 770 - protein, 548 aa, unidentified
  source 1..548: note = uncultivated organism
MRAAIYVRVSTGRQALQDLSIPDQIAQCEAYCSKRDWEVAATYTDAGASATNDNRTEFQAMIAEACSKAKPFDVVIVHSQSRFARNTLDLLHYTKKLEKAEVQFVSITQDIGSGDQADVLRTILGAMDEYQSKETSKHVSRSMCENARQGFWNGAQPPFGYRTYVAERRGKKDKKKLEINPAEAEIVRRIFTLYVHGEGEKGPMGLKAIASLLNSEGVQTRNGGKFLLQYIHKILTNEAYVTRHVFNRRDSKTRKIKPEDQWILLKTPRIIEDADFNAVHDRLDSNHPLTTSPRIVNSNILLTGLAHCSQCHAPMRIQTGKSGKYRYYKCGKRADAGRSVCSGCSVRMEKLDDIVLDVLIERTLAPSRLDELLSPLFERDLDRERTIQNRIKGLKSDKREMKTQLDALWRQIATEDLRLDASLKAYIEKMQSKYESIIRAITRLEHQNKMPLGKFDAKSIGTFSSALRSRLTAKCQNRFRRAYVRSLINRVDVDHERIRICGSNAVLAGLASTYSQSRRLVPTFAQEWRTRRDSNARPLPSEGSTLSS

SEQ ID NO: 771 - protein, 530 aa, unidentified
  source 1..530: note = uncultivated organism
MIRRAVAYCRVSSDHEDQLNSLENQKQMWEEYINKHEGLEFCGLYVDEGISGTSTKKREAFNRMVNDASTGKFDLILTKEVSRFARNTVDTLQFTRKLKEYGVDVYFKIDNINTGDNDGELRLSLMATLAQEESRKISERVKSGHKQAMKNGIVFGANRIFGYDLIDKQLFINKTEADIVRKIFNWYLLEDESLHGIVRRLAAIGITKGKLGGKINHSSIRRILENEKYAGDLKQQKYYTVNYLTHKKKKNKGDKGYIINIDNHPAVIDRDIWNKVQMKLNDNMRKYKEQGIGYSKSLFSGKIICGSCGGKYRKRTMKNKDGTYRVIYKCNVNYSKGKKGCENGSYIRQDVLINIFIDLLTRISEVKDKKIFIKNMMIALEEGLVNNSIKRLENIEKQITKIQDKKDKLLDLYMDGILGKEGYIKKNTELQEAESRFNAELQIAENRKYHLSSKKQRLDNLYNIVCKELDYSELQSNDDIKELVNIFIDKIVIKENIINFYLVDGNYEIDIKKYPKRVNTGDYPSRRFLE

SEQ ID NO: 772 - protein, 511 aa, unidentified
  source 1..511: note = uncultivated organism
MPTVTVIQPTITEEKSKMIRCAAYCRVSSDSEDQLNSFMAQLKYYENFLADSKTETLINVYADEGVTGTCEDKREDFQRMMSDCRKGKIDRIYTKSISRFARNTRDCLKNIRELKSLGITVFFEKENIDTANIPDEMMITIMGGLAQEESTSLSQNMRWSVQKRMQNGTYKISRPPYGFDIIDGDLAVNEAQAQIVNQIFNWYVSGCGLQKIADILNENGIPSSKKQKKWTAHIVKYILTNERYIGDTVFQKNFVTESLPHLERHNYGEKPKYYVTDTNPPIVEKSVFETVQRLLKERHKPYSNNGHLMSGKIICARCGATYKFKKCGEKFYLTCRTHDKKSNQCKNGRILESKIHSAFITLHNKLFYNCNQILIPLKATLQDLKLRRFSSNSNVMEIHKEIAQLKEQIYVLARLKTKGFLDNAKYLEQIAELNAKVNKLQLELKKITHLDNEDETLEQIEMLIDYFEKQSNPISEFDESAFEFLIEKIVVISQNELEFHIIGGLKFTEKI

SEQ ID NO: 773 - protein, 526 aa, unidentified
  source 1..526: note = uncultivated organism
MSKRRQSTTTPSALTETKRCAIYTRKSTTAGLEQDFNSLDAQREACEQYIRSQASLGWQIIPEAYDDGGFSGANVQRPAFQRLMQDVEAGKIDIVVVYKVDRLSRSLLDFAKLMDRFNRMNVAFVSVTQNFSTADAMGRLTLNVLMSFAEFEREMIAERTRDKMAAARRKGKWTGGPPPLGYNVVDRKLVVNEAEAALVRRLFDLYLDLRSAVSVARTLNAECRTTKHRVSANGTSRGARKWDKQSVLHVLRNPIPAGLVPCHDEVHEGQHQAIIDQVTYRRVQSLLDERRGQSTRHGRNPDYVLTGIIHCALCGSAYAPGSTRKGNREYRYYRCSKRDKGGIAACPAGPLPAQAIEGFVVERVRDALADGKLAADVTRTVKERLAGERTALLAERRDLPSKIAALSSEGKRLVDSVSNVNGAGQRLLDAKLQEVGDQLGRLEARLREVEHRLSLLDACEVEAGWVERCLASFEKVWDTLSAQNRGRLVRAVIERVEVDEPKGDVRAFIADLGSMPEMTTVAKASA

SEQ ID NO: 774 - protein, 501 aa, unidentified
  source 1..501: note = uncultivated organism
MFDAVYARQSHFKKDSISIQTQIDMAKKFCTNPVRIYQDPGYSGKNTKRPAYQKLMKDIEKGEISKVVVYKIDRFSRSMNDFVTAYAFLEKHNIEFASVTENFDTATPMGKGMLYIIVVFAQMERERTAERVADNYYARIKEGWWPGGPAPYGYDIVKMDGVNKSILMPNEKMELVKRVFQLYSTPLTSLGEIANALNEEGILPPSGSGLNSWQGLTIQRIVSNPCYVKADISIYSFYKSRGVTIDASKNNNIENFNGEQAALLLGKTNATEDKRTIYNRISTSEVHLSLAKWPGIIESDEFLRCQDKLSSNRQLGKKADGKYTWLSGLMKCNRCKRALKVNAWTNSKGVLNLYLNCTGRVVHACDVKKFPFHVETVEQCVQAELEKILSNCETQQEEPNEDPGIGIALYKIEEEIRNLISVLKSKESSKSIIRYVSEEIDKLERQQKELIEEQEKRRVPIQFEPIVFSELSFDEKKKVAYTYINKIYVDPDEKICIDWKL

SEQ ID NO: 775 - protein, 504 aa, unidentified
  source 1..504: note = uncultivated organism
MAANPIRSLRCAVYTRKSTEYGLDQEFNSLDAQREACEAYIKSQASLGWKLIPQHFDDAAYSGGNLERPALKRLLREIQLGRIDVVVVYKIDRLTRSLADFAKLVETFDAHSVSFVAVTQQFNTTTSMGRLTLNILLSFAQFERELASERVKDKVAASRKKGKWTGGTTPLGYDAKGKKLVVNKTEAQTVRIIFQLYLEVRSFGRLVGELDRRRVVTKRRDTKVAKYRGGIPFTYGPLAYLLKNRIYLGEIHHGGKWFKGEHAAILDQDVFDRVQQLLQENNIRRGTKFSESGALLKGKLFDDKGNRMSPTFSSKNGVRYRFYVSTALRGRKHNAGSVRRVSAPEIENLVEAEVRGKLNAGEAPRDELFGLIDRVTLSAGKILIILGDSRSNKRPIEIPWTPTPKGRAQFQFAPPERKADPKLIKAIVRAQAWLNQISEGHHTSIEDLAAAAGYNPKVIRHGLRLAFLAPEIAALALHDDRPIRLKQIPKLLALSWREQRQSIE

SEQ ID NO: 776 - protein, 620 aa, unidentified
  source 1..620: note = uncultivated organism
MEKEEKKIAGIYIRVSTEDQAREGFSLGEQEEKLRQLCKYKDFEIFKVYKDAGISAKNMKDRPAFQQMLEDMKAGKLNYIVAYKLDRVTRSVRDLEVLISTLEEYHCYLICDRDDVNTSTANGRFFVRMLTVLSQLEIEIVSERTKFGLNGAIKAGHIPGKVPLGYYRDTDKTLKVDVTTKDIVLRIFEMYLEGKSYQAISNILNKEKVLSPNNKKWCDSTIDRIINNKIYMGDYERYKYDTNKETELFVDVVPPIITRAMWEEVQKQKEKNQRSYCRNRVYIFFQKLVCPTCGKIMTCKGAGGKKSRYMYYFCDNCNLYYNEAEIEDCLIDYILDLVEYDFHVNKYFYPLLAEKKNNETKEIEKEIKKLKEQKERLMKVYVNGILHEEDFAKDYEFIEKKLAELENKKIDSLNFDKETYNPQHLLAERDIEREKLTEHQMYKDVLLKLWTMKSKEEKQSFISKFIETATLKKDKDGNFDIDKVNFRSSFVEQIDKLYDKGVVDFPTMLERDGKFEDTRISVNMNNEQLQDYLSTLKKELDINYMDLGEYYFHDDKIDENYNNKSKVAMIRDRHIEFKLKKNQKVIRMVAIKQYKNFLVKPEGKLQLGLVTHTTSKKQHK

SEQ ID NO: 777 - protein, 548 aa, unidentified
  source 1..548: note = uncultivated organism
MKKYIYFVAVYLRLSRDDEDIDGSTKSESNSISSQRELIRSYVREHEDMELFDIYVDDGYSGTNFDRPEFKRMMADIEAGNVNCVIVKDLSRLGRDYIEAGRLIQKTFPAFHVRFIAITDHFDSQTADMNTKSLVLPVKNFINDSYCRDISGKVKSHQRTKREQGKFIGAFAVYGYRKSEEDKYKLCPDDYAAEIVKKIFAWKREGMSTQVIAQRLNELGILSPLEYKKSLGEKFSTGFRTNLTAKWSAVAVKRILTNEIYTGVMVQGKCEKVNYKVNKTVAKPQEEWVRVEGTHEAIISSEDFEIVQNLLKVDTKAKAGSACSHLFSGLLFCGDCKEPMNRRVNRYKDISRVYFICSTRNRGKGCSRHSIPEDELKEIVFKTLQVHVSVFLDVCSQLEHIQEMEVNFEEVARFDKEIERLHKEQDKYLELRAGLYEDLKSGLITETDFRNFRAIYEKQYEETKDALQKQEEMIKQLFRNGVASGVRLERFKEVMKLTTLDRDTLLCFVSRIEVFEEKKVYVEFRGKEEFHKMLVLQEYSLSKAAKRV

SEQ ID NO: 778 - protein, 547 aa, unidentified
  source 1..547: note = uncultivated organism
MGEEEYIAVYSRKSRFTGKGESIGNQVELCKSYICEHYGQAALDYTVIYEDEGFSGGNMNRPDFKKMMNDAKKHRFQAIVVYRLDRISRNISDFAGLIEELARLDIAFVSIREQFDTGTPMGRAMMYIASVFSQLERETIAERIRDNMHELAKTGRWLGGTTPTGYASEAVTSIHVDGKSRKVCRLKLIPEEAEVIKTIYDLYMETDSQTVTETELIKRGLKTKNNKYFTRFSIKSILQNPVYMIADEDAYNYFVKADTELFSGREAFDGVHGIMAYNRTCQEKGRTTEYHSPEEWIVAVGQHPGIISGRTWTAVQESLERNKNKSYRRPRSNEALLTGLLYCSCGSRMYPKLSQRKTPDGKQVYTYVCRMKERSRRTVCSSKNVNGNILDMAVVQELKLLEEDREAFLIQLKKSRKIQTGERTSCREGLTALKKEKKETEKKIEGLADSLAELEESAAREHVVKRMEQLNREWVEIKNRICELESLSSQNELSDMELEGICQLLSEFTEEMDEASVQQKRMAVRSIVHKVVWDGFHAHIVLCDGQE

SEQ ID NO: 779 - protein, 560 aa, unidentified
  source 1..560: note = uncultivated organism
MKKKHFLTAMYLRLSRDDEDKDSKAGKTGVVKSESNSIGSQRELIRAFIMEQSDMELYDIYVDDGFSGSNFERPEFKRMLADIEAGRVNCVIVKDLSRFGRDYIEAGRYIQKVFPTLGVRFIALTDHYDSNSADMSETSIILPVKNFINDSYCRDISTKVKSQLEVKRRNGECIASFVVYGYKKSEEKRNQLVPDEYAAGIVRKIFKWKIEGMATTAIAEKLNELGILSPREYKISLGLRFYGGYCGAGSSGWSSVTVKRILTNEVYLGHLLQGKRERVNYKVKKMQMRPKEEWVKVENTHEPLISEDDFEIVQQLLKADGRKSPKTGKSSPFVGLLFCGDCGEQMIRRVNRYKEKENIYYICSTKNRGDGCSRHSIAESELWETVENSIRQFANAFLEEKEKFERVGENERNYETIDQYDKETERLKKEKDKYHHLCAGLCEDLKKGIIDKEEFEHLYKSFCRKEEELEKAIKGQNQFIREILEKGVLSAERLKSFEECVELKEIDRYTLSSMVKQIKVYEGRKIEIEFRFTDKFKMMSDFNRRILEKDQNIQMAERRA

SEQ ID NO: 780 - protein, 563 aa, unidentified
  source 1..563: note = uncultivated organism
MPVALYLRVSTEDQVKEGYSLEVQREYLESFAKREGLEIFKIYKDDGISGYSAERPALKNLLKAAKEKKFDLVLVYKIDRFSRNLKDLLNLVDELSSSGVGFKSATEPFDTTTSTGKLMFQQLGSFAEFERNRIAERVFPGMVKGVQRGNWQGARYAPYGYRYNKEKKLLEIDEKETAVVKLIYTMFLCDKSIRSITEYLTRKGYRNRKGNIFSTKLIGDILKSRIYIGKLVWNRHYYDKSQKTKKGYRYIKNPPEKVIISQGKHQPIISEEDFELVQEKLKARRVERRKKVNDYPLSGLLYCAKCNHKYLGISSISNHRTGVKKRWYRCMGPYRSFIRCKNKSVKAQEIETEVAETLEVLLKNDKLKTNRWTNVTFKNDTNFPVFAESTKTGLEKVKNRLKSNLQKQSKLTDAYLENLLSEELYKQKNEGLRQEEEELNKLIALQEVRDIERERSKEYLNRVEEFLEGYDPNKKEMDLETKKLMLNLLFKNIKIAHKKLFSFEFFAPFNFLFSETERKSQCQKKQKLIKICPKKSTSGLSADRWCKYRVMILMILEKLTDCK

SEQ ID NO: 781 - protein, 514 aa, unidentified
  source 1..514: note = uncultivated organism
MANAIRIDPSTKQPLGRVRVAAYCRVSSNSADQLNSYANQLSYYTKLSKVRTDWNFIGIFADEGISGTKAENRPEFQRLLRYCKAHQVDLIVTKSVSRFARNVKEALETVRTLKLLGVGVQFEKEGINTLSLGDEMLLNTFTALAQEESEAISQNIRLSIVKRMNDGEYVDSNAPYGYRLVDKQLEIYEPEAMVVRRIFDLYLSGHSTTEIAQMLTEEKIPRKCGDTGKWKSTKISYILGNERYIGDCFYQKTCRDTSVPFKQSVNRGQEDRYYATDTHKAIIDRTTFETVKERLGKNQKRYCKTTQLNTYPLTSHIRCTECGSFYHRKVASGTVKWVCSRHKEDWTLCDSHHYSEERIYDGFIAMVNKLRFASDNILGVLQSKLDNISLCFKRNNEKATQIAQQIADLNAKLLMLEQLRSKGFLSQDGYHAQAREINNTLTSLKSKRQETFASKVTDLQNDLKKLQEILSELEAPLESFDEKLFFEIVEDMTINKNDEMTITILGGLRFTERI

SEQ ID NO: 782 - protein, 525 aa, unidentified
  source 1..525: note = uncultivated organism
MRFFIYGRKSVFTGKGESVENQIEMCREYIASRFAEDAEREIRIYEDEGFSAKNTDRPQFQKMLRDLREIRPEYIVCYRLDRISRSVSDFSALIETLNQNGISFICIKEEFDTSRPMGKAMMYIASVFAQLERETIAERVRDNMLMLARGGRWLGGAPPTGYSSGKICMALPDGKIRSYCILEENPEESKAVRKIFEQYLKLRSLTGVCRALAACGALTRSGKPYTPAVVRQILKNPVYCTADPEAFSYFTRKGAEVCFGEPDFQEARGLTAYNKRNYQKSSAPRRPASEWIVAAGKHPGLISGKDWVSVQETLETASGKPHSLYSLLSGLLYCGRCGAAMYAKPRSGAKHLPSFDYICSAKLKKGSRACSCGNLNGPAADRAVLEFLTSKSFDVTTLRKRLEGMARKNAGEDAAAKRYQQEINRIEKEINALLLSLPDEGPKSGFAAYAERRINELVNKISELKRKVSRMSESGEAYRQTAQAEAVRLLDPILCLSGLSAAEQRRAVRLLCRRAVWDGSTLYLS

SEQ ID NO: 783 - protein, 556 aa, unidentified
  source 1..556: note = uncultivated organism
MARTESYRVGIYSRLSVDHNDRKAESIENQIEMIRQYIAEENNRITNGRKLTVHDIYIDRGTSGISFQREGFERLMDDVRNHVVDCIIVKDLSRFGRDYVETGNYIEKILPFLGVRFIAVADGFDSVAEDAAEQKLTMNLKNLVNDMYAKDISKRVTAARKLAAESGGYIGSTPPYGYQTEKTDGVRRLMIHEESAAVVRFLYDGIAKGMTTAQLSSVLYRQNVHRISDYNRCGHVFCGESELLHQWNPNVIRGLLSNPVYTGKLVQRKLQSLLLEGRKGSRKTDREHWITVENSHEPIVSQELFDQVNQILKRKKSDDTGKRLPENHENIFRNVLYCGKCGGKMHAVFHRRKTDGQRSYAYKCRRAYYMDGRKCEKNYIREETVESHVAEQIRQILKDRKITSKTLVSLNRKECEKAVAVYKEEIDRLLQENQRLSAKAGEMYRQYKEGRITDLEYAAFRDRRAEYDSFCEKRVKERKRKIRKSEIRMEEENKFLRSLQSAKGHKKLNVLLVDSMIERIDVFPEGEMEIRFRFGKGGSCYGEEQDRSLLPPFYGG

SEQ ID NO: 784 - protein, 513 aa, unidentified
  source 1..513: note = uncultivated organism
MPVAKLIAPTTKQEIPKLRVAAYCRVSSNSADQRNSFATQERVYTKYIAEKQEWELVDIFADEGLSGMKADNRPEFQRMIRMCELHQIDLILTKSVSRFARNVKEALNYTRKLKLLGIGVQFEEDGINTLAMADEMLLNTFAAIAQEESKSISQNQRLSIVKRMEKGEYVASKAPYGYRLVNKKLKIFKPEAEVVCWIFQAYLNGLSIKTIADTLTAQGVPTRSGQEQWKANTITYVLTNEKYIGDTLFQKYYGEMTVPFKKHRNYGEMDQYYAKDTHEPIVEKTIFYAVQSLLKNRQATFKQEKSKNRYPLTSRIRCSECGSFYHRKVRSGVIKWVCSKHAADTTACNSNYYSEERIYDGIITMINKLRFCEEDILGQTIQKLEFAAAAYKRNNRAASQLSQSIAELNAKLLALERLRSKGYLAADIYHTQAREIRQQLGKLKTERYSSFESRITTMLEDVRKLKSLIDELEQPLEVFDEKLFHEVVTDICINNRDEMTVTLLGDLKFTEQI

SEQ ID NO: 785 - protein, 525 aa, unidentified
  source 1..525: note = uncultivated organism
MSRKIIRCAIYTRKSSDEGLDQSFNSLDAQREAGEAYVKSQAHEGWKALPALYDDGGYSGGTMERPALQGLLTDIDAGLVDVVVVYKIDRLTRSLADFARIVERFDARDVSFVSVTQAFNTTSSMGRLTLNVLLSFAQFEREVTGERIRDKIAASKAKGMWMGGNPPLGYDLPASGTRILRVNEGEAETVRHIFARYLELGSVHALQRELTDQGIVSKRRVTGSGRTVGGLPFSRGALFHLLRSPIYLGRIPHKGVIHEGGHEPIVEQGLFDEVQERLDHQARRHRNNGEQRVARAPLVGRLFDASGSPMSPTFSRGKSGRLYRYYVSTPLQQGERHKADDAIRRLPAPAFEKLLAGLVERWVPLAGVPLDLPLQVRLHDHGFLVDMPGELAPDIAPRLLDDERIVHATRQSCWIEVLQVLPLRGGKRSIVTGSRVALPDPSLIRALRKAHRMLSMHRGLPALEKAPASRYDRQILRLAFLAPDLQRDILTGRQPPALTLEELRCADIPPCWNEQRRALGWPAST

SEQ ID NO: 786 - protein, 537 aa, unidentified
  source 1..537: note = uncultivated organism
MAKQTENNVGIYLRLSQEDMREGDSLSIDNQKLILTKFVQEKGWNLVDEYIDDGYTGTDFSRPGVQRLLGDAQTGRINIIVVKDLSRFGRNYIEVGRYLDYIFPMNNIRFIALNDGVDTADRNSAALEMMPIVNLFNEWHSSSTSKKIRAVFLANAKAGNYMGSFAPYGYVRSDTPNHTLVIDPEAAEIVRRIFEMRATGMTYRSIAAVMNAEGILTPSEYRYHKLGRENPKFTLKVWDSCVVKTLIQNPVYTGKLVQMKKTTVSHKNHKEIKKDPSEWVIAEDTHEPIVSQELWDKCAELGQSVSRGKTCSNGVMNPLSGFCYCADCGNKMKKNGRTNKKSYVCGLYARAGKTFCSSHHIPLATIEEIVLRDIRSKISLTVDEEKAKQIFLAHKTGQQAKQNAADTKRLRAAQRRLTELDRLIHATYEDKVMGRVPEEMCISLLNDYQQEKEKLTSELETLRQNIEADKQDSSDIDEFIRRLRSFENAEVLTREMCNELIEYVKVDSYVSPTAPRDIYIHYKLLDEPMNDSNNLYK

SEQ ID NO: 787 - protein, 540 aa, unidentified
  source 1..540: note = uncultivated organism
MQEEKTYHAAVYARLSKEDERAGDSVSIESQVAILTKYVADNGWNHVATYKDDGYSGTSFERPAFQEMMSRVKKGEINLVVVKDMSRFGRNYLEAGIYIEDTFPRLNCRLIAVNDNYDSLRDGNDMMVIFRNIFNDFYARDTSTKIRAVRKSAMRSGRYMGAFAPYGYVKDPADKHKFLIDEPAAEVVRLIFSMRAGGIGCPKIARELNEKGIMPPRTYYFDARGQANPYEKTNKKWNDCTVRHILENEAYLGHTVQHKEECVSYKDHHLKAVSPDEWIRVEDTHEPIITKELWEECRRVDRLRSRPHQSRLKEVSLFSGFLFCADCGYSMRCQVTVRRKKNGVKANYEAYMCGSYSRSGHTACTTHYIPRHVLEELVLADIQDKAEKVCVREKEVVRRITEQKQAQGRQEAAAAEKSAKALKKRLSELDRLIQSTYEDKVLGKIPEPLCVKLMSGYQSEQEEKAAKLEELERMLAESRKVKEDVQEWADLMKQYRDADILDRDMLLKLVDRIEVGEARVVNGQKERQIRICYKFAGDIG

SEQ ID NO: 788 - protein, 529 aa, unidentified
  source 1..529: note = uncultivated organism
MIRPVATPTAAPTKVVRCAIYTRKSHEEGLEQAFNSLDAQRESCEAYVASQRHDGWVVLPSHYDDGGFSGGNVERPALKRLLEDVEAGRIDAVLCYKLDRLSRSLADFVRLMERFEKHGVSFVSVTQHFDTKSSMGRLTLNVLLSFAQFEREVTAERIRDKLAAAKMKGKYVGGRPLLGYDVDRERMRLVVNADEADLVRRIFQRFIQLGSCMLVARELNRQDYHTKAWTARSGNKRGGALWNKVYIHWTLTNRRYLGEVMHQGQAYPGEHEAIVDRRTWDRAYAILGENRNYQASQTRKKSAAILKGLLRCGCCGVSMSPTYTTRRGRRYQYYVCHSASKNGHDTCPVKSVPAGQIERAVFDYLRLLFADPEMIARTFRATRVEAEEERRGREKERDAIRRRLADLRKAIGRLVRTGDGKAEGALSAELRSLNDEHTEAEERLRKAEDVLGRQRDDFPTEQDVAAALKTIDPLWEELFPAEKERIVRLLVESVTVRPDGLSVRLRPGGLAALAVEMQGAETETVEATV

SEQ ID NO: 789 - protein, 524 aa, unidentified
  source 1..524: note = uncultivated organism
MTEKIATKRFYCAIYTRKSTSEGLDQDFTSLDNQREAAENYINSQKSEGWIALPDRYDDGGYTGANTDRPALQKLIADIKEGKVNCVVVYKVDRLSRSLLDFVQLLELFEKNSVAFVSVTQAFNTNNSMGRLTLNILLSFAQFEREIISERVKDKMGAARKKGKWLGGRPILGYDLDKVNHKIVINEKDAKLVREIFDLYLKEKSFLGVAKILNEKGYLTKCHPTKSGSHGGIRFKNTNIHHIVKNILYTGKIKYNGEIYKGMHEAIISDETFNKAQEIIANNRVRRDYSKVTHNTGILSKILRCKACNGIMFHTYTSKKKDRKYRYYVCLNAHKRGYNSCPTKSINAQYIEDTVISSLKKIAADSDLRKGALVDVNKRIHEEIEAHNKDTKALIEKARNLHDKIDKIKESLNLPVENKREVEQELKLLSAKYDEYDRLLTEARLKEMALGQKLITDRELAEALIINMPIWETLFPQEKYKALRLMLKEIEYSGADGKIALTLNHNGLKFLYLLLHPELQKDAK

SEQ ID NO: 790 - protein, 553 aa, unidentified
  source 1..553: note = uncultivated organism
MSYNRATAFAYLRLSREESKSSESTSIATQRVIVTNYCKQNDITLVKVFSDDGWSGGNFDRPGFQAMMRELEIGAVNMVVTKDLSRLGRDMRESSYYAEQFFPEHGIRYVAIADNFDTDTDNVMAPFQFAMNEVYLRDGSRKVRDALKSKREHGEYCCCPPYGYKKAQNKKGVLVPDEMTAPIVKRIFEAAANGDSCKTIAIDLTNNGIIPPLKYRVLYRDDFSDAGAAKASDAWNGQTVRRILKNPVYLGHTILGKTKKASIKSTKKTTVPKEDWAITKNTHEPIVSEKLFDLAQADLGKRTKKFMDYGRVRNNIFAGVVFCANCGHALCSSGTVYKGERLKYWYLTCTHKRKDIQNPCTGVRIRYGDFTEAIRQDLNNLIDLSDDEIHDLVQDVINKNAKADNSQSIKIQCEKAKARIKTIDKIIAKLYVDNAEGKIDDDRMYSMVKNFEKESDGLKATIAELEGQLHQEPSTDDYKKFFDLAKAYTHIDVLDRDTILTFIDRIEVGERKVQKGCESMRYPPYSQEIRIFYKFIGEITELPEKDFPIAANG

SEQ ID NO: 791 - protein, 539 aa, unidentified
  source 1..539: note = uncultivated organism
MEQKTDKEKPIIKCAIYTRVSTSEGLEQEFTSLDNQRESAESYIQSQKAEGWIALPEHYDDGGFTGANTDRPALQKLIEDIKAHRINCVVVYKVDRLSRSLLDFSQLLEFFDQNSVTFVSVTQHFNTQNSMGRLTLNILLSFAQFEREIISERTRDKMGAARKKGKWIGGCVPLGYDLDKINHKLIVNQEEAKIVREIFELYLKGNSLLDVTKIVNTKGYRTKIRKLAESKQGGGVKFSHTSIDKIIKNAHYAGKVRYQDIIYPGEHERILDDETFQKAQDILHLNQRNLEVHVPFAKQISLLGGLLRCRACNSSMHLTHNVKYGNVRYFHYVCLNAQKRGYQECPTRLVNAGLMESKVLECLRKITDDQRIIPESWETYTLDQKITVLKDIVKEIKYDGDTAILEFILHNTQKSHRFNVTKAELKYQSIAPKDRLIQSEPQLRQNLILAHQIDNLIFKGKAKNLREVSGWLNLSHVRICQITGMLFLAPEIQEQILFSRDGIISEIPEYKVNEIAKELDWLKQKETWQRLINNPTQER

SEQ ID NO: 792 - protein, 551 aa, unidentified
  source 1..551: note = uncultivated organism
MTTAPNPVRCAIYTRKSTEDGLEQEFNSLDAQREACEAYIASQRHEGWKLVPVAYDDGGYSGGTMERPGLKALMQAVENGLVDVIVVYKVDRLTRSLADFAKIVEILDERKASFVSITQAFNTTTSMGRLTLNVLLSFAQFEREVTGERIRDKIAASKKKGMWMGGPVPLGYIVENRKLVVEPEEAERVRTIMCRYLASKSAPALLVQLEREGILTKIQQRVSGPHKGGIPFRRGSLFHLLKNPVYRGKIVHKDQIYDGEHQAIVDAELWDAVQAKLASAAPPRKRPGNDPQQALLKGLLSDSEGRPMVPTYATKGVRRYRYYETRRDLTGPDKAESTRYAMVHLERHVAEHIGALLGDQHALRRIAGLTDGGSLQIMFVRAQLHGQEMATDLRSAIQGLICKISFAPDRMIIELDPGQFGIDEPSIWTHEIPLPRKKPFREAKLRINSNDDGPASIDPKLIGLLADAMSAQKLVLASPDIPLQKIAQREGRCRKQLTQLVKLSWVSPRIVEAIVEGRQPSMLSRKRIMETDLPLAWGDQESLFGVGSLAK

SEQ ID NO: 793 - protein, 551 aa, unidentified
  source 1..551: note = uncultivated organism
MTRPHMRCALYTRKSSEEGLDQAFNSLDAQREACEAYVKSQRSEGWRGLETRYDDGGHSGGTIERPALQRLMADAAAGKIDVVVVYKIDRLTRSLADFARIVEVFDRHGVSFVSVTQAFNTTSSMGRLTLNVLLSFAQFEREVTGERIRDKIAASKARGMWMGGVVPLGYDLPTKGTHKLIVNPAEADRVKIIFETYLLTGSVHALCSWLNAQGIQPKQHITRSGHKIGGQSFSRGALFHLLRNCTYRGRIMHGDTSYPGLHDPIISEELFKSVQAKLDAQKRRKTDNTPEIPKSALRGRIFDANGLPMSPTTARGRSGRLYRYYVSAPLQQGRGADLPIADSNGIRPHRKMEKRAAHRAPGSVSALRRVASNAIEARISAVLERLLPEKTGNLLQIPLRIELHPGALHILLSAQWQATIEAHLIDGDVLMQEKAEQIRLICPIGLYQRSGRTEIAATARGGQRIDATLVRALRAAHAMVTRDAKGLPQLQAAPATPYQRRLIKLAFLSPHLQKSVLDGRQPQDLTLARLINAEIPICWTAQEHLFGHRSN

SEQ ID NO: 794 - protein, 575 aa, unidentified
  source 1..575: note = uncultivated organism
MSEKKAFRCAVYTRKSSEEGLDQDFNSLEAQREACEAYIRSQAHEGWKLIPDRFDDGGFSGGNMDRPALGRLMAMVRDAKVDVIVIYKIDRLTRSLTDFARLAETFDKHGVSFVSVTQQFNTTTSMGRLMLNVLLSFAQFEREITGERIRDKIAASKKKGMWMGGPIPSGYDLKDRQLIVNDKYADTIRRIFRLYLEEGNVPALLERMNRERIRTAARVSAKGRATGGRPFTRGHVYKLLSNPIYVGRVPHKGVSYPGQHQPIVDSGSWDAVQARLARNTQGERKRRRRPLPSTPLLAGLLFTSSGNRMYLAHATKARRRYHYYVERPADHGPSLAATEEPPSSVLMDPDGNARAQFTGTNRNALLRLPAAEVDGAVLASLHDLLTDRHRLMEFLGDTDASDLKTSLDAAASLAGSFGALAASPVDFIRRAIASPRRLVLEISPHDLRRTLGVGAVDATDIGMKPISIDLEFRRRSRQFKLATQSSRTAPANVDATLVTAVARAFDWFDRLASGKARSLHELAAADGFDAAYVGHILKLAFLPPATVEEFLSGRQLPELTADRMIWHEDIHPKWR

SEQ ID NO: 795 - protein, 549 aa, unidentified
  source 1..549: note = uncultivated organism
MAATKPRLRRCAVYARKSSDEGLEQDFNSLDAQREACEAYIKSQAGEGWKPIRSRYDDGGYSGGTMDRSGLQQLLADIRARKVDTVVVYKVDRLTRSLADFAKIVDVFDTHGVSFVSVTQQFNTTTSMGRLTLNMLLSFAQFEREVTGERIRDKIAASKQKGMWMGGFVPLGYEPNGRTLTINEAEAKTARTVFRLYLEHGNVRCVKEEADRLGLTTKVRNGTDGRTRGGRSLSRGYIYKLLGNPLYVGCIAHKGKTYDGQHPAIIDAETWDAVQAKLARNACERPSESRVSDPSPLLGKLFDEAGGSLTPSHAVKSGRRYRYYVSKRLIDGRAAEHKERNCWRLPAHEIERIVGDAVTGLLADRAALASAMRESGVATDGIRNQLYAAVRWQGEILDLVERVDLDADRIAIGLDLSSLAGETGTTIRHVVPARIKRRGVEMRLVLAGAQTETARPDPALIKAIARARRWLDDLLSGRARSLGNIAQREGCSDRYVSHLMPLAFLAPDIVQAILAGNHPVDLTAETLIKRTDLPLEWAEQKALLGFERK

SEQ ID NO: 796 - protein, 500 aa, unidentified
  source 1..500: note = uncultivated organism
MNNEKKTIRCAIYTRKSVSEGLDMDFNSLDAQREAGLNYIVSQKAEGWIPIDKHYDDGGYTGGNMERPALSELLSDIKKGLVDMVVVYKVDRLSRSLMDFAKIVELFESHKVSFVSVTQHFNTKDSMGRLTLNILLSFAQFEREIISERTRDKITAARKKGKWVGGIPILGYDIVYGGKGIKINEIEAKRVREIFQFYNDCGSLGQTVEYLRSQNIRTKEWMSIKGNKKGGREFSKSTVNRLLKNYAYIGKINVNGEVFTAEFNGVVSEELFNSVQNRLKGNCIDKGARQRNRYKALLVGKLFCGNCGKLMGHTYTKKSSGKIYRYYVCSQASQKGWSQCPYPSVPADEIEKFAIDELSHITENETLLTEVIENFNQKNREMLLENSKFIESVKLSLGAIRANIKKTDDITRQRFFSSQEEEALASLQRAEYERSEICSRIEMNSEELKNLLKNFREIWENITFNERIELIDLLIEKITLNAESGDIFITYKNSNTIWKL

SEQ ID NO: 797 - protein, 566 aa, unidentified
  source 1..566: note = uncultivated organism
MTMSKPRIRCAIYTRKSSDEGLDQDFNSLDAQAEACAAYIASQRHEGWVAVKSRYDDGGISGGTLDRPAVQRLLGDIDAGLVQMVVVYKIDRLTRSLADFAKLVERFDAAGCSFVSVTQAFNTASSMGRLTLNVLLSFAQFEREVTAERIRDKIAASKKKGLWMGGVLPLGYDHHPDPKTRGLVVDEGEAETVRAFFALYDEFGCLNSVMRRANDMGLRSKLHHFRSGRIQGGARFSRGQIYALLRNPIYIGKIRHKARVWDGQHAPILEEALWDRVQTKLQAASARPRGRKGAADRSGASRVAPLTGKLRDETGDRLTPTHTRRHGRQIRYYVSNRLISGGTDPRGWRLPAPALEQAVADVIAGHLISLARDHRICAETDLQRGNAVKDKVRQLAGQLSDSTPGLLAALLAEGHMEKDRIVLKLQAKALGEALDLHPDALDPSVLAIEATFALRRRGVEGKIVVGDREPQPDRTLLRALSQSHAWVADLRKGKPLGEVAAATGHSESYIRTRAQLAYLAPAIQCAILDGRQPADLTLERIIRKPVPLDWDMQARLYGFWRGSGQP

SEQ ID NO: 798 - protein, 549 aa, unidentified
  source 1..549: note = uncultivated organism
MESTTLYYASAYVRLSKEDMVSASGIRSESNSISNQKQLILDFLKDKADIKLVSIREDDGYTGTDFDRPDFQRMMDDIRAGVVNCVIVKDLSRFGREYINAGKYIDRLFPYYGVRLISINDGIDTITRSSSDDFNIMLKNLMNDNYCRDISIKIRSQLQVKRKNGEFIGAFAPYGYEKDENDKNQLVIDPYAAEVVRDIFRWKLEGINQDHIAKKLTEQGILSPMEYKRSKGLSFKSSFKTKKLAEWTAVAVRRILTNPVYVGTLVQGVRSRPNYKIKTVIINDEENWVICENAHEPIIQARSFLLVQRLLELDTRTSPNEEFVFPLAGLLYCGDCGGPMVRKTQKTSEKLFYYYICGNHKNTGACSNHRISKLQIEEAVLKLLQEHIRILMELESVLQVIRDAPMRRYSVRKAQERAVYAETEIERFRRLKLSAYEDLREGILSKEDYHDIVTQYESRIEDNKLSREQAIRELDLYIQNGTSQQKWIQEFIEYRNIQTLTRSMAVECIERINVFEDKRIEITFTHMQDYQSLLSQIDDLQKETQKGAS

SEQ ID NO: 799 - protein, 542 aa, unidentified
  source 1..542: note = uncultivated organism
MSQEKYFAIYSRKSKYTGKGESIENQIEMCKQYIKLHFGKDALNRIVIYEDIGFSGGNLNRPDFRRMMLNAKTGKIESIIVYRLDRISRNISDFSGLINELSDLEINFISIKEQFDTATPMGRAMMYISSVFSQLERETIAERIKDNMHELAKTGIWLGGVTPTGYRSMRNEKTSSNGNIKSFNFLDIVPYEAETVKKIFDIYLSYNSLKMVENKLNDLNIKTKNNKPFSRFSIKAILTNPVYSIADKDSYNYFDLNNAAITVSKEKFNGEYGIMPYNRTHQEKGKAALSMPINEWIISVGMHQGIVSGQQWVAVQNLLRNNKSKVVKRPRINESLLTDIIFCKCSSKMVTKLYADTISDGKRKFSYICKVKQKSKKSLCNVKNINGNYLDEIVSNNIDSIKECTSVLIEELTKSSSLFIKSENKTAAYYSKRIEKNKLKLKNLMYAYIDNHNINIKSEIENEIEQLKLEIEKLQNQLKKHKCDIEKSANTNKHINEIAKELYNFKNALKAVNINTRREAVQNIVAKVLWDGDCVTIYYNAS

SEQ ID NO: 800 - protein, 723 aa, unidentified
  source 1..723: note = uncultivated organism
MDADSQSTSPPGAIIPVAIYTRVSTDNQVGGRFDSCESQLAICRDHVRKNSGLGWVEMGHFSDPAFSGSTMNRPGLRALMRQVETGGVKVILIFKLERMSRNIDEWGPFRNFLKQHGCRLESATEDISENTPSGRLKNNLMLSFSQYEKENTAEKTQAKMEQQAKRGYWNGGAVPFGYAYDKNTQTLQPHPEEAPIVRRVFELAAQLVTLEQIADVLNREGLRTRARLFRRTDGTEHMVGVKRFRSDGLRLMITNPIYRGVIRYAGHEHAGRHERLVTDDLWEKTNAVVVKTVRPVQTLKPDQDKHFHLLKGLVHCGCCNRALVPHASGNRDESGRLYRYYYCSHLVKERADSRCTVRRISAGSLESAVVQFLSELGRHPDVIGAAVGSSQTRRLARQAEVKKELGSLDRELSDTNSSIRNCVESIAAGGKAIAEELAGQVTVLKDRKQELTVQRERLSQELAGCESEILDEHRVGHAVEQFGQILQGLTPDEQKTLVALFVDRVVVRPSKDDEGTSFAVAVRRLELEFKLNLPRLVEGMEERVMEQGEGKRLVMRGFVVTAQVALGQQGRANQAIILTPFRCGEEPQPQSTAETPAQAAQKAQNPLLRARAWKRMLAQDPKLSLRRLAAREGLVAPTLVQHFKLLKLAPDIQSQIAGMRNPDALRFFSLRRLMPLAELSVAEQRRFFREWQAVFGCGPGLTSQGASVATVPANGQTRGIRPF

SEQ ID NO: 801 - protein, 565 aa, unidentified
  source 1..565: note = uncultivated organism
MSKSISKIKKIYRAAIYLRLSKEDGDVADAKKAESDSISNQRILIQDFLKDKDDIEVVSTRIDDGYSGASFETRPAFQLMLEDIKRGVVNCVIVKDLSRFGREYIDAGKYLEQLFPSLGVRFIAINDGIDSARECESDRFSLPFKNLINDAYCRDMSIKIRSHLDVKRRSGEYISNYVPYGYDRDPEDRHVLTIDTYAAGVVRDIFKMKLSGMSQDAIANRLNEEEGILSPLEYKNSVGCRFKTSFKTNEQALWSSVTVRRILENEVYVGNLVQGKRTTPNHKVKKVIMKHSSEWSRVEGTHEAIISRRDFDIVQRLLGMDTRTSPDNESVYVLSGIAKCADCGAPMVRKSSTVGGKKYEYYICSTHKTNKSCGSHRIPVDSLQDSVLLVLQQHIAGILNLERVLEYIGTVPFQELDIKKLEERCAKKEEEIAKCKELRVMLYTDFKEGVITKEDYVELHDAYTKKGNEAQSVLTNLKLEIRKILNDKADKYEWIDYFKQHKNIKELTRTVVAELIAEVRVKDKYNIEVVFDFDDCYADALTKIEQYKEQKSKQSEETIIMKEAM

SEQ ID NO: 802 - protein, 523 aa, unidentified
  source 1..523: note = uncultivated organism
MPKVGIYCRLSIEDKNKSSCDDSQSIQNQKNMLRDYCHEREWEIYDIYCDDGYSGIDRTRPDFNRLLADCEKEKIDIVLCKDQSRFSRDIIVIEQYINDKFLEWGVRFIGVADNADSDSELYGTMRLFTSAYNEMYVKDISAKIRRTLAYKRQQGQFIGSFAPYGYKIDPSDKHHLIIDEKAAENVRNIFDMYVQGEGYRKIAAQLNSDNIPSPSAYKQQNGSKYVNTNAVSSNSNGLWTQSTIASILRNETYIGTLVQGKSHNISYKNKKRKQVGSDDWIRIPNSHEAIIDMEVWERAQERLNSNTRSSRGTQELSPLSGKVKCMICGRPMKRNVYYNKSGTLKYYGLQCATYKSGAMNCSNCKSISGKVLEQKIIDELNAIIKQYCEADKITIDNIYKQQEEKLRSFLNSLTAQQSTAKCRLTKMYKDKLDGLLSDEDYALFRESLAEEEKQLTERIEEINMQIEKCRTQQINTETQKELIEKYTEFTQLDRNIADEFIDYIEIGSVTDDGNREIHIHWKI

SEQ ID NO: 803 - protein, 588 aa, unidentified
  source 1..588: note = uncultivated organism
MSTKKLRCAIYTRKSTEEGLEQEFNSLDAQREACAAFIASQVGLGWQLVPDHYDDGGISGGTMERPALQRLLADIGEGKVDVVVVYKIDRLTRSLMDFARIVDIFDRHEVSFVSVTQQFNTTTSMGRLTLNVLLSFAQFEREVTAERIRDKVAASKKKGMWMGGTVPFGYRVENRKLVIDEPAAAEVRRLFARYLELGSVPALAAELNEQADATVSGSTLLHRDTGQGRRKAAGKIGKGKLYYMLSNPIYIGRIRHGSAIYRGEHRPIIEEDVFDAVQARLAAQAPRSRGTIATRDIHLLNGVLFDEAGDRLSPTHATKAGKRYRYYVSARLKSGGSDNKDGWRIPAAEVEAIVLYQLENLLADRTMLSEWLQAVGQVPRIEAALEKAGRTSAVLKATATNPEKVRQIVRMAVRRISLSSDRIRILIDRSALANWLADTAPEDATARGRPASTSSRTRRGPIESDADLHVVDLPLSIRKRGVERRLVIEGQAASRSRPDKPLIDMIARAHAYLAALTDGQGLGRKAVAKQFGVHAEDVSRLLPLAFLSPRIVELILTGCQPADLSVRHLARGIELPVSWAAQHKLVGI

SEQ ID NO: 804 - protein, 552 aa, unidentified
  source 1..552: note = uncultivated organism
MKCVSQQAIANPCAIYTRKSSEEGLEQSFNSLDAQREACEAYIKAQAHEGWTLVKTHYDDGGISGGTMVRPALQRLLADIDAGRVKTIVVYKIDRLTRSLADFARIVERLDRAGASFVSVTQSFNTTSSMGRLTLNVLLSFAQFEREVTGERIRDKIRASKQRGMWMGGVAPLGYDMPTDPVTRALVPNEAEAATVRLIFQRYLDLGCVSRLRDDLIERNIRSKTRVTKAGRVMGGARFSRGALYHLLRNRIYLGDLKLSNGFREGAHPAIVPAELFEAVAQCLDRQAVDRSRNRTLQSAAMPLTGLLFDRDGHPMSPSFAYGRGGRPYRYYVSAPLQQGHRLSPSSGNLRRIPAGLIEEGLQRHLVQLMETGSDTPLAELVPSLARIDLDLRKVHLTLRKSLLPRHLQVRLVPHPADPALGQISLHLHCRIRGGRSFIQSASLPDGPARPDSALIGALLKAHAFAASLGWTDGVARSSPSVLPPANSYERRLTRLAFLAPDLQRAILEGRQPRHLTLKDLITRTIPGDWSAQRAMFANGTDREDLDARCRT

SEQ ID NO: 805 - protein, 551 aa, unidentified
  source 1..551: note = uncultivated organism
MKLLNRTTSDAKNTDSLRAALYLRVSTGRQAENDLSIPDQRRQAQEFCRVRGWQVVIEFVDAGLSGTDDRRPELQRLLDLAAGGDSPFDVVVVHSFSRFARDHFALEYHVRRLRKNGVKLVSITQDLGDDPMSVMVRQVFALFDEYQSKENAKHVLRAMQENARQGFWNGAAAPYGYAIVAAEQRGAKTKKRLAIDAVEAEVVRLMFRLVNEGNGTSGPLGVKALACHLNERGYRTRRGARWGIGPLHALLTSPTYKGEYRFNRKVWKTKEDKPEADQIIVAVDPVIDPSLFDAVQARLKSRNPKQTPPRVVTGPILLTGLATCASCGGGMTLRTGKSGRYRYYTCATCAQQGKSACPGRSIPMDKLDQIVTDQLNASLFMPERVRAILSGLIARQASRSEDHAQRLTALQNKASDCESRLSRLYEAIENGIADASDPTLKDRLALLKAERDQAKAAKDRAFAELQPETRITEEKISAFAALMRENVANGAIPFRRAYLRSVIDQVEVDDTEIRIHGRRDVLERLVMGGGATPAGVPSFVRKWRTRQDSNL

SEQ ID NO: 806 - protein, 681 aa, unidentified
  source 1..681: note = uncultivated organism
MNSETSTNKILRAVLYERLSKEDGDKLTKEEKSESIKNQDLMLRSYAIEHGYEIVGVYNDEDWSGADSSRPQFNEMIKACEAGEIDVVIAKTQSRFARDMELIERYLHNKFLEWNVQFKSVVDHIDNTRRETKKTSQILGLTDEWYLEDTSINIKETLRAKRASGEFTGSFAPYGYDRDPENKNHLIIDPVASETVKQIFENYINGMGLKTIARYLNDNFVASPYEYKMSKGSNLKLAYLDNYLVYDYIEKAGLYKADISYINESREILHNLISYNIFSKDKKNFDNKCKLYLKNYSEKKMKIYYTTDNDIDYNNFDVKKWTLLRKDDLIPFDTTCIATVVEMLDRKHTINYQFDILLENNIEHEKYYFDIIQITNDEKKIIDYEKNIRKKCKWCDQMIKKILTDEVYIGNLVQSKTTNVSYKNKKKVKKDKEDWIRVENTHERIVSLEQWLKVQERLKQRVRANKDGYYNPFVHKLYCKCCGKIYCRTGDSNHVYFRCKDQQEKYKSCDNRSNISKDELNNFALGKINELLNRFYNEEQLKEFKEKDTDSDLFKSRINSLNKELIDVNKELQNKKTYFQHLYEDKINGLLDTDEYIILKSKYKDDSEKLENRAAKIKEELKLINDKKAILKTKETVYSKYKHIECIDIDIVSDFIDRIYIGKYDKETNTRDMKIVWNFES

SEQ ID NO: 807 - protein, 564 aa, unidentified
  source 1..564: note = uncultivated organism
MKNIKDNRKIAIYSRKSKFTGKGESTHNQIETCKRKIELTFGNVDLENDIIIYEDEGYTGYNTKRPAFQEMLSDIRDKKIKAISFYKLDRISRNVSDFSSLVNELDNYDVSFLSATESLENITPSGRAMMFMISVFAQLERDTIAERIRDNMIELAKTGRWLGGVTPTGFKSEQTENITVDGKRRKLYKLSPVDNEVRTVKMLFDKMQELKSQTKLETYTIQNDIKTKNDKAYTRWGLKNILVNPVYAIADQDTLDYFRNLGVEIYADEKEFDGIHGLMVYNKTEKKKNQVLRKDVNDWIIAVGKHEGIISGKEWVYVQNILNRNSDMKYRKPSTSNALLSGILRCSHCGSFMRAKLKNKTIDSKGRKIFDYMCELKDKSRKQKCQCKNINGLEADDLVLEEIKKLAMPTSKFYKALKNLSSNAFIKEYKNNEEVKTLKSLINKNKNHINSLLDKIKYADVSLLDDISNEIKKLKQANAELEKQIKTLTNYNYNEISDKETADLLINILDTYFTSFDTLDLNTKRNLIKLLVSSITTDGEDITINFLGTRNMKDETFPTGAICK

SEQ ID NO: 808 - protein, 541 aa, unidentified
  source 1..541: note = uncultivated organism
MALSAPTKRRRGGDPKLPATGGTRVAIVTRISTDEVNQPYSLEAQAKGLEAFVASQPGQAITHRFVDQASGATLERPGLQAALAAAKAGEFDVLLVYRIDRLTRSIVGLMTIVSELDAAGVALRSATEPIDTQGPVGRMLLQLLGIFAEFERGLLIDRITKGFERKAARGEWLGGPGPYGYRLDSASKTLVPEPAEAAIVGAIFAKYTEERLGAASLAHWLNDSGHRSHHDRLWTNQTVLRVLRNPVYIGKIAHGDDLHDGKHEAIIEDRIFARTQKVLDERAATSATLRPTTSPYLLSGKLRCQVCGGAYVGTGAHGRNGFYRYYVCRTRQKTGGRGCSSPRLPADDLEDVITEALVSTYGDYDLLTQAARDAYALARDEQPRLEAELAGTESQLRETSAAIDRYLRAFEVGSMSDTLCAPRIVELSERRTELTARRDELSVQVRASAPQLPSATQMRVTSEQLRRAMNNGSPDVVKQVIDELVDRIDISSDKQAQPYFRVPDIQRPGPSLARACGTPVRTDPHHVEVKGLEPSASTLRT

SEQ ID NO: 809 - protein, 549 aa, unidentified
  source 1..549: note = uncultivated organism
MIIIKAAIYSRKSLFTGKGESIENQIQLCKEYAEKNLNLKNDNFIIYEDEGFSGGNINRPKFQELLKDVKKKKFDVLMCYRLDRISRNVADFSTTLELLQQHNISFVSIKEQFDTSTPMGKAMVYISSVFAQLERETIAERIRDNMIELAKTGRWLGGQTPLGFDSQKILYYNSEMKEKSMYKLSPVKEELKKVKLIYNKYIEFGSISLVLKYLLSNNIRGKNGGDFASMSINDILRNPVYVKSDDGVFKYLSDSGIITCGTPNGNGIMTYNKRNSKYVLKKRTEWIAAIGKHEGVIDSNAWLEVQFRLNKNKKKANPRQGTSKKSLLSGVLKCALCGAPMRVSYGRPKKDGSERIYYYMCTMKAHSAKSRCNNPNVKGSELEKAIIENIKQLNTTKILKELQSAKNEAAVSIENNFTETVTKEIKDKSDQVNTLLEQLAHTNANNSIASEFITSKIESLGNEIKKLNLKLDKSKDTKQENIQKKLNFEIIEKSLHEFNSSFDMIKDTSKKRLILENIIDKVYWNGNTGDVDIQLWGSKKKHTLRPVVR

SEQ ID NO: 810 - protein, 528 aa, unidentified
  source 1..528: note = uncultivated organism
METRKGGYVLKKVTKIDEVPQSKVTLQKIRVAAYCRVSTDSDAQLESLETQKRHYESYIRSHINWTFAGLYYDEGITGTKKDKRPELMRMISDCKARKIDLIVTKSISRFSRNTTDCLELVRKLLDMRIPIYFEKENINTGTMESELLLSILSSTAENESTSISENNKWSIQKRFENGTFKISSPPYGYDWNGQMMTINEQQAAIVREIFSAVLSGKSSTAIAKTLNERGIPAKRGGKWNPNSIRNIVINEKYTGDCLFQKTYTDEEFNRHMNRGEKDQYVAHDHHKAIISHEEAEAAKAIVLQHAKEKGLRTKTGKCQNRYAFTGKIICGECGSSFKRRTHYCTGSRYAAWACTTHIEDKTRCSIKYIRDDRVKLAFVTMMNKLIFAHRRILRPYVAALQDSPVDSPMKRIHELQTQLAENKEKRDNLLRLASQEIIDQVIYNRENNVLMSEYTQYRHEMESLTSNISSSVGMLASANDLLHFTEKIVMLDDFDAELFDRYVDRIIVISREEASFELKCGLSLHERM

SEQ ID NO: 811 - protein, 548 aa, unidentified
  source 1..548: note = uncultivated organism
MSKQSTALRCAVYTRKSSDEGLDQEFNSLHAQREACEAYVLSQKSEGWTLLLEQYNDGGYSGGTLERPALQQLIADIDAERVDVVVVYKIDRLTRSLADFSKLVEVLERNEVTFVSVTQSFNTTTSMGRLMLNVLLSFAQFEREVTGERIRDKIAASKAKGMWMGGRVPTGYKVENRALVIDEAEAEIIRTIFALYLELKNVRLVAEALKARGITSGDSKPFSRGHIYKILSSPLYTGKVEHKGKVYKGQHEPIIDRATWNVVQAQLAANTRGKRSRPNIKEASLLAGLLFDTLDRPLTPTHAVKSGRRYRYYAASADTETSAPAFRLAAGEIEQAVVARLAGFLGQTGALIDELATSDLPPDTLKSLIANAEALSEAVGAGGAANQRSLLLEIVERVTVAEDAITVRLKRQALAARLLGDAAPELEGAITIEAPARLTRRGVETKLVTEADGASNDDPVPDPALIKAVARGHAWFDDLVSGQATSVSEIAKREGLTPRYVSRLLELAFLPPKLVDAILAGAQPAEMTAETLTRGERGLVWADTNGAA

SEQ ID NO: 812 - protein, 566 aa, unidentified
  source 1..566: note = uncultivated organism
MPDEQETKLIAIYTRKSNDENLNGSVTSIDSQKSACRSYIQIQKDKGWREYDEQFDDPAESGKSLKRPAMQRLLGRIQEGKINGVIVYKLDRLTRNSRDFHYLLELFEKHNVAFISATESIDTKSPQGRLMTAIMVQFAQYDRELDQERSKDFILARAKKGLWCGGIPPLGYDLKDKLLVVNEDEAMIVRLIFDLYLKHKSVIPVVEELNRLGFRRKAFKTSDGRIVGGKHFDIASVIRILKRKIYIGIVTNTRTGQDFPGQHKPIIVNALFEKAQELLKSHIKRAPEQVLHTTNKHNFRLKGIIRCGECGSAVCGYVRHKKNGKIYRYYKCISKLNGVPTKCEFTAIGAEKLEEFVIEQLAILGWDRDFINALVEKARELSSKRLEPLKLEKQQVEARLSNIKSGINNLINLAKQTANAEITDELEKLGLSKKNLEARLSQIEAELSYCGKVVYDVDVVEATLRNFAKYIYRIPIELQIKTIQLIIKQILVFKDKVRMELYELPVERVNELINGKYIEKNIEDLKSSNHGQGCGRKLNTNEIGTKVVAVDNNWRGRRDLNPRSPP

SEQ ID NO: 813 - protein, 556 aa, unidentified
  source 1..556: note = uncultivated organism
MKPMQMGKPDIFDAALYLRLSKDDMEGGRTTAESNSIANQRELLRSFVKSHTDIQIFDIYVDDGYSGVNFDRPEFKRMTTDIEAGKVNCVIVKDLSRFGREYIEAGRWIDKIYPALNVRFISVTDQFDSKTADFSEKSFVVPIKNFINESYCRDISGKVRSHQKIKRERGEFIGAFAPYGYCKDPENKNCLVIDAYAAENVRKIFSWKMEGFSLGAIAQKLNVRHVQPPKEYKKTNGDNYNCGFRSSDTPKWSAVQIKRILTHEVYIGNMVQGRQERINYKVKKRLDKPKSEWVKVENTHPAIISRNDFYVVQKLLQYDGRASKTSERANLFSGFVFCGDCKSPMIHRVNQYKEKKKAFYICQTKNKGGDCTRHSIPEEVLKRIVLKEIQAYTALFIDYQMIMEELCEMKVSYDPVIGYDTQISRLREEYNRYDSLKVSLADALKEGLIRTEEFDDFRESYGRKCEELDQMIENQRKLVKQMFESGMSAAALLKDWKKSPEIRNLDRTLLALTVDKIYIYENKKIKIHIRFQDMIEKMEVIKRFYADHRTEGRNEV

SEQ ID NO: 814 - protein, 531 aa, unidentified
  source 1..531: note = uncultivated organism
MKAPSVKPVRCAIYTRVSTDHGLDQEFNSLDAQYDAASAYIKSQAHAGWTLIRSRYDDGGYSGGSTDRPDLQKLLDDIRARKVDVIVVYKVDRLTRSLADFAKLVELFDAHGVSFVSVTQQFNTTTSMGRLTLNVLLSFAQFEREVTSERIRDKIAASKRKGLWVGGTLPFGYEMKEGKIAVIEEEAELVRLIFRRYLELGSVNELVRDLKERNIRTRAKQLATGATRGGIPFGRGALYYLLSNHFYIGEVKYRNEILPGEQPPIMDRALFEAIRQKSLAQWSHRTIVRNKSDYLLTGLVFDDAGHRMVPTHATKAGVRYRYYVSTPFLHGEAKTASAGSVSRIPAADIEDIVVKFLKEHLAAKRDESTTSAVRLEDCGDLTRLVAEIVVHKDELVVRLKSDNTDEASDCPDDRSLSIPWQKPPSKRSRQILLPHNASRSDVRPEQFERRARLVSAIARGRRWLDDVVSGRITTIAELCTREKCSVRQVNMTISLAFLAPNLVKAAIEGRLPRGIGPAAPRDRRPQNGSAS

SEQ ID NO: 815 - protein, 681 aa, unidentified
  source 1..681: note = uncultivated organism
MARVRVVEDAGSAGDAVTGIYLRVTAEESIKTDLSLPNQRRRGLEICTERNWSPVKVYQEPRHVGGDEPPAKRPALAALLADIEAGHVKRVLVRHDDRLWRSTEVQDVILNVLRRNTVDLWTFAGQRELRSAGGRFAIKVLGAAAELEKGLTGERIREMKRGKAHAGRLGGGPPSFGYTSQSRYKLELRHQGMSEDEAHRLACEKYPVAKTWYLDEREAEVVRIIFKLYLEERLGSRRISQELNRRGHRRRNGYAWSAVKVGKIVNNPAVAGLTAYDEEAYVKGLPSKAARFRQTLFPGQHSAIIPVERWHEAQRIKTEVNSRLIRTKGSSSARIYPLTGVLVCGVCGSQMSGKSSGTQRSPYYVCARRKYYGVTDGCSGPSMHMRWADEAVLDYLDKLFETPESLQAIRERVNRELADRAPEFETRLREVRASMAELEAKQRRWMEKYESAIDDASAEIIWQRIRELKNQELELRRESDGLEQQLGASSTRQLTLEETAAYLARLRDLPSAPAVKRRAFIEKLHRHHDLRIRVLDARRLAVFMRLDQADTCPETPEKAGTVGCRVAIFGKAATTSIPGPMYPGKPDPGGPTKTMLCPPDAAISSARRATSCPRTSAMSAPIDGRKSGGATVSAVRGWPCNASTNSFKCPTGTMAQSPPTTAASAAFSRGMNRRATEEARA

SEQ ID NO: 816 - protein, 536 aa, unidentified
  source 1..536: note = uncultivated organism
MADRKRCAIYTRKSTEEGLEQDFNSLDAQREACAAYILSQAGEGWEAVAEHYDDGGWSGGSMVRPALRQLLADIEADKVDVIVVYKVDRLTRSLADFAKIVEVLDRRGACFVSVTQAFNTTTSMGRLTLNVLLSFAQFEREVTGERIRDKIAASKRKGMWMGGPVPLGYRVEQRKLVVDQAEAETVRRIFRRYLELASIPALADELARDGLRTRERVLGNGRILGGVCFGRGPLATLLKNPAYIGKIRHKDLVHDGEHDAIIDPDTFAAVQETLKRNNREKVVGKRSARPSLLTGMLTDPDGRPMSPGRGKKGAKTYCYYVTRTKPGEDRDKLWRFPACEIDKLVLEAIARHFEMPITRATDTPEEWRKLVELNKAMADRLRNSSTVSRRELLLELGAAIQLHDHAVHIRFLMTAESEPTELTFPAKLVRKGHQLKLAVPPDNRGPVTCADPVLVKLIAHSFAARDYLVEGKQHPCVSYYSRRHLQRLARLAWLAPDIISDILEGRQPPQLTARYLLRCGDMPLDWSGQRTFLGFA

SEQ ID NO: 817 - protein, 524 aa, unidentified
  source 1..524: note = uncultivated organism
MSARTPTPTRTNGVKPPARPPVIRCAIYTRKSTEEGLEQEFNSLDAQRASAEAYIASQKAEGWACLPEKYDDGGYTGGNMERPALTRLMDDIRAGRIDCVVVYKVDRLSRSLMDFARMMGEFEKYRVSFVSVTQQFNTTHSMGRLTLNILLSFAQFERELVSERTRDKIALARQKGKYAGGRPVLGYDAIDTRLVVNEEEACRVREVFATYLRTESIGRAVAEANARRWTTKRWTTKDGRVMGGVPFTKGNMHGLLTNVLYAGKVRHGSNVYDGEQPAIVDEQTWARTQALLRENGRTGGSVVMNKYGAVLKGVLRCGACDKPMIHSCTRKENGQCYRYYVCFTAQASGYHACPSKAVPAEQIERFVLERVRAMGRDHALVELVLEQARRQDSEQAAAHAAELAVLERELKWLASETRRAVAEAGRDGARTERLADLAERTRAVEARAASLRDMIAAVNERLVSREQVEASAVEFEPLWRSLSPRERARLMRLIVRRVEFDGAKGEVAITFHPETEWLAKEAAS

SEQ ID NO: 818 - protein, 531 aa, unidentified
  source 1..531: note = uncultivated organism
MIAAIYSRKSKQTETGDSIENQIELCKNYANTYLLKNNEDVSFIIYEDEGFSGSNTNRPKFQQLLKDAKDKKFNCLICYRLDRISRNVADFSSTLELLQNNNIDFVSIKEQFDTSTPMGRAMVYISSVFAQLERETIAERIKDNMYQLAKTGRWLGGQTPLGFNSERVKYFDEEMNEKSMSKLTQVPDELELVKSIYDLYLDEMSLHKVQKYCLANHIKGKNGGQLMQRSIDDILRNPAYVISDDDVFEYFNKQNIITVGTPKGQGLLVYGKRNVKGKQYDKSEWIVATSNHKGVIPSKKWLRVQELLDRNKNKVSKRLGTSNVALLTGLLKCSECGSSMRITYNRPNKEGVRGYHYTCTLKCHSGKTRCNNPNANGLKIEKEIIASIKSTTKEDILREFNKKYKNKPKADVTSNYKAIEKEIKNKTAMMDNLVDQLGNATESASTFIMKKINKLGEEIEVLNKELNKSLIVKDETDKENANLELILQSLEEFKKVFDMLGLSKKKSLLNRMIKDIIYDGYKKKIDINYLI

SEQ ID NO: 819 - protein, 508 aa, unidentified
  source 1..508: note = uncultivated organism
MTQRTRAALYLRVSTTRQEEGYSLETQEAGCRAYAAQHGLDVDEAHVYQEVFTGVELWERPQLTRLREAIHRQQIDAVICYAIDRLARDPVHLGVVLSEADHKGVRVEFVTEAIDDTPEGQLIRFVRGYAAKVEHEKIRERSLRGKRARALSGKLLAGGSSLYGYDLDRENGVRTINPSEAAIVREIFRAYVTDGVAMNDIARRLNARGLPSPTAHKRVYADARTPTWRQATIRNILLHEAYIGESYAWKWQTVSRNKAPVLRRREEWIALPKDTTPPLIDRATWEAAQRKIETNRGEHARNRERPALLRGLIFCAVCGRRMWVDWYHKRLYYRCPAKTLTGERCGGVIVQAKPVEEAAWAHVVACIRDPQLIERELMAATPQLDQQVIAEIETINRRLSQVVRGQERLLARYSESESVPWELIEREVARAEDEKARLRADLVQLEARRAGHNIARRQIGSLTAWCERVTANLDAMTFDERRRTLEVLALRVFASGFEYDFRLDPQVF

SEQ ID NO: 820 - protein, 563 aa, unidentified
  source 1..563: note = uncultivated organism
MLENELITQEEKLFAIYSRKSKFTGKGESIENQIELCLKHLEYKYGKEIREKVIIFEDEGFTGANTNRPQFQKMLQELKTGKYQTLVVYRLDRISRNVLDFCKLKDKLSNWNVGFLSVTENFDTTTPMGNAMMMISSVFAQLERDTIAERIRDNMHELAKTGRWLGGTTPLGYSSKKLEKISLDGKKRSLYTLEINKKEIETVKLIFNKFLEFKGIHILESYLIQHDIKTRNGRYFRRFALNTILKNLVYCKADEDIKKFIETKNNKIYNNGINFDGKNGLISYNKNIHGKSKTGKRKTIVKNIDEWVISIGNHEGIIDGKNWIKIYNILEENGTNKRKTYGKTKHESLLSGIIKCELCKSYMRPKMLTKYNEVGKLNFSYMCEMKEKSRKQKCNCKNINGIKTDTLVLEKINELTANKKTIAKELKTINKILNKFSKKQTSNETKVLKTQLEKIDTKINNLTQKIAIVDTEVSQILNNQIIELNKKKENTLNRLNELNDKFTKQENKINETELAMKILKEYHNAWNKQNLTKKRELTKLLISSITTDGKKITIKFNYNKPNF

SEQ ID NO: 821 - protein, 600 aa, unidentified
  source 1..600: note = uncultivated organism
MIVALYARVSTTKQAEKDLSIPDQLRQMREWSKARHYQIATEYIEPGASATDDRRPVFQQMVADACTSPPPFDAIIIHSLSRFFRDMIEFALYERRLKKHGVIILSITQQTSDDPAGEMAKRIFSLFDEYQSKENAKHTLRAMNENARQGYFNGSTPPYGFRAVEVEMMGNKGKKKRLEIDPAEAAVINTIYRLYLDGYEGHVLGVKGIAAYLNNRGITMRGGKFRKTIISRIIANRIYLGEYAFNKRDSRTLKIKPQSEWITISLPPIVDAELFQQVEQRRFERDSSSTPARIVNTPTLLTGLLKCGCCGSLMTIATGKGGRYRYYKCASKINNVGKKECENGNVRMETLDRLVLQTVAEKVFTPERMNSIIDGLKVSLKEVNPDQNEKIRHMSRELNDIKQQTEKLFEAVEKGFIPMNETLRERVHKHEVRRQEVLMELARLKYQKEMPFARLSKKNIVAFCVALKEMLQDRTSQFGKQYLRLLLDEIRVLKRKCTCEEAMLHSQVHFQAGQTKVSSKCPVSTHIGSPARTRTTDPMVNSHLLYRLSYWGMFGKCASIKQGRPVVKHDAFVKKNSPSPQPYPIMGDGGGEGIFLMMTL

SEQ ID NO: 822 - protein, 518 aa, unidentified
  source 1..518: note = uncultivated organism
MSGARRSKGNDKAGAAITGSLPRIAVYVRLSLAKGDTVSIQKQKEACEALAHSMEDSMQYDARPWTEGGDYFEDTESAYQSQTVRPSFDELRARLPELRGGVVIFYALDRLVRRTRQWMDFYELATECDVGLVCVTMPIDTRTAQGRLFATLIVQIGELESGTIGSRVQSAQEFLIKDGRFRGGTPNFGYQSSHREGHGWVLAIQQQEADTLRMAAKLILDGSSLTEAAATLNRLGRTSRKGGPLRGPNLSKWLRNPATSGVSMWDGDYARDRDGERTTWIEEPVLDPSTWRQVVAALDANHPTGQGSGARPGSILLRGLVRCGLCNSRMRGTNAERGTYSCPSASDGSGTCRYNIITKPGLEAFVTAWVLARFTPAAIAAGEQERRRADGGYDKTDELRTQIKDLTNELDRLEEDRAAGMFDTSAAVDRYRKRYRTTTEKLGRLERELAAIEVRQTRVLSKSARPITGAEWANLSIEQQRTAVRAVVDHVTIGPSSKGRKSGPKFDASRVDITPLSD

SEQ ID NO: 823 - protein, 546 aa, unidentified
  source 1..546: note = uncultivated organism
MKRVRCAVYTRKSTEDGLEQEFNSLHAQREACEAYILSQKHEGWELMLTHYDDGGFSGGSLQRPGLTALLVDIDAGLVDVIVVYKVDRLTRSLADFAKIVERLDAKGASFVSITQAFNTTTSMGRLTLNVLLSFAQFEREVTGERIRDKIAASKKKGLWMGGPVPLGYEVVERKLVPVPAEAEQVRYIMRCYVESTSANALITHLAQEGIRTKVQRRSSGPHRGGIPFRRGSLFHLLKNPVYRGMTVHKGKTYPGEHEPIVDQDLWDALQARLAAKAPPRKRHTNDRHDALLEGLLTDPEGRRMVPSFTCKGTRRYRYYETRRDLVGSGKPPATRFAMRSLDRHVADELRKLVADEHALRRWTGIEEAARLEAIFAQAACLQRLFGSESTWSQVIRTLVTSIQVRADRLDVGVASAALGLNSDALPLKLTLPTRKPFRETKLRLSTETSSAGGSNSDRSLIKLLREAHQVRELVLAAPGEPLNTIAARHGRCRKQMAKLIRLSWLSPRVAEAIIDRTLPDRFDRKHLLEMALPTSWSEQHKLLGLA

SEQ ID NO: 824 - protein, 626 aa, unidentified
  source 1..626: note = uncultivated organism
MRTCVIYTRVSTEMQVDGYSLDAQVQVLERYAELKDMKIIERYQDAGKSGKDIKGRPDFQRMLMDIKSHTIDVDYVLVFKLSRFGRSAFDTLKSLEILKQNEVALICTEDNIDTSSTMGKLILTILACISEMERENILVQTMEGRKEKARQGKWNGGHAPYGYMIGEDDVLLIDEEEGKIVKEIFSLYVKTDWGFGKIAKFLNNEGIKKSTHEHKNKLTTWSGDSIKKMIDNEIYSGLMPYGKRTIKKINGEEKRVFAENYMLEKGQHEAIIPMEMWKKAQRKREKTKGKREKEVGIGRESLLTGILKCPKCGSPMYMSRGRKNDKNILFYYKCGRKTKVTGHECSYTRQIRQEEIDSQVYEAIVKMLDYGQFEEEICKEMREGEDLERILEQKERVEKVIKTTRNSKKVLEQEMDSLAFDVPHYERKRQDMQRRLEKLYDQEAKQEEILEGIQRKLKNIKTKEEMMETVHTALKNFSRLYDKLSDSKKKSFYKLLIEKIEIYQEPRENGQWLKRIRFKFPLSLENQENIEFAQEYGNTDTLQIELDVPKLDIIRKKSATYKEIGEFIKEKYGVSVHSGYIAEVKRKCGLDMRKNYNIPKKNVEKKHCTPEKEKYIMEALKHFGSK

SEQ ID NO: 825 - protein, 545 aa, unidentified
  source 1..545: note = uncultivated organism
MPTIAIYPRKSVYTGKGESVRTQIDLCRQYCDVHFENPTYLIYDEDEGYSGGNVNRPDFQRMMADARAHKFDVLCCYRIDRISRNVSDFSRTLEDLQAHHITFVSLKEQFDTSTPMGRAMIYIASVFAQLERDTLAERVRDNVHRLAQDGRWLGGNTPTGYTAKRVAFMRDGRQHSYMALEEIPDEMPLVHMLFERFLELGSLAKLETYCLQNNVKSKFGNDMERMAIRSILSNPVYCVADKAAYSFFSVNDYNLCSSEEDFDGAHGILPFNRTRKPSGSHSTPNDTSEWMISVGRHTGAVPGEKWVEVQLMLDENKSKTRRKPRTHNALLSGLIVCGSCGGYMRPKAYGTPLEDGTRKFSYICELKEHSKRARCDMTNAPGNEIDRIVVQRLFDTIRGQGAFQRRSAADSLKIKEQAQSVQHNMDEIRATISETEKQIDNLVSTLSLGGSDATKARIVQQINELEASSAKNRERLAQLQANLATQDASLDVFGVMQSMLTAFSSSFETITQDERRRMLKTIVEKVIWDGENIEIHIFGEKRLPK

SEQ ID NO: 826 - protein, 520 aa, unidentified
  source 1..520: note = uncultivated organism
MSSARLRALVGARVSVVQGPQKVSHVAQKAAGEQWAAQHGHRVVGTIQDLGVSASVSPFDRPDLGPWLDSERVDDWDVLVFSKLDRLFRSTRDCVKFAEWAEQHRKILVFAEDGLTLNYRNPDKGSIEQMMAELFVYLGSFFAQLELNRFKSRAKDSHRVLRGMDRWASGVPPLGFKVVDHPSGKGKGLATDPAGKAILEDMAAKLIDGWSFIRIAQHLNEKRVPTNLDKARMAKGKEPNPNPWNVGTVIESLTSERTQGIKMTKVGKKFVPVLDENGEPIRMAPPTFEPGYWKQIQEAAARRQQNRRTPTETANPMLGVGYCGKCGASLAQQFSRKRRANGETVEYRYYRCGKTPVNCQGVFVRAEEADAFLEEAFLWAHGDDPVTRRKFIPGEDRTEELEQTNRTIEALREDRALGLFSSDADQAKYRQQMAALVAKRDQLSAQPHRPARWEIEETGQTFAEVWEESDHRQLLADAGVRFVLTSGKPREWAVETLNMRPDHPVFLEPSDDVLDSPGSG

SEQ ID NO: 827 - protein, 524 aa, unidentified
  source 1..524: note = uncultivated organism
MNQINNSKKIYHAAIYVRLSKEDGDVATAGKRESNSISNQKDLIKNFLKDKKDIVVVSERVDDGYSGSNFERPAFQMMLEDIKKGIVDCVVVKDLSRFGREYIDAGKYIERLFPALGVRFIAVNDHYDSLEGKSQADEIVIPFKNLINDAYCRDISIKLRSHLEVKRKNGEYIGAFTPYGYQKDSDNKNKLVIDVYAAGIVKEIYRMKLSGMSQTAIANALNKQGVLSPMEYKHSLGIRIQDNFKTYEQAEWSTMSVKRIFGNEVYTGTLVQRLLGIDTRTSPNEEKVYPLSGLVVCGDCGAMMIKRDVPAGGKVYAYYICSRHAATKACAAHRIPMGKLEETVLELVKIHIENILDMKKIMDFIHEVPFQELDIKELEIRKEAKEKEAVRCRELRDYLYEDFREGIISKEDYKELHDGYTEKRKKAEEAVRSIDQQISEVLESKSDKYHWLDYFAEHQNIQELTRTVAVELIDQILVYDKKHIEVRFNFDDCYQSLLRQIQSVGCDVSTGMDGRIEIQKREVV

SEQ ID NO: 828 - protein, 601 aa, unidentified
  source 1..601: note = uncultivated organism
MKASVNGTTAINRTALYMRVSTNEQRIDGYGLESQRRSLLSYVERNADQGMQTKASWIFTDTHTGSDFHRVGLQRLLKQVREKKIDTVVVWKIDRLSRSLKHLLEIFDTFQKHKVNFISLQENLSFTGPIGNFIFQILSSVSELERSLIKTRTRQGIITSAEMGNFTGSRVPFGYKPIPNPNGKGKKLEIIPREKQTVEEIFRLYIHENMGYEAIAVHLNDLKVPKGTFTKHLQKHNKWTPKHIERIIPNTLYRGEFIANRTDQSGQRLPQEEWTIVAIPPCVDEITFAIAQRKRLERGGNHQNKGNFYLLSGKLYDISTPYNRKFSGSPRSKGGFSYKRKQFTDTEGTRFSVFEIPAKPIEEAVWERITLALKDPDIFIQQYITKNQPTKKEQENINKQLLELRETYANIELEQGRIDQAFQAGLYSFEKAEKQTAALTQKADELQANITETEQKLHILQKGVANLKNLKAASKQFKKNIDNLTPEQKKLLVDLFVERIEVDRKELPAKSTKQKKWKRSLEVFFRFDPRHWQQDTPEGRTTQATDSKHKPTSNPDSEASGRERGSRYTLSLNFELVKKRVSNHFNRFYSTVEIVEISLLN

SEQ ID NO: 829 - protein, 592 aa, unidentified
  source 1..592: note = uncultivated organism
MDEQPKLKIIKASKGNLRNNKNPGHKLRVCAYCRVSTNSNEQHDSFISQVNYYKDLIEENPGWENAGIYADEGISGVNADKRPDFQRMIADCMEGKIDLILVKSISRFARNTVDTLNYIRTLKDKRIAVRFEEEHIDTMTAEGELLLTVLSSVAQQEVQNTSEHVKKGLMMKMTKGQLVGFSSCLGYDVDSKTQSLVINDKEAEVVRYIFNRYNEGVGTTILARELNEKGCKTKYGSTKWHDSTIIGILKNEKYKGDLLQGKTFTVDPISKRRLKNEGESDRFYISNHHEAIVSKDVWDMANKILKSRSDCRKMNSDGTRLKFSRQYTFSSICQCGFCGRPLTRRVWRNGKNYERRVWQCMSYTKKGKHDCQNSKGINEEALEGAFVEAYNRFIGGDNSFLSDFIDKTYDYMKNSNLKGLMEQCEERIDSNQGKIDKLALAFVDGTLSQDVYEAKLKSLNAEKTKLAKEKENLDLQVQSESDAITKLQNFRAAALESGGKELKTFSRDVFDTTIDRIIFGGYEKSRVPDPFMVTFVFKKEFGTPNTMEGNLDYTILNEFNYLWKHFVFRQKGANERVKCQDNFIKVRVAISK

SEQ ID NO: 830 - protein, 572 aa, unidentified
  source 1..572: note = uncultivated organism
MKASVGSRVRCAIYTRKSSEEGLQQSFNSLQAQREACESYIASQRHEGWHAIAKQYDDGGFSGGNMNRPALKQLLEDIAAGLIDTIVVYKVDRLTRSLTDFAKMVEAFDEKGVSFVSVTQQFNTTTSMGRLTLNVLLSFAQFEREVTGERIRDKIAASKKKGMWMGGLVPMGYDLKGRQLVVNAKEAKLVQEIFAQYLSLGSVAELKQHLDRKRIRTKARTSVTGRAFGGEPYARGGLYKLLKNKVYIGRIAHRGESYAGQHPAIIEPEIWEKVSALLANNNDGQRARGRKVASSALVGILFDEQGSRYTPTHAVKNGRRYRYYTSQAVIHRQRKPSHLDRIPAKELEQLVYSRIRSLLTSPQELSSACTELGLSGQEFKGLIEAAQQLADKWPNLSAEELKELVRRIVMRIVVHGSAVEVEIDAEALAARLLGDDDGPPIPENQNLHSASHGFRLKCLFQPVHRRGELRLVLPNSHLIAERPNHSMLRAIARSLQWRERIIAGEIHSKEELAADAGLNASYVGRILRLAALSPDLVDSVTRGGEGVGCPLTRLVRSLPLDWRAQKSALLDH

SEQ ID NO: 831 - protein, 510 aa, unidentified
  source 1..510: note = uncultivated organism
MSNTLALYARKSVERENSISCETQIEYCKMMIRPEERGEKVVTFIDNGFSGGNVNRDGFQKMMRLVRQGKVRKVIVYKLDRMSRSLSDFMNILQEFKEHKVEFVSSQEAFDTSSPYGDLIVKILMVFAEFERTSIINRVSQAYLHRSEMGFYMGGRRPYGFQLVPAVIHNVKTKKLDPIPSEAEQVRYLFEVYAQETVSLRRLVDILNSEGKQPLNGSHWTTAKLSTLLKNPIYVKADSNVYDYYDRHGTEIVTDVSQFTGECGAQLYGHTKHQSDNPDWSDMRLVLLSHPGIVDSDIWLKCQHKLEKNRQISKSYSNPTSWLAGKVVCEQCGHSMTTIKGNANQKGQVRRYFNCTGRSQRICAGPKVTIYAEDLENMVYQCIAEKLSGLNETRYRSHKSSSGELNDLKLKIKAIEQAEKQLMDTMLTGGFNEDLLAIANKKATQLKQDRLALYQQMEELQSREDETGAVINLAKSWKTADYQRKKAVAMILIHKILISADGDAKIIWNM

SEQ ID NO: 832 - protein, 531 aa, unidentified
  source 1..531: note = uncultivated organism
MNNREKSIGSLALNPAPRRIIIPAADQDHTRPLRVAAYARVSSDSSDQLHSYAAQTAYFAKLINSDPNWTFVDVYADKGITGTSTEKREDFQRMMEDCRSGKIDRILVKSISRFARNTKESLAAVRELKSLDISVYFEEQNIDTAQATGETLTAVFSALAQKESEAISERMRHSYQMRMQRGTFSTHCAPYGYRLVKNRLEVIEEEAVIIRRIFDRYLSGISMEDIAKEITALGIPTKQNTPFWQVRSIQYILRNEKYVGDSLLGKTYTTLTLPHRKIENKGEGVQYFIEGSHPPIVSRTVFDKAQQLLSRKSAVIPPRAATPHPLSRKIVCGHCGAFCKRKKTRGTAYWICQTHNKNAGSCPIMQIPETEITDAFLRIYFTLKHHGDQVLPQLIQDLQAAKNGKLLWSEDIVELNKQIADIACQERLLAQLKQQAVVDPDIFIFQSNQLAEQRREAKLKKSRILRSEDDQTVQRTQELLDILEDGPDLLMTFDEALFSELVETIIIQDNSTIRFRLINGLELPEHIERKK

SEQ ID NO: 833 - protein, 542 aa, unidentified
  source 1..542: note = uncultivated organism
MNRINCAIYTRKSTEHGLDMEFNSLQNQEESCKAYILSQAFNGWEYIKTYSDGGVSGGTMERPGLQALLNDIREGHIQVVVVYKVDRLSRSIIDFHKMMQEFDKYGCNFVSITQSFDTSNSMGKLTLNMLLSFAQFEREVSAERVRDKIAASKAKGLWMGGTPPLGYDLKDKQIIPNQQETELVNLIFTKYLELENMQAVAEWLNQKGYHTKAWIPRGGQSRGGKAFQKSSIQRILTNPIYIGQVAHLAKNKVYAGRHEGIVLKPVWESVQDMVRRRITDPHAFSHYQTHKTVLAGKLYDDKGQSFRLTSSKKQGKKFLYYYNGVGGHYLPVEQLDRFVLSMLKTADFDDIEPLADMSAITDTQLGRWISKATCQTVGKKHYLTVFLDEKQVKTDLGNCPKMSGQVDVKPLKMARIEDTIYLRDSFMVDNISSVRLRNGSARNILTVRQLNESLVRGLARGWQLKRLLERCKPLRECEKASGMNKRTFARYLNLCYLSPKIVTDILEYRNPRNISLKELMTLAEGETGFSKQEKEWNYPFFC

SEQ ID NO: 834 - protein, 541 aa, unidentified
  source 1..541: note = uncultivated organism
MARKSRKNIETAPVREVQKPMFYAGAYIRLSVVDRKNKGESIENQQAIINSFIAGQSDIELRECYIDNGHSGQSFERPAFLRMIADMESGRINCCITKDLSRLGRNAIDAGYYIERHFPSIGVRYVAVTDDYDSADGQSGGIMLSLKNMINEAYALDASRKVKAIVQMNVRKGNFVGGVAPYGYFKSPGDCHKLVVDSYAAPIVWQIFEMAADGHSHRSILDWLNASDILPPRRYFHSIGLASGKEVGVNKLWWGQGAISEILRNRMYCGDMVQGKHKTVNNAIAQVPQGEWVIVEDTHEAIINRELFDTVQQTLVKPDPKREPYYKIPMTENVFAGKVFCGHCGYVMARKRGGEKWYGYKCNTRLQYSPKACQGMKMTESALKAEMLKLLREYEPHLAKILSPSSVEASDADDSKKELASAQSEFDRNKRFLEGLYESLVSGDISDAEYKDMKSVYEVKIASLTERIKQLREEIHTRAGREAAFAQAHKNVQRLEQVSDLTAEIVGRLVDRIMVYPDGRIEVKFSFLDEPVYNKEGAEDE

SEQ ID NO: 835 - protein, 500 aa, unidentified
  source 1..500: note = uncultivated organism
MIRRADIATQTPAVRCAVYTRKSTDEGLDQAFNSLDAQREAGEAFIASRRLEGWTCLPDRYDDGGFSGGNLERPALKRLMVDIEAGGVDAVVCYKVDRLSRSLLDFSRLIEVFDRRKVMFVSVTQPINTADSSGRLMLNVLLSFAQFEREMIADRTRDKMSAARRKGKWTGGHAPLGYRVHEDGGRLVVDPDEAAMLREIFALYEDHRSLIAVAEELNRRGWTTKRGQTYGGRPWAKTHVHQVLTNVTPTGRVEHRGQIYPGEHDAILDVATFDRVQELLAENRPYGGARAKNRYGHLLRGLLHCKACGTAMSPSVTKKGTRIYRYYCCTSAQRRGWHTCPHPSLNATQIEGAVVERIKVIGQDPSLVAETLAQIRQLKATRTPTLVAERRRLERELARLRDRNGDADHLARIEARLAEIAEELSVLQTAAVDKRDLATALALFDPVWDVLFPAERERIIALLVERVEFDAARETVAVTFRPPGIRALAEEVQVAEGVLA

SEQ ID NO: 836 - protein, 576 aa, unidentified
  source 1..576: note = uncultivated organism
MEVRKIPARPGKRKTTVKVPFLESVKTFENGLKEEIRYGKMAASAQAPTPSTPVKIEAVPALTIKRKLRVAGYCRVSTGTTQQETSIVAQREHYEEYIKSHPDWEFAGIYWEAAVSGTKKENRPELQRLIAACKAGSVDLILTKSISRFSRNTTDCLEMVRTLTSLGVNILFEKENIHTGTMESEFLLTLFSTFAEEESKSISANELWTKHKQFENGTFRYSTAPFGYNLVDGTFEVNPERAPVVREIFDAVLAGKGTPTIAKELNARGIPTGTKRNDGSPGVWTAYMIGGMIKNVAYIGDVLNQKTFFDHFHLKYNYGEKKQYYNEGHHEAIVDKDTFERANAAIRQRGAEKGNHPCEDKQLRNNPHSNRYAFSGKLKCACCGGSMKRVTQKTSQGKKYHWVCSDHVVDKTACSMKREREENIKNAFANMLNKLLYAKDIIFETYISRLRQEEAKENAAALEVLNEELNQVLDEKRRLTLLISKGCGEPISFRQKLIELEARENTLRYDISQKSGDSMTFRAVADARDALGDWKKDGDLDSLFTEIIESATVETGKCVVFNLKCGLNLTEPLKEA

SEQ ID NO: 837 - protein, 543 aa, unidentified
  source 1..543: note = uncultivated organism
MTGTRTRCAIYTRKSSDEGLEQEFNSLDAQYEACAAYITSQKHEGWRLIKRRYDDGGISGGTLERPGLQTLLADIDAGLIDMIVVYKIDRLTRSLTGFSKIVEQLDARGASFVSVTQSFNTATSMGRLTLNMLLSFAQFEREVTAERIRDKIAASKAKSLWMGGMVPLGYEPHPDKNVRGLIINEPQARTLNRLFELYDELGCLGKVEAAVKQQHLQFNAHKGTTGKSPSRGAIHKLLTNPLYIGKIRHRNKLYDGQHEAIVRQELWDRVQQKLQFASARKRGTDHTASQSHALLKGRLFDQTGDHLTPSHTKKNGRIIRYYISNRLIRARDPSGWRLAASRIENAVITAVKKQLLQAVREQQLIPNTDINQYLSTQTRIECFPEQEPAIIASIITRIDLSPDEIKITLDCAKLASASGLAKNSLSHKTLTLTLPFILKKRGVEQKLIIGDKMPEPNQTLIRGLANAHTWLERIRSGETLAAIARTRNVTESYIRSRLPLALLSPKIQSAILNGTQPADLTFEKLIRSEMPMDWQAQEAAIIR

SEQ ID NO: 838 - protein, 542 aa, unidentified
  source 1..542: note = uncultivated organism
MSATTAPKRKKRRPTGPFGGPGGPRRIGIYERRSTDDEHQPFSIEAQDSALTKYAGSQPGWTITAKYSDDASGATTQRPGLQQALADARAGRFDVLLVYRVDRFSRRLSDLLDLLAELDDAGVAFASATEPFDTSTSSGRMLVQLLGVFAEFERETIIDRVTKGMAAKAAKGQWVGGPAPYGLQADRDTWKLHPEPAEAPWLAEIFRLYTRERHGTRNIAAELNRRGARTRTGKPWSAYQISRILANPAYAGDIAYGDVHVENAHQALIDRAIWQRARALATARAESSNPRAASDTDYYLTSLIRCPDCGHNYIGTAATGRNRTYRYYTCYSRNRYGTSGCTGPRLPASQADTAVLTALTGFYTKTPDLIGAAVTRAQAHHTQGHASHQAEHDAALAQAAAKEAAIERYYQAFENGTMDEATTGNRVRKLQNEITQLRARAADIAATLATTPQGPDPATITRLAGYLTDILSSGTPAEQKTAIETLIAEIRITPEGIIPVFKIPQPGTLIPGSNPDTTSTDTVRAPVHSVGRVGIEPTTGEL

SEQ ID NO: 839 - protein, 565 aa, unidentified
  source 1..565: note = uncultivated organism
MNRLNCAIYTRKSSDEGLEKEFNSLDAQREACAAFILSQKHAGWVALPDLYDDGGLSGGTMERPALQRLLDDIKIGKVQIVVVYKVDRLTRSLADFAKIVDVFDAHGASFVSVTQQFNTTTSMGRLTLNMLLSFAQFEREIAGERIRDKIAASKAKGMWMGGNVPLGYDVKDRKLIVNKVEAETVRMIFRRYADLGSVRVLGHELDRLGVVSKRRESAGGLLSGGNRFSRGALYTLLQNHLYRGEIAHRDNIYPGQHEAIIDADLWQAVQEKLSGNRQARVLGTNAEEPSLLTGLIVDAHGQRMTPTHAVKKGRRYRYYVSTSLITGARSDHAKGWRIPAGEIEGLVLNRLRAFFASETDVGEALSCFDLDASTLRSALSKAKQLAETWTDLLRNKVRELVRSIVETVEIQDEKIVTSLKRKEAASVLLVNALSLPPMSEPGAFELCIEARLRRAGKGIRLVVGGGVAEKPNGQMAALMRDAHATRVALMTGRDATLDAMAQRLGIKRDYLSVHMRLTHLAPDIVRALLSGRYPAELTPPRLVSLCKDLPHDWQLQRTVLGFETR

SEQ ID NO: 840 - protein, 580 aa, unidentified
  source 1..580: note = uncultivated organism
MNEKKRVRSLLRVSSKQQLHDDDIPIQRAEIANYISKQPDWEFDSEYIEKAVSAFKNTVQEREVLLQILEDARARKFDILLTFMSDRIGRLEEYSMYIATLNKLGIEVWTIKEGLLSTEEDTDRLTLFIKFWSNERESRKTGQRVKAAQSEMIKQGKHIGGKAPYGYELVYSGEISNHGRALKKLKIVESEAIIVREIFRLSAEENLGSFAIAKELNRRGIPSINGGEWKSTTISDRLKNPIYMGYLTYNRRTHKDTYKKNPKEEWIFSENPLPELQIVSESTWYKSQSNREKRKSAIASVKEDYGITSTGKLPLMGIAYCASCGTRLTNGSRYDTWIKKDGTKVKKVCGRYKCTQKANGSLACEGSALYRADEIEPIIFAEVNNYMKQLKQSNIYTEVLKNQERSRKTILKEIESIRNEVKNIESDIKALEDNIPQALLGKGLFSADKLSALLNQKEEKKIEIQTRLESKQQEYNSTALTNKDIEKFSSIIPNWEQEFNSAPIHLKKVLLRKVIERIEVSKDEIKIIFRISDQAFRKEADLPLSPKESKGGKEGLEEKNEGGDLPLISGSHHTTLYRHG

SEQ ID NO: 841 - protein, 618 aa, unidentified
  source 1..618: note = uncultivated organism
MKSDALYCRVSTDQQVEFGESIETQKSRLLEYANQSGYQPKLYVDAGFSAKDTNRPQLKLLRQDIKSGLIRSVSVTKLDRITRSLHDLLELLREFEDYDVTFKSITQPFDTSTATGKLQLQLIGIIAEWERSITSERVSEDMRHMAKNGKWLGGPIPFGYMTYGEKLKKLEEAGHKNPQSTARQICPEDKKLYSDPEEARIIKRIFDLYLETTSIRAVTHRLNNEGYLTRAGEAWSNTSIRRILGSGVYIGSLIYNRRIGNGNGKKKKRGESEWITVSGTHQPLISEATFERVQKTLQKQSKEPIRRNSEYLLSGILYCGKCNGRMHGFSCKNAQGKPFSYYKCMNHSQKGTSVCKGSSVRREKLEEAIIQCIFDMRKNEGFIDAKQALRAYNRQAGSKRHEAVKEKERFEKRKAEVQRRKQSSIERLEDETISREDYKLRAKALDEELLNLDNSLFRLEAQLSEMQLGEVNFESVLQIVNDISGNWKHTTASERKEALATLIKRVIYTSQDDVKVECYSSKSARVTARTPIQEHSHTFQNPFLFILRARVPQNYELLGEPKTLGERIKYERLRQGMTAESLASQLGVCSETVRNWETSNTAPNEDRLNRLKTALPLG

SEQ ID NO: 842 - protein, 534 aa, unidentified
  source 1..534: note = uncultivated organism
MSDNEKPVKKIIAAYIRVSTSEQAKEGYGLDTQIRHIKNEVERFKDKGWILEDKFIYRDEGVSGTIESRPAFQRMLEDAKQKKFDILISWKIDRLSRSMRLLLETMDKLGEYDIDYKSVTEPFDTTAVGKLIFRIFGALAEFERDLIMTRTSEGKIDSAKEGKYVGGGVPFGYKIVKQKVVIDKEEAKIIRTMFTWFVEMDYSIEKIAKLLTERKILTKADTKKLGKRTKNPSCYWHHSMVKHKLQNEKYIGIWYWNRNGKDKNGNKYEKPEKDWIKFFYTGIMDEETFYKAQVKLNKNALLSNHAKNKYLFSGKIVCGECGAFYTGYISTKNTKNYRCSKNNQGKGAVRCKASHISEQKITEALWNQIEVFLKYPDKEFKKITDALRKNTYYQTLITEKEHAERVVQSNMDARQRVKEAFRNRIYTETELEEELGIIDNSTKTLQEQLEGINNQLTTEHAKKEKIIAIKEMAKQHKAHLDNPDYEAKYDIIQAIVHKVLITGNDIELEVKIPKYIKNLIESDKIKSKHINGGR

SEQ ID NO: 843 - protein, 526 aa, unidentified
  source 1..526: note = uncultivated organism
MRKSRANRTTAPTKPTTRCAIYTRKSSEEGLDQEYNSLDAQRDAAEAFIISQKAEGWTVLPDRYDDGGYSGGSMERPALERLLRDIDTGGIDCVVVYKVDRLSRSLMDFARIMQVFEAKQVSFVSVTQQFNTTHSMGRLTLNILLSFAQFEREIIGERIRDKLAAQARKGKWTGGAPVLGYDVDRSGPSPRLVINAREAAQVRDIFRMYLEEAALLPVVKELAHRGWINKQRVTKKGQHLGGRSFDKSTLYQLLTNPIYTGKMRYKDELHAGEHEPIIDPAVFDQVQQQLKQNSRTGGAEVRNKYGALLRGLLRCKCCGTAMSHTFNSGRGRTFYRYYRCTHAIKNGSDVCSSGMLPAGEIERVVVDEVRGLAKDEVLLARVINDAQVVIEGELVAARRDLDDLRQERERHHRELQQLTTSGKTTADVTERLADLQTKLLASDQRLPDINARILALEGQTISQVQARAVFADFDSLWQSLIPREQARLLKLLISAVEYDGDAGTVSVTFRPTSIRSLINRKMEKAA

SEQ ID NO: 844 - protein, 544 aa, unidentified
  source 1..544: note = uncultivated organism
MARTAKRYLKMEGAESTQISVYKAGIYARLSVDHEDKKSESIETQVEMLKEFIQRQNGKPDRDFVLVLYDIYTDLGKTGTNFERPGFERLMRDIREGKVNCILVKDFSRFGRNYIETGDYLEKIFPFLKVRFISVSDQYDSFSSDSKSQELSMNIKHLVNEAYAKDISAKERAAKRTEQKRGSYVGSMAPYGYHCEEENGIRRLVADPDAAEIVRRIFTQYADGMAIQQIIDGLFEDGIHRVSDYNTYHHVYWQEGELLHEWGNSSIRAVLNRNNYYGDLVQHKYESRFARGEKWCDVLEEEDWIVTPDAHEAIISKELFDRAQKRLKAAKEARTSVGWDENDRAFYNVFYCGDCGRKLATSRTKDCVEYFCQANRYKDERHCTAKYISEEKMQTIVRTEITRQLQLSGIRSKDMATLSKETFQKVTDQVQDEINRLDTDAKKMKGKTTEAFTKYKEGELSLEAFQEKQAERKDWEAFFEKRKKELEQKIRMIQKRQKEEGKFLRSLLQLDGTTRLNQELVEALIERIELYADGRLEISFKFKG

SEQ ID NO: 845 - protein, 513 aa, unidentified
  source 1..513: note = uncultivated organism
MVEARKTARCAIYTRKSTDHNLDLEFNSLDAQRESCEAYIKSQAHEGWRLVPDRFDDGGISGASLERPALKELVSGIEAGKIDIVVVYKVDRLTRSLTDFAKLVELFDNHGVSFVSITQAFNTTSSMGRLTLNVLLSFAQFEREVIGERVRDKIAASKRKGLWMGGPVPLGYEAKDKKLVILPKEAETVRLIFRKYLELGAIGPLLQELDRLGMTTKRRRLSDGRTVGGGRFGKGALNHFLRNRSYVGEIEHRGQVFTGCHEPIIDRELFDAVQAKLSGNAVERRLSLKAAAAPLAGKIYDDRGNRMGPSHTVKNGIRYRYYVSKAILQRRPKEAGSVPRVPAVEIEELVATTLQEHLNALPDDGRPTPDLDRIVIKQGIVEVCLAGPDVADDDQAGVAFSVPWTPTSGTAVKGVVSGDAEARMNSSKNRDAMLTAIGKARLWIGDLTNDRATIAQIAEREGKGQRYIRMLLPLGFIAPSIVEAINQGRLATGTAGLASSLPYSWIAQARILQ

SEQ ID NO: 846 - protein, 553 aa, unidentified
  source 1..553: note = uncultivated organism
MARKSRKNAEGQSAPAYQIFMYYVAIYIRLSVEDNKKRGNSIESQRSIIENFMALNPDFKLYDVYIDNGTTGVNFERAGFKRMMEDVEAGKVNCVIVKDLSRLGRNVIDTGYYIEKYFPSKNVRFISVNDSFDSEDKDNIHGGIILPLKNMINEAYSLDIGRKIRSQAKQSMKDGDYMGARPPYGYVKAPDNCHKLIIDEETSPIVRQIFEWAYDKAGLNDIVKRLNDAGIIPPSHYKREKGVITHENLIGNGKWQTRTVGKILADEVYTGDMVQGKTTSVDHKQIPVSKENWIVVRDTHAPIISREMFEAVQAYREQVAKDSIQRGKKPYTENIFKGKVFCGCCGGSLHRQRNERKHGPDAYYYHCIANSRIAKGTCQGVAINENELHSTVLSILLGHAEAITGTHLVLQNNDALLKSRQDETKARITALRQGIDTNRRFLKSLYENLIKGILTSEEYFSMKADYEAKITGATDSIARLENGQKELYAQTTRYYDLASCIDGLDKGGELTAALVDKLIEKVTVYPDKRIEVCFRFQSEFDRIDEVVSQCVNM

SEQ ID NO: 847 - protein, 530 aa, unidentified
  source 1..530: note = uncultivated organism
MDSAALYLRLSKEDIDKINKGDDSESIINQRLLLADYAIQHNFKIADIYSDDDYSGLYDDRPEFDRLIRDSKLGKFNVVIAKTQSRFTRNMEHMEKYLHHDFPLMGIRFIGAVDGVDTQNAANKKSRQINGLVNEWYCEDLSNNIRAVFQQKMKAGQYLGAFAPYGYLKDPRNKYNFIVDDYAAKVVKKIYNLFLEGYSIKKICNILEDDQVPNPTLYKSQMGLAYKNKKAEQFSNKYGFWSETTVKRILSNETYIGKLIQGTYRKASFKDKKVIPVPRDHWYVVENHHEAIINKKTFENAEKLRARRRVYASNQGKDKKIHIFAGKLRCETCGHTMIKSGGVKGKHGDWYLRCQLSNKSRQKECTSHSICYSTIEDAVRKRIIEVVNTVLNDNDNLSKLEEMFQSERFDTEIVNKKSNLRYINLDIEEYIKSLQILYIDRVKNNVTEDTFFNLKKGFEDKLQRLKEKKKALELAIKKLEQNLSPENDMKNNLNLSKLTNEIVIDFIDYIEIGEKNKETQEQDIIIHWNF

SEQ ID NO: 848 - protein, 560 aa, unidentified
  source 1..560: note = uncultivated organism
MAIERTTPGELGNDREARSVQVAIYTRKSNDENLTGNVTSIDNQKAACRSYINIYKDKGWQEYPEAFDDPAESGKDLKRPAVQRLLKAVQEGRVQAVIVYKLDRLTRSSRDFNHLVELFERHGVAFVSATESLDTKSPQGRLMVNIMVQFAQYDRELDVERSKDFHLARARKGLWCAGLPPLGYDCKDKLLVVNEEEAALVRRIFNSYLECHSAVAVALELNRLGFRRKAYQTQDGRAWGGKRFDIKSVIRVLQRKVYIGIITNERAKQEFPGQHQPLVSPPVFEKAQELLKSHSRHEGQLSYRANKYGFRLKGLVRCGECQSAVTSYIRPKPKTGKVYLYYKCLAKMNGMPIRCSVTSIGAPKLEEFVIEKLAAVGWDRPLLERVVEKVKALSRAQVGPLEREKRELDGRLNAVRQEIGNMIGLVRSHGTSKEVAEEMGRLETAKKTLEARLHELAVQIGYRSRAVYDVDVIQRALQSFARFIYKLPIEHQVRTIRLLVDRVLLFKDRVRVELHELPIPDLQRALDVKLAERGVEYFEGRRSPKRRDQKTTNGRTAVVE

SEQ ID NO: 849 - protein, 574 aa, unidentified
  source 1..574: note = uncultivated organism
MPNEARPTIRCAIYTRKSSEEGLEQSFNSLDAQREACRAYIESQRSEGWRPISTQYSDGGYSGGTMERPGLKRLLEDISAGKVDTVVVYKVDRLTRSLADFAKIIEIFDKRGASFVSVTQQFNTTTSMGRLTLNVLLSFAQFEREVTGERIRDKIAASKRKGMWMGGTVPLGYDLKSRKLTINPKEAERVREIYRQYLKLDCVSKLKVDLKRKGIGSKKRTSQSGRKTGGVSYSRGALYCILQNRIYLGEIEHRGQVYPGEHEGIVPRELWERVQARLRANNHAQQNGLRAAMPSLLAGLLYDERGNRFTPAHAVKNGKRYRYYVSQAAIKNPGISHRGSIRIPAGEIESLVCSKLRSFLGSPNEVADALMLQRRNDPTTQSILVAAEAWSKRLASAAASETRPFVRSLISRIVVQTAKVDVRLDKQALQSALLGAGHSNMSLRAGLSNGFFTLKLNARLRRCGREMRLVLPANSRGEIPSRPAQSLIKAVVRAHDWYRRIIRGELTGSRSIAKATGLDERYVNRIFQFAFLAPDIVENILDGRQPARMTLENFRTHLPMEWDAQRELLSFSAE

SEQ ID NO: 850 - protein, 552 aa, unidentified
  source 1..552: note = uncultivated organism
MSGEKKSIVAIYARKSKLTKKGKSIENQIDACKTYIESHMEFAEYDIQVFTDEGISGKDFERPNMKLLLECIKSGEISALICYRLDRVSRSVRDFSNLIDFLEKNKIQFVSVSESFDTSTPMGRAMIMICSVFAQLERETIAERISDNLYSLAKMGRWLGGQVPLGFYSRRIEECDASGQKRSRVRLEAVEEEQELVRLIYSKYLELGSLTQLEMYLYNLGCKTKNNNDYGRYVLKTMLSNPVYCVADENVYQYLKEKGYGIYADLNQFNGEHGLIAYNKNNNQGAVQRVNPTDQWIVAVGEHEGVISSETWCEVQRKLQDNSKRSYYRPKKSEAILSGMVVCGCCGGRMRPRTSRRTKDGELRYSYSCVNKEKSRAKQCQIPNALGSQLDDLVVDEIMKLKDQVITEYGFLEKTLGKIEQTVSSQSADMILKRDITQAKRQLQSLLDALGRSSNEATSDNIIRRMDELNQNITKWQEQLDSKKTSNVSKLRVKPGELLAESILQFDKKHFKELSAQKRHDILSQIIKEIVWDGENAEIHLWAEELPEIQSA

SEQ ID NO: 851 - protein, 531 aa, unidentified
  source 1..531: note = uncultivated organism
MTKQAAIYARVSSDDQAEKGYSLPSQIEACQRFAEQKGFDVAAVYQDDISGAKPITSRPDGYQLQRVIESGQIRAVIVYCVDRLSRDIVDLLTTVRNWLRAGVEIHALDMGQVTSELDIVLVIKGWQGSDERQKIRERTSRGRNSKARAGKVVGAGTPPYGYTYSDGELLIEESQAQIVRMIFDWYTRGDEHGNMMSLLAIARRLTEMRIPRPGESKSLIWKMKRGKAAKWDGQKWNVGTVHKLVINERYCGVLRYGKSIGVNGIGGKRPPDEHILIDVPAIVSRETWELAQARRAYNSKIAKRRTKHEYLLRGLIYCGCGRVMVGMGKGNLYACTRRYNPTGNEEACKEPLVSLGLIECVTWNYIMSLITDSQKFEEKLREAQAQESANMRPKQKELDHVQALLKGTENEAEQIARELHKTKGIIREKLEQQGEEVNRRYQALTRREAELQEALTFELTERNIDNLLEFREAVSVGLENPTFEDKRRWLEILQTKVTVTNGIAVVTCRLGGKPFKYSLSRYNISRNWVVS

SEQ ID NO: 852 - protein, 541 aa, unidentified
  source 1..541: note = uncultivated organism
MKFFIYSRKSVYTGKGESIENQIEMCKQYIHSKFSDVADTDITVYEDEGFSAKNTDRPQFQQMLRDIKLKKPDFVVCYRLDRISRNVSDFSSLIEDLNDRSISFVCIKEEFDTSKPMGKAMMYIASVFAQLERETIAERVRDNMLMLARTGRWLGGTTPTGYTSEKQQEIIIDGKVKTSCKLKDNPDELRAVDMIFEKFLELRSVSGVSKYLIKQGIKSRSGKYYSLPSIKEILQNPVYCVADKDALDYFTAQNSDVCFEEKDCSEKYGLLAYNKRDYKKKHAPRQSMDKWIIAIGKHKGRVSGKKWVAVQNIIEDNIPTGKKPAKMHNDYSLLSGLIYCEKCGSRLFAKSRSGKGATPGLFDYVCSSKLRGGTELCDCQNIGGQQADDMVCDYLMKYTDESSSIYKLLEKLKHDLQGQKQESPLESIEARISKCNEEMDNLVNTLSQGNLGSAFIQRVNARINELDQELSDLTKERERLQKDVNLIADKEIQVDMLAAALGSLKNNFPILSVYEKRTLIKLLVQKIVWDGRDLHIFMDGE

SEQ ID NO: 853 - protein, 552 aa, unidentified
  source 1..552: note = uncultivated organism
MKKLRCAIYTRKSTEEGLEMAFNSLDAQREACEAYVTSQKAEGWVLVPTAYDDGGFSGGTMDRPALVQLLADVRAGKVDVIVVYKVDRLTRALSDFARIVDVLDAAGASFVSVTQAFNTTTSMGRLTLNVLLSFAQFEREVTERVRDKVAQSKARGIWMGGNVPLGYDVQDRKLLANAAEAATVVHIFRSYLDQPSVRALKETLDMQGVRTKVQQGKTGPRGGVSFSRGALYWLLSNPIYIGKLRHKDKLHEGQHDGIIPLDLWDATQAKLRASAAERGNATTGNGTALFTSMIRDAAGRPMSPSFTVKEGRRYHYYVSSISKDIDRGLSGASAAPVVRVPARRLEAAVREALRALLLDEAQLASLFVDGDTATTRRQLATAVELARHFGPHAIDGAHSLLTRLHFSLIIHRDRVAASVAHSALLAALDHNVGTAAGDDRRIELIVSTNITHRKRGARLVIAKNAPAEKIPDPNLVALIAKAHRARAALFSNAAPRGNRHIERLARLAYLAPDITTAIPDGTQPATLTSRSLLKLPGLPLEWNEQRTRLGFE

SEQ ID NO: 854 - protein, 588 aa, unidentified
  source 1..588: note = uncultivated organism
MANDLLSSGSAAHAAHSTPSLACAIYTRKSSEEGLEQDFNSLHAQREACEAFVLSQKGLGWTPIATTYDDGGFSGGNVERPALKCLIADIEAGQVKVIVVYKVDRLTRSLADFAKLVDLFDAMGVSFVSVTQQFNTTTSMGRLTLNVLLSFAQFEREVTGERIRDKIAASKRKGMWMGGVPPAGYCAVGRALAPEPIQADRIPEMYHLYLQLNCIRRLCKEVRERGWLTPERTNKRDGFGGHKPFSRGHLHRILSNPLYAGLVHHHGEHHAGQHSALVSMDLWNQVQERLALNRQGHKVQSRAQSPSLLSGKLFDEAGRRLIPSHTTKGKKRYRYYVTSVDDPGEPIRLPAIDIERQVIGAIVNWSFNQQQVLNATGWADAQQAAQVLKLAHRLQLALKQGAKGEQSISASGEHGAPSPIHLRLCVSRIEVAPKGMRIVLDLIGCGLVEEGAGPQQTIIDIPVERKRCGMAVRLVIGNEAALKRPQREPDPGLVSLMVRGKAWLKLLTTGGQSIEAIAEKERLSARYVSRVINVALLAPDIVQALERGDHPVTLNATKLVTSVPFPMDWAEQRRLLGLGKQERTAPCG

SEQ ID NO: 855 - protein, 562 aa, unidentified
  source 1..562: note = uncultivated organism
MTAPAPAKRTMRCAIYTRKSSEEGLDQDFNSLDAQHEACAAYVASQRHEGWKLMPARYDDGGVSGGTLDRAGLQRLIADIEAGGIDMIVVYKIDRLTRSLSDFARLIDRLEAAGCSFVSVTQAFNTSSSMGRLTLNVLLSFAQFEREVTAERIRDKLAASKKKGMWMGGVVPLGYDARERALHVNAQEAALVREIFCLYRTHRSVARVEAILQKRGVRTKRHTFTTGRTRGGVPFTRGAIHHLISNPIYIGRIRHKELLHEGLHDAIIAPDLWADVQAVLEGNTRGVRRSTAKRHHGQAVSSPLAGKLVDETGDRLTPSHAVKSGRRYRYYVSGRLLAGKADPGEGWRLPATQLEQAVGACAADGLVHSQTASRLLEGQPAGVLAAASPRLAAMAQELAGDRSGEALAALIACVFITPGWLRVHLDGDAVAGRLDVRADTIAPDGLIFEAAFTRRKRGVETRLCLAEPKARPDPVLIRAVVRAHDWWGAMRSGASMKEIADKEGLPQRRVAHLLKLAFLAPDITEAILHGRQPPSLTTETLIRKPIALAWDEQRAALGMGRL

SEQ ID NO: 856 - protein, 513 aa, unidentified
  source 1..513: note = uncultivated organism
MAKVTRIEPTIDTSLVRKLRCAAYCRVSSGSEDQLHSYAAQVKYYSKVLGGSETEELIDIYADEGITGTCEDKRDEFKRLIKDCRRGKIDRIYVKSISRFARNTKDCIKNIRELKELGITIFFEKENIDTAQVNDEMIITIMGGLAQEESTSISQNMRWSIQKRMRNGTYDSPSVPYGYIKENGKLVIDSKNADVVKMIYSWYLSGMGIESIIEKLNEMNIHSPHGHEKWHNDVVSYILKNERYIGKMLLQKSWSSETIPVRRYKNKGEKEQYLLYDCNEPIIDKDIFNRAQKLLAENSFKYYKPAESSLAFSKKIKCYRCKCSYKHKKKRDIDYWICSRHDKKAANCNSKPVEGTSMHLAFIRLCNKLILHHREILLPLQRALQDLNSKKLGNNTKVLDIRRDIAALNEHKHVISRLRTKGFLDEKKYNEQLSVLENKKARLERELNRLSKADDEDETLEQVDTLIDCFEGRTTIITEFDDELFGMIVERIVVRNNILEFHLISGLKFNEEI

SEQ ID NO: 857 - protein, 502 aa, unidentified
  source 1..502: note = uncultivated organism
MRRQEGVIAIYARQSIDKKDSLSIETQIDLCRKNVESKQIDGEIVVYKDPGYSGKNTKRPEFQKMMSDVENDRIKLIVVYKLDRISRDLKDFTNMWDIFDAHKVEFCSINESFDTSTPTGRAMLNITMVFAQMERETIQLRVKDNYYARIAKDGRWAGGPAPYGFVNARTADNKPTLQENPKEMEMVKYVFQEYANKPNVSLGMLCRDLHSKGYRSKRANGTFDNITLARMLQNPIYAVADDKLYKYFKLKKVHFLNDEEEWNGEHSAHLVGKKPNKSNYRKYATLEEQSIYISNIKGNIDSRTFIRVADRLAENEQFGSNNSMTPMKEFQGLLKCSKCGYAIRLNEGKYVYCYNAHTLHGCDVSYKGLDLEKLRVDLGEQVQGFLDQVARDIVRVGTLRRQQEEEIEKLRQQMENLMQLAAMGGESARSIHEKLEILQKEIDQKELENHINYHFTDNLHIKWNIPIKYSRFTDEEKKAVCQHLIKKIDLHPNGDLEVTWKV

SEQ ID NO: 858 - protein, 529 aa, unidentified
  source 1..529: note = uncultivated organism
MAKPKASEAVRCAVYTRKSSEEGLEQDFNSLDAQRVAAEAYVLSQAGEGWMLIPEHYDDGGFSGGNMERPGLKRLLADIEAGEIDVVVVYKIDRLTRSLTDFARIVEIFEKSDVSFVSVTQSFNTTSSMGRLMLNVLLSFAQFEREVTGERIRDKIAASKARGMWMGGLPPLGYAIPEPGSRMLRVIDEEADRVRHIYRRYLALGSVYTLQSELEAEGITSKRHVTRKGKVLGGTHFSRGALFHLLRNQVYLGLITHKGETYQGEHQAIIDQDLFDQVQQQLNANSRRRIKGKERSVARSPLMGKLFDEAGEVMTPAFARGRRGKLYRYYVSASLQQGQSVPDDDIVRRLPAARLEAIIKDLLARWLPRSDDPFSVLDEVRLLTRGMLLALTGDRTLELGSTLEEGAHLISASKRRTVIEVELALPLRGGKRHIVLGKRRPRERDRTLISALRRAHAMATKERGMPLVHTAPVSPYQTRIQRLVFLAPDIQRAIIDGAQPAGLNLERLVKCQLPISWHEQRELLGFEPL

SEQ ID NO: 859 - protein, 505 aa, unidentified
  source 1..505: note = uncultivated organism
MNELYSNRKGKSCVIYIRVSSERQVKGYSLEGQMRYLKEWAEFEGMTVSKIYVEEGKSGKSISGREEFQKMLNDIANKEIPVDFVVVFKLSRFGRNCKDVLNSLTYIQQYGVNLICKEDGLDSSTTMGKMMITILGAVAEMERENILSQTYLGRVEKARQGGWNGGFAPFGYSLYKDTSNRDTSKIKSTLKIKEDEAAKVRLVFEKFVNEGLGYSTIAGYLNKQGVIKKPSKNSHSRTFTDWDVNQIKRMLSNPLYTGRIAFGRTRAEKIQGTENVYHRVKVDDYIQSDKISHEAIISDELYEKAQRKKASSATGKPVVGRGTKHLLSGILRCPMCGSSMYADIVQWTNQDGIKRQKLNYQCGHYAKAKHGNCKKNAILGEWIEAEVIAYTKLLVRNPLFVQDIQSKIGKKVDDAEIDIEISNFQKRIAKLERSKNKLEQDIDNLSDDDKRAERKRNDMNRRLNKLYEEIYEIEDQIVDCEQRKQAAEHKQLSTESIYKILLAFD

SEQ ID NO: 860 - protein, 550 aa, unidentified
  source 1..550: note = uncultivated organism
MSIYRDVYSACIYTRLSRDDSDKEEKAESNSITNQKALIRDFLSGHPEIEIVSEHEDDGYSDVNFDRPGFNAMMDEIRSGKVNCVVVKDLSRFGRNYIEAGNYIERVFPFMNVRFIAINDGYDSAEKRSQSDSLIIPFKNLINDAYCKDISIKIRSQLEIKRKKGEYIGSFAAYGYLKDPQDKNKLIVDPFAAEVVRSIFRWKLEGMSQSKIADKLNNQGVLCPMEYKLSLGMKTPTKLRVHAKAKWSAVTVSRILTNELYIGVLIQGKTSSPNYKVKKLLPKDESEWVRIENSHEAIIDHEDFVAVRSLLKRDVRTSPAEDAVYLFSGFLSCADCGQNMIRKTIPSGKRKYVYYVCATNKAGKGCSAHSISEPLLEQTVLEAIRVHINMILNLERLLNFVDDLPEQQRNVFNFDAQIVRLKEEIERNQKFKLKLYENLTDGIINQEEYFQFKQSYASKISDAEASIIELEKEREAAVAGNKADLLWIGVFKKHENIHSLDRKVIVELIEHIEVHEGNRIEIFFKYQDECARAIRYIRKLSETVELPTAI

SEQ ID NO: 861 - protein, 539 aa, unidentified
  source 1..539: note = uncultivated organism
MQMKKCAIYTRVSTDMQAEKEFNSCEAQELKIKSFIRSQNNMQIAKIYTDLGYTGANIKRPALHELLEDIKKNQIDIVFCYKIDRLTRSPKDFYQLIELFEQNEVAFISVTERFDTSTPSGRLLRNIMLTFSQFERELISERTRDKMHQRAKKGMWNGGIVPFGYQRIEKKLVKEENEAKIVKLIFRTYIKKDFGADVYNELKRRRITNRQGKIFSKGAISCILRNIVHAGKVKYANKIYTGIHEPIISEELFNLAQAKHKNKNKKYMLFHKCLFAGLIKCKECGSSMTPAFTNKHTNGKLKRYFYYRCTSTQKYDWNNCSVKQVSADRLENFVIDNLKRISLDTSYLDSLIFALNHKQSEYREGLELQDTDYKFSAETTRNLIISALKTAKETKGIERNLQIRKYIEGISYSPSEIKIKLKYNPAVGQTLEPVPGGGGTGSRVEQITPSWGAVAGNGVYPPWRKPADKGRALSANVGSARPSMKIVRNKMNGCRGRTRTSNAQIQSLVSYQLNDPANSSETAFIIINFTLMSILATHF

SEQ ID NO: 862 - protein, 579 aa, unidentified
  source 1..579: note = uncultivated organism
MVSQTPSGAGRGQMRLRCAIYTRKSSEEGLEQNFNSLDAQREACEAFIASQKHEGWTILPEMYDDGGFSGGTIERPAFQRLLVDVGEGKIDVVVVYKVDRLTRSLSDFAKIVEIFDKRNVSFVSVTQQFNTTTSMGRLTLNILLSFAQFEREVTGERIRDKIAASKKKGMWMGGLPSLGYNVKDRRLVINEAEAKIVRHIFQRYTELKSVRLLKADLDASGIVSKSRNASDGTRYGEKSLARGALYLMLQNRIYRGEIVHKDKCYPGEHEAIVDEALWSEVQTILTENRADRILGTAEKQVSLLSGILFDARGERMTPTHATKNNTRYRYYVSRSLLVGTVKHSGQRIPASSLEALVTRRIHGWFGDRAAMLDIIQSHTSDAATQKRLMVGLEQCVATWPELRADDVRKFMLSIAARIQVHADRIDISLNPIRLPRWLGRSDAPAEPTAETQSDTDGHFVTLTIPARLKRAGKEMKIVVEDGSDPATPDASLVRVLVRAHVIRDRLLQDKSRTLDEIAKSEGMVASYATRLFRLTLLAPDIVSAILGGKHPPELTARKLMDDTRLPLDWNEQRQSLGFA

SEQ ID NO: 863 - protein, 590 aa, unidentified
  source 1..590: note = uncultivated organism
MKKKCYIYIRVSTAMQVDGYSLEAQKERLIKYAEFQGMEVVREYCDAGKSGKSITGRPEFQRMLQDVAEERDGVDFILVFKLSRFGRNAADVLNSLQYIQDYGVNLICVEDGIDSSKDSGKLTITVLSAVAEIERENILVQTMEGRKQKAREGKWNGGQAPFGYVLDSKNSMLVVNPEEAEIVRIIFDKFVHTDMGADAICNYLNQRGYTKKKVRGHELNYFARGLILKILDNPVYIGKIAYGKHATEKVKGTRDEYRRVKQEEFLLADGLHEAIIDEETWEAAREKRKRTGVKWVKTHSLEHEHILSGLIKCPVCGGGMSGTVQRRKNKKTGEYKDTFYYRCHHRKMVDGHLCDYKPMINQEKFNAEIEEFIRYMVSGDEFRAFIQEKLEEKVDVSALETEKKQIMGQLQQVQGSKNKLIQMLDRLDTGDKHYDRKYQDMQDRLDNLYDKVVEFEEAIKDIDARIGASYGKQITGKKLYEFLLDFDILYDKMTDLEKKEFMNTFIENIELKKETIDGTGTNQLQRIEHIDLAFPVYYGDCKGTRIRMPEENTVETVCLLSNRKADSHIKLSLDMDEYYDIIEKEQAEKK

SEQ ID NO: 864 - protein, 532 aa, unidentified
  source 1..532: note = uncultivated organism
MDEQKKTSGSLALNGAPQVITIPPSDPVRDRKLRVAAYARVSSSSEDQLNSFAAQNAHYTELITDNPEWEFVDVYADKGITGTSAEKRDDFQRLLADCRRGRVDKILVKSSSRFARNTKECLEAVRELKALGVGVCFEEQGIDTSELAGEFLTAIFAMMDQKESESISDNMRWSYQVRMRNGHFSTCKAPFGYNLVNGKLEINTDEAPIIRLIFDRYLQGHSMDDIAKEVTAYGFPTRDKKPYWQVTSVRYVLCNEKYIGDSHLQKTYMTEALPRQQKRNSGEHKQYIWKETHPPIISQDIFERVQKLLGVKSSRIPPKSKDVSPFAQHIFCGDCGAIFKRKPQGLSGYWMCSNHEKSRDNCLVRQIPELEVECAFFRMYHKLRHKGKLILNQLLADLQSARKGKLLWSLDIVALNQKIADITRQDRLLAQLKQQGLVDPDIFISRQNELAEQLRAAKLEKERFLETEEDQTIQQTQELLEALEAGPDFLDTFDGELFRELVDRISVESNDRLRFRLVNGLELTEPIERTVR

SEQ ID NO: 865 - protein, 502 aa, unidentified
  source 1..502: note = uncultivated organism
MDRPALQRLLVDVAAGGVDVVVVYKVDRLARSLTDFARIVAVLDEAGASFVSVTQAFNTTTSMGRLTLNVLLSFAQFEREVTAERIRDKIAASKRKGMWMGGMVSIGYRAEEKKLVVDPGEAELLHHIFTRYLELGSVRRLKAELDASCARTPMRRHRKGRHTGDAPFARGKLYALLSNPLYAGRVRHKCTVYPGQHEAIVDEELWQAVQDRLAANRQVETRRAQAASPSPLAGKLTDPDGRRMRPSHATKNGRRYRYYVSADLIEGSVATGAAGWRIPAAEIEAALASVIAARLRDPGFTSSLIAERHLGMDRTEAILGRIKAITAALDASGTTAARDLLRALVTRVDLGEAELRAMIGFEGLASGGVVDPVDAALAGIPDSTVSAPIRLARRGAELRLVLQGAAASRPKPDAQLIQTVIEAHCRVAGYLDPALDLSLGDLARRDNVDQVDLSRALQLAFLAPDIVEHILDGTQPATLTAQQLKRVGDLPLAWDEQRSLIV

SEQ ID NO: 866 - protein, 565 aa, unidentified
  source 1..565: note = uncultivated organism
MNKRIRCAVYTRKSSEEGLEQSFNSLDAQREACEAYVKSQQHEGWRLIASHYDDGGFTGGNMDRPAFKQLMADIDAGKIAVVVVYKVDRLTRSLADFAKIIEHFDKHQVSFVSVTQQFNTTTSMGRLTLNVLLSFAQFEREVTGERIRDKIAASKKKGMWMGGIVPLGYSCHERKLVVNESEAATVRTIFHQFLRLETVFSLQSWLRENNVKSRRGNDFYRGPLYLMLRNPTYLGLVKFKKELYPGEHSAIIDRETWDKVQAQLNDNRQGKRRKPRATKVSLFMGMLLDASGTPYTPTHASKSGRRYRYYTSQAVIKKTEKGNAPGRIPAPDLEKAVIDRILNWLQTPADLLAALQDESSESPPKGFLARILRHAAKTAETWRSRIAIDRTQFLKTVIERVVVHSDHIETRLRVPALINEILGTTSVPATLPESTSIECPFRHVSLGRPLRMIIAGASITTEASRQAILKAIARARAWYEQLTSGEASSIAKLAAKYRVTPRFIRMYMKLVQLSPLSIEKLMTRPESLPLSLAELLTNVPMNWNEQVFGVPPLLQSQKDPRRSMT

SEQ ID NO: 867 - protein, 599 aa, unidentified
  source 1..599: note = uncultivated organism
MEDKTLKTKEINFDELKESKNVITKEFAQSYTKMRLKVAAYVRVSTDFEEQQTSFHSQYVYYDGLIKQNPNWEFAGIYADEGLSGTQTKNRDSFNKMIKDALNEKIDMIITKSISRFARNTVDTLNIVRLLKSHNVDVFFEKENIHTFSVTNELFLTLYSAFAQAESESISENMKSGLQMKMKRGEYVGCPECYGYDWNKEAKTLEINTEKAKIVKRIFEEYARGYGSGRICKGLNNDKILSPTGKRWSPSTIRRLLFNEKYLGDLCTGKTFVESPVTHRKKMNQGQSKQWYTENKHEAIISKELWMKAHEMYKKRSDKSKNHRDKYSRRYAFSSKIYCGFCGERFVRRSYIKNKKDMNSERVIFWGCRSQFHEISCENKIKYKDEELKKMFVFLFNQLYSDKDKYVKQFLHYVDTVLNKDNIEKEIYSLEKERDMIVQKQSKLLDLALDNKISKQVLDSKMAELDIKHEEIKEALEKLHQHSQLKSEKIAQMNKIISIIEEKRELKEFDDDIFEALVDRIVIGKKLDDGTFDYKSIQFILKTSEIITNEDIKGLISEKINDKFSTYNESLHVTSEDKKTGLTAYRCAKRLWVCNKWRK

SEQ ID NO: 868 - protein, 521 aa, unidentified
  source 1..521: note = uncultivated organism
MIKPNTDKQVRCAIYTRKSTEEGLQQEFNSLDAQRDSAESFIASQMHEGWTCLPTHYDDGGFTGGNMDRPAFKQMMEDIEAGKIDCVVVYKVDRLSRSLLDFSRIMEKFDQANVSFVSVTQQFNTTCSMGRLTLNILLSFAQFEREIISERTRDKIAAARRKGKWSGGMPVLGYNVTAETSKLIVDPVEAERVRAIFDLYLERRSLLAVVDELDRRAWVTKQWTTKRGTCRGGKPFNKTSLHRLLTNVTYIGKLRYKDEIHEGEQDAIVDLKIFEKVQARLNRNGRSGGGEVRNKYGALLKGILRCKACDCSMTPSHSIKAGNKRYRYYVCLQAQKRGWAKCPTKSVPAGEIERFVVEQVRAIGRDRSLARKSIEKASAAVREQIASLATEELLIQRNLTQWQNQLGEVIRKLPAGGDDSVLLGVLADLQDRVRENEKRLSTIRIDSDGLRKTILDPDEATEALAHFDELWDTLAPQERVEILQMLIRHIEYDGKGEKIAITFHLAGIKSVEARLLAETAQ

SEQ ID NO: 869 - protein, 553 aa, unidentified
  source 1..553: note = uncultivated organism
MKASRISCAIYTRKSSEDGLEQDFNSLDAQREACAAYILSQKSQGWVAVPTSYDDGGISGGTLERPGLQQLMIDIRAQKVQVVVVYKVDRLTRSLADFSKLVELFDQFNVSFVSITQQFNTTSSMGRLTLNMLLSFAQFEREVTGERIRDKIAASKRKGMWMGGLVPMGYKANGRTLEIKEDTAEKVREIYRMYLDIGNVSRLKEHLDQMGWQTPERHSVRQGQHGNRPFSRGHLYRILSNPVYIGKIPHKTEVYEGQHPGIISPEIRQAVRETMESHLKGVRSGVNNAWPSLLIGLLVDAKGRRLTPVHTKKNGRIYRYYSSPMDIDNKDPDKIRVSANELDEAVLTGMKTFLKDEARLLRFLDDENSNQFHELLQTAQQLHATLNAPDRELMQRCVQSIEVTRTRLWVRFKASSLGLDLKDETQDETSLIEIPVLLKRCGLAMKLIMYPDTVRATRKKDTTTMIALLAKATDWFNRLKSGECKSISALAEEDGSTAPYICKVIQLAFLSPEILNRILVGEHPPELNAQQLFKKLPLSLNWAEQGKALGFNL

SEQ ID NO: 870 - protein, 509 aa, unidentified
  source 1..509: note = uncultivated organism
MPGIGFYARVSTDEQREQQTIENQIEYATGRFKLDKIQCDKWYIENGVTGTIALEDRPEGKRVLDDATSGELKTLYIYKMDRLGRITKVTLGALWTLEALGINIVSMTEPFDMSTPAGKFMVTIMAGQAQLDRDVIVERLRQGMDRAARAGKWLYGIVPYGYQVINRYLVIYEPEAETVRLIFKLIVERDYSCRLVADHLNALGVSPISIAPGSGKRKKDTATVWQTGRIRNLVHEPCYKGVTYYCGDSKLGRDTIPRPCPPIVSEETWELAHEVLAGKKVFTGRQYKHEYLLSGMIHCSVCGLTYIGTTNKEYNIGYYRCGGKTQYRAKAIAFKKCKNNNIHQEDVECYVWDMCVQFITNPQEALSALVGHPAPVRNIKAEMAALTKNLHDKDAEKERVITLFRKQYITESDVESQIEDITSERKIIERQIHALKEENRQTQKNKELQDNAKALLERLHQKIHDGIDCADKREIIKTIVKEIIVYPKKRVEVTFKFYPPVKPSIPCAT

SEQ ID NO: 871 - protein, 524 aa, unidentified
  source 1..524: note = uncultivated organism
MVNVAIYCRLSDEDRNKQNAFDESESIQNQKSMLTDYCRERNWDVFDIYCDEDYSGIDSTRPAFNRMLNDCCKGRINIVLCKSQSRFSRDMEVIEKYLHNKFIEWEVRFIGVVDHTDTADAANKKSRQINGLVNEWYLEDVSENIRKTLQHKRENGEFTGSFAPYGYAIDPENKHHLILDEPAASVVHNIFEWYNQGWGYRKIVLQLNNMNIPSPVAYKEQHNSKFRCMNVEGSSSKGLWTQSTIYRMIRNETYTGSLVQGKSHKVSYKNKKLKFLPEDQWIKIPNAHEPIISQELWQATKKRLESRLRVAKVTTELSVLSGKVKCAECGKPMYRNIYYNKKRTIQYYSLCCGSYTVGAMNCSNVSSMSGLELEKIIIEQINLFTANYFNRDKIQIKSDFNKQILTLQGALQAYSAVISDKRNKIDKAYEDKLNNVITLEQYNYYKNKFQKEVQENEAKAAGIEKELATLNERQRGDGNIDKIVKKYSHVEQLSRIMVEELIDVVLIGSKEANKPRPITIKWNI

SEQ ID NO: 872 - protein, 532 aa, unidentified
  source 1..532: note = uncultivated organism
MGFAKIRPVPEACALNAVLYCRFSSDRQKENSIDFQLRADREYCERKGLKVVGEYIDRALTGTNDNRPEFQRMIRDAKKQQFAFIIVYRFDRFARNRYDSAIYKKELESVGVRVLSTEESVGTGDEGIILESIYEAMAESYSRKLSKIVLEGLKETARKGLTTGAPPFGFCSVDHRLAIDERTAPAVRFCFDSYAQGRTKTEIAEDLNARGYRTRKGTPFNIETVTRVLSNRVYIGENDYAGIERRCPSIIDEKTFATVQELLAKNKRSYGKKKERAFFALSGKLFCGVCGAAMVGDEGTSKTGKTFFYYTCATKKKKRSCKKKSEKKDFLEWYVCEQTVKYVLTDERISEIAERVIALEEKESGAGEIRRIEKEIASIEKDFSALAEKLLATDSPGIIKAINEKAAVLEARKADLEGELSSLRLRADLRLDQQEVESYLNTFRSGDLLDEDFRRRLIHALVNCVYIWDDKILIYYNVRGFESVSYIDALADAEQLSECSDSFSPGPPNTKLSEHHAFVFSHGVLGIVISRG

SEQ ID NO: 873 - protein, 545 aa, unidentified
  source 1..545: note = uncultivated organism
MNRYCIYSRKSKATEKGESIENQIQACKDYIQRVDSRINVDEDIDVYIDDGFSGKNVNRPEFQRMFEKIRRKEYAGLVCYRLDRISRNVCDFVLVVEELNKHGTAFMSVNEGFDTSTPIGRTMMYIASIFAQMERETIAERVKDNMHALAFTGRWLGGPTPYGFVSQRVAYQAHNGSTKYQSILVPNEDEVRVVEMIFSKYAETCSLTGVQSFLKQAGIRNRRSRLFADYSIKGILTNPVYCCADKAAYDFFASKGCAMPDDAEKLFDGAHGIMAFNRHDIANGNGALRPISEWVIAVGDHDGIISGAQFVAVQNKVEERRLRYEQAFAYPENDYALLSGKIYCKKCGSHMYTQRGRKSSPGGYFAYICDGRKTFGADVCDCKYLNGRAADEIVWNRILEVDVNGSYIHDLLADMSNTAKAKRKAQSAIEMLQEQLTQKQSAIRTLVMRMAQADFDETVQKYINEQIQALDKEASELKQAIAHESQIDQRTQADADMVSHLADVMRTAKNAETLAAKRSIINQVIDRVEWDGEQVDIFLLGQRGL

SEQ ID NO: 874 - protein, 583 aa, unidentified
  source 1..583: note = uncultivated organism
MTLKGVIYARVSTEEQATEGYSIAAQKEALHEYARLRQIDLVDQYVDEGRSGKSIDGRPQMQRLLQSAKDRKFDVVLIYKLDRLSRKTKDSLEIIETLDQHNIQLMSYSENIDTSTPGGKMFYTVLSSVAEMERDTIIDRVKMGMTQRAKQGKWNGGVVFGYDNVNKELIINEAEAAIVKEIFELASRGHGYKKITGELNRKGYNTKRKKEFSIGTVKGILENPVYIGKIRFNQHVNWSEKRRRGKNSNPEIVDGTHPPIISISLWEEVHNKKKKRSYRPTQSKKPFILTKSLRCPVCGHGMVSGKSNGKYRFYQCGQYKAKGSTACKPNSINADVAEKQVLDELRLTIEKPYFINNFVMTLNDQRLHAEQPLAEERKRLYSSKVKIEKQMDNIVNQLMDTPELQDVFKKKLLELKEAALNLNEHIQRVEEELKSLDTQPIDADALRNLLSHFDAIINRASAIEIKQLLSLFVKSIQITKDPISSKYSRQKSRQIKKINLLFDFTIESMAGATGEWFNEMASLDYIQPLDTSLLELPSNSEKTIREALASLSVLPLFMIRFIMKVLIGDRELQNQFYNIQKTY

SEQ ID NO: 875 - protein, 501 aa, unidentified
  source 1..501: note = uncultivated organism
MKAVIYARFSSEKQNEASIEGQLRECMEYANFNGIEVIGNYIDRAQSAKTDHRPEFQRMIKDSYKRPFDCILVWKLDRFARNRYDSAYYKNVLKKNGVRVISAKESISQGADGILLEAILEGYAEFYSAELSEKVKRGMTENALKAKGNGVRPPFGYYVDDTDHYQIDETLAPIVREIFTRYLDGMRVNDIVKLLNERGIKHKGFEMKYNAVFRILTNRKYIGEYKFGDIVIPNAIPAIIDEATFNSAQQRMARNKKAPAMHRSEDDYLLTTRLFCGKCGAMMTGVIGTSHTSRQYRYYKCNHAKQGKCDKKSVRKEWLEELVLDEIKDLLSSDEVVEELADRVYELQQQEDNATASIQTQLTGVKTKLNNLVEAITQGIYSSATKKALDELEERKRNLEIELFEAQMHDTMLTKEQILFALHNFRKIDISTQEGKQRLIDGFVNSIYLYDDHFVITYNYKGQSKTVTFEEVNSSPLTSKGSPKSRKNSQKRLFFLFFLTF

SEQ ID NO: 876 - protein, 515 aa, unidentified
  source 1..515: note = uncultivated organism
MNKKKVPQTTVRCAIYTRKSTEEGLEQEFNSLDAQRESGEAYIASQRHEGWTCLTEGYDDGGFTGGNMERPALRRLLADIEAGKVDLVCVYKVDRLSRSLLDFAKMMEVFENHRVSFVSVTQQFNTASSMGRLILNVLLSFAQFKREIISERTRDKIAAARRKGKWSGGMPLLGYDVRDSKLIINDHEAQRVRAVFQLYCDHQGLLPVVEDLASRRWVNKRWTTRKGRERGGLAFTRTSLYQLLTNVTYTGRVRHKDQTYAGEHEAIVDDKLWQQVQTLLQRNGRSGGASRNKFGALLKGLLHCTSCDCAMTPSHAKKGNRRYRYYVCSHASKQGWDGCPAKSIPAGEIERFVVEQIKCVGRDPELVNEVVGQAHEQGRQELADLEAERRTLDRDLAKWNTEVRGLVGASDPASVGRLADLQDRIRAGEQRVTEVREQAIALGKGLVDESTVAQTLALFDPVWESLNPIEQSRVLSLLVDRIDYDGANGQVSITFHPTGIQSLADQLAHQKEKRA

SEQ ID NO: 877 - protein, 544 aa, unidentified
  source 1..544: note = uncultivated organism
MQSFSYSFKAASYSRASKDDAESSTIENQLGIIKDFVNLSKDIQIVSEYSDNGFSGIDFLRPSFNKMMKDAEEGKINCIIVKDFSRIGRNYIEVGELMNDILPKLKVRLISINDRYDSNNPKSDSDEITIPFKHLLNEQYLRDISIKIRSNLNVKRKNGDFVLNKLPYGYRRDESNKHKLVIDERAAKTVQDIFNMKIQGMSQQKIADCLNDIGEPAPSEYKKNQSRFNTPFQKNNKALWSPVAVKRILSNPVYIGTLIQGKVTTPNYKVKKRIMKSENEWNITEDAHEAIIEKKDFETVSELLNQDTRTPPKQAIVFPLSGVMFCGDCGNSIVRKKAGKYYYYVCATNKTGKGCTSHSFSTNELETAVMESITNQIAVIIELEKCLEYLKNLPYQKKNIDKINEQITERENEIKDCEKYKRSLYEDYKNGELSKDDFIAFGKDYTDRIDDLTKAVRILKEKGELIFFENNSAHKWIEHFKEYKNVSELSRQLVTNLITRIDLFEKKQITIFFRYQDKFETIIKLFNDVKKEGDKNGSENKKSG

SEQ ID NO: 878 - protein, 579 aa, unidentified
  source 1..579: note = uncultivated organism
MSKTNEPKKVCVGAYLRVSSARQASEGDSLEAQRNIVNAYVTQKEAVGEWSDTDVRFFIEPGRSGKDDKRPEFQKLRRAVLDNNIDVVICVKFDRVSRNVIDLLQFRNFLGEHEVEFVSIRESFDTTTTYGKFALNLLASVAEMERDLISERTRTVMHDRAERGLWNTRPPYGYRQADNDKGKLVPDEEWAAIIKEQFFDGVELHKSAGALATHLREIGLTTPKRKTKTGKTIGGRIFDARQVKNVLTNRAYLGEVNWGGVRTLNAHEPLVSQEQFDRVQKILHHAMVGNNTPEKATDRIYLLAQLVRCGKCGSTMTPYSTHGRGGKRFHYYACTTRQHKGMEACSAAYVPAPAIEEAIVQRCIELSCDEKARDKIVDNAFKQADTDRLRLDKEIEIARGREGEIKKEINNLISVLRSLGEDGLDSVREDLKRLEEDRGAIQKQIESLQAQQEELQPINDLQRRFIESWRGLGDLLKVAGPAARRKLLLHMIEVIEWKTSEESKRCGTYAIRFFPEAVEDRADLWAMEWYSDGPENEQGPTEVDPLLRSSALVRTGYTLTPSAQPAKRCDRSIIDMQFY

SEQ ID NO: 879 - protein, 568 aa, unidentified
  source 1..568: note = uncultivated organism
MRCAIYTRKSTDEGLEKQFNTLEAQREAGENYIKAQRHQGWELIDKHYDDGGYSGGNMNRPAFQELLNDIRADKVDMVVIYKIDRLTRSLLDFSKMIEIFDKHHCSFVSVTQNINTADSMGRLMLNVLLSFAQFEREISGERIRDKILASKKKGMWVGGVPPFGYKGENKKLVVVPEDAEKVKHVYELFLSSGNLSMVGHTLLRENCTFRGKVPGWTFLRSMLNNRVYIGEITHKGTSFPGLHQPIIDKETFESAQNLFKSNTQKIRRRRLKPVSKNEENGLLRGILSCGCCEQKLYPRYSLKKDKRYYYYTDNTHKKYGPHSCRLNAIPMHLLDNLVMDLLNPLIKSPYVLQALAQEACQVQANLKESEVFYAMRETDSVFQQLTGAQKEKIVSLLVHGVTIFADKIVVVWKPLALHLMDKRLKASLKPNELKPELMESTVPIDLITHRGSKEIHLPETVSDMLYLTSGEKPSKKEDRYLIKILANGFTYRETQEAKNLNLHELAEIYHQDPAYIGAQIRLTFLAPDIIDAILRGAQPKTMTARELLRASIPASWPEQRKLFGFPKI

SEQ ID NO: 880 - protein, 556 aa, unidentified
  source 1..556: note = uncultivated organism
MDTKTSEYAYHAAIYVRLSKEDGDKPESDSIGNQKDLIRAYLAGQPNIDLCSERVDDGYTGVNFQRPDFTAMMKDVREKKINCIVVKDFSRLGRNFIETGKYIEKIFPFMGVRFISVNDGYDSLNPKTSSDNLIVPVKNLMNDAYCRDISIKIRSQLDIKRKKGDFIAPFAVYGYLKDSENKNKLIVDEFAAAVVQDIFKFKLDGMSAQAIADRLNEQDILSPLEYKNLIGLKYKTTFKANPKAKWTAAAILRILKNPIYVGTLVQGKRSSPNYKVKKRFDKPADQWISIENNHEPIIDKEAFHDVAKILRSDTRTAPSEETVYPLAGLIYCGDCGKSMVRKNNASSKKPYIYYVCSGCKSGSGCTSHSIRDILLEQAVLVALQEHIRAILDIAQTLGDIRNLPYTSRQVKKADERLAAKRKELAKYQNNKMKLHEDYADGIISREDFAAFGKRYDKKSDEAEAAILRIEKEIDELTSGKSAGQQWIGYFSRHENIEDLSRKLAVQLIDRISVYENQKIHIQFKFQHEYDSTIALLEAVKKSGQPTEAAAPRQGVM

SEQ ID NO: 881 - protein, 541 aa, unidentified
  source 1..541: note = uncultivated organism
MEKDKKRIYCAAYCRKSVEERSDETFGSIENQNEAILSFIESHKHEGWVALSEKYDDNGFTGSNIDRPSLQKLISDIKDGKVNMVIVYKLDRLSRSLIDFVQLLKFFEKYNVSFASVTQPIDTSSSTGKLMLHILSSFAEFERQLISERTKDKMSAARKRGQWTGGWAALGYDVDKVNKKLVINPTEEKLIKEIFDLYLKGNSLLRVAQILNDKGYRSKSITLQSGKTFGNKKFGITHIQSTIKNPLYIGKVRYAGQIYEGEQEAIIDEETFKKAQEMLKENRVERKATKNTDCSSLLTHLLHCKACGTFMIHTYTLKNKTHRYRYYICSNAQKRGYIACPTKSINAQAIEDATINYLKEIFNDNQNKRDNKNKQEIEALLSPIWDTLYPQEKRRIIKALVKEVDYSADTKKLGLMLTCSDLRHEFDVDLKQVRPLNKWHKEIEIEKEPKIRKSLILAYQLQKLLDEDKVTSLKQASEWLNISQSRLNHMLTLLLLSPTIQTEILNGDNKVMDLIPEYKIRSLASHFDWNEQASIWKNIKA

SEQ ID NO: 882 - protein, 565 aa, unidentified
  source 1..565: note = uncultivated organism
MISSWGLCPREEHDTEVKKRAGIYIRVSSRGQAADDKVSLEVQQRESKAYCSRRSYDIVGLPYVDIQSGTDSRKDRIAFERMLADAKKGVFDVIIAWRPDRLFRSLWPAARLKQVMDATGVDVETVTLPMDKSTLGLWAWMAEREIQNIRERTMMGREAMARAGKLATGNPPYGFQYDPSIQQLRHHEKEKTQVLDMFNSVAQGKSINSLVTNFNQLGILTRHGKIWSRQQVLKILKNPIYIGKAYWGKRERRNGVLVAKKSDEDRILIPVSPIVSEEVFHRVQRQLEKNRSLSLRNTKLIYTLQHLLRCRVCGKTFQARSHSNRHGKPIRTPERYYGCRGMKQSPGAYHCRRPAELYAPTLESVVWDKVAQAFADPHALIEILKARNTAATDKAKAIKAELDLAKDQLGKKHLELQQVLTWARQSLLTADELKPQLAQVRDQRQHWEWEVERLTQKLGSLQAGDRNLADAERMCMSIRERLGSLTAQEKKEFLRFVVERIWVDESNNLDIEVVIPNFEKRPTDVNCETPLSLLGEGEEVLREGASPLFDSSLTHSPPQGDLFIA

SEQ ID NO: 883 - protein, 512 aa, unidentified
  source 1..512: note = uncultivated organism
MVMRVCLYQRISTDEDHQPTSLKTQRERLERYCEAMEDWRIVAAYEDQASGTTLDRPGLQAALDLAREKRIDLLLVYRVDRLSRKVRQLAGLCEELDQLDVVLKSATEPFDTGSPAGRMMLQMLGVFAEFEHATIVDRVTAGLERRVREGKWMSGRTPYGYTRDKQSKLLVPDPVKAPVVRRIFHLYADGKLGTTAIARTLDAEAAPPPRKQGWSPNALQLILANPAYRGLVRWNGETHPGLHEPLIDDETFEVAQEILRRRGEDASLRRGNPTDFLLSGLVRCHHCGRAYVGTSAHGRNARYTYYACSTRYKYGPSKCNGDRLPKDRLEAAVLTQLADLYRDGSVIEKALADAAAVVENERPRVEEQLASTRAEIARLEAKLERYFEAFEDGSLSPADCQDRVRGHRARLAVLREQEADLDQTFGTQAHTPPDTAALTRLADQLDEIIANESPEQAKELLRLLIKEIRVHDRRRIIPTYRIPAAVRATPSKVDPAGLEPATFALPARRSPS

SEQ ID NO: 884 - protein, 554 aa, unidentified
  source 1..554: note = uncultivated organism
MSNYCKDFSNCFIYIKYSNKESGAMRFAIYSRKSKFTGKGESVENQIEMCKDYIFSKFHDIKNEDILIYEDEGFSAKNLERPAFKKMMNACKSNPFDFIVCYRLDRISRSVSDFSALIEKLNKQDVSFICIKEQFDTSTPMGRAMMYIASVFAQLERETLAERVRDNMFMLARSGRWLGGTPPTGYSAQRVEEILFENKIKTSCSLVENPQEVNVVKLIFKVFLETYSLSAVSKFLIARGTLSRTGNYFSVLGIKDILSNPVYCFAEIEAYNYYQNLGADLCFEKNECTQHFGLIAYNKRSGTTLGNVRNDKSKWIIAIGRHKGIINAKDFVRIQNRLCKNRQNHNFVITPHNDYSLLSGVIVCKKCNNRMFSKKRTGSDSFDYICSNKLRGGLKLCDNQNIKGEVIDKTILEIVSKRVNCGKTITNQLSALKSELIKQPIEKNTEIEKKVLQCNEKISNLIEVLATSTVSNEFTNLIEKKIEDIKNQKITLIKLIDNAKIGNDIRDNDTFKKLSDENVLSIMTIGEKREIIKSNVKKILWDGQTMTVFLFAQS

SEQ ID NO: 885 - protein, 564 aa, unidentified
  source 1..564: note = uncultivated organism
MTTKTYNVGIYCRLSNDDERDGESVSIENQKLLLQNYVRQRGWNEVDVYIDDGYSGTNFERPGVKRLIEDAKAKRINVILVKDLSRFGRNYIEFGQYTDYLFPSLGCRFIALNNGIDTESTNGSTDVMCFLNLFNEFYSRDTSKKVKAVKKACAESGKFMGTYPAYGYKRDLADKHHLVIDEDTAPIVRRIFEMRAAGTGFHAIAVTLNEEGIPSPGVLYYQRKGQSDPRRVNHKWADQTVKNIVRNEVYIGNMIQGKTGTLSYKSRKLVGKPEEEWIRVEGTHEPIISRELWDTVVSIDRKKVRKTPAFDGYKSIFTGLVYCADCGFKMRNQVERFTYKDGTPGRYSSFICGNYSRSGKGACTIHTIYENVLTQLVLEDIREKARFAEYDPEHLVQQIIRLKDKEAKSRLSSCEQELKAYTARLSELERLMQNLYEDKCAGTIPQTVFQTLMRKYEAERAEKSEAIPELEHRVKSYLENQTDANRWLAIIRQYTEITELDESILFELVDRIEVGETKKVHGQRICDLRVYYRYVGNVDAALARNIAASENIPEERRQPLEEAI

SEQ ID NO: 886 - protein, 568 aa, unidentified
  source 1..568: note = uncultivated organism
MIRMRKVVVYARVSTEHEAQISALDNQIEFYDKLVSDHNDWELFEGGIEGGKYIDEGITGTSIKKREMFKKMLNDSEGGNFDLIVTREVSRFARNTLDAIDTARKLKLKGIEIYFVNENLWTIQDPDADFKLTMLAAFAQNESAHISQRVKAGQEVTFRKGKFYGSGNILGYDYNKFSKEVTINEEQARTVRFIYDMCLKGTGTRMIQYELERRGYLTSTGTTKWTPSTITRILRNPFYCGTIVYRKSYIPDFLEQKPKKNKGEVKQIIVDSKYPTIVTKEEFNKVQEILDSHRTYNNDKETKVGKPPVTVYGKKLVCECGASMQKKTYHKYKDGHTSWCYQCYSQLNTGSYTSRIKNGISTEGICKTKMIPEWKLKIVSLIAFEKVWVEKEQILSIIDNMLDSGLLESDTKQEIERLERKIVSLKAKKLKLLDTYLSEVFDKDTLDDKKVELDDDINKFQNQLDELNVRLANSNSIEDRLKECKKKIRNNFNYHRGELSDKLVDAFVDKIVVGNDHIEWYMKLCGSNNGIHLGRIKITKDDAISYSKYYSDLSKVYLKEPLYVDIYI

SEQ ID NO: 887 - protein, 534 aa, unidentified
  source 1..534: note = uncultivated organism
MKDRVSSPRGRSPSAEPVARRVAIYTRKSTTMGLEQEFNSLDAQREACLAYVERQAGWRIVDARYDDGGFTGANIDRPAFTRLMQDAEAGKFDIVVVYKVDRLSRSLLDFVKVMERLNAAGVSFVSITQNFTTADAMGRLTMNMLMSFAEFEREMIAERTRDKIAMSRRKGKWTGGAVPFGYIARDKKLVPHELESLIVRDLFELFLQHRKSAVVAKLLNEQQKLPRGARLKAGRLLAWTTASVACVLKNPLYAGIISHDGERYRGEHPALVDEDTFERAERILSGKNRTPLTFHGTNPAYILRGLLRCGLCGAAMTPGSTRSARKTYRYYRCSTRDKHGPEGCPALRLPAGAIEEYVATRIAEAAFDGALADEVEASLTRRLDQRRKDLEELRAKLPGPIANYSANASRYVEELTRLDGKARELVEQRLNRETQQLAAAERQLNDASRAIDALESTQAEVKHVLGALRDFKLVWEAMTIENRGRLLRALLDRVVVDEASGRVDIHLVDFAADPDASGPDEPTNKSHEPREDAA

SEQ ID NO: 888 - protein, 533 aa, unidentified
  source 1..533: note = uncultivated organism
MAVRNVSVIPAKLMQELKGLGVTAKPRVCAYCRVSTNNEDQLSSYEAQVEHYTAYIQNNPAWEYSGIYADEGISGTNTKKRVEFNRMIEDCMAGKIDMVITKSISRFARNTLDTLQYVRQLKEKNIAIFFEKENVNTLDSKGEFLITLLGSLAQEESNSLSQATRMGIVFRFQEGKVKVNHNRFLGYTKDENGELIIVPDEAEVIRRIYREFLEGKSTLKIARGLQADGILTGSGRGKWWDTTVYQILKNEKYMGDALLQKTYTVDFLTKKRVKNKGIVQQYYVEDSHPPIVSKAEFAAVQAELVRRSSMRGYSKTGKSNFTSEYPFSGKLFCQNCGSKLRHTFFGTGKNKRGYWLCINHQMNGSKACNMRSLNEKHLEQAFVRAMNEVIGGKDTFVDKLMLNIYRGLETIEEYTVEQIDERLQELQREIISLVRLNSKTGLDTRVYDKEYSTLGAEIERMRERRQKLKDKQAEQVLRVNRIQEIEENLLAHENGLTKFDEDLFRRVVEKVKVQSMVEAVFVFKTGVEVLEIL

SEQ ID NO: 889 - protein, 550 aa, unidentified
  source 1..550: note = uncultivated organism
MQKQQTYRCAVYTRKSTDERLDMAFNSLDAQYEACAAYVKSQQGRGWTLIDKRYDDGGYSGGNLRRPALSELLKDIESGMVDIVVVYKIDRLSRSLTDFGDISRTFENHGVSFVSVTQQIDTSSASGRMMQNILMSFAQFEREISADRVRDKLYQSRKLGLWTGGPTPYGYRIEDKKLVVDAEAAEIVRKVFRRYIATASCLQVARELNDAGVKRPEVAGKAGDGVPVLWNSSHIWTILRNRVYTGKLVVKRTGESFDGVHERLVDDDLFEKAQRLLDDNRRAEAKGKRHSVLSPLKGLLRCGTCGGAMTPVFSNYKGAKNRRYIYYRCTRDAKQGEHTCPIRNIAADVVEKFVYSQLGPVLRRDDVVKMVSGGDDAKAEAYLAEIADLDKFWSKMVPAEKERLIHLLVKEVRLWPNKVEICLTLNGGADKVSVAVKLATNLGRQTFVVDCGNAVDGDETNPETAVEQTIRRSHKWLELLTSGTYHDRKSLAEALGLSNSYLGRILRFPFLSPIVVQKIMDGELPDISVTKLMANPSLLWSEQHRLLGID

SEQ ID NO: 890 - protein, 502 aa, unidentified
  source 1..502: note = uncultivated organism
MAVALYARKSVERENSVSCETQLEYCRAMLRPEERGEAVLCFVDNGCSGGNTDRPGFQEMMRLIESGEVGKVVVYRLDRISRSLSDFVGILQTFKARGVRFVSSQETFDTGSPYGEMIVKLLMVFAEFERQSIIGRVRQAYAYRSRAGFYMGGRRPYGFSIEESRLGGVPTKVYRPKNGETEQIMRIFTAYADRATTLRQLADEMNRISPPQTGKWSASRLSAILRNPIYVRADNGVYTYLLQSGCQIVGGAQAFDGLHGVQLYGRHTGESADGESEGIYAVVQRHEGLVPSDVWLACQAKLAQNRARGRAVSNRTSLLGGIVVCQGCGRTMTVTKGGRRKDGGQTRYFGCTGRLHRHICDGPAVPIYAESLEAAVEALLYARLARLEKRIPLSPPTAEVNALKNRLCEIAAAREALVALILGGRADAETLRGAGERALALAEAEKDAKRALAALESKTPRGVPLLSLWEAASAERKHAAACLLIERIEVEQGGGVTVKWNL

SEQ ID NO: 891 - protein, 527 aa, unidentified
  source 1..527: note = uncultivated organism
MMKKNDKVDSQEKKIVRCAIYTRKSSEEGLEQDFNSLDAQRESAEAYIASQQHEGWICLTDRYDDGGFTGGNIERPAIRRLLADIEAGNIDCVVVYKVDRLSRSLLDFARMMSIFEEHEVSFVSVTQQFNTTHSMGRLTLNILLSFAQFEREIISERTRDKIAASRRKGKWIGGRPVLGYDLARLPGGVKITVNKEEAECVRSIYEMYLEYESIAETRRRLDMLGWYNKSWTTKDGRAMGGQPFNKSTLFHLLTNITYLGKVKYRDQVYEGEHDAIVEEDLFNRVQMLMARNRGSGGSHKRNKYGALLKGLVRCKACGCAMSHHFASKGNKRYRYYVCVNAQKNGWNACPNPSLPAGELEAFVFQEIRALDYDDLFVRDAVLQVHRRLSDEIKTLDTHRKTVNRDLRDIQTRINEITSSPDIQNDKDKELSKLIDRQSVLEKKASKLDEEFNRINQRMIDDDEIIGAMETFDPIWAVLKPRERERLVHLLVHQVEYDGVNETISVTFQRSGMDSFTNGKETHEEVIA

SEQ ID NO: 892 - protein, 567 aa, unidentified
  source 1..567: note = uncultivated organism
MDIRSPMRVALYTRVSTEDQAREGYSLEVQSEYLLNFAKREKWQISSPEGSAKVYEDDGYSGYSLDRPAFEALMDDARRKKFDLILVYKLDRFSRRLRDILNILDELETLGIEFKSATEPYDTTTSSGKLMIQQLGSFAEFERNRIIERVFPGMIKGAQNGRWQGARYTPFGYRYDKELKKLVVCQDEAKLVKDIYRRYLAGDSACRIAGDLYNEGIHSRSGGKFHSKLICDILKNKVYLGKLVWNRNRYDTRTKTKDGTGRGYRYVQNSPSKVIEVDEVHEAIIDPETFDRVQKKRQSNTTYGGGYTRYKNRVYYLSGLLYCAECGMKYHGVMLDSNHLRKEKKPWYRCLSKSYPSVTCKNPQISAESLEKQLIDEILYPMALGFPVEDAAEEIYGEMLIKQSIKEPIEHYTAQHQLKRKRLDQNLKQQSELYDLYKANHMNIEVYRQKAAELRQEEMSLQKEIQNLKVKVIDRERGVEQRIRTQYFLKSLRERNYQFTESEKKEFMRIIFRKIVIQNKEIVSGQADMSEPWNFFYNRGLECQKKQLSKKRKSDRCVSVLKPSDVR

SEQ ID NO: 893 - protein, 558 aa, unidentified
  source 1..558: note = uncultivated organism
MGNIQKIRKIFHAAIYVRLSKEDGDVADAGKKESNSISNQKSLIRDFLRDKEDIEIVSERVDDGYSGSNFERPQFKLMMEDIKRGIVDCVVVKDLSRFGREYIDSGKYIERLFPALGVRFIAVNDHIDSLEDGRDDIVVPFKNLMNDAYCRDISIKIRSHLEVKRKNGDYIGAFTPYGYLKDEQDKNRLVPDTYAAGIVKEIFRMKLGGMSQTAIADYLNDHDVLSPMEYKHSLGIRIQDNFKTHEQAEWSAMSVRRILENEVYKGTLVQGKHTTPNHKVKKLVDKPEEEWVRIEKNHTPIIGERDFALVQKLLGMDTRTSPYETEVYVLSGIAVCGDCGAPMIKRDVPAGGKVYSYYICSRNNATKECGTHRIPREKLESLVLGVLQAHIQNILDMKRILEYVDTVPFQELDIQELENRREAKELEIQRCKEMRNLLYEDLKEGVVSKEDYAELYEGYNAKRRKAEDAVRAIQREIRDILESKTEKYQWLDYFTEHQNIDRLTRTAVVELVDRVKVFDKKHIEVVFQFDDCYQSMMKQIETTGCAVSVETAGRKEVV

SEQ ID NO: 894 - protein, 546 aa, unidentified
  source 1..546: note = uncultivated organism
MKTTRCAIYTRKSTEEGLKQDFNSLDAQREACEAYIKSQQHEGWQAVKAAYDDGGFSGGNMERPALKQLMADIKAGKVDTIVVYKIDRLTRSLADFAKMVDVFDAHKVSFVSVTQQFNTTTSMGRLTLNVLLSFAQFEREVTAERIRDKIAASKAKGMWMGGMVPLGYKAENRQLMPNPKEAKLVQHIFDEYLQLESVENLRNQLNDTGHCTRTGKRFHTGHLANILTNPVYIGKIKHKEKVYDGNHKPIINNKLWEKVQTLRQKSIRRHTHRVRAKDPSLLAGKLFDAGGHPMSPIHANKNGRRYRYYISQAIVQGKPLAEDSLSRIPAVELESIISQYIQKLLQQDDQLSHIVNEPSPFMRQRGKELAQHWEELKPSQTHIMLRTILSKAVLSKNQIEVRVSPVGLTAILKGEKHTTKASKHDLSHLIPIKLKPVAGGATYIFGESAPENREQNKELLRAVAHAVTGNRMLIERKISSQQELAQHFKMDERQWRRTLPLAWLAPNIIKLILEGKQPVDWTIQKLREAAKCSNWPDQHKSLQIPA

SEQ ID NO: 895 - protein, 503 aa, unidentified
  source 1..503: note = uncultivated organism
MQAIYVRQSVDKKDSISIETQIERCMVKLDTKEDFEVYNDKGISGKSTENRPGFQRMLSDLRTGNLSKIIVYKFDRISRSLYDFLKMQKEFSKYRVDLISCEESIDTSTTSGKLMLNILMSFSESEREVIQNRITDNYYARGAKGLYLGGYAAFGYNKIDIQIDGKKTYAFDENIDESPILKKIYTDYNNGNSLAEISRWLNDKKIPTRKNSPWNSTCLSRILRNPVYVKANADVYNYLVSLGATMNNSINEYTGMKGCYAYGNPDKRTGIKFSNLKNDFITLGMHKGIIDASLWLNVQSLLTIKKNHSNLGTGSLTWLQGLVKCSCGYTYYVKRCIGAKKEYRYLYCRGRKNNSCPYPRTMMPVEKIENIAEQELLLRLQNLKGESKLKVVKDTHEINAIKIEIAGINTKINNLIEQISEGTDLAIQYLNKHIDSLDSKKQSLLDEITKLELKENKKAQIRIDINDVTTNWQNYDLETKKEIAKEVIEKIVLEGKTVRVIFY

SEQ ID NO: 896 - protein, 532 aa, unidentified
  source 1..532: note = uncultivated organism
MKTFFNAAAYIRLSREDGDKAESDSIGNQRRLIADYVKEKEDLAVYDTYVDDGFTGTDFNRPSFRRMIDDIEAGKVNCVIVKDLSRFGRDYIDTGRYLERYFPERDVRFISVTDGIDSAKQAYDMLLPIKNIFNEQYARDISKKIHAAVRTKQKAGEFIGAFASYGYRKASADKNRLVVDAYAAEIVRRIFALYIRGCGKHRIAAILNEEGIVCPSEYKKINGENYRNARRLNSTSYWTYSTINRILQNEMYIGNMVQGRKHQQMRSRARTADRSEWIVVEGTHEAIIDKDTWEKTQELLRRRTRNMDLQRNTAVLAGFLKCGDCGRALVKKAYVPEHNGKKSESGVNYYCGTYVRSGRQYCTPHKIGYEVLESIILGDLKVMLQNKDNLKALVTGEVGSVAASDSREAAKITIQAELEKVRKLKKAVYEDYREELISKEEFVSYRQDYAQKEELLVRQLLCVEKKTGSAGENVFDTAWFQRLLEHREVEKLDRAVVVEMLHEIKVYENHRVKITYNFSGEMAPLFADIVDG

SEQ ID NO: 897 - protein, 526 aa, unidentified
  source 1..526: note = uncultivated organism
MRLFFVLEGGIAVKAAVYCRLSEEDKNKNCKSDDSESIKNQKALLTQYALDNGWDIYGVYSDDDYTGSDRRRPEFNRLLSDAREHKFDIVLCKTQSRFTRELELVEKYIHGLFPIWGIRFISIVDNADTENKGNKKSRQINGLVNEWYLEDMSDNIKSVLTNRRKNGFHIGSFALYGYKKDPDIKGHLIIDDEAAAVVRRVFELFAKGYGKTAIARMLNEKGIPNPTEYKRLHGLRYKHPARNQSSLWKYNAIASMLKNEIYIGNMVQGKYGSVSYKTKQNKQRPKDEWYIVEGTHEPIIERELWDRVQNMLTERTKPFSGGKIGIFTGKVRCAGCGHVMRSFKKSDGKHYLSCSTRFAAKAACEGACISVERLIKALLQELNRLSGEYLIKDGLEAQITTFEKTQELERTLLADISLYEKRMAEYEKGLCDAYMDKVRGNITADDFALLSKSISSDRERLKQMAQDAYKNLETLEKSKSSYGLIEKYAYPVSLNRETVEILVESVFIGKRIPGTRKVPIEIHWNF

SEQ ID NO: 898 - protein, 1283 aa, unidentified
  source 1..1283: note = uncultivated organism
MNEKDKAMWVHTLWDPLDEMHQSPLNSSKEGIRVAAYCRVSSGKKNVNSLENQVSYYSNYIYNKPNWKFVGVYMDDGISGGTIRHRPGFMRMLRHAKEGKIDLILTKSIARFSRNTQEFLEVIQELKDTGTTLYFEREGAEISKGVSSLVVETHAAMAQEYIESLSNSIKMSYRKRINEGLPHFNEPYGYNLVQSDTGAKLVIHEEEARVVRWVFDQFIEGRSYTDIAGEMIKKGIRTKKGNENWSSGKIGNIIKNISYTGNKQSSKKRKDLLTGKYIESESKGESFLILDSHPQIIAQETFDKAQMRVQSITKPRRAKKKKMENPLRSRMVCGRCGKSILMKGIYSYWCADAIISSDLCDAVNLKRFEPMEMGLQAIFSRMLGVKLEVQKEREKITFKVHDPKERSEAELNNDFLIMLRDLEKMLKRINQNDNFEFHRLKFFTEIEIATIRAQDETAAELREAYKVFEEKANRIEEDRKYREEALDWLKTTTDLKMFIEDMTIERVRAWILSLTVFSNKAFYVDWIDETQTIIGEEEIFRISEAFSKKKTEREKQIVSQNDLTSTSSKTTLIETSKKETVNIQSIKSKGEETVHTLKNKRNMTSYGSPPASFSMPDVVKLEDGLTIKDLDDLKNSILRNRMSKLQGEEKKKLRVAAYCRVSSLMDEQQLSFQTQLAYYNYKILSNPSWEFAGIYADEGISGTNTERRDDFNRMIKDAKAGKIDMILTKSVSRFGRNVVDVLDTLKDLNELEKPCICYFEKEGLKSNDPNSRLILSLMATVAEEEVLSLSNSISWGMQRLAQRGTVNRATDIYGYHIDKNRVWHIVEEEATVVRLLFEMYAEGKTIYEIMDYLKKKRIKTKKGNDRWHYNTIKIILENEKYIGDYEYQKYVSPKLLSDQGIKKNNGLLPKYYIEEHHEAIIEKELFERVQELMEENRRKDYVKKNKDGTAGRPCYYKKLICKECGHLVARYGEGDGTKHGGLWRCRNSSKISGSTCKVKESVLGYYLDYNFHKTICKLHESKRFRKWMNDYLESLELSVEEKTHMQNLEKEIKELNEKLYKAVDLQVSERGKDTTLINNLTNQIIDLRNQHTEYINRIEKKKDEENRLNRLVEASKNMKMLNAKQYHNMKPRIKKGDSLFSIKEKTNKYTLIDIEVNDHFPEALFEEHVLSATMDKKGNIKYRFADDFEFWIYYSNEDYKEELDEAIQETKLKELLNSKEVKKIKAYCKVPRKPKEIFEHLKLENRNQFNNRFIIPLCEAGKLVLIPGKNMYQNKYKWQKGKS

SEQ ID NO: 899 - protein, 584 aa, unidentified
  source 1..584: note = uncultivated organism
MGNEGKVLRAAIYCRKSSEEGLEQSFNSLHAQREACEAFITSQRQEGWRVLPSQYDDGGYSGGSMDRPALQQLLRDVKDGKINIIVVYKVDRLTRNLADFAKIIEILDAHGVSFVSVTQQFNTTTSMGRLTLNVLLSFAQFEREVTGERIRDKIAASKKKGMWMGGFPPLGYDVKDRKLIPNAKEAALVQKIFALYLELGCVSRLKGELDRTNVRSKIWKPRNGVRRGGARFSRGALYDLLQNRLYIGEVRHRKLWYPGLHAGIVPRELWDRVHSKMASNRECRVIRIREHSSSLLTGLIEDQKGNQFTPSFTVKNKRRYRYYVSRVTIENPGTKPQRPTRWPAKELETVVLDRVQSFLLSEAEVFGEYHGDTGEGTQELVSAAKDLASRWPRLSPGEISEFVSSCVARVIVNQNTVEVLLDKAALAKHLLGAAAGKIDTNPTQTTSRAVIHLRADAKLQRCGGEVCLLVPALGGESKVRSRPVPSLIKAIARAHAWYERLLQGDVGNCTALATETGLGDRYVSRVLRFAFLAPDIVESILDGTQPPDLTFAKMARDIPLSWAEQRDRFGFPPVPTPTLLSSRI

SEQ ID NO: 900 - protein, 562 aa, unidentified
  source 1..562: note = uncultivated organism
MNRVRCAIYTRKSTEQGLEQDFNSLDAQYAACSAYIASQASEGWALLPNRYDDGGISGGTLERPGLQALLADIAAGQIDIVVVYKVDRLTRSLLDFSKLVEAFDAAGVSFVSITQSFNTTTSMGRLTLNMLLSFAQFEREVTAERIKDKIAASKQRGIWMGGRPPLGYAARNRTLVIVEEEAELARSLFRRYLELGSVRQLLDVLNRDGIQMPDRTAANGRTLPGGPFTKTKLFTLLRNPIYAGLIPHGAKRYPGHHPRLIDDELWQAVQARLDANRDGEQQAPTEKRVSPLAGLVFAADGEPLIASHANKGKVRYRYYVSRHLTGPLEDRAHRATSMRLPARELEGLVQRALADRMADPFRLMQDCGAERLLSAMSADLDAKAQAVAEELRHSRAVAQALMRTAISRLVIHLDRVEMEIRPDVLLRKLGTDPGPVLPISMTIPVRVKRSGRAVRLITHDGQTASAAADPSILLGIAKGRDWWATLTADPKLSVRTLAQREGLDPGYVGRMLKLAFLDPKLVQQFVNGTAPAHITQRKLLRDGMIVPRWPQQRVALESTATN

SEQ ID NO: 901 - protein, 500 aa, unidentified
  source 1..500: note = uncultivated organism
MIAIYARKSVFREDSISIESQIEHCCYEAKGEPYIVYSDNGYSGKNTERPEYQHMIEDIKSGKIQKVIVYKLDRISRSILDFSNMMNLFQNKDVAFVSATEHFDTSSPMGRAMLNICIVFAQLERETIQQRVADAYVSRSQKGFYMGGRIPYGYTKTPITINGIKTSMYEIQPEEAEDIRLIYELYSNPTTSLGEVVRTLLTKLPVNRRGNAWCTARLSEMMRNPVYTFADKAIYDFYKSQGTNIVNPIEDFTGETSLYFYKGDNTNRKTWDLSGHTLVVAPHIGIVDSATWLICRRKLLNNHQVKYCKPKNSFLAGKIKCGHCGYSMSVRKSPRAKGFIKYFVDLGRSDYHVCSEVVKSLRVDDFEKEIVERIKTKLNSLNIQCNSEENAITGKIRSLNIQKEKLEEEIKNLINNLSATSNNIAMSYIEKRITELDKQIHEIDSVIQIERSKKQPNHGQIQDAVSKWDLLSFEDKRAVVELLIQKILVYKDHVEIIWHV

SEQ ID NO: 902 - protein, 548 aa, unidentified
  source 1..548: note = uncultivated organism
MKVAIYSRKSKYTGKGDSIGNQIQMCKDYITSIYPNEKISFTEYEDEGYTGAITDRPQFKKLMNDITKRNYDALICYRLDRISRNVADFSSTLSFLQNYNTNFISIKEQFDTSTPMGRAMIYIASVFAQLERETIAERVRDNMMELAKSGKWSGGRLPLGYDSETFSYTDENGKERKSVKLVPNEKELELVKLIYDTYLKEGSLHKTEVYFSINNIKSNKGILLEKTSLKVILQNPIYVKSTQRIMEYLENNSWNVYGEPDGVSGLLSYNKTSSIIKDGKYVKVPKHKEDWIAAVSNIPGIIDDDQWIKVQEQFKANKNTFPRLGKTNNALLTGKLKCALCKSNMRVVHGRVSKVTGEKFFYYSCALKTRSRSTLCSSKNVKADRIEDSVLTSLEKLGNNKTKFYNNLKKSLNTSTRNKNLKLEIEKLKSQIEDKQKLLNGLLDKLALAPDIEEIFLKRIKDIKSEINVLEKQIDELKDTISKNESVEFTLDLTKTLLDKCTNIRNLPFEVQKQVINGLIESIDYNSETDEVTVNFYNSEGSKKKLLL

SEQ ID NO: 903 - protein, 503 aa, unidentified
  source 1..503: note = uncultivated organism
MIGIYVRVSTTEQAVSGYSLDHQIEACIQKAGTNEVMRYIDDGYSGEFLERPDLERMRKDVRDGLIDKIICYDPDRLARKLMNQLIIDEEFRRKGVEVVFVNGEYAASPEGRLFFSLRGAISEFEKAKIKERTMSGRKGKAKKGKIVKNDHVYGYDFDSVKSEMVINEKEAEVVKFIFDAFTSPTSKFQGMNGIAKHLTETGVPTKKGGAVWHRQVVRQILMNETYTGMKIQNRWNTEGLLANKYNRSGEDKVKITERPKEEWIYSPSPVIIEKEQFEHAQELLKQSRRRYTKKSENQYLLSGLLRCSSCGNTMTGRVQNNWGTKVRYYSDRKNTAGAKNKGCGVSVKSDEVEGYVWSNIEMLLNNPEKLIAFQEVAATTETFEEKELKRLEQEIERTKKGRKRLITLITLSEEDLDLNEIKDQIKDLQTKEKNLQNQYTELQKEMEAEKKKTTNLDILKQAMDLYFVYKDKEMPFEIKQRIIATLVKEIRVHDKDTMEIITF

SEQ ID NO: 904 - protein, 514 aa, unidentified
  source 1..514: note = uncultivated organism
MKSTEILIKPNEEVKKRIAAYCRVSTDSMDQKNSFITQIKYYSNYVKTHPQYELVDIYADEGITGTSMKKRDEFKRMLNDCQKGKIDRIVTKSVSRFSRNANELISAIRMLKEMDISVFFEEQGIDTDKINVEMLITLPALSAQQESQNISDNVRWSYKKRMESGQYNTSCPAYGFRMINGELRIKEDEAEVVRRIFDLYLQGYGKQSIANILNKENPDSSRKWYVYGIDYILNNERYMGDAVLQKKYTTETLPFTRKRNRGEKAQYYVENSNVPIISKEIFNAVKQLQNDRKKSSYNRQVSLLSGKVKCTDCGKNFRKLTDKDKIYWVCSYRTTSRSECNTGRIPETDFYDAFTALMSKLKANKKYILDTLIKQIEMLKNRSNPEQESIYRINKEIADLSAKNHMLAKLHTKGILKDAEFTVQVTEISKKLQKLKEEHRKIISEDKNGELLERLNYLNEVITDYVDDLTFHKDIFQDIVESITVYGNDTLKFRLTGGLELTEKIYRRERSTSV

SEQ ID NO: 905 - protein, 516 aa, unidentified
  source 1..516: note = uncultivated organism
MKDIIARKAGVYARVSKEDVTRKKHSSSESIENQKRLAQIYAENSEDDIEIVSYYIDDGKTGTVTDRPAYQQLLQDAKNKKINMIIVKDFSRLSRNSVDSLKFIAYDIQKLNIRFVSLGEGFDSLYAQNGIDDLKMGFLAVLNSTYPEDISRKVSMNLDIKRQDGKFVGAFAPYGYKKDKINKYLLVIDKPAAITVKKIFYLFLEGMSKQSIAIYLNKQGILCPTEYKKKNHSNYKPAKKEYPFYIWTYSTIHKILSDEVYIGNLIQKKTKMIKVLEDNKSKRKKVPIEKGKEIKIKNTHKAIIEEETFQKVQQMMKTKRREIQQKQNTALFSGILKCYHCHRTLYYCYSNNVKGEKIYYYRCSSYKNASKIICTPHTIKEETLIDILQYILNILFILFFEKEQQICIKAQSKQNQITLQQQLKQEQKKYSEGKKRLLQAFSHGILEERDIIEYQNTYQKKIQKIKSSLQNIYKNSTFCEEEKLNRILLHYFVDTIYINENKEIIISFCFCSPFLF

SEQ ID NO: 906 - protein, 545 aa, unidentified
  source 1..545: note = uncultivated organism
MSRPGNGTTSAATEVRRCAVYTRKSTAVGLEQDFSSLDAQREACEQYVRSRERDGWRLLPEAYEDGGFTGANINRPGFQRLLEDVEAGRVDIVVVYKVDRLSRSLLDFAQVMERFNRAGAAFVSVTQNFSTADAMGRLTLNMLMSFAEFEREMIAERTRDKIAAARRRGKWTGGSVPLGYQVFDKKLVVDEIEAVVVRELFALYLEHGSALEVAHVLNDRGRATKRHRATNGRIRKARPWTKDAVLRVVKNALYAGLMPYGDEVHPGEHEAIVSEDTWRQAQVQLRRQTRRTATRPRNPDYLLRGLLRCACCGAAFTPATTRKGDRAYRYYRCITRDKQGRSACPAGPLPAAAIEDFVLARLHEATEGGALAADVRARCAACLAHDRAELHKEKAGLPRAIASLSAEGQQLVSKATALSGPAARLLDDRLEEVGHELARLQDRLAQVERRLAELDDLEAEAAWVADALDDFAALWKVMTPPNRYRLVHALVHEVLVDEPTGEITATLVDFGARLDPPDDPAHPPELPPEPARPSLRLVEPTEASP

SEQ ID NO: 907 - protein, 635 aa, unidentified
  source 1..635: note = uncultivated organism
MPEVKIRRCAIYTRKSTEEGLDRDFNSLDAQREAGENFIASQKMNGWQLLPDHYDDGGYSGGNTDRPALKQLMTDVVAGKIDTIVVYKMDRLSRSLLDFMNMSEFFEKHNVSFVSVTQDINTSTSSGRMMLNILMTFAEYERSIITERIIDKIAGAKRRGKFCGGCPILGYSMDNESKKLVIIPAEAQIVRETFDLYNQLGSAKEVARVLKERGYHSKEWTTRKGKIRPGAEIKPDLVYRILNNPLYVGRVSHKEKTYPGEHQAIISQDVWERTRELLESNLASSGRKNRTMDVPFKGLLRCGHCGGAMGITYTRKKNARYYYYLCRDDSKRIDSVCPLVRVAAGDLDRVVLRKLGELLSSPTILAKTQAAVANYYAAQADELRKQLVELEKIKAKLRASSGQPDIAADELTQLREQFRKVEGERATVEAELKEITCSMSGESVAEVLKSLEMLWGELFPAERYRLAHLLVGKITLFTDKMIIDVKTDGLKSLFRELHAVNPNDEVVENPDAEIISITVPIRLKHQANRRTLLLAGEELAEDQAAAANENLILGLAKAHVWFEMMLNSEVRTVQELADKVNVERSYVTRILNLVNLAPGIQSAILDGREPDGLTLKRLRNELPLDWRRQEGMFVS

SEQ ID NO: 908 - protein, 536 aa, unidentified
  source 1..536: note = uncultivated organism
MCKKRLQYRYENLDLENEVVIYEDEGFTGYNTKRPNFQRMLKDIKDNKIKCVICYRLDRISRNVSDFAEFKETFSQYDVTFISISEDFDTSTPMGNAMMMIASVFAQLERDTIAERIRDNMLELAKTGRWLGGNTPTGFKSKEVQKMTIDGKKKKLFRLTPIIEEVNVVKTIYDKYLHLKSQSSLETYMLKNDIKTKNGKHFSRWSLVNILTNPVYAVADKDTLEYFKQFDIEIFADEKDFDGTHGLMVYNKTEKKGKTNHVIKKDVSEWIVAIGKHKGVISGKNWVEVQRLLDKNADKRYRKPAGNNALLSGLLKCSYCGFFMRPKLKGKNDLDSKGNRKFDYMCSLKDKSRKTKCNCMNINGIEADNLVMQTIKDLFNPNHEFYMAIKTLLKSFDIAYDNNHELNLLKAEYKKNQSNINNLLDRIKYVDVSLINNISAEIKKLKNTNMEIEKQMKALTKDKNNFISDKEITSLALNILDTYFNTFDFLDLVHKRDLIKSLVSSVTSNGKDININLVGSEALNNNSIIPRCDSSK

SEQ ID NO: 909 - protein, 501 aa, unidentified
  source 1..501: note = uncultivated organism
MYDAIYTRQSVEKIDSISIESQLEYCKYETRENPYKQYIDRGYSGKDTNRPAFEEMLADIKQGKLARVVVYKLDRISRSILDFANMMEVFQKYNVEFVSSTEKFDTSTPIGRAMLNICIVFAQLERETIQKRVTDAYYSRCKRGFYMGGRIPYGFEKKDTMIDGIKTSMYVPVPEESEQMKLMYALYANPENSLGDIVTYLNENGIQQLRGGMWSSARISEMLRNPVYVQADADVYEFFRSQGANIINPVSDFTGYNACYLYKGTISATRKQCDLTDKEIVLAPHQGIVPSRDWIKCRMRCLNNRQSTKTCKPKNSWLAGKVKCGKCGYGLTIAKANTKWHRYFICAAKSATRGGKCAGTGGTVYADVLEDYLQKAIRERLSEFQTLSKETEACTRPKVNENKIRIAQIDREIDGLLSKVTGANAILMQYINEKVDALDAERKRLQEEALSLTYNQTESNDISNHVEKWEDAAFEDRQSVVDALIKVIHIADGKIEITWKI

SEQ ID NO: 910 - protein, 553 aa, unidentified
  source 1..553: note = uncultivated organism
MRLPLLWEQVLWSAQMNAVPHQKIRAAIYTRKSREEGLEQEFNSLDAQHEACAAYIASQRHEGWKHLKASYDDGGVSGGTMNRPALIRLLEDVDSGLVDMIVVYKIDRLTRSLADFAKLIDRLEAKGCSFVSVTQSFNTSTSMGRLTLNVLLSFAQFEREVTAERIRDKIAASKKKGMWMGGRVPWGYAIHSDPKVQSLEVHSEHAGDIRQIFDLYEELKCLSQLKLRVDGLWPERNYSRGRIYNILINPIYIGKIRHKTEVYEGLHQGIIDADQFDRVQERLKLKSAIKRGTHPKRGLSACLIGKIYDETGDRLTPSNTKRDGRVHRYYYSNRLITKGADPTGWRIRADTLELALSTMLKTYLIGACKNLRLKADMKVHEVADYICQFEGLSIKGTLDLLQRVDLTKGILRISVNADGLTPLLNCPSNTFEPDHLIFEEPISFQRRQNGTKLIWAQYQPSPRTHLIKALHDAHDWLNQIKSGKQIAHIKQQTGLLDRTIWKRMRLACLSPKVQKAILAGTLHHDITIKTLESKAVPENWAEQEALYIGKVPC

SEQ ID NO: 911 - protein, 545 aa, unidentified
  source 1..545: note = uncultivated organism
MTKIKCAIYVRKSTEKGLELEFNSLHNQEEACRNYIMSQSFQGWEHYKTYTDGGISGGTMERPALKQMLDDIGAGLIQVVVVYKVDRLSRSIMDFHNMMREFDRHNCNFVSITQAFDTSTSMGKLTLNMLLSFAQFEREVSAERVRDKIRASKAKGFWTGGIPPLGYDVVNKKLVPNAAEAATVRRIFEKYLELKSLGNLHHWCIENNITNKQWTSQKGETMGGTVFCKHALNNLLQNPIYIGRVRNKKTNETYAGLHDTIIQTSVFNQVQEMLTENNNRNTSQCIYGQYMLRGKIFDMAGNIFKTKSTSKSKARHYCRPGLYLPANDIDRITCETVQNMLDANISELIPHDIAQNWKAIDFANMTYEIRTRLLSAMLDKVVYNNNRLTLYINITPIDIGFQTPEYTNPNAHSNLLNVCKSNDGKQIIIERAIVINNRVSTNQYDACGRTIMTTKENNLQLIRALAYGWRYKSMFERGQTIGQITKVEHKAERTIYKYLALAYLSPKIITTILDGNVPISVNLQNLFAISAKHSTFKDQEREFYN

SEQ ID NO: 912 - protein, 572 aa, unidentified
  source 1..572: note = uncultivated organism
MIFVAVYGIYSRKSKFTGKGESIENQLELCKRYIQNKYGNNEINDNPDTDINIVVYEDEGYSGKNTARPEFQRMMADIRMRKLNYVVCYRLDRISRNVGDFAQTVENLEQYKVSFICIKEQFDTTTPMGKAMMNMAAVFAQLERETIAERIRDNMLHLAKTGRWLGGTTPLGFKSEQVEKMTIEGKIKTSFKLVPIQEELQIVELIFMTFLKLSSVTGVESYLIKNDIKTRRNRNFVPLTIKEILSNPVYCIADANIYEYFEEHGCTIGHEKSRFDGRYGVSAYNRTSSEGKYQSKRPLNEWIIAVGKHRGIIYSGDWLTVQDILHKNRMYTFKYNPKNKASLLSGLLYCKSCGAQMRPRINSRSKADDKGNRRFYYMCEMKRISNKMKCAIENLPGNALDAAICKRILEYGETGGKINNKVTALKEQTANGESVFQKEIKFLKRQIRETETEIRNLIGALGKSPSDSYVYQYTEQQVKELHERITLYKRELVQKEKDENQTVDFDEQIQAVLNVLTAFKSTYEYAANEEKKQLLHSMVERVEWDGEKIDVFMYGVPLSRHQDNGKAYRAPY

SEQ ID NO: 913 - protein, 567 aa, unidentified
  source 1..567: note = uncultivated organism
MPGGQLDACLLSTGSSWAMKHATHHSTKTETKEPGRAAIYLRVSTDEQADQYGLDLQRRKCTELCSMKNWEVTAVYVDPGYSGATMKRPGLEQLLEDSHNGKWDVVVVYKVDRLSRSTRNLLAICEDYLRPNEKDLASCLESIDTHTTMGRSFLNILAVFAEMERETIRERTDGGRWEAARKGSWAAGGVPFGYRKEKLPDDRKVLVIEEQEAEVVRKMFKWHVTEGIGSPGIAERLNAMGIPTPSRMRGESRQGQFWQGSQVGRMLNNTVYMGEAYLHRCQGRMAHTHHPRETWIRIEVPAIVSRRTFEKGRKIRANNRRVGGGQSTVITPYLLRDVLYCGHCGAHMRGMRSNSGAGIRRYYRCGRQARQRASDHPDRCVLPYTPAPALEEVVWQRLRSAILDPDSLQSLAQLDEVDAEQAQAEIATLEARLAQIEKQRERLRWLFTSQTISFEELETDLATLDKQRRDVNERKASLETKLVQQQDLKARLETLYGLLEALRSKIDTLTFDERRALLSDMGLRVVVHPDRSVRIDALIPVPERGGFVAPREEGRTPLRCRRPSGRG

SEQ ID NO: 914 - protein, 519 aa, unidentified
  source 1..519: note = uncultivated organism
MRLSEKGITRQKEDITALAGRLGVAVSEWYSENDTTAFKKRRVVLPNGRSVWRVYRPEFRQMLADYEDGKIDGIIFYDIDRLARQPRDLEDLIDLVEYYKRPVETVTGNIDLRTSNGRAMARVLVAMANKSSEDTARRVARARLQIAQEGRGGRFSGRQRRFGYREDGTLNPAEAEVIQEAAKGFLAGQSWKGLVKFFEESGQRPVIARSWSQVSVRQILLSPSVAGIAVYNGTLRKENQEGRPRELYSDPDGVALRDASGKYIMGNWQPVLTEKQWKELVTESEGRKKGQVKSAKGTRKYLLTGFLRCGRIRDDGTMCNRSLCGFFRPYESGTIAYQYRCPDKSNGGCGGIARNMNKLDKLIEELLFAHIAAHAPTDSELTTVPDENDPDAMDLASVQERLFSLRKGYAAVPQTVSDDTMFNIVPQLEASERELKTKLAKKARTRAGRLARSKSVEDVRREWDEAAGDVGIRRAILSRYLKAVVIRKSSKHGPGNLDYEAIEPVWREEGDVMPNDNIA

SEQ ID NO: 915 - protein, 524 aa, unidentified
  source 1..524: note = uncultivated organism
MAQPESSLATDTRQDAIYARQSKDKKDSISIETQIEHAVKEAGGGASLLKPYVDKGFSGKDTNRPAFQRLIKDIQKGCIKRVIVYKLDRFSRSLPDFSDTMKLFEKHGVTFVSTKEKFDTSTAIGNAMLSIVMVFAQFERETIQERITDNFHARVSQGWGMGGVAPYGLAREPFIYRGIHTKVFVGKEPELTTLCRLFSQYAKTDITLGRLTKQLNEEGIPSPGNSFWDSAKISRILHNPIYVQADADVYRFYKAKGAAIINSVDEFDGQHSCYLYGKWDKAQRKSADYGGLSLALSLSEGIVDADTFLRVQAKLDANRQLRRSGQSKHSWLSGLTKCGKCGYTMTVANSGKGSQPRKVFYCRGRSQYHVCCGHSRVFHVDEVQAAVEARLMENIRGKRGLQLIRRARSDERDAQYKINLVKLEGQIENLVQAVAEGDAMVGKYLKPKLAELDAQRAALEASYQAYKYRMGPALAQYPLAEMEDCWPRLPLEQKKEIAAIFMERILFYDDGLEIIWRHQFDSEA

SEQ ID NO: 916 - protein, 576 aa, unidentified
  source 1..576: note = uncultivated organism
MAILDEIRKRKGGLQAAVYARYSSDMQREESIEAQLRAVSFFAEKEKIEIVGFYIDRAKSATTAMRPELQRMLIAAESRTFDIVLVHKLDRFARNRYDSIVLREELKKSNVIVLSVIENLDGSPESLILESVLEGMNEYYSRNLAREIEKGKTENAYQGKHNGGIAPLGYNVIKETGQLVINEDEAEIVRYIFDRVANRVSYKALLTECRARGWKSKVGGELTVSSLYTILRNEKYIGVYVYNKSAPKAANGKRNGHSYKNPDEVIRVIDAIPPILDSNLFATVQEQLDRRRVRSGEGRAKRLYLLSGKLICAYCGARMVGNTRNPIKRTTPYSSYRCGSRQKGIKCECREVNKEMIEHRVLSALADTLLDDNASDKIVALYEEHLKANSLPFQAHKKSLQTRKCVVSKEINNLVQALADGGSNSVLKRINELETEQERLNSLIIEMVELEKNRISEQEIRKRISLAREQLRSGSLSCMKRIVDETISYISVSNERIDIFLTFWSRKNLAAAPRGAPQGYLESQPLRRDVFGGEGATPYTNTSDYLYVIRIVREPVQNPTKHRKLLNALFRQMDRQ

SEQ ID NO: 917 - protein, 598 aa, unidentified
  source 1..598: note = uncultivated organism
MKRIAIYSRKSKYTGKGDSIENQIEMCKEYISKFISEDVQFSIYEDEGFSGGNLDRPNFKRLIRDIKSNNIDILVCYRLDRISRNVSDFSSTLELLQAHNCAFISIKEQFDTTSPMGRAMIYISSVFAQLERETIAERVRDNMLEMAKNGKWTGGKIPIGFTSKKIKYVDDEGNMRQKNSLVQNEEELKFVKFLYEKYLELGSLHKLECYISENNIRSKSGILFEKSTLKIILQNPIYVKADEDVIEYLKNNTWTIYGEVDNEHSLLTYNKTKQTKLNGKNVKTKNDISERFAAISSIKGYLESKLWLDVQKQFDKNRETFPRLGKTHNALLVGKLRCGKCNEYMLVQHGRVNKDGKKLFYYLCSLKRKSHGKLCNNNNAKTEELEKIVILSSKNIGLNKKLYLEAIKQHNDSLLNENELEIEKTTLLKELEENKIKVDKAVDVLLASNDPDATPILLEKIKILKRNSDVIQDKLNNLEIAYKKAKIEKINIELIESLVDKCAIIDSMTRDKQKELIDNLIDTIYWYGDGNHSGKIRIKFIGTDEESDEIEINEDSINKLLQNETPCTCKAYDYLLSLRKTKKNKRLRTCKICRPLCR

SEQ ID NO: 918 - protein, 572 aa, unidentified
  source 1..572: note = uncultivated organism
MNIANKKHRAGLYARVSSQEQVNEGVSIDAQMAALRAYSKSQEWEVVDEYIDGGFSGGTDDRPALKRLIIDANRGRFDIIAVCKLDRFFRNLRLLLNYLHNFEQLDIKFISAQEGLDTSTPYGRFAVQIMGVIAEFERGRIGERVKDSRKYLVDQGRWPGGRTLYGYRWLSDKKQWEIISEKAKVVRLIYNLYINRKMGIESIVATLNRNGVSTHQGTSWRFSTVRSILSHPGYQGQHKTAKAMPVIIDENIWQKAQQRKEESRRILAKPKNWFLQGMCFCGRCGHVLRCTQKKPGATRYYACHGRIHADPSQESSQRCKLPFIRADWLEQAVWEKVKDVLNNSDKMTECVNKALTDLEARRDEIDEENSDIESKLEIIRAKQERLGMAFTDGAVHEPAYKSKLKRLKNEEQFLLRSQQEINPEQLGKIAYLNFCIETVKEILDHGSIHITDFGMMGNLVEDNSHISGITDFIIGSQYLPDNPLEEHSSSEKQESLIRNRRALLQMFNIKVVAYPERVEIQGTIPTKVLENRNMRRKPDIAPIISSPSTKTERGSGGEVIYYAIAKNPVLGY

SEQ ID NO: 919 - protein, 590 aa, unidentified
  source 1..590: note = uncultivated organism
MSRDQRTATHCAIYTRKSSEEGLEQSFNSLDAQREACEAFIASQRHEGWRAMPTRYDDGGYSGGTIERPALKRLLNDIAANKINVIVVYKVDRLTRSLTDFAKIVEALDAKGVSFVSVTQQFNTTSSMGRLTLNVLLSFAQFEREVTGERIRDKIAASKRKGMWMGGPVPIGYDLEARKLVPNTKEAALVCKIFSLYLELGCVSRLALRLAREKIRSKVWITKAGIRLGGNAFARGALYDLLQNRLYIGEIRHRDQWYAGEHQGIVPRELWDKVQAQMNGNRKKRHDHIRERSSSLLTGLLVDGTGNRFTPSFTFKKRRRYRYYVSQLSVRNPATKFNGPIRLPAREIENRVTEKLLSFLKSDAEVFDRLGAAAESPAASGQLVAAAKKLALRWPSFRSEELRDLLASFLRRIIIQENNIEVLISRADLRQVLEKGDDFVLANLDRPYKAIHPDDLICLTIEAKLKRSGGEVHLVVPPNSGGGSSPQPNPSLMKAVARARTWYERVLEGKSSNQRSLTLHAGLTRRYIGKVFGCAFLAPDIVEAILEGRQPRDLSFKKLCAHIPLSWIEQRAQFGFPDQSKRLARESRLQ

SEQ ID NO: 920 - protein, 582 aa, unidentified
  source 1..582: note = uncultivated organism
MLLALYARVSTQRQENEGTIESQIEDIKLKAEAAGHIIVQEYLDDGWSGDMLARPALDRLRDDADKNIWEGVMAYDQDRIARRYSYQEFVIDELEEKGLKVLFCTSSRPQNGEEKILQGVKGLFAEYERLKIAERMRRGKLHKARSGHVVGTMAPYGYTYIPKQGDKNGYYKINLAEAETVKMIFEWVAFEGKTIKGVARGLMELGIKPRRSKRGVWNSSTITRMLQNETYIGKSYFNKSESVVPKNPIKDTKYKKIKKTSRVMRPEEEWIEIPVPRIISDDLFKKTRARLAQNYKYRPRNKKYNYLLNSMIYCTCGKPRTGDAVQKGKHLYYRCCNRIYSHPLPPTCNEKNISAEIVDKLVWQRVSQFMSNSDLIRGYAEKWLESKYDKTNDTQDSVDTLKHALEKIKKEEDRYVKAFGAGVISEHQLKDRVDEINDNRTALQKQIRDKVQRIKDNTVNVPEPQQIDAFCKQAQRVLTTLSFKTKQEILRNVLDKVVANQEELQVYGYLPVREESYVEVHSINRNCEDTIRLFLYEPVKVLIPFEKTIVLPPPRKGRIIVERDTLGRIVHSSVPNISVAAD

SEQ ID NO: 921 - protein, 546 aa, unidentified
  source 1..546: note = uncultivated organism
MKIFIYSRKSKWTGRGESVENQVQMCREYIERNIEGARDAEIEVYEDEGYSGKNTNRPEFQRMMKKMKAGDCGYLVCYKLDRIGRNIIDIASLVEELNKLNISFISIKENFDTSTPLGKTMLYIAGIFAQMEREQIAERIKDNMSMLARDGRWLGGNTPLGFSSQKEEKVVVGDKVKTSYRLQIKEDEIETVRFIFKEYEEKQALHKVVEYFLKHDIRSRRGNEYTNDRVKAILTNPVYCTADEAAYDYYDSLGCQLCFDRKDADGSRGLIAYARTSSTVYTNKVNPPKEWIIAIGNHKGVIPGEVFVKIQKLVGANSVKGESFRKVRNEIALLSGILYCSCGHAMRPKYYNVRQVLEDGTRKFSYICPYKDDTHGEKCNVPNVPGNDLDLEICKQLFAYAEPGSPVSNLLKDMKKNISDSKEESFDEETVLEKAIAEKEKRMERLLQTLTEAGRSPEFISRVDSEIARLSKECQDMKAEAKKIENKGGFSKIQISQVDLLISELRNFKEEFNSLSVPKKREYLKLLLDKVVWDGDKAHIFLSGSH

SEQ ID NO: 922 - protein, 549 aa, unidentified
  source 1..549: note = uncultivated organism
MARKSRKHADVQTEAAYRAALYVRTAFYIRLSVEDNKKHGYSLETQRLILEDYAARYPEMEICGTYVDNGATGTNFDRPGFRQMLADIEAGKINCVIVKDLSRLGRNVIDTGYYIERYFPANKVRFISVNDNFDTDNPDNMFGGIVLPLKNMINEAYSIDIGKKIKAQARQSMRDGEYIGGRAPYGYKKDPANCHKLLVDEEAAAVVRQIFEWAHHKAGLNDIVRRLNDAGILPPSNYKQAQGLISHDNLIGSGRWQTRTVQKILDSEIYTGDLVQGKTKIIDHRQVKAGADNLVVVHGTHEAIISREMFEAVASYRRQVAKDSKKSSQIPYTPNIFKGRIFCGQCGISLHRQRNRGIYHYRCITRNRVRKDACVVVSIKERDLTAAVLEILRRQLGTLVDHYLELRKNGAFLKARNSRITAEILSLKQDLEKNRRFLRGLYENLIQGTLTNEEYFTLKAGYEAKISTDRERAAALEAGLSKLDSELKQYDDLARDAQTLKAGCRLTVDLVEKLVERIDVFQDKQIRVKPRFQNELAGLEEVLGECKSM

SEQ ID NO: 923 - protein, 634 aa, unidentified
  source 1..634: note = uncultivated organism
MERVIQKVQFPMPKQPKLKRVAAYARVSNGKDAMLHSLSAQVSYYSKLIQNHRGWLYCGVYADEALTGTKDSRQNFQKMLAECRAGNLDLILTKSISRFARNTVTLLETVRELKDMGVDVYFEEQNIHTMSADGELMLTILASYAQEESLSASENKKWQIRRDFEQGKIGGIVILGYRRTKDGSLEIVPEEAETVKMIFADYLSGMGKRDWKFVSVYADEGVSGCNTAKREGFNRMIKDALDGKIDLIVTKSVSCFARNTVDSLTTVRKLKEKGIEVYFEKENIYTLDSKGELLITIMSSLAQEESRSISENVTWGQRKRFADGKVSLPYKHFLGYKRGEVGLPEIVPEEAEIVRLIYRSFINGMTPYRIAKILTEKGIPTPAGKIKWQSSTIESILTNKKYNGAALLQKKFTVDFLTKKTKINEGEVPQYYVEHSHEAIISPEEFELVQAEFLRRKSLGKQYNSKSIFAARIICGDCGDIYGSKVWHSTSKYRRVIWQCNHKFDGTCQCNTPHLYEDTAKEKFLSACNQLFANRSEVLENCLMMQELLTDCSELDEKWKTVTQEMEIVAELTRKYIMENSMTVQNQEEYNTHYNALMERYEKAKAKAVSLQQKKEERLAKRDLIGGFMSEFAQ

SEQ ID NO: 924 - protein, 540 aa, unidentified
  source 1..540: note = uncultivated organism
MKTPAVRPVRCAIYTRVSTDHGLDQEFNSLDAQYDAASAYIKSQAHAGWTLIRSRYDDGGYSGGSTDRPDLQKLLDDIRGRKLDVVVVYKVDRLTRSLADFAKLVELFDAYGVSFVSVTQQFNTTTSMGRLTLNVLLSFAQFEREVTSERIRDKIAASKRKGIWVGGTLPLGYHMKDGKIAVIEDEAQRVRQIYRRYLELGGVNALVRDLRERNFRSKSRLLATGATRGDVLFGRGALFYLLRNRFYIGEVKYRDEILPGEQPAIMDRALFDAVQQKLTDQWTALSTVRNATDHLLTGLLFDDVGHRMVPTHATKSGVRYRYYVSLPHLHGESKTASVGSVSRVPATDIEDVIVKSLQEHLIAQKEKPASSDAQIERRKMLQDSITRIDVHEDHLAIRLRSADDEQTSDSTGDDHLLSIPWQKPPSKRARQILLPRGIPRNEVRPTRIERRARLVSAIARGRRWLDEIVSGSVTDVQQIAARQKCSVRQVNMTISLAFLAPDLVRAAVEGRLPRGVGVERLRDAPAEWGQQFEALGLNPQ

SEQ ID NO: 925 - protein, 506 aa, unidentified
  source 1..506: note = uncultivated organism
MRSAAGHEVNRAKSVGIWIRVSTEDQARGESPEHHEKRARDYAELKAWRVREVYHLEAVSGKSVMGQPETQRMLADIASGHITGLVFSKLARLARNTRELLEFADIFLAQGADLISLHESIDTTTPAGRLFYTMIAAMAQWEREEIAERVAASIPVRAKLGKPLGGQAPFGYEWKDRHLVPHPEEAPVRKLIYELFLQHQRKKTVARLLNDAGHRTRTGARFSDTTVDRLLRDSTAKGERRANYTKSLGDNKGWVMKPESEWVLTPVEPIVTEELWDQCNLSLRDRANGKKPARKPVHLFAGLAYCTCGQKMYVPSNSPKYICYRCRNKIPVTDLEGVFHEQLKSFFFSSSEITAYLEQADQTIKEKQELLGTLETEAQKTKREMDKLYNLYLADEISREGFGDRYHPLEEREKQIADQMPHLQGEIDFLKVQYLSSDEILTEARDVYSRWLELEQAEKRKIIENIMEKIVIGKEDVAISLCYLPSSAEIMAERQHNLMDSSRRQA

SEQ ID NO: 926 - protein, 525 aa, unidentified
  source 1..525: note = uncultivated organism
MNSPRQTMVSTPPSIRCAIYTRKSTEEGLDQQFNSLDAQRDSSEAFIASQQHEGWLVNAERYDDGGFSGGNTERPAFKRLIDDIEAGKIDCVVVYKVDRLSRSLLDFAKVMEVFDKYGVSFVSVTQQFNTTHSMGRLTLNILLSFAQFEREIIGERIRDKLAAQSKRGQWTGGYPVLGYDIDRSERTPRLVVNADEATRVRRIFSLYLELKALMQVSEELERRGWCNKVWQTKKGTAKGGRAFDKCSLHAMLTNPIYAGKIKHKTDIYEGQHEAIIDEGIFEQVQLQLRTNGHNRGNRLPGKNGGLLKGLIRCPYCNVAMVHNITKKKSIAYRYYTCVRAIKRGRKACQHPSLPAGEIEAAVVDQVRAIAGDEGLRDEIVRQATEAVADQKEEFETQRIQLTRQLSRDHAEIRRVVLVQDANSSTTARMADLQQRIEAAERSLVVANKRIAEIDRQQVSAVDVTEAFTDFDRVWSSLTIREQSELLGLLVARVEFDQSDCTIEISFHSSGIASLEDLVLKSEEAA

SEQ ID NO: 927 - protein, 541 aa, unidentified
  source 1..541: note = uncultivated organism
MIVALYARVSTTKQAEKDLSIPDQLRQMKEWCKARHYNIAVEYIEAGASATDDRRPVFQQMISEACTSPPPFDAIIVHSLSRFFRDMIEFGLYERRLKKHGVVVLSMTQQTSDDPAGEMARRIFSLFDEYQSKENGKHTLRAMKENARQGNFNGSRTPYGYRKQELDIQGNKGKKKRLEVDPVEAATVKKIFQLHINGHQGQQLGVRGIAAYLNDRGLTMRGNRWRKTFIHQMLTNRLYLGEYIFNKTEAKTRRIKPESEWITVNVEPIIQPEIFEQVNLKLEEHSPAKIPPRVANSPTLLTGFIKCGSCGASMTIATGKGGRYRYYKCSRKINDLSSEKRCQNSNVSMEKLDNLILQTVAEKVFTPERVEVMMKELQANLKHAHSDQHEQIRQLSKELEEIKQQTDKLFEAVEKGFLPLNSSLQERSHRHEVRRQEILVELASLRRQKEMPMTKLGKKHIAAFCAALKERLCDKASNFGKEYLKLLVNEIRVDKKEVHLSGSYSALASALSISTKPTLETVPSFVPIWLPNPDSNQGQGG

SEQ ID NO: 928 - protein, 555 aa, unidentified
  source 1..555: note = uncultivated organism
MSNSKIAIYARKSVSTEKGESITNQIETCKNYATSILNAEPNQLVIYQDDGYSGKNLARPQFQKMFLDIKKGGYSHIICYRLDRISRSVSDFSGLVKELQNINVHFVSVKEQFDTSSPTSKAMMYISAVFAEMERETIRERVIDNMTALTTTGRFLGGKAPDGYIKHKVETTDSTGKKKKYNILVVDEERAKQVQDIFQKYLNWQSIKKIETYYAQNSIYNYTGYQYKCIGLRRILTNPCYCSADENAYNYFKELGCKLMMPKEAFNGEFGVTVYMRHKMTLNKNNRKQVIDRSPEDWLIYVGFHKPLISSSDYIKTQEIIYNRRSLSIRKPIGTHGIFSGMLRCGNCGDYMRPSNVALDENGAYNGKRFYYICENKSVSARHNCNIKNIRGDRFDIELIEKIERLLNNNASIVVKINSLKNVKLNATKDINTLKKNINTEILKKQQAISNLIMKLSTSDDILQKYITKQVNELDNEIQELNIKLKKIDDNEILNAKEKVEIERIDSIIEKIRNGALRCEIKEPEDMLTIRNSLKEIIDTIVWDGKTAVINFKKI

SEQ ID NO: 929 - protein, 550 aa, unidentified
  source 1..550: note = uncultivated organism
METTNLIQYNAAAYVRLSKEDLTSISGARTESNSISNQKQLILDFVKDKADITIVSIREDDGYTGTDYDRPDFQRMMDDIRAGIVNCVIVKDLSRFGREYINAGKYIDRLFPYYGVRLISINDGIDTITRSSSDDFNIMVKNLMNDNYCRDISIKIRSQLQVKRKNGEFIGAFAPYGYEKSEEDKNKLVIDVYAAEVVRDIFRWKLEGLNPDTIARKLNEQGVLSPMEYKKSRGLSYKTSFKTKSKAQWVPMAVRRILTNPVYVGTLVQGIRTRPNYKIKTVTVNEEEKWAIFENAHEAIIKPKIFLLVQRLLELDTRTSPNEEGVFPLAGLLYCSDCKGPMIRKTQTASGKKFYYYVCGHHKKTGKCSTHRISKNQLEDTVLKLLQEHIRLLMELDTCLQTIRSAPMRRLSIRKAEERLLAVEAEIDRYRRLKMSAYEDMKDGILSKDDYLDIKEQYETRIADAQLAEEQVRREINLYLENGNAPQQWIQDFLEYRNIQSLTRSVAVECIESIVIYEDKRIELTFTHMQDYQELVSQVQDYYLEQKGAS

SEQ ID NO: 930 - protein, 508 aa, unidentified
  source 1..508: note = uncultivated organism
MEDVLTTEYDGCGRCLVAVRRLSRKTDKTSSPQRQGDQDLQAAADAGGHIIAWADDWEVSGATDPMTRKGLGPWLRGEMGPYDGIVAPTVDRVGRNVRDTLNTQELLTSEDRVVVTADHVGVWDFSDPNQEHEWLAKAWGSQMELRAIQKRNWDETIRARNAGEPKQRPSYGYMYVRLAPMAKIDHVALDPVGAEIIREVARRILADETGKITIGTEAVRLTREGIPNPGDRRAQLYGRPMKGGPWTGHTLKHILCSEAALGYLMHGGKAVLGADGRPVRIAEPLWDRATHDALVQATAPKRDGKRAPKGMRLLTGTFFCGNCGARLHVTGRGNSRYAYECTARIRGILASAGCKPAPAIALTAADALVSEWFLARYGSGEVMRKIYDPGTGHAAQIAELEATRTRLREDRQAGLYDLAEDAEWFRTEYRRLGEEISALKALPERKPGMRLVPTGRTIAQEWDAADNARRREMLAEFEVRVVLHPTGHGPRVAITGMEISPNGFELAD

SEQ ID NO: 931 - protein, 550 aa, unidentified
  source 1..550: note = uncultivated organism
MPANPKAPNNGTIPKPPLRCGVYTRKSTEEGLDQEFNSLDAQRESAESFISSQRHEGWIALPQHYADGGYTGANMDRPALRRLLEDVQTGEVNCVVVYKVDRLTRSLLDFSKIMEVLDRHGATFVSVTQQFNTTSSLGRLTLNILLSFAQFEREMISERTRDKMSAARRKGKWVGGGLALGYDCAPQRRALVVNEGEARQVREMFKLYLDLGSLIPAVQELARRGWRMKSWTTREGRRIGGGPFNKATLHYLLTNVIYTGRVNYKGEIYPGEHPRIVDDETWNRVQEQLNRNGHRGGRNVRNKYGALLKGLIGCGSCGVGMTHTYVRKDGGKLYRYYVCINAHQRGWNTCQTRSVSAPMIEGAVVQQLRGVARNPAMLSEVLRQLEQQRREGSADLNKGKAEVEKERREVASEIARTAKLVVGKGRQGESATAKLADLQERLAELEHRRVSVVREIDNLNSRFADPGEVQQALEKFEPLWEHLTTWEQERFVRALVSEVKYDGRTETVTVGFRSSGIKELCSIAVPVTEEPTDERKQTRNPIQTSSFAGH

SEQ ID NO: 932 - protein, 566 aa, unidentified
  source 1..566: note = uncultivated organism
MRAKKELHEPKSRPVGIWIRVSTEDQAQGDSPAHHEARARLYAQAKGWDVREVYNLAGVSGKAVSEHPEAKRMIAGVKSGHIKALIFSKLARLARNTRELLQFSDTFKAHGADLVSLEDSIDTSTPAGLMFYTVQAALSQWEREEIAARVKASVPIRAKLGKPLSGQMPFGYMRKDGKVVPNPDEAPVRKLMYELFAETRRKKAVARILNERGYKSPSGKTWTYTTVNRLLRDTTAKGQYRQNYTTSGVKPGSIEYKPESEWVIHEVEPIVSVELWEACNAILEGQRTSRKALGRSPAHLFSGLAFCAACEQKMYVPSRKPFAYRCWHCNVRMTEDDLETIYHAQLKGFLFSDQDIAAQMDALDGVITAKGERVRHLERERVAVKSEMEKAYQLYLADQISPAGFGERNRPLEVRLAKIDEELPAEQAAIDVLRINRLSRDQILAEARSLHTRWPELPLEQKRQIVETITDRIVIGKQDIDIHLHYVPSPAIEPVEPNGQAVQAGKPKVSGSAKALNKATQEFGLVRGRLGGTLTTSNGPSSISQARAVSGSSASTISLMSRRPQG

SEQ ID NO: 933 - protein, 557 aa, unidentified
  source 1..557: note = uncultivated organism
MNRCAVYTRKSTEEGLEQDFNSLHAQREACEAYIKSQQHEGWRLVRKHYDDGGVSGGTMNRPALQELLAAVERREVDIIVVYKVDRLTRSLADFAKIVELLDHNGGSFVSVTQQFNTTNSMGRLTLNVLLSFAQFEREVTAERIRDKIAASKKKGLWMGGPPPLGYDVRDKKLVINRTEAQTVRQLFDLYVELGTVRRLKDEADRLGILTKKRKSKSGKETGGKPFTRGNLYQLLANPLYIGRVRHKEETYPGAHKAIIDQATWDAAQRILAGNAVERTSPTNARAPFLLTGKAYDETGDLMVQSQCDKKGKRYRYYISKRLMHESHKHKDGWRLAAKTLEDAVITPVRELLQDQGRLIDLLQMEDQSTTDLTRLKTRAAIVAIQLADGEPDEKKVLLQGVIERIDLAPETISITLNQTGLTEALGTTPPEDKSPIALTVPIRLQRRGVETKLIIQGPNASHAPDSKLCQLIARARLWFDQLAAGEMENVKAIAEREKLPPSEVSRILPLAFLAPKIVEMILDGKQPEGMTVKYLERLPSLPRSWQDQQTLLRATNC

SEQ ID NO: 934 - protein, 634 aa, unidentified
  source 1..634: note = uncultivated organism
MSIAIYSRKSKFTGKGDSIDNQIELCREYVRFHFPKADPSEIMTFEDEGFSGKTLDRPQFQKLMQMQESKPFDALVVYRLDRVSRNVGDFAKLIEKLNRSGTAFVSIKEQFDTTTSMGRAMMNVSAVFAQLERETIAERVRDNMYLMAKDSCWTGGTTPLGYVSEKVEYNDGGKIRSYFRLSVQESEAAIVQLIFSEYLMTHSCRAVEYYLLEQGFRTRRGVLFDDVAVRRILTNPVYCAVDDVSIDFFQERKCEVVATKEKIGDVGFMPYNRTNQLRAPQPMDKWLVSAGAHKPLISSSDWIRVQKILEGNSGEYFRYAHRNKTKYKPISLLTGVIFCSCGAPMRPKRYTTGGDSFSYICTQRERSRNKLCSIHNCIGKEADAAIRELILTADADENIISRHIKKLRKSEGQVQSYREDLSRNISKTISDKQKQANNLTLSLASGNLDGAALEYVNKSLNTLLEEIEALKHKLMKSAELAAADNSSINEISSAMEYLSTHFGSIPLLDRRELIKRIIDKVVWDGERLEVFLATSTNSGTETTDEIITFTDKPVDKPPNPKETDGYYEFRKCSDLVVRAFADSQGIGLRQLAKMCGVSYTTIKYWTSKRNSPSHAQYEAVFMDYYLNTYRNGSE

SEQ ID NO: 935 - protein, 528 aa, unidentified
  source 1..528: note = uncultivated organism
MNAASTKRAGAPRRAAAEVTVSGHATARNAKCVRCAIYTRKSTEEGLSQEFNSLDAQRESAVAYIASQKNEGWSCVRDRYDDGGFTGGNMDRPALKRLMDDIEAGKIDCVIVYKVDRLSRSLMDFARLMALFDRKGVSFVSVTQQFNTTHSMGRLTLNILLSFAQFEREIISERTRDKIASARRKGKYQHGKPILGYDFVPAPAPFTGRRLVVNKTEAERVRRIFELYLEAGSILRVADECNSRGWTTKSWTTTAGRTVGNREFDKTIISRLLRNPLYVGKVPHNGAVYDGEHEAIVEDDLFRRVQARLKLAGERGGAAVKNSTGALLGGLVRCKGCGCAMSPSSASKKKPDGTRTRYRYYVCSNAVKRGRQHCAAPSLPGPALEAFVLEQVKALLADSPQMTVVVDRAIDLLREAAGNRLAEQTRLRGVLERLSSEEPTAATRREIEQVRRTLAAVSAQVAADAERLIDEDEVAGAVEAFDGVWDAMTQAERAEFLHVVIASVEYDGQTQNVAITFKPEIAPAEAPN

SEQ ID NO: 936 - protein, 530 aa, unidentified
  source 1..530: note = uncultivated organism
MRKKVGGYVRLSEEDRDKINKTDESESIQNQKNMLIAYCKEKDWELVDIYCDEDYSGAGTYRPDFERLIADCENGLIDIVLCKSQSRFSRDMEIIEKYLHNKFLEWNVRFIGITDNADTDNKGNKKARQINGLTNEWYLEDLSENIRSTMRNKKERGEFTGSFAPYGYIRNPEDKHKLLVDKVASEVVKQIFELYKSGKGYMVITNYLNASEIPSPYEYKKQNGSKFKILNAVSKTFWHTDTIAKILKDETYIGNLVQGKKRNISYKNKKSVSIPKEDWIIVKNTHEPIIDMETWTMVQTKFLGRAKPQKSGEIHMFSQKIYCDECGKIFVRNAGNTKAGKIYYLNCKYGRRSHAICDNKKAIRVDNLEELVIKEINNQLNLYYNQDTLDSLNTSQSKFNMSATYNNKMDALESEKRTLEKDLDKKNNYYQNIYEDKTDGVISVTEFNALRGRYSADIEAINTRIRCINEEISLTKQKLKYAENKENIFKNYKQIKELNKVIIDEFISVINIGKYDEDTNERSITIEWDF

SEQ ID NO: 937 - protein, 607 aa, unidentified
  source 1..607: note = uncultivated organism
MKETLHIYTRVSTRVQDDEGTSLATQKELGIKKSKELKLKNKVWNEGAASSHHEDLANRPVLVQLLQEIARGKVKHLFVFNNDRLSRNEDTQFVIKSALRKNDVVLYTKDGQFDLNNPQDKLFKSLLDSVAEYDNALRTERSRLGKLNKVRHGYWHGGPPPYGYEIVAGKLYPQDVESKCVKRIFRWFREGKSIIWIKSQLDQAGVTARRGKLFTTGSINKLLQNTHHMGHYTWTDKKSGETITVPCPVIVDETVWNEVQRRREQIYARKGQNNRTKKFYLLRNLMFCGECGSQMSGRIHEIRNERVYFCPRKTRNWKNGIIPEKQKWQRGKVGEHGCGMTRSLNIPLTDKFVWDLVLRTVADSSTLKDGFKEEILKSKFASDADTERELRNLRTKSNRLKKEYQQIQSSIADVETNHLLQRYDEEVYTRIKSNLDAELRTKRDEIEQNRIRIKEVGNERRWLDWVEKYADRVDSFKEFSKEEKKEYLEGIVRRIDVTLDKKTNDHHLDLTFALPLVGDGIEYQNPKKKGDGYRVIEGSEHASTVVSYAEEQEVHKASRRKGRQRQSAETFKKNSEESDLTYHRSTPNSDGGIILSQIPDKRSHYAR

SEQ ID NO: 938 - protein, 519 aa, unidentified
  source 1..519: note = uncultivated organism
MAAGNGSLAMPRRSAIRCAIYTRKSTEEGLEQEFNTLDAQRDAAEAFIRSQRGEGWVALPEHYDDGGYTGANMDRPALQRLLQDVRDGLVDCVMVYKVDRLTRSLLDFARIMEVLDKHGASFVSVTQQFNTTSSLGRLTLNILLSFAQFEREMIAERTKDKMSAARRKGRWVGGIPMLGYDIRERGGALVVNEDEAARVRAIFDLYLEHGSLIPVVEELNRRGWRMKEWTTRKGRLAGGGPFAKNRLYNLLTNIVYIGKVEHGGQIYEGEHEGIVDPGVWQRVQDRLRHNGRTGGRQVRNKYGALLKGILRCASCDAGMVHTYTQKTPHKLYRYYVCVNAHQKGYHQCPTRSVSAPAIEQAVVEQIRGIASSPAVVDNVLESLGEQRVADIESLEREKRLIERELERLSQELAGLVRAGGKLAVDRMAEVQERASALERQLREVREQLAAWEGQTVNVADVRRTLREFDRLWAEMTPREQEKFVKTLVDRVTYDGWSGEVTVGFRTAAIKQLCAETRNQ

SEQ ID NO: 939 - protein, 583 aa, unidentified
  source 1..583: note = uncultivated organism
MPKAREPSSRSSKRLHCAVYTRKSSDEGLEQAFNSLDAQREACAAYILSQKHEGWSVLPTLYDDGGYSGGTLDRPALQRLLADIAEGKVDVVVVYKIDRLTRSLFDFAKIVEVFEARGVSFVSITQQFNTTTSMGRLTLNILLSFAQFERELAGERIRDKIAASKKKGMWMGGLPPLGYEVRDRKLVVNAEEARTVLHIFRRYVELQSVRALKEELDASVIRSKRRTFADGTVYGGHKLSRGALYLMLQNRIYRGEITHKGNAYPGEHKAIVDQALWDKVQAVLAENRVDRATGADAKYPSLLAGLAFDDSGERLTPTHAVKKGTRYRYYVSKSLITGAAKDHSQGRRIPAGNLENLVIGRLCDFLADEGAVLSAISNAEQNGPQQKRLIARGRQISEELPTLAPNVIRSTLVTLVSRVDIKAEHVEIRVYQQRLHDLLQAQSKNTSLAAAAPASYSGGTLKLKVKARLQRVGREMKLIVHNADDRAAADPGLLRIVARAHDFQERLMQDPGLTVPAIASQERLTIGYLSRLLRLPSLAPDIVTAIINGKHSSELGAKRLMRLALKLPTDWAEQRKLLGFQRQ

SEQ ID NO: 940 - protein, 526 aa, unidentified
  source 1..526: note = uncultivated organism
MSKRDDSPPTLRCAIYTRKSTEDGLEQEYNSLDAQRDAGEAYIASQKSEGWVCLPDRYDDGGFTGGNMERPALKRLLADIEDGKVDCIVVYKVDRLSRSLIDFSKIMDVLERRKVAFVSVAQQFNTSSSMGRLMLNVLLPFAQFEREMISERTRDKIAATRRKGKWSGGMPMLGYDVVNSGNGGRLHVNDEEAARVREIFELYLNRLSLIEAIKELDSRGWTTKRWTTRKGHERGGKPFNKNSLFKLLTNRIYLGKITYKDEAYDGEHPAIVDDDIFERAQRLLKRNGRSGAPYVRNQFGAVLKGLVRCVPCECGMVPTHATKTTSGGGNKRYRYYVCQNAQSRGWHNCPSPSVPAPELERFVVDQVKAIGKDTNLLAETLEESRRQREEAIGKLEDEKRTLERELHRHNTELRELAAKGQTNGVTTDRMADVQDRIKIAEQRTTEVREQIVALSRELVDAREVGEACSLFDPLWDTLTAREQARILHLLIERIDYDGVNGTVSITFHPTGIKTLADELATQEATA

SEQ ID NO: 941 - protein, 530 aa, unidentified
  source 1..530: note = uncultivated organism
MNPTSKKSAATLPLVRCAIYTRKSTEEGLEQEFNSLDAQRESAEAFIRSQSHEGWTCLADRYDDGGFTGGNMERPALQRLLTDIAAGKIDLVVCYKVDRLSRSLLDFAKMMETFEQHSVSFVSITQQFNSATSMGRLVLNVLLSFAQFEREIIAERTRDKMAATRRKGKWSGGMPVLGYDLDPRGRRLHVNEGEAERVRAIFALYLEHQALLPVVQELACRGWVGKCWQTRNGRQCGGRPFTKTSLYRLLTNVLYAGKVRYKDEIHDGEQPALIAADTFGRVQALLKSHGPEVGPPSVHRFTALLKGLLRCVCCNCAMTPAHTTRKGGLRYRYYTCVHAQKNGWQNCPSKSIPAGPIEQLVVEQIQRLGRDPLVLEQLLTTIRHKDEVRLAEWEGECVGLERDLLRGQSEVRKLLAEVSAGTSSSGAVTRLAELQARRAQIEQRLARLRGQMEALQQERLDQLAVQEALSGLVPTWETLTPNEQARVVRLLISQVDYDGKHGKASITFQTLGLKTLAGELLARQREEQRA

SEQ ID NO: 942 - protein, 582 aa, unidentified
  source 1..582: note = uncultivated organism
MFHYLMAQAEKEQKNCRSRKVAFYGRVSTEHEEQTYALKNQMQWYDELKKQYCDWIVVARYIDDGITGTQAKKRPEFLRMVEDAKKGAFNLIVTREVSRFARNTVDCLQITRELKNYGIEIFFVQEGIWTMDNEGEMILTIMAMVAQEESRKTSERIKAGQEISRQNGVLYGNGNILGYNRVGQTYVVNPEQAKTVQLIFNLYESGLGMQAIRNELMRLGYKNAKGKVEWDSTRISRCLRNSVYKGVMAYNKSHRNNFLDQKIIKNHDEDTYMYMKGDFEAIISTEQWDHCKHIRESRIKVQAVNRNGHLEMKSFGVNKIHNVWTNKLRCKCGSSMRMNKWRKRRDGVIPTGYKCYNQLNKGADKITDTSSDGFCDMRAVCGWKLELMALQIFRKLMKNEMLVKTMGEKLEADKFTESQKADGIRREYEDKIRKLSEKLERLLEMRANGEIDKDTYIAMKLKTEADKQQAQQELLIFDKAACNYNIKSNSKSETITYLKKIISSKTIKVDEKLIEEFVLRINVENEAEFTWYCNFDANGNNGKEPQKLQFVIPYKEALKFRNARNELLRKSQYAELKVIVYY

SEQ ID NO: 943 - protein, 524 aa, unidentified
  source 1..524: note = uncultivated organism
MSEATVSKIITTIPATLNRYTATPIRAEIKRRVAAYARVSTDDEEQLSSYENQVSYYTQYIQEHEGWIFAGMFSDEGISGTDTKNRDGFNAMIRAAMEGEIDLIITKSVSRFARNTVDTLTTVRKLKAIGVEVYFEKENIFTLDSKGELLITIMSSLAQEESRSISENVTWGMRKRFAEGKVSLPYKHFLGYRKGADGLPEIVPEEAEIIRLIYRLFMEGKSPSYIARYLSVRDIPSPAGKEIWRAETVKSILTNEKYKGDALLQKTFRTDFLTKKSKVNEGEVTQYYVDHSHPAIIDPEMFDAVQIEMKNRSKPGRRNYTTHVFSGKLYCAECGGLYGSSTCHNQVVWRCNNRHRRITECKSPALRNPAIQEAFVIAINRVIENKYEIIQICQDTMARLCDVSDLDAELARLQTEIGIMASFMTEYINTNSRVALQQADYNHQFQEYETRYNALKEEKKALEQKRIAQIAKMNGIKQYIESLRFQHRIVQFSETLWYNTVDRIWVNPDGTMSFEFKGGPSIRI

SEQ ID NO: 944 - protein, 506 aa, unidentified
  source 1..506: note = uncultivated organism
MPVSPVRKVRCAVYTRKSTEHGLEQEFNSLDAQREACEAYIKSQASQGWTVLPQAYDDPAYSGGNLERPALKRLLADIEAGRIDVVVVYKIDRLTRSLADFAKLVETFDARSISFVAVTQQFNTTSSMGRLTLNVLLSFAQFERELSSERVRDKIAASRRKGKWTGGSVPLGYDSEDKKLVVNATEARTVRTIFSRYLELGSFGRLVADLDARGIVTKRRATKNPKFDGGIPFTYGPLAHFLKNRIYLGEVHHGGKWFKGEHKAILDRKLFESVQQLLKHNRIERSKRSSESGAPLQGKLFDDKGNRMSPSFSTKNGVRYRFYVSRALRGRQHEAGSVTSVSAPEIENSVIEELRKLSGNSELPSPDIAGLVSRATISKDGIRISYSLKKEGAESETIEIPWLPKQKGSAEIREVEAGSRTDSKLLAAIVRAHGWLGDLKSERYRSIEDLAKAASIHPKIIRQELRLAFLAPILMASILADQARIELKQIPKVLPLSWIAHGKLPK

SEQ ID NO: 945 - protein, 538 aa, unidentified
  source 1..538: note = uncultivated organism
MSSAPRQKTRAAIYTRKSREEGLEQEFNSLDAQHEACAAYIASQRHEGWKQLKGRFDDGGVSGGTMDRPALTRLLEDVDQGLVDMIVVYKIDRLTRSLSDFAKLIDRLEAKGCSFVSVTQSFNTSTSMGRLTLNVLLSFAQFEREVTADRIRDKIAASKKKGMWMGGRVPWGYTIHPDPKVQSLEVHLGHARDVQRIYDLYEELGCLAQVKSQVDGLWPERNYSRGRIYKILTNPIYIGKIRHKTNIYEGLHSAIIDVAQFDRVQEQLKLKSAIKRGTHPTRGLSACLIGKIYDETGDRLTPSNTKRGDRVHRYYYSNRLTIKGADPTGWRIKAETLETALSSMVKSNLLQACQNHSIKGDLSVHNLAQYIGCIEALNPIAALKLISRVDLTGGNITITINQNQFEKLLQCSSNLIETERLTFNEPITFQRRQNGTKLIWAQYETGPRPHLIKALHDAHTWLDLLKSGKQITDITQATGLLDGTIWKRVRLACLSPKVQKAILNGTLNPDLTIRYLQSKRVPETWVEQDKLLISKVPC

SEQ ID NO: 946 - protein, 546 aa, unidentified
  source 1..546: note = uncultivated organism
MADFLCPNDDSAMCYAIAYYRLSKFAKSTDSESIANQQKLIREYVSRHPEIVLVDEEQDDGYTGTNYDRPGFQAVIKAVKEKRANCVIVKDLSRLGREYIETGKYLERIFPAMGVRFISINDDIDSEHERAGDDIIIPVKNIMNEAYCRELSRKLRRQFEVQRSKGEYVGSFVSYGYVKDLEDKHRLVIDEYAAEVVRGIFQLKMQGYNAQAIADYLNENGVLSPSRYKRQIGSQYQSGFQKGQVSEWGPMTVRRILTNEIYIGTLIQGKRGTPNYKVKQMRERDPSKWSVVKHNHEPIIDELMFELVQQMLKRDTRKSPQEETVQPLAGIVFCVDCMRGMCRRVVKRGTNSFYYYVCSTNKRAKECSSHSFSQKTLESIVYRAIKRQIDLVVELDTLLSQVERSGLVAGKLKRLDVLAEEKEHEIESYQEYRRKLLEAFHEELIDRTEYDAMRQKYTAMISQAQASLEKIMEERKSALSEKSDARNWVSQFAKYQDAPQLTREMAATLIDKVFVYEDKRIKIDFNYRNEIAYHQEILQQVGKAVS

SEQ ID NO: 947 - protein, 532 aa, unidentified
  source 1..532: note = uncultivated organism
MNFELEVRSMPMVGIYCRLSVEDRNKTDSDPSASIQHQKAMLCDYCHERDWTIYDIYIDDGYSGIDRSRPEFNRLLRDCENGNIDIVLCKDQSRFSRDTVVIEQFINDKFLEWGIRFIGIADNADTDSESYSTMRLFTSAYNEMYVKDISAKIRRTLAYKREQGQFIGSFAPYGYMIDPNDKHHLIIDEETAPVVRLIFDMYVSGYGYRKIVQHLNNDGIISPTEYKRQKGSKYVNKNADSSNAKGLWTQCTISRILANEMYTGTLVQGKSHHISYKNKKRKKVEPEDWIRIPDAHEPIIDSDTWSRTQERLKSHTRVGRVSKELSPLSGKVRCACCGRPMKRNVYYNKAKTIKYYSLQCATYKTGAMNCPNKSNISGLVLEKRILDELNAIIEKYCQTDKIEFGEIYTEQLNQLEADLAKLNERHSSAEQRLVSMYKDKLDGIISNEDYILFRQSLNNEEHEISEHINSINQQIAECRERKKNTEDQKAVIDKYTHFNELDRTVADEFIDYIEIGMLNDNGERQIHIHWKL

SEQ ID NO: 948 - protein, 561 aa, unidentified
  source 1..561: note = uncultivated organism
MSNSRQIRAGIYTRISLDATGREEGVERQEKYCREWAERAGWDVTEVYCDNSVSASKPDGKRPAYEQMMRDVEDGVINAVIFWDIDRLTRQPRQLEWWLDRCRKGLDMADAKGGDMALDTRSPMGELFLRMRASFAAYEVAHKGERQRAANRDRADKGMLFTGARPLGYVKDLYRNENGELRVARIIEDEAKVVRAVYRAFLDGISLDGIARALSGIDEPGCEGIACVPRPVYTKAIEYNKRHPDRPKELPDAQPWFSATVRLMLRNPKYAGYVGYTPTSKSKKSGDGTGKWYSMLWLDEDGHPVSGAWEPIIDRETWWRVQDILDDSARRTSLQSPKVRKHIGSGIFRCGVCGHTLHIQGGKRGSYTCPNHGHGEPGHVCILAKETDHLVDVLVYTYLSREDVRAGLDLTPDANSPRDFEAEIAQQQRLIERAEKEYDEGIIEGRDLMGRRNRARERIETIRVEQRRAEEKVRRSTIPRTISHAPNPADAYAAADLATKRAVVDYLFDVRISPLKQRGGTHCGKRGNRFDLSRIHIAMKTQDGLVPLTPPKDQPPCALEE

SEQ ID NO: 949 - protein, 525 aa, unidentified
  source 1..525: note = uncultivated organism
MAKVTIIPSTLDPITQLPKNSKEKLKVAAYARVSTNTEEQNSSYEAQVSYYQNYIEGKPEWIYVDVYADEGISGMNTKRRVSFNRMIDDALEGKISLIITKSISRFARNTLDTIKYVRMLKDKGVEVFFEKENLWTLDSKSELILTIMASIAQEESRSISQNVTWGKRASFQAGKVSFAYSRFLGYKKVGDEIVVDEDEAQIIRLIYRMFLVEGQTTTGIAEYLKTQNIISPAGKGPNWTKNTVESILTNEKYKGDALLQKSFTENYLEQKMVKNTGQIPQYYVENSHPAIIDKGMWELVQIEHERRKGMRTSYSSTDIFSTKLVCSDCGSFYGRKKWYAGSKYERYVYRCNHRYNEGKARCKTPHLYEKEIKEQFLEAYNITMQDKKRIEDDLKAVIKLITNTKGIDKEIAQVNNELVTISDAINKLIQDNSKSNKGIDKFEKKAKELKNKYEDLKIKRDELVNTKRLNLAKSYRMKTFLKSIEKSDDKLKYWNDSIWMLMVESATVYRDKKIKFKFYNGIVEK

SEQ ID NO: 950 - protein, 516 aa, unidentified
  source 1..516: note = uncultivated organism
MSEPKRTVRCAIYTRKSHEEGLDQDFNSLDAQRQSAESYIESQRHEGWQCLRKQYDDGGFTGGNMERPALTDLLADIQTGGIDCVVVYKVDRLSRSLLDFARLISLFDEHEVSFVSVTQQFNTTTSMGRLTLNILLSFAQFEREIIGERIRDKKLATARQGKYIGGGPILGLDVVDKRFVVNEEEANRVRCIFDRFEKLESCRKVAVALNAEGIQTKRHTTKAGKPRGGNKWTYRKVYDLLTNRKYIGQIVHKGKAYPGEHEAIVRVEQFERIQAQLHANKTYTHKHQVRRFALLRRMIRCGHCGGRVMPSWTKNHGREYRYYTCAKKVKTGYGECPLPSLPAGEIETAVVDQLRTLLRHPDVIARTYREISKLGAAGPDAGTLARLDELRKRHEQTQKSIRAVLNVGDQDEGFMADELKRLNGELKSLAKSIRGLEVQATRGQPVELNRVGEALRAIDPIWDVLFPEEQRRIAQLLVEEITVSTSGIDIRFRTNGIEQIVEELQPIEERHVEKHA

SEQ ID NO: 951 - protein, 504 aa, unidentified
  source 1..504: note = uncultivated organism
MTRAAVYLRISNDDHQTGLAVERQREDALTIVAARGWTLAGEYVDNAISASKRQVRRPEYDRMEADFRAGRFGAIVCYDLDRLTRQPRQLEDWIDAAEEEGLILVTANGEADLSTDGGRLFARMKAAVARAEIERKGARQKRANIQRAQSGKPVPTRRRYGYETDGVTPREPEAEVVRSMFAQFEQGQSIRAISLRLQREKVPTGGGKSWPTSRVRYILNSPFYAGRALHKGAETESDTIVPIVSAELSEHVRAILADDKRRTTTGPKPKHLLTGIARCVAPGCNRTLHHLSTYACQAAAMKGHISILTRTLDDRVLDEVAAAILTSGPDIFDGTGDRSEFRRLATVLSANEEKQRATLAQSDEGLISPAVARQRLIDLRAERESTELAIDRVRIESAVSQTLVESAHVLLVGDVMTMSEWAEAKRTVIARFLELPIERQREVVRALVAVTVAPGRDPRRIQVEHLIATHLNSESSELAEDFGGESAGPGDPAKRRAPHVSIAG

SEQ ID NO: 952 - protein, 519 aa, unidentified
  source 1..519: note = uncultivated organism
MERRVREIPFYFKNCRGGKIMYRTAFYVRQSKDNVDNPAQSVKNQQKLLWDFVRNKEEFDVVGIYEDVWSGATFSRPEFLHMVSDINDGKIDCVMVKDLSRLGRNYIETGEHLEQIFPMHHVRFISVNDRFDTNDYSNGESMIIALKNILNDLQLRMLSQNIRKTTYIKMKRGDYPSGGGPYGYMRSKVNPAQLIVDWNTAPVVKKIFQMKLDGASTLGIAKELTRLEIPTPMQYWRSIGRLKSDNRGTSDSKWSHITVNDILRNPYYTGNCVNGRYKRDKINEKSRKTDVSYSSEWIITPNTHEAIIDEEMFKSVQKILEKSTEKRRASVAANPTKQNPFPDIVCCAVCGKKLIRKKVRDHYLFRCDHVHITETDLSDLTVAALNNYLRRVHRRTYVPKDSLPVSSISDSEYKKEKIQLYENYKNGDISKKGYLQEKLKLDEKIERIKEEEKQKRVGMEASSLCKPSQNLPEKDVLSSIIKKISIEDANNVEFIFYPLPGTNMDFNSHWSMQRKPTLS

SEQ ID NO: 953 - protein, 646 aa, unidentified
  source 1..646: note = uncultivated organism
MNEEKKVAGLYIRVSTEDQAREGFSLPEQEKRLRAMCEYKNYEVYDVYEERGISAKTGNYRPEFERLLQDVRDKKVNTIVVLKLDRLTRSVSDWEKILTFLEENDAYLDCANDEINTTNANGKMISRILTSVSQQEIERTSERTKIGLAGAIKVGHIPHQAPLGYKHEDKKLVIDYATKDVAIRIFNMYHDGLSYKKISNILNEEKVLDKTNWRDSTILNILENPIYKGDFIHGRRTKKPTYYFDVVEPLVSKEYWEECQVQQKKNSRSFQRTLTYLFMQKLKCPKCKRILGGKATTKKNGNSYYYYYCHDCKISFKESEIEKTIDEYMDSIVEYDSIVNQYFLPMIKQKIENPKEELEKELKSQKSKFDRIREAYINEVFTLKEYNQERKKVEDIINDLETKLNETEVCEKLKFTPNDILVKRDIDFINSIKYPDKFKQRNKFWNEYTRDEKAELIMKYIEEIELTDKYGNYTDVEFIKFRESIASTSNDLYFKGYYDRYVPSLFGNIYGKIRFSEYLPEEEMAQQIMRLRQFYDVGYYEATYSVKDKVFYFNFLEDKKTIVRVFPLEDYRNIDPDEKMDTYNLGILYVKEDNGTLLENEDDVFKLIPAECDGNVVYSKEPILVESKPVPYYEDEENSEDEISSQ

SEQ ID NO: 954 - protein, 567 aa, unidentified
  source 1..567: note = uncultivated organism
MNETKRTIRCAIYTRKSSEEGLEQEFNSLDAQYEACSAYIMSQKSEGWKRLSARYDDGGISGGTLERPALRRLLADIEARRIDLVVVYKIDRLTRSLMDFSKLVERFDKSNCSFVSVTQAFNTSTSMGRLTLNVLLSFAQFEREVTAERIRDKIAASKKKGMWMGGIPPIGYIARDKELVVDPEGAKVVNRIFKTYLDVQCLSYLKREVDKLGYETRPSRQDSNARPYSRGHLYNLLRNPIYIGEIRHKDQRFPGRQPGIVDREIWDRVQTLLEGRSPSVRGRGSQAANRSPLAGRLFDETGDRLTPTYAGKKDRRIRYFVSHRLIDRSRAEASDSTGWRLPAAQLEEAVASAISGALKNGKPANSSDVGTIKRVTETLARITDDNERWSDLLDLVTRVRVTPGALEIELHRGKLASMLEASAKELPMGVANISAPFQRRRRGVETKLVYGYEPPKLDAVLLRRVARGYAWWDEIRSGKATFKEIVKREKLSRRFMAIHLDLAFLAPDLVISIVEGQQPPSLSAQLLRSMQIPLEWNNQRELICESKPLNGPLSANRFNVVARRSAP

SEQ ID NO: 955 - protein, 525 aa, unidentified
  source 1..525: note = uncultivated organism
MIKKASKQTPAIRCAVYTRKSTDENLDLDFNSLDAQREAGEAYIASQKHEGWNCLDDRYDDGGFSGGNVDRPAFQRLMADVEAGNVDCIVVYKIDRLSRSLMDFSRIMEALDRRGVSLVSVTQQFNTTTSMGRLTLNILLSFAQFEREIISERTRDKIAAARRKGKWTGGPPVLGYDRVKDARGSRINVNAEEADRVREIYRMYLREGSMMPTLRELRARGWRTKEYQTAAGVWRGGAEFDKSALQKVLTNVVYLGKITYKDEIHEGEHEAIIDEDLYAQVQGLLRRNRNSGGIYARGRNKYGALLKGLVRCSACGCAMSHHFATRGKKRYRYYVCIRAQKNGWDACPSPSLPAKALEDFVIDQIKTVGRDPDVLEDSLRATHAHIQNQIDELTAQRRGVEDAIKDLGRQVGKIAARAGYDESATGEMDRLQEYIRQRQSDAAEINKQIAALKQRMIEPDELVGAVEAFDPLWQALSPSKRAKLVHLLVERVEYDGKDETIALTFHPTGIRSLTEQQEESPCRSS

SEQ ID NO: 956 - protein, 553 aa, unidentified
  source 1..553: note = uncultivated organism
MTTMPNPVRCAIYTRKSTEDGLEQEFNSLDAQREACEAYISSQRHEGWKLVPGAYDDGGYSGGTMERPGLKALMHAVENGLVDVIVVYKVDRLTRSLADFAKIVEILDERKASFVSITQAFNTTTSMGRLTLNVLLSFAQFEREVTGERIRDKIAASKKKGMWMGGPVPLGYIVVDRKLVAEPEEAQRVRTIMRRYLASKSAPALLVQLESEGILTKVQHRTSGPYRGGIPFRRGSLFHLLKNPVYRGKIVHKGQIYDGEHQAIVDDQLWQAVQAKLAIAAPPRKRPKNDPQHALLKGLLSDGEGRPMVPTYATKGVRRYRYYETRRDLTGPDKAGSTRYAMAQLERHVGEYLGMLLGDQHALRRIADLTDGASLQIMFAQAELHGQEMVTDLGSVIQKLVRKISFAPDRIIIELDPNQFGIDEPSTCSWTHEIPLPRKKPFREAKLRINSNDDKPANIDRKLIGLLADAMSAQKLVLASPDVPLQKIAMREGRCRKQLTQLVKISWVSPRIVEAIVEGRQPSMLSRKRIMEIELPLTWSDQEQFLGYGSLSK

SEQ ID NO: 957 - protein, 500 aa, unidentified
  source 1..500: note = uncultivated organism
MKKAVIYARYSSDRQNEQSIAGQVEVCKKWAMDNDIEVVEIYPDEALTGRTDKRPNFQRMIRDARNGKFDYIIVYKIDRFARNRYDSAIYKAQLKKYGVKVVSAMENIADGPEGIILESVLEGMAEYYSANLSQNVLRGMHQKAELGKYMGGTIPLGYKIDSDKNYIIDENTAPVVKRIYEMYADGCTVKEICQELNASGYKSSTGKPFTYNSLHRLLANPKYIGRYEYLGVVLENAIPRIIDDTTFEKVQQRVQRNRRAPASAKGAVDFHLTGKLFCGKCGNSMVGDSGTSGTGATHFYYSCIEKKRKHGCTKKSVKKDWIEQFITNVTIDQVLTDENIEYISKKAFALYKKDRNDKSEIIALNNSLREVQKAIDNIMRAIEQGIITDTTKQRLMDAEERKKAILVSIAKEEIKKPPITREHIEFFLRDMKNKIYKSSDQIEIIIRTFVNAVYLYDDKLVITFNFREGETLKKFELSELEKFGFDDVRLTIERLYELLL

SEQ ID NO: 958 - protein, 539 aa, unidentified
  source 1..539: note = uncultivated organism
MRGERSPKENGTGLAARAGVRCGIYTRKSTEEGLDQAFNTLDAQREAAESFINSQRQEGWTALSQKYDDGGYTGANMDRPALKRLLADVQSGTVNCVVVYKVDRLSRSLLDFARIMEVLDKHGATFVSVTQQFNTTSSMGRLTLNILLSFAQFEREMISERTRDKMSAARRKGKWVGGNPVMGYDVAPQGGSLVVNQEEAQRVREIFALYLELGSLIPVVEELDRRGWRMKSWTTREGRQAGGKPIPKNSLYNLLTNMIYLGKVEYGGQVYEGEHERIIEEETWNQVQCALSRNGRRGGRNIGNKYAALLKGLVRCGTCDVGMVHTYVNKKDRLYRYYVCVKAHQRGWAQCETRSVSAPALENAVLEQLRGIARNPVMLREVLRQLNEHRQRDSAEIERERTDIERELKKIAQEMKAAVSMVGKAGASADLATDRLAELQDRVSHLNSRLAELRQQGAAMEAERVDTQDVEEALHEFDSLWEQLSAWEQERFIRTLVEHVRYDGKTGTVTLGFRSRGIREFCSWAPALTEKHEHAKQHS

SEQ ID NO: 959 - protein, 577 aa, unidentified
  source 1..577: note = uncultivated organism
MTKTAIYCRVSTDDQEKEGTSLHTQLEACLKYCLDKDYTVVRKFIETFSGLTLDRPKLTDLRNMIRANDLDVIVVYCLDRLSRNATHGVILRDELDKHHVLLESVTEDIDKTPLGEAITYLRGTFAQVEAEKIKERTMRGKLAYVKVGKLPQGTGIGIYGYNWNKATGKRTIHEYESKIVQKIFTMALSGTSTNKIAIELNKQCIRTKSGGLWYPLTIRRIVSNSTYTGKTYYGMTKRVNKTKVVVQPKENWTLLPDITPPIITEEMFKRTQETIAKIKQSRPIKESSPYLLTGFMKCAKCGSPIGGTTLNGKYRYYKCRGSNPTATRGKICDAGYIRANELEKDVWNKVLEMLTSPLTTFALLTDADVNIRARLKQNNPLQILEKQISQLRRKIKAYDAKEKRLYSLLTNEAVTKDFVLDEVNKINKDKLNDNQLLKELLATRKRTNNTDQMTFRLTELSEILRAKAKSQLGNSDTTEYLKEKRNFLESLNLEVVVPPKTRAYQLTMRLGAQIISEVNPDDEAQFNSRLKDFEQQHPEFNIEDLIDIDKQLPGNSEFAKSINLFKQNLVTIEQTSA

SEQ ID NO: 960 - protein, 549 aa, unidentified
  source 1..549: note = uncultivated organism
MKKAAIYARVSTGKQAAGELSLPDQKRQCQNFAETKGYEIAAEFVDAGVSARTDKRPEFQRMINLACAAHRTFDAILVHSQSRFARNTKDLLIYKEKLEANGVQILSITQDLGEGETADVLRTMVGALDEYQSKETAKHVARSMIENARQGYWNGAQAPFGYRTYAAETRGARIKKKIEIEPQEAETVRLIFRLYVFGDGGSGPLGVKQIATKLNARGLRVRSGRPFRVQFVDTVLRNTAYIGEHYFNRNDSRRGKQRPREEWIRFPMPRIVEDSLFYTAQEKLDRQHPLKTPPRIVRSDVLLTAVAKCGECGAPMRKLSGKSGTYHYYRCSKKYECGKAACTGVSVPMAELDEIVVGALEDTILKPNRLRKMTEALVSRASERNEAFAARRSLLDGERRQARRQVSELYRLVGTGEMSMDATLSAHVKGLQDKVETLNRQIAHLDRERSLPVESIGAEVVEGFGRAVSAALRHPDNRAFARAYVQALISDVTVSDSEVRISGPKAALLHQTAMFAAKGELVPSFAREWRTRRDSNPWPLPSEGNALSS

SEQ ID NO: 961 - protein, 523 aa, unidentified
  source 1..523: note = uncultivated organism
MASVKIIPAMPQAGKTGSSVKEKPRLRVAAYCRVSTDTEEQATSYETQVEHYTEYISRNPEWTLAGIYADDGISGTNTKNRPEFNRMMEDCGAGRIDMVLTKSISRFARNTLDCLKHIRELKAQNIPVYFEKESINTLDAKGEVLLTIMASLAQQESQSLSQNVKLGLQYRYQQGKVQVNHNRFLGYTKDAEGNLIIDPEQAEIVKRIYREYLEGYSMDRIKAGLERDGIPTGAGKTTWHTSTINKILRNEKYIGDALLQKTYTTDFLNKTRVKNNGIVPQYYVEGNHEPIIPKQLFLKVQDELVRRITCVTANGRKCGFSSRHAFSQIVFCSECGENFHRTQWNNRGKKSVVWRCLTRLYPKKTDLVCHARTVKEDELKAACLSAFNGFWKERDGFQEQMERNIERLLAENNPREEEKLRKREEELQQELISLAEARKNYSHVVSELQKVREEQTELENSRNRRSETVSRIRELREFIRSQSSELTEFDETLVRHWIRKITVHPDRLTIEFKTGDIVETGGE

SEQ ID NO: 962 - protein, 549 aa, unidentified
  source 1..549: note = uncultivated organism
MYLKSHNSFLAAIYLRLSSDDGDKAESDSIRNQRSLLQDFVSKHSELSLIEEYVDDGYSGANFERPAFQRMMENVRNHKINCIIVKDLSRLGRNYIETGRYLEKIFPVLGVRFIAVNDHYDSADTKNDADQIIVPFKNLINDAYCRDISMKIRSQLEIKRKKGEFTGSYASYGYAKDPVDKNHLVIDEYAAEIVRFIFNMKMDGYSADRIAMKLNEMGVLTPMEYKRSCGFNYTCGFRSYKDAKWCATSVLRILKNELYVGTMVQGKTRKINYKVKACMDVRPEDWVRVEGTHEPIVSREIFECVQNLMKLDTRTSPEEEMIYIFSGLLRCGDCGQNMVHRVVKKKGKQYRYYHCSTYKNKEGCTSHNISDAKLQKVVLEAIQKQIALLVQADAIMAQIENIPQQQFGVKLLDSQIRTLNAEVQKYKDLRNNLYQDMVDGIITREEYRDIKQTFTRKMERAEESIRELETKKRRLLSNEMRTQKWVEEFKNCRNIESLDRKVTVMLIKRIVIYSSDRIEIHFNHADEMAELISYAFASKDAMQGEVDAV

SEQ ID NO: 963 - protein, 561 aa, unidentified
  source 1..561: note = uncultivated organism
MSEKVFRTAIYCRLSKEDGDKVESNSIGSQRSMCEEYIKKHKDLEHVATFVDDGYSGTNFERPDFQKMMKLAETGKIDCIVCKDLSRTSRNYIEGGRLLQQTLPRLGIRFIAINDQYDSFNGNPQSDSFIIPFKNLINDTYAKDISVKIRTNLDMKRKKGDYVGAYTPYGYVKDPENHNHLIVDDYAADIVTQIFSMYKDGLSICRITDRLNELGILSPMEYKRSCGINYDTVFRTSETAKWSYNAVHRVLTNEMYMGMMVQGKQSTPNYKVHELKDIDESDWIRVENTHEAIISYDDFMAVKTMLGRDMRSSADDSNANVFSGFVFCGDCGQPMIRKVVPAGKKKYYYYVCSSNKRKEGCSTHSISVKELENTVFNAVKDYVTHVLDLEDAIAYINNLPSADRTVFNYEAQITKIEEEIERFKKMKLRLYEDLSDGVINKKEYMDFRNQYTRLIEDRESALDRVRKESRDCKAAGNGERAWVAVFREYENIDEINRRVLMSLVDRICIYEDHRVEVFFRYRDEFLAALEYLNSFNTVLPERYQIPQIMIAQNQAALREAI

SEQ ID NO: 964 - protein, 520 aa, unidentified
  source 1..520: note = uncultivated organism
MNKQNDKQMTIRCAIYTRKSTEDGLEQEYNSLDAQRDAGEAYIASQKSEGWVCLPDRYDDGGFTGGNMDRPAMKRLLADIEAGGIDCIVVYKVDRLSRSLMDFARVMETFEKHSVSFVSVTQQFNTSTSMGRLMLNVLLSFAQFEREIISERTRDKIAATRRKGKWSGGMPMLGYDVDLRGGRLLVNEDEAKTIRAIFELYLEHQSLIETVKVLNDRGWTTKRWTTRKGHERGGKPFVKNNLFKLLTNLIYLGKITYKDEVHEGEHPGIVDADIFGRVQRLLKRNGRTGGKYVRNRFGVLLKGLIRCVPCGCGMVPTHTTKNGNKRYRYYVCQNAQSRGWHTCPSPSVPAPEIERFVIEQIKSIGKDTNLLAETLEQSRHQREESIKELESEKRSLERQLNRYSTELRNLVAKVDHGGLATDRMADLHDRIRTAEQRTTEVREQIVALSRELVDAREVGEACSLFDPMWDMLTAREQARILHLLIQHVDYDGQNGNVSITFHPTGIKTLADELKEKEALV

SEQ ID NO: 965 - protein, 513 aa, unidentified
  source 1..513: note = uncultivated organism
MTEVSDTHVVLYLRKSRADIEAEQSGAGNTLARHRRTLTDLATRMQLTIDAIYEEVVSGDTIAARPEMQRLLTEVEAGLWDAVLVMEVERLARGDSIDQGIVARAFRYSGTKIITPSKIYDPCNEFDEEFLEFGLFMSRREYQTIRRRLTAGVQASRREGKYTGSVPPYGYLKQKLSGEKGFTLVPDPQTAPIVRQIFSWFLTDRLSMVEISKRLNAGAIPRPSGRAWYPKTITNLLGNPHYAGYTTNSRRPVKAVIRDGAVRKTRPRNTQQLVFYEGRHPALVSREQWQTAQERLQAHTAPPVPRGKGQTNAFCGLLYCSVCGSRMQRGQYGKNSPRKPYLFCMRRGCPTVSSSYEAVETLVQAVLQAWPLTWDPTDLPDDHAIRARSLAGLHRQRDRIALQQTRVMEFLETGVYSPEMFRTRIAALDAERKQIEQTLDALVQAPAAPQVPVPSISALYTQLTPSEQNELLKTLIEKIVYQKPERTTPGLAGDLTLTIYPRLPYPVESVRSI

SEQ ID NO: 966 - protein, 584 aa, unidentified
  source 1..584: note = uncultivated organism
MRRTKSKKNPDRSLRIAGYVRVSSQRQATEGDSLTAQQHEIEQEVEFRQRRENWNVGSLEFYIDAGKSAKDQNRPQLQRLKRDIAANKVDVVICFKLDRITRSLKDFVDLWALFEDHDVDVISLREKFDTSMPTGEAMIQLIMVFAQLERKMTAERTYSIMKDRVERGLWNGGHILGYRSKADEPGLLEIDDEGAAIVRMIFDGFETLGSAGAVARSLSDKGIRYPSYTTRSGKQRGGNLFAKQKVTGILKNPVYIGQMRWGDAVHDGNHPPIITKEQFDRVQVQIGESLKRRKNIKRRAEGARQYLLSGLLRCSCGAHMTGAVAHGRSSTHYYYVCTRQNHEGGKYSCASPRIPAEALENAVIERIRELGSVIEARERIVQHALSCLDSESETLRREGDVVRRQRQKTKADIGRLVEVLKSLGAAGIDSVQTELTRLEREDKELGRRLMEISKRQEPMQRISDDAKAFIRTWADVGELLDAATHEERLLILRHYVEVIELHSDDPKGKTGTYAMRLFPEVRPDRGFGLSQDDPDSPTDDGNPWAENTNGVDTPEGTDSVVLTDSRLVRVNDEKAPPLGLEPRT

SEQ ID NO: 967 - protein, 517 aa, unidentified
  source 1..517: note = uncultivated organism
MRSRSVAPQPAPSVVRCAIYTRQSVEERGKSGFGSLEAQREAGEKYVSLFEEKGWQALPERYEDGGFSGGTLERPALKQLRADIATGKIDCVVVYRGDRISRNIREFLELMEEFDRHEVSFVSVSEQFDTSTPAGRMQRNMLLTFAQYERELIAERTRHKVHASRRRGRFTGGFLALGYDRHPDGGRLVVNEAEAKLVRQIFRMFLTIPSIVEVVQNLNRRGWTLKRWTTKEGREIGGGAFDKHSLRRLLTNPLYVGRVHFDGQVYAGADEAIVDEKTWDQVQQLFTDGAHGPRRRSTRSTSLLGGILRCDACDCAMTPTYSQKGRIRYRYYVCNRAHRRGHASCPSPTVKATDIEGFVVEKIRAIGRDEGLVARTVEEAGKQLNERKVELEAEIGRIKKRLDRAHLEMREDMETVTGRVNTAAKTTGTDGRIQDLEDHLAAAQDELIALRAQRIDASDLRAALQAFDPVWANLTTEEQARVVQLLIERIDYDGSVGKMAITFRPEGVRTLAKEGAK

SEQ ID NO: 968 - protein, 503 aa, unidentified
  source 1..503: note = uncultivated organism
MSRIAIYARKSVFREDSISIESQIEMCEYEARGENYTIYQDNGFSGKNTARPDFQRMISDIESNKISKVIVYKLDRISRSILDFAKMMDLFQKHNVDFISATEHFDTSSPMGRAMLNICIVFAQLERETIQQRVIDAYASRSKKGFYMGGRIPYGYKKIPTVIDGVKTSMLEINADEAQELQLIFSVYSKPAATLGDVLRELSMKGKSINLRGSRWSTARLSEIMRNPIYVRADSGVYKFFKSNKTNIINPPEHFDGVHGCYLFKGENKNRKTWDLSGHNLVVAPHEGFIESSVWLTCRNKLLSNHQIKITKPKNSFLSGKVKCANCGYAMVIRKAKTKSGRYFVCTGRSEMHCCNKKLPTIYATEFEDLIVNKIKEKIDSLTIAPTQENDSSVNLKITTLENNIELIDKKIESLIGSIVGAEKVSMEYINKTIKRLDEEKRTYIEELENIKMAKEINMGTKELSDVMQKWDELNFEDKVGVVNLLVNRILVSSEKIEIEWLV

SEQ ID NO: 969 - protein, 508 aa, unidentified
  source 1..508: note = uncultivated organism
MKRIALYTRRSIYSEESESINMQIQSCKDYFKREECEFEIFIDEGFSGSNTDRPDFIRMTNQIHNNEIDAVVVYKIDRISRNMVDFINLVNDFEQYDVPLISVTEGADPTTPAGKFVMNILASVAEMERANIQQRVTDNMLTLAKKGRWTGGNSPFGYKSFKKDNMGTFLEVDETKREIVLKIYDKYLECESINETSRHISKKYFNISIASVANTLSSPVYLKSSNRTHDYLKLKGFTVTGEPNGNGYLTYGKRPKVKNAKKWNTKGYITAVSIHEALIDEDTWFRVQSLIEKNSVDPRPKESAHSYLNNLVICGVCNANMIIDLTYTRVDKTKVYSFRCSRKKKDGDSCSNGFIITKELEESIEDKLRKIGLNKDLLNDYVTLEDDQDYKKEISEIEVKINRNNLQINNLADKLSLLSNEAAKVIISKVEQLTTDNKKLQTELLTFESLQSNKKNSSNDLDSLYDSIQLFNAMDDSDIEGKRKVIRTIIEQIDFTKEGSIAEMQLKA

SEQ ID NO: 970 - protein, 540 aa, unidentified
  source 1..540: note = uncultivated organism
METEPKRAVLYARLSIASDESVSIERQLEAGRDYCRARGFQVVAEHVDDGVSASANAPEDRRGWQEILRHSPGTFHVVVVWKVDRLARKVLDFLHAEQDLRKRGASIVAVDDPIDMSTDQGRAFATMLAVFGEMEASAIRARVKAARQALIKAGRVPGGAAPFGYWNAPNPDGPGKVLAKDPETIGFVVEAASRVLRGDSVNSVATYLDEVAPRQGRKNSAAYWTITVTRRMLQNPVLAGMTPHNPGNTSKERGSEVLRDTDGMPIVREDLAVLSVEEWRALQERLTNREPYRAASESYLAGLVWCGHCNRKMYRNAKTVHGKKVRVFQCQGKEGCGQQVSNLESIVEERFLAEFGNRYSYTLIQRPTDYDTTEIDNQIAETRARMEEDDADMVALAERWQSLKDLRKRVPAPELSVEKSLTSSAQQWQEDPRAALLGQVDGVRLVKGKVGRNFDQTRLSWMQDDAEQFGSLRDALTAAGLSDEEQLEYAARLRESLGAEPNHSVVPLSEFLASKGLDPDEQEEYATWVAQRREDAAQSP

SEQ ID NO: 971 - protein, 572 aa, unidentified
  source 1..572: note = uncultivated organism
MRKNEDCIAVYSRKSKFTGKGESVQNQEELCREYVRVHYGEDALNRLIVYEDEGFSGGDLNRPGFKNMMDAARKKRFQALIVYRLDRISRNISDFAGLIEELTRLDIDFVSIKEQFDTGTPMGRAMMYIASVFSQLERETIAERIRDNMHELAKTGRWLGGTTPTGYASETVESVSPGGKTKRACRLRLIPEEADKVRLIYSLYLELDSLAGTEARLMQLGIQTKNGRSFTRFSIRGILQNPVYLTADLEAYEYFEQSGSEIFSEKEAFDGAHGMMVYNRTRQEKGRTTKLLPPGQWIVAVGDHPGLIPGGRWTAVQKSLEQNKIKSYRKPRKNEALATGLLFCSCGSRMYPKLGRRRKTGDGRPYAYVCRTKERSQRQACAADNARGEELDAALTELTGSLKEDKECFLSLLRQGRRFCLSGESGVQIRLSAAKREREEIERKQRGLADSLAMFQEQEAKEEAVRHMEELGRRRRELDGEIWHLKTILYREILSDSEIREKGRSLSELAGIMGVMAAEQKRAVLNALIQRIIWDENTAYVILKGVSDEELCQYERLEAHPPVCPADALGGG

SEQ ID NO: 972 - protein, 538 aa, unidentified
  source 1..538: note = uncultivated organism
MTKLVRCAIYTRKSTEEGLEQEFNSLDAQREACAAYILSQKHEGWSLILEQFDDGGFSGGNLDRPGLPALLDQVRAGKVAVIVVYKVDRLTRSLSDFAKIVDVLDAAGASFVSVTQSFNTTTSMGRLTLNVLLSFAQFEREVTGERLRDKIAAAKKKGMWMGGNPPLGYDVADRKLIINFAEADTVRHIFSSYLEAGLVRSLLERLHEEGVTTKSRAGRAGIPFGRGSLRHLLQNPLYLGEVHFKGGVYQGQHEAIIDRVLWDAVQAKFAAAAVDRGEGRRATEPSLLSGLLWDANGGRMTPSHAVKNGQRYRYYVTLADHQVNHAAFRFSAPLLEQAVTSRIAEWLSSAQPVDRADADLVAARLAQSRADIAMLREPTPADQQATIRRYVERVQLGPGRLSIQTRVVEGLRPTLLMATLGRIRCGNGTRIVVRAEPSSSGGVDEQLVQILANARAAQKLSQAHPSRTLAQLPKLAGVSEQRVKQLLRLSFLAPSIVANIVSGETPEVIAGTSLRHLSDIALDWAEQRRAFCSPAASI

SEQ ID NO: 973 - protein, 570 aa, unidentified
  source 1..570: note = uncultivated organism
MRNIRCAIYTRKSSEEGLEQDFNSLDAQHAACAAYVASQASEGWVLIRNRYDDGGISGGTLERPGLKALLDDIGSGLIDNVVVYKVDRLTRSLLDFAKLVEAFDKAGVSFVSVTQSFNTTTSMGRLTLNMLLSFAQFEREVTAERIRDKIAASKQRGMWMGGTPPIGYRPDGRSLAIVEEDANLVRHIFQRYLELGTVRALHDELFRQGIRQPRRTTTAGRTFGGTSFGRAQLYNLLKNPLFVGRIRHGSKTYPGNHPAIVKKETWDGVQAQLADNSQGPQQGPTAKDPSLLAGKVVDQEGQPLVATHACKGKVRYRYYVSRHLQHGTPANDAASDSESGVRIPAKELEQLVIRAIVTELNDPIALSRRLGASIDGPRQVAALVKNAETMVANLDGKRGLPVQVLLGRIVQRVTVQEDAVDLTLEPVALSEALGLEAGASVADEFRIMIPVRLRRTGVAVRFVLETGRHAAEGPVDQKLVAAIVKGRAWWKRLQADPSMTITDLAKTEGLASNYVDRILRLAFLSPTITKAVLDGTAPTDLTLERLKDVKCIAPSWAEQHRLLAMPAVRS

SEQ ID NO: 974 - protein, 525 aa, unidentified
  source 1..525: note = uncultivated organism
MTIDRTEAQHQLRRAAVRCAIYTRKSTEEGLEQDFNTLDAQREASEAFIKSQTQEGWQALTDRYDDGGFTGANMDRPALQRLLEDIKDGRVNCVVVYKVDRLTRSLMDFAKIVEVLDKHGVSFVSVTQQFNTTSSLGRLTLHILLSFAQFEREMIAERTRDKMSAARRKGKWVGGVPVLGYDVSPKGGSLVVNEGEAERVRAIFDMYLEYGSLMPVIKELDNRGWALKAWTTRRGTEAGGGPFSKTRLYNLLINVVYLGKVSHRGQLYDGEQPQIVSTEVWQRVQQRLKSNGRVGGYEIRNKYGAILKGILRCKSCDAGMIHTYTKKTANKLYRYYVCVTAHQHGWNKCPTRSVSAPAIEEAVVAQIRGIGASPAMIEAVVGELEEDQLAQRADLEQEKRVAEREIRRINDEIAAVIRPVAAQGPGMRLATDRLADLQDRASALERRLGEIRNQLAAKVSEGVDRAHVSRVLRDFDRAWQQMTPREQEKLVKSLVHQVTYDGPTEAVTVAFRSAALKQMCMPANV

SEQ ID NO: 975 - protein, 545 aa, unidentified
  source 1..545: note = uncultivated organism
MSIVYNVGIYCRLSREDNKGGNVNLSLSIENQQAMLEKHVNEKGWVVYKVYVDDDFTGTNFNRPGFQEMMSDIEDGKINCVITKDLSRLGRNYIEAGRHREIFADYGVRYIALHDNHDSENAGQNNITVPILEIMNENYAAEISRKVRYTKKLMAEQGKFANSRPPYGYLKSPEDKHKLIVDENVAHIIIRIYDLYLSGTPARAIADMFNSDGIVTPNAYYYAERGKPNPYKSNKNAWGSATIMNILRNPAYYGAMSSGKRYAKSYKSKLLVCRPIDEWIIIEGTHEPIITKEQWEDAQRVGVKNKQETVRRSKDGEVSIFAGIIKCADCGANMVFNRNKEYKFYRCSTYQQKGKEVCEHHKIRYDTLYNAVLANLQEYAVLAVEDEEKLIKHIMKANEDFNGKSVSRYERSLREANNRVREIDGLLQSLFEEKCKGNVTDDMFKRMAAKYEDEQKQLTVDVKRMEAELDERQRTQRDLTSIVTRVKECLTIDKLTRAIAVDLIDRIEVGKIYEVDGEKNIDIEIFYKFGLTNTSSDLTKENRAS

SEQ ID NO: 976 - protein, 519 aa, unidentified
  source 1..519: note = uncultivated organism
MKRRSHPNETSTVRSAIYTRKSTDEGLEQEFNSLDAQRESGEAFVASQRHEGWQCLCEHYDDGGYTGGNMDRPALKRLLADIEAGKIDCVVVYKVDRLSRSLLDFARMMETFEKHGVSFVSVTQQFNTATSMGRLILNVLLSFAQFEREMISERVRDKIAATRRKGKWSGGMPLLGYTVQETKLVVDEVEAQRVRQIFELYLEYQALLPVVTELNRRGWTTKHWTTKKGIHRGGRLFTKNSLYALLTNVTYIGQIRYKDEVHRGEHSPIVPDELFHKAQALLQRNGHTGGRAVRNKHGALLRGLLRCGPCGCAMSHTYTAKGNRRYRYYVCGTAQQRGWSECPSPSVPAGEIERFVVEQIKGIGREPAVVAETVRQVRQQTEVGIERLEQERSALQRQLRDDHARLQAAAAMTDHVERVSRLANVQECVRVAERRLTEIDNELIALRGELVEEAEVAKVLAEFDQMWETLVPREQARVLELLVERVEYDGERGSVSLTFHPCGIKSLTHELANRQEDAA

SEQ ID NO: 977 - protein, 522 aa, unidentified
  source 1..522: note = uncultivated organism
MTRTSRHQPAPTRVRCAIYTRKSSDEGLEQSFNSLDAQREAGEAYIRSQAHEGWTCLPDRYDDGGFSGGSTDRPGLKRLLADIEAGRIDVVVCYKVDRLTRSLLDFSRLMEVFERHRVSFVSVTQSFNSATSMGRLTLNVLLSFAQFERELASERTKDKIAAARRKGKWSGGAPLLGYDVVSDRTGSRLVVNAAEAEQVRRIFALYLERGSLIATAKAVAELGWTTKRWTTKSGKQRGGAVLDKCRLHALLTNATYIGLVRHHSEVFDGEHQAIIDRDLWQRVQLRLEQQRRTGGGLVARNTTGALLKGLVQCAHCGGAMAHSFTTRGTTRYRYYTCLAAQKRGWQACPTKSVPAGDLERFVVNEIKAIGRDPAVVASTFAAANAHVRGRLAEIDHERAILTRELRRRHAALKRTTDADALAALHGQVDAANARVAALGDEEASLRQTTVTEREVAAALAEFDAMWSVLSPREQARVLHLLVEKVVVDRVENTCRITFKPTGIRALGGDGDAATQPASANAA

SEQ ID NO: 978 - protein, 570 aa, unidentified
  source 1..570: note = uncultivated organism
MKGNAETIAVYSRKSKFTGKGESIENQIELCRQYIFAHFPGVEEENILVFEDEGFSGGTTERPQFKVMMKQAKEHRFKAVVCYRLDRISRNIGDFAKLIEDLNALSISFVSIKEQFDTQSPMGRAMMYIASVFSQLERETIAERIRDNMQELAKTGRWLGGVTPTGYVSEPVDRVTVDGKTRRMYQLTQIPEESELVRVIFAKFLETGSLTKTETYLLQNGIQTKNGKAFTRFSIKNILSNPVYLTADEAAYQYFEQNEGELFSPKSAFDGAHGVMAYNKTIQKPGKANELRNLTDWIIAVGKHEGIISSGDWIRVQTLLNHNKSKSYRKPKSNTALLSGLLFCANCGGYLRPKLSKRKNAKGELIYSYLCETKEKSRCQLCNMKNPNGNALDELVAGEIKKLSADPDAFLSELADAEKVLLGSRTEYEGELARLRKLIDENEKEITGLLSSLSKAAGTPAEDYILRQIGELHEKEEGFRRQMEALQSVSMEHALSGQEFDLLKDLLSSFAGTFDNMSVEQKRAALRAFVKRVVWDGETVHVYLFGSKEEVELPPVSGVQDDEPQGANSK

SEQ ID NO: 979 - protein, 536 aa, unidentified
  source 1..536: note = uncultivated organism
MTGKAAIYVRVSTARQAESDLSIPDQVSQCRAYCERQGWKVVDIFTEPGASALDEDRPAFQEMIFKATRSDHPFDYVVVHSLSRFSRDSLHSELYVRQLRKAGVELVSITQDIGQDGSGEFIRKILNVFDEHQSRENAKHVHRAMLENARQGFWNGARPPFGYSVEVKELRGSKEKKVLVVNEEEARTVRLMFALASGERGRPMGVKAIATHLNERGIRRRGLRFSTGGVHDLLTSTTYVGRHHFNRNDSRNGRPRPPSQWIELPVPAIIDEQTFNAVQGLLQSRNPKRVAPRVVNGPTLLAGVARCGYCGAALIQNTGKGGTYRYYCCSRKLKEGPLACRGIRMRMDRLDEIVIGEIIEHVLDPERLRTLLDTYLQSASERADRNKHQIDRLRQTHRDTQAALARLLSLVEKGVMEAEDPSLKERLLGLKLQRDELAVEIADLQQRLSSNEPEITPEKIERFAALLRDKLLNGTPEFRQAYARMVMREVNVQDKEIRISGSKAILAKAASQGFGKTPPAVLSFVREWRTRRDSNS

SEQ ID NO: 980 - protein, 545 aa, unidentified
  source 1..545: note = uncultivated organism
METIKKVRCAIYTRKSTDEGLEKEFNTLEAQREAGENFVMSQKSQGWEILPDHYDDGGYSGGNMNRPALERLFADIEADKVDMIVVYKIDRLTRSLMDFSKMIEIFDAHNCSFVSVTQNFNTADSMGRLMLNVLLSFAQFEREISGERIRDKVAASRKKGMWTGGVVPFGYIPINKKLVVKEREAEIVRFMFDGYVKYKSITGICKLIKDKFGEEYRREMVKRILRNPIYIGKIKHKDVFYDGQHEALVSQEIFDEVAKIRASKDLTKRTCLYKKNEVGILRGILYCGCCHTKMTPTATNGHKLRRYYYTSTKAKYYGYHTCQNGSVAVAVLDEAVLQIITPMLRDTALLNGLVKEIAPDRIKEIFKIMQKPELLLKRMSELDKSLLVRKLIERIIVQYDTLEIKWTELALDMLPVKYQKKTTDGVMTIATPLSRTKDLLQVSIPEIVEPVPTINKELVRALAKAFRYQKILTTTKISLAELAAREETDAGFMGRILRLTCLAPDIIKSVLAGTQPADFILQPLVRNEIPPIWAEQRKLYGFPEI

SEQ ID NO: 981 - protein, 549 aa, unidentified
  source 1..549: note = uncultivated organism
MTAPVRAALYLRVSTGRQADNDLSIPDQRPQARAYCASRGWEIVADYVEPGVSATDDRRPEFQRMIDAATTKPPAFDVIVVHSFSRFFRDQFQLEFYVRRLAKSGVRLVSITQELGDDPMSNMIRQIMALFDEYQSKANAKHTLRAMNENARQGFWNGSRPPIGYRIVEAAEQRGHRTKKILEIDPIQAETVRLIFRLAREGDGSSGPMGVKSITKHLNAAGVRTRDGGRWGLAAVHDVLTRTTYIGRHRFNTRFWKTRERKPEAEVVEMTVPPIIDTAEFEAVQALLKSRSPALTAPRVVSGPTLLTGICFCAGCGMAMTLRTGKGGRYRYYTCSTKVRQGETGCTGRTVPMHKLDTLVADHIEQRLLQPARLESILSSVLDRRKERAERRTAHIAELRKRASEADAKLKRLYDAIENGVADLTDPMLKDRIAELKAIRDQARADAERAEDAIERLGPTITPQTLKTFARHARKRMRTESGGYRRDHRRALAQRVEVDRKEVRIMGSKSVLLRTLVAASIAKTAGFGVPSFVPKWRARKDSNLRPPDS

SEQ ID NO: 982 - protein, 552 aa, unidentified
  source 1..552: note = uncultivated organism
MKTIRCAIYTRKSSDEGLEQSFNSLDAQREACGAYILSQASEGWTALPDIYDDGGLSGGTLERPALKRLLAEVAAGRVDIIVVYKVDRLTRSLFDFAKLVETFDAAGTSFVSVTQSFNTTTSMGRLTLNMLLSFAQFEREVTAERIRDKIAASKARGMWMGGTPPLGYAPNDRTLVIVEEHATLIRHLFARYRALGSVRQLQDELVRDGVRVPARTRLSGASIGGGAFTRGQLYQILKNVIYTGKIGHKGMLYDGLHPAIIEQSLFDAVQAMLADHCQGHRSQAAAAESSLLAGRVVDAVGELLIATHACKGKVRHRYYVSRALHHGSGNTGVRLPARELESLVIERLTQLLADPIELAAAMSLEVTPNLLTALPDRCTVLAAQLGHRRPALVAAIVTSVQIKSAEVVVSVDLAALATALSVERPGSAPNILDLPCTARLTRSGRALRLVQDNGALIRKTPDKSLVRLLVQARRWWTLLCGGEIGVAELAVREGVSASYATRVVRLAFLAPAVTEAILAGRQRAGVTAASLTLERIIPADWQAQKAAFLPVR

SEQ ID NO: 983 - protein, 526 aa, unidentified
  source 1..526: note = uncultivated organism
MPRTITVIPATINAFTKKPEMAMAKRRVAAYARVSTDSDEQFTSYEAQIQYYTDYINDHADWELVEVYPDEGISGLSTKKRENFRRMMDDALAGKIDLIITKSISRFARNTVDTLTAIRQLKEKGIEVYFEKENIWTLDGKSELLLTIMSSLAQEESRSISENVKWGQHRRFEQGKVTLPYKHFLGYERGETKDSPPVVNPEQAVIVRKIYSLFIHGMTPGGIARQLTAEGIPTPAGKQKWGASTVESILTNEKYRGSARLQKRFTVDYLTKTTKVNEGEYEQYYIEESHEAIIDPEEWDAVQDEIKRRKEFGKAYSGKSILSMRVVCGDCGGWYGPKTWHSTDKYKTVVWQCSTKFDKSKPQCETPHITEEEIKARFLKVYNGLIESKAAVIAACKAAKDRFVKCPELQAEKDELLAEMNEVTVLTQQCIADRQNGHGNDFSARYNGYVERYEKAKARFDEINEMLDARAVKGRAIDRFLRDISGREELLTEFDAVLWMTVIDIVTVRKDGVLVFRLHDGREIEG

SEQ ID NO: 984 - protein, 543 aa, unidentified
  source 1..543: note = uncultivated organism
MTKTDNKIAAIYIRCSSDEAKKEGYSPQTQKEKTEKAINEYGWQTNKNLIYSDIGSSGGTDKRPGLQQLIKDAQTGKFDIVVVYRMDRFFRDVRLLLNTIEDLRELGIGFKSVTEPFDTSTPTGRAMFANAGIFAQWMREIGLESRNEGMIKAMKEGKYLSGTAPYGYDLNRKTQKLKINKQEKGIVKKMFKWLTEEKLSEYKIQNRLNELKIPTKYDNLKRGKRTLSKCWWNKRAVGRILRNERYTGIYYYRKYKKPSRCKNKSNLRPKEDWIKLKMPEEKIISQKTFNKAQKQLKRNKELSKRNTKLIYALQHKIICGYDGRRYQCARRLYKSKKTGDQRETKYYFCSAIRKDLSAQKCPSSTISDSRILPPVWNKIKEILSDPKLVMTKLEEYKQKKTDDKEIKAEIKHLEKKILRERKKKERYAELYAEGSVLKKFYDQKVKKCNEEIEITQKEREKLSQKLMSEEARKERIESVEKLYKKLKDKLENATYETKREVIQLLIEKIVKTGDRLEIELNIPFKEKREEIDSAGCEDRRRVD

SEQ ID NO: 985 - protein, 505 aa, unidentified
  source 1..505: note = uncultivated organism
MERYLEYLRKSRMDTDFDEVSVEETLNRHRKILESFCKERRLNVVETLEEVVSGESLSSRPKMLRLLELVNTGMYAGVVCIDIERLSRGSSLESGYIMQVLQANNCKIITPSKIYDLQNESDEQFTDMKFMFSRYELKTITKRLVRGRNQSASEGKFLGSVAPYGYRIYKLPGIKGNSLRIEPSEAEIVRLVFDMYGEQGIGYNTIAYQLNEMHVPSQTGTWGQTSITNILNNEVYLGMIRWKHEPTKRIVKDGMLAKKRVTSKDYELYEGLHEPIITQEQWDQVKAKQRERNHASVHKDKKLMNPFATILFCEKCGAVMKRNVPAKSQNTSPWYRCPTRGCDCRTIKCDFVEDAVIKAMEKWLAEYTIKIETEQSPQTDPTETALSFVRDQLVELQMQQDKICEYLEKGVYTVEMFTKRNDTLTREIQKQRAAESDLLKKQSSQSETKSAEAEIIPTTQHILDSYPRLSVAEKNSLWKIVMEKITIFRTPDGEFSMHIYPKLPM

SEQ ID NO: 986 - protein, 560 aa, unidentified
  source 1..560: note = uncultivated organism
MKNKHFLAAMYLRLSRDDSDVGDATDGKGNVKSESNSIGNQRELIRAYIHEQQDIELYDIYVDDGFSGSNFDRPEFKRMMSDVEAGRVNCVIVKDLSRFGRDYIESGRYIQKVFPALGVRFIALTDHYDSIHADAGESGIVLPVKNFINDSYCRDISTKVKSQLEVKRKNGECIAPFALYGYRKAEYNKNQLVIDEYAADIVRKIFEWKMDGMAVSAIAEKLNGLGVLSPKEYKKSIGSNYKGGFSGAVKSMWSSSTVKRILTNEVYLGHLIQGKTEKINYKLKKSVEKPKEDWVKVENTHEAIISQDNFQIVQNLLKVDSRVSPVSEKNSLFAGVIFCGDCGEQMIRRVNRYKDTQKVYYICSTKNRGEGCTRHSIEEEKLKRIMLESIRRYANYFLEEKRVFEKSLELETNFEAIVRYDTEIARLKQEQDKYYSLCSGLYEDLKSGIISKEEFERLHGEFKRTATEFEDAQKKQETMIKELFKNGVISAGRLKTMQDCAELKEIDRHTLCSMVKEILVYEEQRIEIVFYYTDQYRIMSEVNKRIQNREKIKCLSERSA

SEQ ID NO: 987 - protein, 551 aa, unidentified
  source 1..551: note = uncultivated organism
MSKKKVAIYNRVSTVKQSDKEFSSLDAQKEMCESFLRGKGSDKYDIHKIYTDTKSAKNLKRPGLRELRNDAAKGNFELVVVTKLDRISRNIKDFLELVEELENNGVDIAVTTLSIDTSTPVGKFQQNLMLNLAQFEREMNAARTKEKRRETAKKGHWLGGFPPLGYNVEEKKLHVNDEEKELIQEMFTRYLKTKSSTKVAKSLNKDGYRNKEWETKKGKIRGGSKFDKHIVLRILQNKLYIGKIEHKEEVYEGIHEAIIDEETFEKAQKIRKANDTPSKSYSDDNTPAVLNDLIECGFCDSSFTTTSTTKSSTGKKYHYYRCIKKNNEGKTKDHAPKDLSVSSLDEFVLHTVKFLLKEPELLEAMKQRATFENETDLESTERKIKQMTDTLKVTKKDIKNTLNLLTKNPDGPSADLYQEQLDDLQLERERIEYELEYCKKRKEALENRQVIDYDTYKSILQEFVKLWDESDSVLREDLMKTVIQSVISHVDSDKSGEVEINYIADKQLEAEWTQIKKCEPEKVQVRTTVMPGSPGRIRTYDPSVNSRLLCR

SEQ ID NO: 988 - protein, 579 aa, unidentified
  source 1..579: note = uncultivated organism
MSAERRAIIRCAIYTRKSSEEGLEQSFNSLDAQREACQAFVASQRQEGWRALPARYDDGGFSGGNLSRPALKRLLADVEADKVDTIVVYKVDRLTRSLADFAKIVEALDARGVSFVSVTQQFNTTSSMGRLTLNVLLSFAQFEREVTGERIRDKIAASKRKGMWMGGTVSLGYEVKDRKLIVNPDEARLVNRLFGLYLELGCVRKLKARLDREGITTKLRTSGVGNQSGGAAYARGALYKILQNRLYLGEIHHRKQHYQGEHEAIVARELWDQVQTMLAKNNQGRKDAVRSKSPGLLAGLLQDAEGNRFTPSHTLKAGRRYRYYVCQPKIENSEAEAKAIRLPAHDVERQVTLRLQSFLQSNPTVMSELGFPSDSPARTKELIAAATKHSEATDKDFLTKVVRRVIVHPDRLELEIGKNTLRSVLMGSRPDPRNLADEQEQASVELIRLEVRAQLRRHGGEMRLVVSPDMPGHVTPPPVSSLLKAIARGHQWHEWIVDGEVSSKVAIAHRLGLTDGYVGRILECAFLAPDIVEAILDGRQPTDLTFQKLTCKLPLSWVEQRQQLGFPQVPQSARHLTAR

SEQ ID NO: 989 - protein, 542 aa, unidentified
  source 1..542: note = uncultivated organism
MNARRTSTEARASIELQRAAIYTRKSTGKGLERDFNSLDAQREACEQYIQSRAYQGWQLVETRYDDGGFTGANIDRPAFARLLDDVDAGRIDVVVVHKVDRLSRSLLDFAGVMGRFSEAGTAFVSVTQNFSTADAMGRLTLNVLMSFAEFEREMISERTRDKIAGARRRGKWTGGSVPFGYAVDDKKLVILAEEAPIVREIFGRYVQDHSALEVAQHLNEVYPNTEPRTYRGKRRQPGRAWTKHAVLRVLKNPLYAGLIPLGDEVFDGEHEAIVERETFRLAAARLDAHSRYKPGRPPNADYLLTGRIFCALCGSALTPKSTTKRRTGKTYRYYSCVAKDQRGRKACKARPLTASALEEFAIARIREATADGALARDIATRIDAYAERKRGVLLAERRKLPGEIAALAAEARRLLDTLTSVEPAAQRLVEARLEEVGLAVAGAEARLAEVERALLGLDARQTEGRWGQRTLENFGVVWDVMTPRNRLRLVRGIVRRVEVDEPRGAIHVLLHDLAVEPPEGDDGADCSKERTAQGGALKEMNA

SEQ ID NO: 990 - protein, 562 aa, unidentified
  source 1..562: note = uncultivated organism
MEPRKQRTLRCAIYTRKSSEEGLEQEFNSLHAQREACEAFIRSQLGEGWQLRKTRYDDGGLSGATMERPALKRLLADIEEGLIDVVVVYKVDRLTRALSDFARMVEIFDRRQVSFVAVTQQFNTTTSMGRLTLNVLLSFAQFEREVTGERIRDKIAASKRKGMWMGGLVPLGYEVRERKLVVVDSEAQTVRHIFERYCQLGSVRLLKEELDRDGLRSKLRIARDGSRSGDQSFSRGALYTLLRNPTYIGEVRHKGTRYPGQHQLIVARLVWEKAQGLLRLHTVRTVGKPNGSMSSPLVGKLFDETGDRLTPSHAVKGSRRYRYYVSRSLMRGAADQTAQGWRIPALEIERNLADALARILDERTAIVRDLDRNLDAAKIQSILEIAAQWSASLRSEEERSKALASLIERAEVAKDGFRLSIRVPLQENGQSPPGENTALFFKRHVPLQVRRRGIEMRLVVGGGADPKVDSAILKAVARANQWLTELLSGRSDSLVEIGKREGVGKRYVSRIIRLAFLAPSILEEIARGHQPPELTAQALSTRRGDLPLSWQAQRELLGFVSA

SEQ ID NO: 991 - protein, 545 aa, unidentified
  source 1..545: note = uncultivated organism
MLPKQNNYSVGIYMRLSKDDERAGESLSIENQRAILTEYVSQQGWTVYNEYVDDGISGVTFERPGLQRMLDDAKAGRINLIICKDLSRFGRNYIMVGQYTDYIFPMYGIRFIALNDNVDTANSQSAGMDMMPIMNIFNEWHCANTSQKIKAVFASNAKAGKYKSCIPSYGYVKADDEKHTPIIDPESAAVVKHIFELRAKGIGMQRIAKILNEENVLSPYDYYCKRVGKFNARRSVTHLWGKDAVRRILYNPIYIGTLAQQRYTSVSYKNHKTVFKDEEDWVVIENNHEPIISQELWDKVREYDVSVSRGKSDKNGVVSPFSGLLYCADCGFKMKKTQLKIKGKEPDVAFSCGYHMRFGKNYCSTHTIRESVLEALVIADIQSKLQLMVNEEQARDQFLKKKMGLHNAQTATDNKRKREVESRLAELETLIQSVYENMVLGKVSEDLCIGLLDKYRAEKNELETEFDEIQNRLDAFSQDEHDVDEFIRRLKKYARFEVLTREMLLELVEYITIEDAPRTRNAPRTIHIYYKFLDKAPLNKRNILM

SEQ ID NO: 992 - protein, 584 aa, unidentified
  source 1..584: note = uncultivated organism
MKKIAIYSRKSKYTGKGDSIENQIEMCKEYISKFISEDVQFNIYEDEGFSGGNLDRPNFKKLIRDIKSNNIDILVCYRLDRISRNVSDFSSTLELLQAHNCAFISIKEQFDTTSPMGRAMIYISSVFAQLERETIAERVRDNMLEMAKNGKWTGGKIPVGFTSEKKKYIDDEGNMRQKSSLVQNKEELEFVKFLYQKYLELGSLHKLECYLSENNIKSKSGILFEKSTLKIILQNPIYVKADEDVIEYLQSNSWTVYGETDNNHSLLTYNKTKQAKLNGKNVKIKNDISERIAAVSSIPGYIESKLWLDVQKQFDKNRDTFPRLGKTHNAMLVGKLRCGKCNEYMLVQHGRVNKDGEKLFYYLCSLKRKSHGMLCNNNNAKAAELEKIVILILKNIGLNKKAYLESVKQHNDSILNEKDIEIEKSALLKEMEENKLKLDKALDILLSSNDSDATPILLEKIKILKRNENVIQDKLNNLEEKFKKAKIEKINIELIESLVDKCATIDSMSRDKQKELIDNLIDVIYWYGDGNHGGKIRIKFIGTDNQSDEIEINENSINKLLQNGVPTSCKAYDYLLSLRKTKKN

SEQ ID NO: 993 - protein, 523 aa, unidentified
  source 1..523: note = uncultivated organism
MKNVAAKSIRCAIYTRVSTEQGLQQDFNSLDAQRDAAEAYIRSQAHAAWSLIRSQYNDGGYSGGSTDRPALQRLLADVRAKKVDVIVVYKVDRLTRSLADFAKLVELFDSHSVSFVSVTQQFNTTTSMGRLTLNVLLSFAQFEREVTSERIRDKIAASKRKGLWVGGMVPLGYEVKNRKLVVIKSEAETVHTIFKRYLELGSLDLLMQDLRERKIVTKVRRLSSGRAVGGNPLTRGPLAHLLRNRFYIGEVAFKGEILPGEQPAILDRKLFDAVQRKLDEQRTNHSMTRTRSEALLMGRIFDDRGNRMTPSHARKNGKQYRYYLSSALLRGQAENAGSVRRVPASEIETLVVDAVRKRLNGSSAASDLDLISKHLARVGIQAGRLAISLLKKGSKPYEGKATFYIRWKKSTLKRHRELIAPTSSGQDVRPIRSETRIALVTSIARGRRWLDEIVTGKVADVEQIAVREKCSVRQVNMTISLAFLSPTLVKAAIDGRLPRGIGVARLRDAPPEWSRQHAMLGLA

SEQ ID NO: 994 - protein, 513 aa, unidentified
  source 1..513: note = uncultivated organism
MREVIVINPNAAPLHDKIRTAAYCRVSSDSDEQLASFSTQVSEYTARINKNPDWTMVDIYADEGISGVSAAKRPEFQRMMADCRRKKIDRILTKSISRFARNVKECIEYIRELQSLGVSVEFEKEGIDTAFLSGEMMIAVFGSLAQEESKSISSNMSQSYEMRMKKGEFVTCHAPFGYRLNRCSLTIDDREAKTVRYIFSSYINGMSTREIADALNSQQIGNHGNVWRSRNISIILRNEKYVGDAHNRKNQDRYKDDAFGIRPPKAEYYIENSHPAIIDRSTFEKAAAVLLRRRTSSTGQRKKNSSMLAGRMQCEICESTMRRKVTRSGHVSWSCQRHDQKKENCELLPISDSAVVNAAQQMIVLLSAMYKTILLPMEAQLNQLRNIKLSHDISLTEQNKEIANISGQLHLLSRLKSKDLIDDESYLSQTGELKRKLMYLQEQRQITIHEQQQDNALEQTQMIIEALQSISELPAAAEEDEVFETIVDKVIIGKDRSISFRLINGLKLEGFHG

SEQ ID NO: 995 - protein, 536 aa, unidentified
  source 1..536: note = uncultivated organism
MSKAAIYARKSKATEKGASVENQINRCKTHLNNMDITDISIYTDDGFSGKNTDRPAFTQMMNDAKAKKFQVLICYKFDRVSRNVSDFSSLVDELTELGISFISLSEQFDTSTPIGKAMMNICSVFSQLERETICLRVTDNMYDLAENGYWLGGECPTGYKHKRVSYVNSKGAQKSYAILEPIEDELALVHFIYDKYLELGSLSKLEKFTLTNNIKSKKNKDFSKTTLALILRNPAYVKADEQVFNYFKSLKINTFGNPDGIHGVLIYKRHKGKGGKLHNMDEWIYSISSHEGIIDSEQWLNVQKLLNANKAKAPALGCSNTALLSGLVTCANCNKPMRVAYGNKIPNSNDRRYYYMCTLKHNSGKTRCNSRNVNGFDLDRIVVNKIKELSVNKTVLLNQLNNYNSSLKNSYNSTYYESIKKEISNNNISINNLLNNVALTTDEDVVKILLSKISSLKEDNKQLSDKLSTINSEIESNEQLIKNYSKLIERLKKLSIYIDTATIEEKKNLINSIIERVYVNGDTGAVSIKFKEFDYH

SEQ ID NO: 996 - protein, 532 aa, unidentified
  source 1..532: note = uncultivated organism
MKIAAIYSRKSKFTGKGESIINQIELCKRECNHLSIEKFIIYEDEGFSGKNIKRPQFQKMLMDAQEKKFQVLICYRLDRISRNIADFTTLINKLDCLHISFISVNEQFDTSTPMGRAMMYIASVFAQLERETIGERVRDNMLELAKSGRWLGGQTPLGYESEKLSYLDFEFKEKTMYTLSPIKKELNVVKIIYDKYLQYKSINQVFIFIYKKSIKTKNGVDFNKKRIQLILRNPLYVRANEDVMNYLKVTGMNVMGKANNKHGILTYNKSKGARIKRDVTEWIAAISTHEGIIDASTWLKTQKILDMNKNKAPRLGTSSAALFTGTLKCSKCGKSMIVKHGHISAQTNKKIQYYVCSTKDYSKGIRCNNPNIRVDELEKVVIDNLKNISINKNILLEELNKLKIEITKSNLMLSEIDNLPEQINTKQAQMDILVNQLSLDNEISKYIRPQISKLGSEIENLNIKYDILKSASYKNNNNESKTNKFLYSINDFSSLMNNLDFNNKRLLFNNLVSSISWDGAKGIVIIKLISLK

SEQ ID NO: 997 - protein, 562 aa, unidentified
  source 1..562: note = uncultivated organism
MSRKPLVRCAIYTRKSSEEGLEQDFNSLDAQREASEAYVRSQAHEGWRALPDLFDDGGFSGGTLERPALLQLMEAVRARRVDVIVIYKIDRLTRSLTDFARLAEQFDAHGVSFVSVTQQFNTTTSMGRLMLNVLLSFAQFEREITGERIRDKIAASKKKGLWMGGTTPFGYDVKDRSLVIKEEEAASLRTIFSLYLELGTVARLEAAVEAQDIRTRRRTLSDGREAGGHSIQRGHLYHLLSNPLYAGRIRHKEKVYDGAHPAIIDQATWDAVQTLLADNTQGPRKRVPRPTTEPGWLTGLLLDQDGKTFALNHANKGGKRYRYYVERPTRDDANRKLKRVPASELERVVQEATCGFLQDPLKLIEKLGIDRPEQTGSIFEAVDSLKHHMADNATAAWDSRIRPTLKHIALNAEGISLSFDRHALQQLLGLPALPKSAPDTLVIDLPVRVKTRGAQFKLVLPATGTDTPRIDITLIKAMARAHTWTRQLITHEQPTIASIAKAEGFTKGYVRRVLRLGLLAPDIVEAILDGRQPVDLTAEKLMLHAEVPRSWQRQRSELLGIS

SEQ ID NO: 998 - protein, 510 aa, unidentified
  source 1..510: note = uncultivated organism
MAQVQIIQPYQPQSDALEKVAAYCRVSTDSKDQLNSYRTQIGYYTNFIAQHPGWELADIYADEGITGTSLEKRDEFKRMLQDCRAGKISRILVKSVSRFARNTLELIETTRELKNLGVVVVFEEQGIDTAQMLGEMQLTLLAMAAQEESTSISKNMRWSYLKRMENGTFLGCRSPFGYTLENGKLLPHPQQALIIQEIFERFLAGEGKQAIADDLTARQIPTRFGNTQWNIAGIHYILTNERYCGDALLQKTFTSGFPARKQRNHGQVNQYYAADTHPAIVSEATFRAAQELIKKRDNGQRTRLHAELPIVCPECGYTYRKVRSRGKEYWVCSSRNRGQSHCSSPRLEESDIQMAFLAMVGKLYTNQESILQGSLSLLEEIAARQEQGNAKLYELNTALADLNEKAHTLQRLHNKGFIEDGDFREQSNALASQRKKLSDQRAQAIRGSKALETFDKLRDLQEQLTSLPEIPWEFDIDLFDQLVEKIVPISNAELLFKLKCGLELKEVLPK

SEQ ID NO: 999 - protein, 542 aa, unidentified
  source 1..542: note = uncultivated organism
MNGPVGKLARCAIYTRKSSEHNLDLAFSSLDAQREACEAYIRSQAHEGWRLIPGRYDDGAFSGASLDRPALQQLQADVRAGTIDIVLVYKVDRLTRSLADFAKLIELFDAHGVSFVSVTQSFNTSSSMGRLTLNVLLSFAQFERELIGERVRDKIAASKRKGIWVGGPLPLGYAAVDKKVVVVPAEAEAVRTIFERYLALGSIRALAADLDHRGIRSKPRRLSTGRSIGGGAFGVGALAYLLKNRFYIGEVVYRGQINRGDHTPILGPDLFEAVQRKLAAQAVERRCRLRGSPAALSGRLFDDRGNRMSPSHTNKAGARYRYYVSQAVLQRKPLAAGAIARVPAAEIEMLISAAVRSHLQANGTDAVDCDRELVERHVERVTLAPKHIQLQLRQIGDELVQTEADAGASRPGSEQLDGLVIVTIPWTSTVQAGVKGIIHVPAHNTPMAPSRRDALLMAIAKARHWADELAHGRVGSVAALARREGKVERHIRLLMSLAFLSPRVVSGLLDGTAPAGLTVTALARALPWSWAEQERRLGLHCD

SEQ ID NO: 1000 - protein, 538 aa, unidentified
  source 1..538: note = uncultivated organism
MRCGIYTRKSTEEGLDQEFNSLDAQYEACAAYITSQRHEGWSLVSHRYDDGGFSGGNMDRPALKRLLADVQAGKVNTIVVYKVDRLTRALSDFAKIVEVLDARGASFVSITQAFNTTTSMGRLTLNVLLSFAQFEREVISERVRDKIAASRKKGMWMGGTVPLGYDVQDRKLVVNEGEAETVRHIMQRYTELGCGRLLVEELREHGICTKQRSDRGGAPFQRGPLFYLLSNRVYLGEVQHRGSYYPGEHRAIIEQPLWDAVQATLARMRSSERRRATCRSPSLLVGLLYDQQGRRMQPSHANKSGRRYRYYVTAADVVTTNAAAARLPAHDIEQVVRDRLVSFLCDRTELRRVLMVEDAAELDQLSRRCGDLAAKLKGRALPTLIQRIDLTDGAVLLTVDRSVLSDAIKIQLPEGAAPIILPAPSVRVRHGKEVRMVLKEAAADDPVRNPHLVALLTEAAEARQLVGRSGELSITQIAERAGRCRSYLAKLYRVAHLAPDIAELIMSGRQPGHLTTRMLLNTKLPLSWSEQRIQLSIA

SEQ ID NO: 1001 - protein, 508 aa, unidentified
  source 1..508: note = uncultivated organism
MEQRRNLRCAIYTRKSTEEGLEQEFNSLEAQREAAEAYIHSQHLAGWVALEERYDDGGCSGANLERPALKQLLEAIEAGGIDCVMVYKVDRLSRSLLDFARLMALFERHQVSFVSVTQEFNTTTSLGRLTLNLLLSFAQFEREIISERTRDKLSAARRKGKWIGGIPVLGYDVDARGGRLVVNPEEAQRVREIFAVCEQAGTLSVALREIERRGLQTKGWTSRSGRQHASKAFAKSTLGALLRNVLYKGCILHKGVVYPGEQDAILEPAQWERVNRKLALNRTSQIGKRHQRQDRLLQGLVRCGECGTVLVATYTRKQGRQHSYYACKTAKCRQRPVPAEDLENTLRRHLQARLGSQPSTIAIQQTLEHVLYTSHSREVVVVLQDGTRFEYMLPAPQRVGVRPAKAKTGRIPRISKLMALAIKMERLVREGKVDDYAALAEVGRVSRPRMTQIMNLINLSPEIQETLLFLPLTVRGADRITERHLRPVAQVVDWKCQKQLFSKLTATV

SEQ ID NO: 1002 - protein, 577 aa, unidentified
  source 1..577: note = uncultivated organism
MTSKHVRCAVYTRKSSEEGLEQSFNSLEAQREACRAFVLSQKHEGWTALNNRYDDGGFSGGTMERPALKQLLDDILAGKLDTVVVYKVDRLTRSLTDFAKIVDVFDSHGVSFVSVTQQFNTTTSMGRLTLNVLLSFAQFEREVTGERIRDKLAASKKKGMWMGGVIPLRYDCADHRLMVNRPEAETVRKIFRRYLRLGCVKKLKDDLDRKQIRSKLRTSSAGRTSGGTPYSRGALYHLLNNRVYVGEIVHRGQSYPGQHGAIIPRELWDQIAARLQMNNQAQRSTKSQSTPSLLSGLVFDPKGVRFTPTHAVKNRKRDRYYTSQAAIQRTGDKPAVSRFPAQELERLVTSQVHLLLASPDKCTACLEGSPDKDVAADRALDLTKRWPKLEISTQHEFVRNVVRRVVVGQTAVWIEVDRAKLAETLLGGKPEFGAAIGNQRLDTIKLTTNFQPHRRGGELYLVTPKSSSSDGIPVPCLVKAIAQARDWYERIVAGEVGTVNELARKTGLPPCYVRRILKYAMLSPRITETILSGKHLPNLTLRELPDSIPSDWREQQDRIFRLVGRDIPGPDTLVRSL

SEQ ID NO: 1003 - protein, 528 aa, unidentified
  source 1..528: note = uncultivated organism
MKAAIYCRLSKEDEDLEKENRGKESESIQNQKSMLIDYALEKGYEIYHIYSDEDYSGIDRNRPDFNRMIEAASQKKFDIILAKTQSRFTRDMELVEKYLHGKFIEWGIRFIAVVDHVDTADEYNKKSRQINGLVNEWYLEDLSNNVRSVLTHKRREGKYIGTFALYGYKKDPKDKNHLIIDSEAAEIVKYIFALYLAGNGASRIARLLNEENISSPTRYKREHGINYKQSVRCQNEDLWSKATIYRMLTNQTYIGNLEQGRHKKVSYKSPKTVWVPKKDWIIVPGTHEPIVDYESFECVQKMLQDRVRGGGHGKINPLAGKVFCGICGSSMEQTGSGYVNKKTGKSLKYFRCRMSQRDKKRCPGQEYMPMEQLQAIVLERIRHHISGYLALEKPDKDLMDLRTENKQRAKQSELERLRNEIQRRRKAMQELYLDKSSGIVESAQFVELNQTFLDDIEELSKRCSRLEKELEEVVDIGLQRAKLERYWEDIRKVETLSRGLACLMIEKVVVYPYDNIANTRKVEIDWKF

SEQ ID NO: 1004 - protein, 545 aa, unidentified
  source 1..545: note = uncultivated organism
MKPAGRPLRCAIYTRKSTEEGLEQDYNSLHAQRDACAAYVQSQAGEGWTLLPEVYDDGGFSGGNMERPALRRLMADVASGLIDVVVVYKVDRLTRALTDFSRIVDVLDKAGSSFVSVTQAFNTTTSMGRLTLNVLLSFAQFEREVTGERIRDKIAASKKLGMWMGGGVPLGYEASGRALIINKAEAETVRGIFRRYLDTGSVHHVHQELTEAGVVSKRRTTKAGVETGGLPMHRGALFHMLRNRTYVGEIPHKTTSYPGQHPAIIDRETFDAVQTRLDDNDRKQRAPGEARRPHKGAPLMGLLFDSAGNPMSPVKAVRPNKPSYHYYVSTAVTTGRPDKAGAVSRISAPLLEDIVAQRLGELRIIDTSRVTPDWAIARDVVERVEVGAEAVIIIFDEERLQVAARDLKPENRVGIDRLERRGDLPMTEIRVRLVRRGGTMFAVGPQGSPAVASSRIDRAMTTALIRAESWKRRLLTGEVENLNVIADAEGVSGAFVRRMIRPAFLAPDLKAAILDGRQPVGLTLEAVTRSELPLDWVKQRRLYAG

SEQ ID NO: 1005 - protein, 587 aa, unidentified
  source 1..587: note = uncultivated organism
MRTKSLDLDFPTLDQLSEKPEKTARTIKKIDPVVRTVPKIRVASYIRVSTDHADQKESIAIQRQHFNSLAKRQPDWIFVGCYWDVMSGTKKDKRPGLQRLLADCRAGRVNLITTKSISRLARNVTDLLEMVREMTATGVRIIFDRENIDTGTMDSELLLTILATMANEESKSFAENNRWAIQKRFKDGSYRRGVAPYGFDLVDGHLEVNETEAETVRYIFDRILSGVGCSTIAKELNEKGIPTKRIGEKRKDGIVHSGKWGAATIRGMIRNEVYMGDSRLQKTFKDTLFKTHLNEGQLPQYYYEDNHPAIVSREAFSRANVVLTQHFKECGAKKEAAPTYTFTKKLVCGNCGALLWRCTDTRKANKRKYWLCSTHHKEGAKACSMKRVMEENVENTFTTMMNKLHFCDLIVVAYRDMLRKGWRDRCGDELRSLEAGLAQNSINQLNLQAQRGTMDQAMFHTQMDILKAQEVETRAEIDLIMDSQVSEADKLLAMVQAWGMKKAFKPDAFEALVDRVVARDRETFEFHFKCGLVLTETVIYELPEAPVISAPQPTLDQERVLLPPAEEDAPRRNVIKILPVRKVAEGL

SEQ ID NO: 1006 - protein, 545 aa, unidentified
  source 1..545: note = uncultivated organism
MKQAETAAVARNAVIYARYSSHGQTEQSIEGQLRVCHEYAQREGFTIVGEYIDRAISGKTDDRPDFQRMISDSRKRAFQYVIVYKLDRFARNRYDSAVYKHKLKQNGVKVVSAMENIGDNPESIILEAVLEASAEYYSLELAQKIKRGMRESALKGQFCGGGIPFGYKSAGGRLVIDEAKAPFVKKAFEQYAAGVPKKQIIEELNAAGLRNRNGKPFGNTALQVALQSEKYIGILRWNDIVIENGCPALIDRETFDKVQERIKQNKREGGKNKAKIEYLLTGKAFCGYCGETITGVSGTGRHGDIHYYYCCRNRRLRKGCKKAHEKKDFLEWYVVEQTVLYVLTPGRMQEIAAAVVAQYDSEFNSDKVKELERQIAKLDRDIDKYTEMLLDAPKSARPRIYEKIETADMQKVDLEIDLSKLHIANKIRYTEAEIVAWLKLFCKGDLFDMEFRRRIIDTFINSVYLYDDRVVVFYNIRGGKQVSYIDMLDATEGFPGLDDEPAPADSAETPDAKKKPDTVSGVRLLNGMVEVTGFEPAASWSQTCV

SEQ ID NO: 1007 - protein, 589 aa, unidentified
  source 1..589: note = uncultivated organism
MEEKKIAGIYIRVSTEDQAREGFSLGEQKEKLQDLCKYRGYKVFRIYEDAGISAKDTNRPEFQEMLEDMRNGKINVIVAYKLDRITRSTKDLENLIIEIQKCNCGLECAVDDINTETANGKFFTRMLTVLSQLEIERCSERTRFGMVGAIKEGHIPGSIPLGYKRDNKKVVIDESTKDTVLKIFDLYIGGNSYQKIANILNKQNEMNHHWRDNTIQAIVNNRLYTGDYIQFKNTEKEIIYENVIPTIISKDTWEDCQNQKGKNSRNYTRNITYLFLQKIRCPNCNRVMAGKAPGGKKKFKYVYYQCLKCGDYVREDLVEKQLAPWLVELMNYDSLIVNQFAPLLTNKLNNPTDKLEKELETLNIKKERIKKAYVNGIIEMEDFDKELKDIDYKVNTINQKLKKEKVYDSVSFDFESLMVCRDYERFSFIEASDGLGLTEMDNWNKLSSEEKQSLIMRYIDLIELEGTNKEVKIKKVMFKESFIKEYANYYNNYGLDFLIELKVDNKSYRLYTTKEKDRNEIERYIKMLSNIYDIFTIEKEIETLANGDVKIRIEESDVREGYRAVKLIPIKRELFESNTSRKVILICIK

SEQ ID NO: 1008 - protein, 570 aa, unidentified
  source 1..570: note = uncultivated organism
MVKVAVYSRVSSQEQATEGVSIEAQVAALKAYAKSQKWEIFHEYIDAGYSGGTDDRPALKRLMIDAGQRRFDIIAVCKLDRFFCNLRLLLNHLHNIEKLGIRFVSIQEGIDTSNHYGSFITQFMGIIAEFERGRIGERVKDSRQFLISQGIWPGGRTLYGYRWLAEKKQWEIVPEEARMVRYIFDLYLNEKMGIDAILTRLNKEGLCTHTGSRWRRASVRQVLVHPAYNGRHQLEIRIPAIIDDATWYQAQEKRENARKLFGDPRGWLLQGMCFCGRCGHVMSCVHKKPEEPRYYACRSRIQSIALRDGKPCDLPFVRAKELEWGVWQKVKDVIDNRETLVECINKALSELEEQKSQIGAESLEIDDKLESIKSKKERLGIAFADGAVSESSYKSKLNQLKKQEITLFKSHNAIHPSKLAGLSVLEERIGRVKDILSVGNIYITEFGIFGAKNDEYFPAGFNAWRESDGKLAIGEFRESDRIPVAGTDLAMRGIDAPPGFWTCQDPREREEYIKKNLRGVLQLFQVKVFIFPDRIEIKGSIPTQLIEFPKDRRKNTASIISSPSQTSKIE

SEQ ID NO: 1009 - protein, 614 aa, unidentified
  source 1..614: note = uncultivated organism
MEIQLRVAIYLRVSTEDQAEKYGLKAQRAAIEGIIKSKGTLDDGKTPAMVLAGKAYEYVDIDISGSKEIDERPEFRRLKEDILNSVEGSRPFDIVAVFKIDRFARRLYILMDVIKFFEEYKVEFLSATESIDTSTPFGRAMLGIMGVIAELELETIKERMSKGREQAVQEGVFMGTHAPYGYQKDKERHLSLFEKEAAVVKRIYHLFTIEKLSPQRIADTLTEDEVLSPDASAVKYKKHKGVSRKINKPFFWRAEVVRTILSNEIYIGVRYYNKTEGRKRLPKSEWKTSNYRHKEIILMHIFELAQQQLRAISERKTLTKKKEEGHIYLLSGLLKCDFCKSMSGKIDMMNWTGGKKKIGTEPLRYSYYYFCNRKNRKKFDTICPVVPIPAEPLEQYVLTFIKDLLSDPRATYEYQKGLESSKLNIQHLESRKDHFTELFNSLPQTRKSILEQHELGVLDKETLVKKLGELSAKEGEYREKIEELDFQLSQITISKGYEASIELYAKKYQKMLEKEFIDKREIFELMHMLIYQVVVYSRPTTQRDKIAGRPKEGQVIPNKIDIYLNLPQNLLRSLYSHRFGVRSDNWYPRRDSNPPNLTFRLFSTIRTRLKERFW

SEQ ID NO: 1010 - protein, 523 aa, unidentified
  source 1..523: note = uncultivated organism
MAKKQSKPKEASPTIRCAIYTRKSSEEGLGQEFNSLDAQRESAEAFIASQKAQGWVCLPEQYNDGGFSGGSMERPALDRMLRDIDDGKIDCVVVYKVDRLSRSLMDFSRILETFEKREVSFVSVTQQFNTTHSMGRLTLNILLSFAQFEREIIGERIRDKIAAQKRKGKWTGGVPVLGYDVDRSEASPKLVINAEEAARIRAIFDLYLSKGSLLPVVHELALKGWCNKKRTTKKGKLIGNKPFDKCMLYNHLTNPVYIGKITHKGEIYEGEHEAIIDLEVFERVQELLKANGRGGGTEARNTYGALLRGILRCKACDLSMTHTFTTARGGRNTQYRYYRCVGAIKSGSCTCPSGSLPAAEIERVVIDEIRAIAKDKSLLKQVLAESQGKIEHELQAMQTERDDLTKELKRHYREIKRLATDPGDAVDRVAELNDRITDGEQRLPTINARIAELECESISPSEANTAFEAFDTLWGNLIPREQARLLQLLISSVEYDAEHESISVTFRPTSIRALVGKATKEAA

SEQ ID NO: 1011 - protein, 515 aa, unidentified
  source 1..515: note = uncultivated organism
MKTRSAAIYARISFDPDGVSDSPEDQDARCQAEAQRLGYEVHEGDVYIDRSISAYKDKHRPRLADMLAAVEAGKYAAVIVWKLDRLTRSYNLGGDILRRIDDAGVKLISVTEQIDTSTPIGKAIVGFQIAQAETESENTAKRVARKHSTWAAQGVAAVGGNRPFGYQHVKAVEGVSPASLVPDPKESKVVRECVKRIKSGESLRSVAEWLNESGVSPTAKGRGNGKWSGQTVRQMLRNPTLAGLRVLNGVETVGVWKPIITKDERAELLLHFATEKPSGGKPPERRLLSGLLRCGQCGAPMYVSVGRYKCYSAVGKDACGLVGAHAEHLEDHVTEQLFTFLQSVKLRPLPNQVDPEALRASVESATERLRDWDRRHAVLGEITREEWQPIHDELVTLIDTSREALSAAELQPTSALQPGNRADLVAWWDAADINARRTALAHSIARIEIAKVGEIRNRFDPNRVHIVFKWNFYELAKVSLAAWDAMSDEERQATWEAEQATLTDAERHLAWNEEA

SEQ ID NO: 1012 - protein, 500 aa, unidentified
  source 1..500: note = uncultivated organism
MRYAAFYGRYSCERQNEQSIEGQLRICQQYADQHDLKIVETYIDRAMTGTNDHRPAFQKMLADCEKNVLWDIVLVYAIDRFGRNSIEIAVNKQKLKKNNKMLISATQRTSDNIDGSKNLDGILLENVYIGLAEYYSAELSQKIRRGLHESRMKGQFSGGILPYGYYVENKKVFIDEERAEIVRFIFQQYAEGTTVKEIIRKLTEKGLTYRGKPFAMNTVYQMLRLEKYIGICRYDEGVYDNIFPAIVPKYIYEDVQKILQTNKKGSKSTRTEFLLKGKLLCGYCGKNMHGDSGTSHTGKTMHYYNCMARKRNNSCNKSAVSKDKFEKLITDTTVQLFEDQSNIDLIANEIMNVHKTRMNKKSVLSILENQRDEIKRSLANIMKAVEKGIFNATTQSRMEELEKQLADVESNIAIEQYKEKTILTKENIIDFLTNAILQKPKKMLQTLIQKIVVYDDKIIIYYNFTDKTNPDESNHRESFYYPGSDSSVMVEINGLEPSTS

SEQ ID NO: 1013 - protein, 502 aa, unidentified
  source 1..502: note = uncultivated organism
MYDAIYTRQSVEKADSISIESQIEYCKYEARGNPHREYIDRGYSGKNTNRPAFEEMLTDITQGKVSRVIVYKLDRISRSIVDFANMMETFQKYNVAFVSSTEKFDTSTPIGRAMLNICIVFAQLERETIQKRVKDAYDSRSKRGFYMGGRIPYGFSKADTVIDGVRTSMYVPVPEEAEQVRLMYALYADPANSLGDIVAYFNKHGIKQLRDGMWNTARISDMLRNPVYVQANVDVYDFFISQGIHVVNPVTDFVGYNACYLYTGAGSTPGKRGDLTGKEIVLAPHEGIVSARDWLKCRIRCLSNKQSTTCNKGKNSWLVGKVKCGNCGYSLSIAKANTKWGRYFICSTRLATKARDCQGTGGTIYAEVLEDYVFNAIRLKLSEFSALLKQQATRTNPKVNEYNIRIAQIDSEIEELLSKVVGANATLMQYINEKIDVLDAERKRLKEEVLSLTCVQEDGLDAIIGHVEQWYGTSFEDRQTVVDALIKVIRIADGNIEITWKI

SEQ ID NO: 1014 - protein, 761 aa, unidentified
  source 1..761: note = uncultivated organism
MYYIYSRKSKYTGKGESIENQVEMCKDYLYSHIKDIEEKEIVVYEDEGFSAKNLERPMFKRMIADSKKEKVDYIVCYRLDRISRNVSDFSSLIADLNNRNIAFVSIKEQFDTSTPMGRAMMYIASVFAQLERETIAERIRDNMLMLAKTGRWLGGTSPTGYKSEKVEQIVVDGKSKQMFKLKVIPDEANLVKLIFKEFIKTNSLTKVETYLIQNGIKTKNGKAFTRFSIKNILENPVYMVADETAFKFFLDNGVEFSEDDEIKSKFNGQYGIMSYNKTIQKEGKRHYTRDIKDWIISVGKHEGLISSVEWIAAQKQLAQNSSKSYRKPKSNVALLSGLLFCGNCGDYMRPKLSKRKNAQGEYIYSYLCQLKEKSHLHNCKMKNPNGNILDKMVCEEIKKLTANNSQFLKELSKAKKEILMQSENYEEEIANIEKSLSDIEKEISALVQALSSAQNTPAQKYITEKINSLDSEKNRLLQKKEELEDLLKNQDLSQIEFDNIKNLALSFSSTFDTMDIEQKRKALRTLVDKIVWDGENIHIYLFGSYDDKLPSSAIDTLEPKREDSKFYTNIVDFKNLEWHTVAKINDRLAILAKSEFNHTIYSLLYKHSFTFVTPRKLLEAEIFNIKYQDSKDINATAEKLRFYRYKKALLQKDVAKEVSINQSTYISYESNSRDYYPIDILEKISILYEVNVIELLDEYNLFLYKGQGLQLKKFRKELGLTQKALANKLNVHTRTVRQWEKDRVRMQKNTYIKIFKDNILN

SEQ ID NO: 1015 - protein, 561 aa, unidentified
  source 1..561: note = uncultivated organism
MERSKASIRRCAIYTRKSSEEGLEQDFNSLDAQREACEAFIKSQAGEGWRLVKTAYDDGGLSGGTMERPALQHLLADINQGGIDVVVVYKVDRLTRSLTDFAKMVEVFDAHGVSFVAVTQQFNTTTSMGRLTLNVLLSFAQFEREVTGERIRDKIAASKQKGMWMGGLVPLGYDVRDRRLVINRSEAETVREIFRRYLELGSVRLLMEDLNRRGVRSKVRVARNGKTSGGNSFFRGALYVLLSNPIYIGEIRHKGVRHPGLHEPIMDRELWEKTQLLLRSQAVRGASRTNSVASPLMGRLFDESGQSLTPSHAVKGERRYRYYVSRSLIKGTADSGGGGWRLPAPEIERTVAASACQVLSDRSGIAAAAQAIGLADHRLPSLFSAAAAWRERLQSEVEAGAALKALVDRVDLADTGIRVSLKVPLPQTGSRPAPDTNELIVTRFFPMTIRRRGVEMRLVIEGDRAPAPRADLALLKAVARAHQWSADLLTGRARSIAEITERERVGARYVRRLMRLAFLAPEIVAAIAAGNQPPDLTAEALAERIDLPLLWTAQEQAVGIA

SEQ ID NO: 1016 - protein, 609 aa, unidentified
  source 1..609: note = uncultivated organism
MARARTKNTIDSRKMAVYVRKSKITETGKSIEIQKEKCIALACAQFDVTEVDILIYEDEGKSGFYADRPKYKQMLRDIEANKIRAVVCYKIDRISRRTVDLLNLVQQMDQKGIAFVSVSDRELDTSTRTGKIMIAMLSAIAEFERDIIAERITDNMYELAKEGRWLGGECPLGYYSKKEKLVIDKKKTTINHLEPVPDEQRAVKRLYELFLQKGSYNATFTMLNAEGFKTKKGKQFTSIAVKNILQNPVYAIADADMQGYFASFDVPVWANDDDFNGIRGMIAYNKTEQTKELGEDSRALDPKFVQRSTRRDVEDWIISIGKHEGIISGADWIRAQSIISKISQDQASRANKESSKALLSGIVRCVKCGGRMYVRAESGRKNPDGSLRYNYYCGSRRNKDWDCTRPPTVRGYEIDNFVIEKISDMATGENSFYDDLLNTKNILLLKNQETENELATLRKQLSQIEQDIQSQIANLRSAPESLKQAIYADVESLNQECEEKQSRLDSIHQEQQSQDSQITDIEKAKQTILDFPRLINLVDYEGKMQLLQRVLECVIVKNDTVHIFLKGSEPNPSFMKEQERSDAQVACYASCSGVRPTCHPNLHSICYCI

SEQ ID NO: 1017 - protein, 560 aa, unidentified
  source 1..560: note = uncultivated organism
MPDRKLRCAVYTRKSTEDGLEQEFNSLDAQYEACAAYALSQQHEGWVLINDRYDDGGLSGGNMERPGLKRLLADIEAGQIDIVLLYKIDRLTRSLTDFSKIVEVMDTAGASFVSITQSFNTTTSMGRLTLNMLLSFAQFEREVTGERIRDKIAASKKKGIWMGGPVPLGYEVKERKLIAKEPEAEQVRHIMQRYLVLGSVPALAEELNAQGYRTKVQRRASGPHKGGCIFRRGTLYHLLSNRIYRGMIVHKSKAYQGEHEAIVDEKLWEQVQFKLKENACGSSRRKRHQYPSLLIGKVFDGEGRAMTPSHAQRAKMRYRYYVTRPDEVDGTPAWRVNAHDLERLICDRIAEEIAEPSLPQTLCQSDELDARSLEQALAKADFLAANLRSGTSDKKAGLIDALVDRINLAETDVTVQLNKFCLMDTLNLPECPNEAPAISICIPAIKVRRGHQLRLIIPGENTTHNKPLQRDPKLIALIAEALAARKLIEGNPERSIANIAEENGRCRTRLGNLIRIACLAPDIVQSIVEGRQPPLLNAKMLTRNPLPIDWAAQRKLLGIV

SEQ ID NO: 1018 - protein, 534 aa, unidentified
  source 1..534: note = uncultivated organism
MSKIKNIAQGSHVTVIKPREMNPAKLRVAAYCRVSSDSADQLNSYIAQVDHYTRYISSHEGWELADIYADEGLTGMEVNHREEFKRMIADCRDGKIDRILVKSISRFARNQEDYILHMRELLRLGVTIYFEKENIDTGKITSEQTADIYGAFAQMETTSHSQNMRVSYRIQMEKGIFVPAKAPYGYRLEDRELHIVPEEAEIVRYIYREFLKGRGKQDIANELNARGVVRSNDRHISSTGRSDVWRVDTVNYILTNLTYTGNQVWHKTFKTDVLPYRKERNRGQKPKYYAEGCCPAIICKEDFEKTQQLIAKRQDAFPKVPSSETMFSKRIFCAECGSSCRRKNVGTQIYWVCGRHKQGKAMCPTKGRSEMLIWEAVSRFHQKIWNGRDLILRPILTQLRELQERELRANQRIGEIDAEIAKITDQNLVLTRLKSKGYMDSDLYLSQVDEINARARELRRLRRGILEKTGEDEQIRRTEEMLEYLESDDGQMEELDPLIFTVLIERLFLTADGNVKIRLRNGLEVKESLATEVR

SEQ ID NO: 1019 - protein, 525 aa, unidentified
  source 1..525: note = uncultivated organism
MKPVAPKAFRCAIYTGVSTDHGLEQEFNSLDNQREAAEAYTKSQAHEGWKLLRDRYDDGGFSGGTMERPGLQRLLADIRDRRIDIVVVYKVDRLTRSLTDFARLIELFDQHGVSFVSVTQSFNTTTSMGRLTLNVLLSFAQFEREVTGERIRDKIAASKKKGIWVGGVVPMGYRVVDRKLLVDEAEAATVRLVFSRYLALGSLPALQRELRDMGILTRQRTLTSGGTRGGVALTNGPLNHMLRNRMYLGELNHRNSSYPGEHAPIIDRDLFDAVGAKLTGNLHQRRSTRSHSDALLMGRLYDDRGNRMSPTYAVKKGLRYRYYVSTMLVQGRRSEAGSIPRVPAAELESIVMDAIAATLPAAPETTDRDCIEHSVERVIVGQGRVEIRLGQHAATTAATNPIAIPWSPQPMRRKREVIGPVAQDAAARPIRAEARSKLLHGIARGRCWLSEIMTGTAGDIETVAARENITERAARMTLSLAFLAPDIVQATADGILPRGFGISRLTDLPNSWAEQRHKLGLPIRS

SEQ ID NO: 1020 - protein, 549 aa, unidentified
  source 1..549: note = uncultivated organism
MKASAAATAEKAAPSRAALYLRVSTGRQSESDLSIPDQRRQGLAFCKARGWEVVVEFVDAGLSGTDDKRPELQRLLDMATTGGSPFDVVVVHSFSRFARDHFALEYHVRRLRKAGVRLVSTTQDLGDDPMSVMVRQVFALFDEYQSKENAKHVLRAMQENARQGFWNGAAAPYGYAIVAAEQRGAKTKKKLAIDPVEAEVVRLIFRLIAEGDGTCGPMGVKAVASWLNAHGYRTRRGARWGIGPLHKLITSATYKGEHRFNRAVWKTKEEKPASEQVVVPVDPIIDAVAFDAIQANLKSRNPRATPPRVVTGPILLTGIATCASCGGGMTLRTGKYGRYRYYTCGTCAQKGKSACKGRSIPMGKLDDIVIGRLADQLLTPERVGALLRGLMDRQTAKDADYANRLTALRAKLSDAEGRLGRLYQAIESGIADPNDPTLKGRVAAVKVERDTAQVAFDRAVAEMRPDARITEAKIAAFVAVMRNNVLTGDVPFRRAYLRAMIDNVEVDDAEIRIHGRRTVLERLVMGGGAAPAGVPSFVRKWRGVRDSYA

SEQ ID NO: 1021 - protein, 549 aa, unidentified
  source 1..549: note = uncultivated organism
MTRTDDPLRDSLTAVHRTDNPLSARSASVQRCALYTRVSTEEQVERYSLEAQQEVLTRWAGVLGYEVAATYTDPGYSGAQEDRPALTRLLADAQEGRFAVVLVYRLDRLARKVRLAYDLIERLERCGVGLMSYSEPNINTTTSIGKAVLGIMAVFAEWERDTFAERSRLGMHKAARMGKYLGGIVPYGYTVEDGRLAPLPEEAAVVQQMFAWVAERGWSTERVAQELNRLGIPPKYRREGRGVRGKRTAGVWRGGGVLRILKNRTYIGEYVYGKRTRKPQPELVSVPVPPLVEPVLFEAAQEQLSRNALFALRNARSVYLLKGLIRCGMCGRAYVGSAGYYACVGRTNRQASPIPEMRCTAPHVRRGELEERIWHDIRSFLLNPGEALQAFINEESPESNEVSLLERRLQALLEARARLLDLYLEGGVEKETYYARLEDLDTRVREVQVSVEAARQRSIAERQRKEALHSLESLSARLRDRIDRLTPEEKQAVARELVEGVTVRPGKGEVEVEVRYRFGQIAPHTGRDSWPPPACTARERSPIPERGRA

SEQ ID NO: 1022 - protein, 543 aa, unidentified
  source 1..543: note = uncultivated organism
MARKSRKNVTPEEIPANAAYRAAVYIRLSVEDSQTGSASVETQQYIIGHFLDRHPEIEPFHTYIDNGLTGTNFNRPAFQSMLNDIESGAVNCVIVKDLSRLGRNSIDTGYYIEQYFSQRKVRFIAVNEGYDTDSADGRPDMMIALRNMVNEAYAADISKKITAAQRQMIKDGKYVGALPPYGYLKDPEDCHKLVIDPEAAAVVKQIFAWAANGMGINTIVTRLNEAGVMTPSYRRAEQGLITNEKQLGSGSWQTFTVNKILHAEIYTGDMVQGKSKVVARKQIPTNPDEYTVVPGTHQPIVSRELFEQVRGILDQTAQSVKDREQTPFSPNLLKGKIFCAACGRALHRQRSKRRKMPDRYLYHCITNSRTAHGTCPGILIYEEALFDELLPIIRNTLESFLGEETVTLSDPESDKETEKRLAFLRQEIRRKDGQIAGLYENLTLGVINREEYDSLREQFEAGLRELTAEADRLGDECKRRAEDSGRLRMLREEEEALRKNPVLTKELLDRLIERIDVSPDKSLRIRWTFKNEYGEEDTPCQPM

SEQ ID NO: 1023 - protein, 554 aa, unidentified
  source 1..554: note = uncultivated organism
MKKIRCAIYTRKSSEDGLEQEFNSLDAQREACSAYITSQKIEGWVQVAESYDDGGLSGGTLERPGLQRLMVDIRSGKVDQIIVYKIDRLTRSLGDFSKIVDTLDEAGASFVSVTQSFNTATSMGRLTLNMLLSFAQFEREVTAERIRDKIAASKKKGLWMGGNVPLGYEPDGRTLKIKEADARIIRTIYDLYLQFGNVRLTKAGVDKQGLKTAVRKLSSGRLKGGTAFSFGHIYHILTNPIYAGRIRHHAKVYPGKHQPIIEPKIWDQMQEQLQAGAVMSRSEKGRHQNERKKQVSLLIGKVFDETGDRLTPSHTKTAKGRGLRYYVSHRLIRSSGKKGTGGWRLPGPELENTVAKLIAEYLTKPEIAAGIVQNATSEELAEIGMRTKSLDHDLEKNCTEILSLALRVDIAQGKISASLDHKSVAEFLGINIDRINSDLMETSSKFQHRKRGVETKLILAGSAAPRDETLFRNIARAKRYLTLIQSGQTFAEIGETAGVSGRRIQQLIELSFLAPDVIRDIYDGSQPIGLTTEWLLRHAYPSIWQGQREVFRAL

SEQ ID NO: 1024 - protein, 536 aa, unidentified
  source 1..536: note = uncultivated organism
MEKMEKQEKKTINCAIYSRVSSSEGLEQEFTSLDNQRESAESYIASQKSEGWIALPDRYDDGGYTGANTERPALQKLLADIKEGRINCVVVYKVDRLSRSLLDFSQLLEFFDQNNVTFVSVTQAFNTNTSMGRLTLNILLSFAQFEREIISERTRDKMGAAKRKGKWIGGRPALGYDLDKVNHKLVVNQDEAKIVREIFDLYLEKRSLLSVAIALNEKNRKTKAYTAAKGNKFGGMKFTSNGVQLIVKNPLYTGNVSYKGQLYPGEHERIISDGIFKETQEILANNRRERKIAGTTKNIGLLNNILRCKACNSSMYYVYSMKGKNKYNYYLCMNAQKRGYKSCPTRLVAAQIMENKFMEFLRKITADPRIETNAWETFTLEEKIPILKSIAKVAPYDANNGILEIVLHKCDTSHKFALKLAELKHIPHNRIQIEIGKEPLLRQDLILAHQICDVSKEKGCSLRQITQWTGIPLPRLCQIANMTGISPRIQEEILFSQDKRLYRIPEYKIRDVISEIEWEKQEQIWNTLLKSAESEA

SEQ ID NO: 1025 - protein, 548 aa, unidentified
  source 1..548: note = uncultivated organism
MKSAIATREPPRRRKSEPAKANTVATIRCAIYTRKSSDEGLQQEFNSLDAQREAAEAYIASQKAEGWVCLPQRYDDGGFTGGNTDRPALKRLLADIEAGRVDTVVVYKIDRFSRSLADFMRMMTVFEEHGVAFVSVTQAFDTSSSMGRLTLNILLSFAQFEREIIGERIRDKIGASRQRGKWTGGTPILGYDVDRSNGGPRLAINPEEASRVCQIFELYLELGSLLPVVIELERRNWRNKAWTTRDGRTRGGLPFDKCRLYNLLTNVLYAGKVRHKSEVYPGEHDPIVSDDVFARVQQQLQRNGRNGTVEHRNRHGALLRGLLYCKACGRVMTHTFTTRGNRRYRYYTCTNAVKRGRRACPSDSLPAVEIENTVVEQIRCIGSDPALLGDTVAEARKDVEAALERLAGERRVVERGLARVQADVRRIVATGPVGGPSAGRLADLNDQVVAAERRLAEIDCRVAELQAERVDTTDVAAALADFDNVWRALSPREQTRIVQLLVQRVEFDAGEGTIEVSFHPSGIKALANGDRDATGPAKDPASDKEDAA

SEQ ID NO: 1026 - protein, 553 aa, unidentified
  source 1..553: note = uncultivated organism
MIRKHLFFVAVYLRLSRDDEDIDGSTKAESNSISSQREMIRSYVREQEDMELFDIYVDDGYSGANFDRPEFKRMMADIEAGNVNCVIVKDLSRLGRDYIEAGRLIQKTFPAFHVRFIALTDNFDSQTADNNTKSLVLPVKNFINDSYCRDISQKVKSHQKAKREQGKFIGSFAMYGYLKSAEDKNRLTPDGYAAGIVRKIFAWKIDGMSAQAIANRLDGLGVLSPMEYKKSRGEHYSTGFQTKTTAKWSAVAVIRILTNEVYTGVMVQGKSEKVNYKVKKSVAKPKEEWVRVEGTHEAIVSREDFEIVQELLGVDTRARAGGACSHFFSGLLFCGDCKEPMYRRVNRYKGVSKVSFICSTRNSGRGCTRHTIPEEELKETVFRTLQMQVSVFLDVCSQLKDIQKMEVDFGEITRFDKEIERLHKEQDKYLELRAGLHEDLRTGLISETDFKNFRAIYEKKYEEAKAALQRQEEMLKRLFKNGVSSGMRLERFKEAMEITELDRDTLLCFIRRIEVFEDKRVYVEFRWQEEFNKMLVLQEYMASRTESREGAHT

SEQ ID NO: 1027 - protein, 549 aa, unidentified
  source 1..549: note = uncultivated organism
MKRVLCLYRVSTKGQVDKKDDIPMQRRECMAFIERMENWCFYDELMEKGVSGYKVSASKRDAILEIRALAEKKKFDVLLVFMFDRLGRREDETPFLVQWFIEHGIEVWSTREGQQRLDSRVDKLLNFMRYWQAGGESEKTSMRVKAAHTQMTADGVWRGGARPFGYKLTHNGRVGKKNRPLYDLSIDEVEGPIVKELFHLVIYEGYGHLRAANYLNAKYPHLGKVWTAQTIRSMLKNVLYTGRMHMNDTQSAPIESLRIISDEEMQFAQYAQSRRMTRKSLQPAQQEEDAPAENTPTKASMYGATLLSGLLYCAHCGHRLIGGYCTKQRANHTYRRPIYRCYNGSVKAKECDGQTVYSAVRIEKAVLEVVHQYFQTISQTVDSVWKEQARLQLRSKQGARLKAAQANYAKLESQQMQLHQEVLKSLTGESVFDTALLKQMLDENKAALDAAAQEVEACEADRDNEAAKVEMLATQYRQISDWASEFDAANNDTRKMILARIIEKITVDRDYRLNITFFVTAEAFRQQVSQMEPQVHITEAERCVTMQAI

SEQ ID NO: 1028 - protein, 557 aa, unidentified
  source 1..557: note = uncultivated organism
MSRADPHAAPSRRCCAVYTRKSTDEGLEQAFNSLHAQREACEAYILSQRHEGWSLVPTAYDDGGLSGGTMARPGLQQLLQDVEAGRVDVIVVYKVDRLTRSLADFAKIVEVLDERGASFVSVTQAFNTTTSMGRLTLNVLLSFAQFEREVTGERIRDKIAASKARGIWMGGPLPLGYRVEDRELLPEPEEAGRVRRIFAIYVEVRSLAVLGRRLEAEGIRSKVRHTRESRSYGGVFMTRGALQKLLRNPIYVGRLSHKGVVHDGNHDGIVEEEIWTAAQAQLDGSAVARSSRRNAQAPSLLAGKLSDGHGRPMSPSHAVRRGKRYRYYITHNDHQDERTTWRVPAHDLEEIVVAQLLTLAGDNAAVLALGADSADSLDADRIGERLDAAAALGRALASAEPGCQREAVHGCVAAVRLHEDRLEIALVPAALGLPATATPVLTARAAKVRIGKQTKLVIDATGPRPVAADPKLTQLIADAHAVQGELMNGRSLDQVAADRQSRRSAVTKLARLSFLAPEIVEAILAGTQPAALTRRTLLDATALPIDWQAQRASLGFA

SEQ ID NO: 1029 - protein, 540 aa, unidentified
  source 1..540: note = uncultivated organism
MKATRSFRCAIYTRKSTEEGLDQAFNSLDAQREACEAYIRSQIGEGWRPIPTAYDDGGYSGGNMERPGLLALLKDIDNGLVDVVVVYKVDRLTRSLADFAKIVERFDKRGVSFVSVTQAFNTTTSMGRLTLNVLLSFAQFEREVTSERIRDKIAASKKKGMWMGGMPPFGYAVREKKIYPDPQEAPVVRRIFQRYLDLGSVLPLKSELAAEGIRSKSRVSRHGRTYGGAIFGCGALYHLLQNRLYVGEIRHKDERYEGEHEAIVTLDLFEAVQAKLQEQQRRSGASPAAQRRHPLAGLIWDETGRRMSPTHGQKEGRRYRYYVSRTNSSDKVIRISAEPTEAVVFNLVRRLAALPPTATTDAMLQLLKRVEIGEQTIRLSLDGKVLPDLPLGDDQRHPHPMDPVSRLRSRLKDGEMIVEQGGLLVLTVPVRPIRRGGITALVHPADGKPVGPTKPDLALLKAIARAHGWLGQMVSGRASTFRDVAKAEGIEERYVRRLIPLAFLPPAMLADALAGHQSAYLTVDRVASEGVPLAWQSSSA

SEQ ID NO: 1030 - protein, 701 aa, unidentified
  source 1..701: note = uncultivated organism
MIKKIKSTDFERILRVALYLRLSKEDLDKLTPEERSESIKNQEIMLRAYAEDNGWKIVGVYDDEDYSGSDRDRPNFNKMIKECENGNVDVVLVKTQARFARDIELVDKYVHNKFKEWNVRFVTYIERIDNTKYETKKTSQITAMKDEWMLEDTSINIRETFKSKRAKGQFTGSFASYGYMKDKENKNHLVIDSVVSNNIVRIFEEYDKGYGMNKIAEGLTNDNILSPLEYKLFNGINLKLPIIKDYVDYDSIDKAGTFIARATYLNDERQILKNLTTIEIFSDDILFNNKLDISLVKVKTEKINIYYSTKKLDELNIKIENNKYIYENNFNFDDNTTWIKLNENDCLPKNTTCIATNIKELDRTHEVYYDFEIKLKENRRHLNYYYNIYPSSDNKNVNLKYKIRIRNKHKWSTSTIRKILTDEIYIGNLVQFKTTTVSYKNHTIIYNDSDTQIRVENTHEPIVSLELWNSVQEKLSKSKKSCKNGKVHILVNKIYCESCHGVFYKCGKNNSTGYGYLCCRDKKTGWSNCSNKKWISEEFLHNYIMDKINALLKDFYSTEKQIEIDNNVVENDLFKEQINNLIKEKNNICKELKNKNSYFQGLYEDLKRGLLDENQYMSLRTKYKEDNNKLEERLNTIDGNLLSIEIQQNKLKNKKVLFNKYKQIDELNIEIIDDFIDKIEIGEYNENQNNRNIHIIWNFEE

SEQ ID NO: 1031 - protein, 552 aa, unidentified
  source 1..552: note = uncultivated organism
MIEKNKPTQVVEKKIAAIYCRVSTEEQASKDENSLDVQESTLRKYCLDQGLIVNDEFIYVDRGISGKSLSRPEIQRLREDAKSGSFHCVVATKLDRLSRSVKDFLDLDYELQQLKIDIKIQSQNFDTTTPSGRMLRMMLMAFAEFERDMISERTSDATRYLAQEGYPRGGIPPLGYKKVNKLYIIVDEEATLVKYIYDLYLQFPSTAKVATKLNELGYRTKSHTTKKGVDRGGKPFVKSIVQQILTNQEYIGKIKYQDKLYDGKHEAIIDESVFNLVQEQLKRSSHTQRFVTKEKATEIPLGEFLYCGFCGHRLVAGYGTKAGKRHYYYKCTRKTKESSSACNGKTLNAVHLENFVNKIFEVLAVDNRSFSLNFQNLSKGTGVQLTELEKERKTLLSNLSKNRGVLNNYNSMIGLKGIQGVPKSTLETIREQELVIESVENKLNSVDKKISRIKTASYDEKILKKAFINFVNAVKDMPAEKRKIIYQSFFERITSFVDDKTGDGDIVLKVHTDGKIVRKWAEMKKFELSEVESSNLRTIVYPGEDSNLRPTV

SEQ ID NO: 1032 - protein, 532 aa, unidentified
  source 1..532: note = uncultivated organism
MRGDRSRKENGNGLAAPSGVRCGIYTRKSTEEGLDQAFNTLDAQREAAESFINSQRQEGWTALPQKYDDGGYTGANMDRPALKRLLADVQSGTVNCVVVYKVDRLSRSLLDFARIMEILDKHGATFVSVTQQFNTTSSMGRLTLNILLSFAQFEREMISERTRDKMGAARRKGKWVGGNPVLGYDVAAKGGSLLVNQEEAQRVREIFALYLELGSLIPVVEELDRRKWRMKAWTTREGRPAGGKPIAKNSLYNLLTNMIYVGKVDYGGNVYDGEHDRIVDDETWNRVQSALNRNGRRGGRNIGNKYAALLKGLVRCGSCDVGMIHTYVNKKDRLYRYYVCVKAHQRGWTQCKTRSVSAPALEDAVVQQLRGIGHNPAMLREVLRQLADHRNRESAAIAGEKTDVERELQSVAQEMKETVSVAASDGTSADRATSRLAELQDRVSHLSNRLGELRQQLAAIDANGVDVHDVEAALHDFDSLWEQLSSWEQERFIRTLVEHVRYDGETGTVTLGFRSAGIKDFCNWAPALNGEE

SEQ ID NO: 1033 - protein, 655 aa, unidentified
  source 1..655: note = uncultivated organism
MSERRSKIRCAVYTRKSHEEGLDQEFNSLDAQRQSCEAYIESQRHEGWSCLPGRYDDGGFSGGNMDRPALGRLIDDIQAGQIDCVVVYKVDRLSRSLLDFARLIALFDEHDVSFVSVTQQFNTTTSMGRLTLNILLSFAQFEREIIGERIRDKKLATARQGKYIGGQPKLGLDIVDRRYVVNRKEAELVRRIFEMFLQLQSCRKVADALNAEGIVTKTYTTKTGKTFGGKSWKRRTVYDLLTDQKYIGKIVHKGVAYDAEHPAIVDAAVFEKVQEVLRANKTYTHKQQAKRFALLRRMLTCGECGGRIMPSWCRNHGREYRYYACSKKVKTGYGKCPLPTLPAGEIEKLVVGHLRALFRHPDVIARTYREIQRLAECGPSEDVLERLEHLRGRQEQTQRAIRAILDLGQHDGGFMAEELKRLSGELKSLEREIRQLQHCSVDGGTIELNQVTDALQRIDPIWEVLHPEEQRRVLELLVEKITVSKDRIEIRFRSNGIERIVEELGPVGTSSAGGPVSGHEPSDDHRPPTVRHDGDAIVIRIPVRFCRRNGQQVVMAPGGAADNGRENGERNDALVTAIGKAYRWQEQLESREYSGLEDLAAANGVDRTYVGRILRLTSLAPEIVEAILEGNEPEGMSLAKLRAELPMVWRDQRWS

SEQ ID NO: 1034 - protein, 642 aa, unidentified
  source 1..642: note = uncultivated organism
MRGCSLWDNGRWLQKLLEFYKKQWKNAAVYGKILSEERQKGVPWERRTRISIKSNISLLAFVLLNSLRRITHMGKTVNCLTVDRIYHAASYVRLSKEDGDVASAAKAESNSISNQKNLIRDFLKDKDDIIVVSEYVDDGYSGSNFERPGFQMMMEDIRRGKVDCVVVKDLSRFGREYIDSGKYIERLFPALGVRFIAVNDHIDSKEESGRDDIVVPFKNLMNDAYCRDISIKIRSHLQVKRKNGEYTGAFTPYGYKKDENDRNRLVPDLYAAGVVKDIFRMKLNGMSQAAIAECLNGKGILSPMEYKHSLGIRIQDHFKTHEQAGWSSVSVRRILENEVYVGTLVQGRHSTPNHKIKKIVDKPEEEWIRIEDSHEPIISKREFAIVQRLLGMDTRTSPNEDEVYVLSGLAVCADCGAPMVKRNVPAGGKVYSYYICSKNAATKECGTHRIPKEKLESIVFEVLKVHIANVLDAGRILEYIDTVPFQELEIRELERQKEAKEQEIGRCKELRDMLYEDLKDGVVSKEDYAELYEGYNSRRKKAEEAVRKLRNEIQKVMEAKTDKYEWLRYFKEYRNISGLSRMAAVELIDRVKVFDKNHVEIDFNFQDCFQSALRQIQSAGCTVCTEENGRINIQEIQEREVV

SEQ ID NO: 1035 - protein, 640 aa, unidentified
  source 1..640: note = uncultivated organism
MMKKQKRNNEDNRGVAIYARKSRITNKGDSIGVQFKQCAEYAKRELQLDDDYSFMEYEDKGLSGYYSDRPDFQRMLHDIEMGKIRAVVCYKLDRIGRKTSDLLRLLDFLEKHKVDLLICSNNINTTSGVSKIFIQIFAVVAEFERDTLTERITDNMMELAKDGRWLGGNTPTGFTVKRVKTGSGKNKSAYSYLESIPEEKAMIQKLYEIFGQLRSIKKTADKMNKLGYRTKAGSKFNASTTRLLLKNPVYCIADENAYNYFYENGGGLCEELSAFDGQHGLSAYNKTDQEKFEDADSTFISPKFVQIMSAKPVSEWIISVGRHEGFIPSQQWIDTQNMLDSIAEKYNRPHRKTNALLSGLVYCPLCGKRLRVISESNRWTNGKPRFKYVCPGYRVSECTFRAVDGVLLDEFVVKQLSNLSDEDSEYFTELLNQRASDIFKNSQNEQELTELKKKKAQLETAISNQVKNMRDAGDDLKRFIQKDIQDLSNELREIGILLEKLEGSKLNQMYAVRNIEEIKERLLSFGKYAEDAQPDVLVTLIQAFVERIYIVDENDERYCHIFIKGCTKEDYDEFFRATGYIENTQEARTVTSVLPVCDSDECCKHYGSTVHLYRMVSFSQLTEMGHSGYLYHSCVLQLLF

SEQ ID NO: 1036 - protein, 551 aa, unidentified
  source 1..551: note = uncultivated organism
MRVKSPQCREALKAYLYLRLSVDEEGGKALSIEAQRHAGRQYAKQNGIVIVGEYVDAGVSGTLSKRPQFDRMIADAIGPERPVDIILIYRQSRFARNTRLFLNTLHQLAEHGIEMVSVTENFGEGRTKRVGQTLVALMDEQRAIEDAIQTRKSRRANARAGFWNGGPVPFGYETYAAKTDGKKQRMKLRIIEGEADVVRQIFDWADQGRGGRWICKTLNDRGITMRGAKFSNGNLAGLLAREHYTGRYFDRTADDDGNVPEREDWIEVPCPQIISREQFERVAALRASRAPTQMAPHEAAGTTLLSGIAKCAMPGCGAGMTIGSGTSRSRQKYYYYRCNERTNVGQRCKRPNIRREKLDQAVLQAVEKRILSPGRLKQLLKDVIELSDGKREKLQQELTQANAERTRRRTAIDRLLVLIEEGVMKASDPEFANRLLENRTAVAALTARIEVLESQLARGSRKITPEVLEKFSRQLREKLHDDDPTLRKAYLRMLVDRVEVSNDQILISGSKTVLERGIARGASRLEGAVPIFDRKWCQKRHHIRTSFPFNF

SEQ ID NO: 1037 - protein, 533 aa, unidentified
  source 1..533: note = uncultivated organism
MGRSQKNDGNLALDQKKVIVIEATKRAEERKLRVAAYCRVSSDSSDQMNSFAAQLNYYTALISGKENWVMTDVYADAGISGTSAKKRPDFQRLLSDCRKGRIDKVLVKSISRFARNATDCLETIRELKSIGVGVYFEEQNIDTSNMTGELLTAMFAAIAQKESESISGNMRWSYQHRMKSGTFLPAAMPYGYRIQDREIVVDEEQAEVVRHIFREYLAGQSLSGIAAQLNRKNIPVRIGLENRQWMHTAISYILSNERYTGDSLWQKTYATDTLPAYQVKNHGERPQYYVEATHQPIIEKDVFEAVQELKGSRRKSRGACHLAHNPLQLKIICGICDTPYKRKECNRKIYWVCRTHDQGKDNCSSHRIPEEEIHAAFLRLYHKLRLRGEPILKQMIADLQSVRERRMLWSLEIIELNKRISEINDQDRMLAGMNKCGLVDPDIFIARSNLLAQQLRAAKQEKERILGAEQDDTIPRTRELMEQLETMPEFLPDFDGDIFTDLVTGITAGADNTLRFRLKNGLELTETIERSAR

SEQ ID NO: 1038 - protein, 572 aa, unidentified
  source 1..572: note = uncultivated organism
MGRKVAIYARVSTEHEAQINALENQIQYYDNKLSEHPDWELYDRYIDEGITGTSVNKRKNFMRMLKDAEKGCFDLIITREVSRFARNTVDTLLETRKLKRMGVEVYFTEDNIWTFKDEDGELKLTLMATLAQNESKKTSMRVKAGQKISFQNGVYYGSGNIMGYDRVGKEAVVNEDQAKIVRLIYQLFLEGKGVTKIKYELEQRGIPTATGLKVWNVATISRMLQNSFYCGTVVYNKEFTADYLEQKKRKNHGEVEQTIVEGKHVPIISKENFEAVQKLIKKHSIYLEDGVRKKLIGSPRNIWSQKLICHCGSRFNRRIYSGAGTDHQLYSYYCYRQKNEGSARKRKELGLDYEGFCDVVQINEWKLELMFSVLLKNLIKNKDKLRTIAKTAIESSALAETVNNEILNEIKEINIKLTTNKSRLDKLLNAYLDNMLTNEEYSSKRKELEDTIITLENRLKELEENSKNQSISVKDKINILKQKVDMLLDIDTNEISDVLIDSIVDKITVHNDRYEWKINYISSSSEENDENSNGVFFARMIITVDEIKRYNDKKRILKKVFQKEPIVMDIYI

SEQ ID NO: 1039 - protein, 519 aa, unidentified
  source 1..519: note = uncultivated organism
MGTITMIPAKRRIGSRVVQDEIPKTRVAAYCRVSTDTDEQSTSYEAQVDHYTEYIKKNPAWECAGIYADDGISGTNTKKREEFNRLIDDCMNGKVDMVITKSISRFARNTLDCLNYIRKLKDKNIAVYFEKEGINTLDAKGEVLLTIMASLAQQESESLSQNVKLGLQYRYQQGKVQVNHTRFLGYDKDEDGNLIINKKEAEVVKRIFREYLEGQSYCTIGKGLTADGIKTAAGNERWIPSTLYKILRNEKYMGDALLQKTVTTDFLSKRRVANKGLVPQYYVENNHEPIIPKELFMQVQTEMARRAKLETNVGKRRQYSAKFALSNTVYCAHCGEVFQRTHWDVHGKKKIVWRCLSRLHKKKAPTNCPARTITELDLHAVVIKAINEVFAKQDDFMPKLRANIEKVLGNSNSVAIAAIDERIREKEKQLIKMTKSRQNCDALGDEIIELRDEKHQLQLDDANKEGTRAKLEELESFLSEQSAEVKEFNDALVRRLIESITVYDDHFRVKFKSGIEIDV

SEQ ID NO: 1040 - protein, 547 aa, unidentified
  source 1..547: note = uncultivated organism
MKIAIYTRVSTEDQARDGYSIEVQQEYLLDHAKRLGWEVYKIYTDDESGYSLDRPALKEMLQDAKAKKFELIITYKLDRFSRKLKDLLNIVDELEGFGVAYKSATEPFDTTTSAGKLMFQQLGSFAEFERNRIKERVFPGMIKGVQQGNWQGARYAPYGYHYDKVKKLLEVVPEEADIVKLIYMMYLSNKTTGQIAEYLYRKGYKTRSGGKFNSALACKILKNQIYLGQLVWNRCHYDTKQHTGTRGGYKYVRNDPAKVIIAQGRHQPIICREDFDLVQKKLRANRKGVLYRGNVFEYPLTGILYCAKCGYRYQGTSSLSNHKTKKRKRWYKCSCMGTYHIRCSNPSIKAEDIEPKVFDIIKKILAHENVVHGRLDGMVKANIYLHNSDVRQELDKLNELLNDNLAKQSKLNDAYMDNLLGIEIYKDKVSLLRDEEGKIKAEIGKCKIKLIEKEQSEAYLKTLQLAIDNFDETQNKIAIVEKKEILKLIFKSVEINGGAIVSVRLYPPFQQMYEEVLRKCKTLIDQKITTKIQANREVCILQPTVVK

SEQ ID NO: 1041 - protein, 558 aa, unidentified
  source 1..558: note = uncultivated organism
MASINEVPKRAVRCAIYTRKSTEEGLDQEFSSLDAQRECAEAYILSQRAEGWIARSKRYDDGGFTGANLDRPALRELLADAEAGELDCIVVYKVDRLSRSLLDFARLMEVFDRRKVTFVSVTQQLNSYSPMGRLTLNVLLSFAQFEREIIGERTRDKQSAARRKGKWIGGYPMLGYDADVNTKRLLVNPIEAEQVRGIFTLFLACGSLVQTLDELRRRDWKLKSWTTRKGILHEGKCFDRPALVRLLTNVLYIGEVSHHGKLYPGEQEAIVDKATWRKANALIEGRRHGSESRSGSHEPAILKGLLECGVCGSSMVPGYGNNHGRKYPYYACLSLQKRGAKACPGQTVMASRIERVVVDRMYELAQDPARPELRETLQVSRREWEVLESAERQRILTTLFERICYDHRRQQALLRLASATSDPETIEVSISARLFAPPKERTSAAGRQPKLSRLMALALKFEALLQEGAVKDHTEVAYRGGVTRSRISQILNLRNLAPQIQEHLLLEPTPHITERMLQKLTRELDWRQQVAKFEELRCRIEPVNPNSATPAAPGLVVR

SEQ ID NO: 1042 - protein, 524 aa, unidentified
  source 1..524: note = uncultivated organism
MPKKKKDHGGNAVIYARYSSHNQSEVSIEQQVDACEKYAARNGYTVVDRYADRAVSGRTDKRPAFQKMMKDARSGSFDYVIAWKSNRIGRNMIQAMNTAAALAALGVACLYVEEDFDDTASGRFALRNMMNVNQFYSENMAEDIRRGMLDSASRGCVNSKPPYGYRRGADGRFEIDEPAAAVVRQIFDRVLRGWSIFDIMTDLNRRGIRTGSGGEWKKQSFGRLLSNDRYTGRYHWDEIVIEDGMPAIVDRSTFDRVQLILKTKKKPRGKQRMNDEYLLSGKLFCGECGSPMSALSGTGKSGKKFMYYTCNRRRYEHACEKKNVPKDVIEKQVLEYIRSQLMNDEFIDWVVAGYDKVVAEIRADSERLQLDAELKDVNRRIKNMLQAIEIGVINEATQERMQELLETRRDLEEAIRLDEAANSIPEPDEVRFWLEGLRAGDFSSRKYQRELISTFVHAVYVYDDRLVLRLNYGQEISLKDEKPPEISDTPGCSPPVSSGAPDASFENTSFMVSFFQVTLPLVRQ

SEQ ID NO: 1043 - protein, 532 aa, unidentified
  source 1..532: note = uncultivated organism
MQVALYARVSTTRQADNDLSIPDQLRQLKEWCKANGHIVVNEYVEPGASATDDKRPVFQQMINDALQKPQAFEAIIIHSLSRFFRDAIQFGVYERKLGKNKVKVVSITQLTSDDSAGEMMRRIISTFDEYQSKENSKHTSRAMKENARQGYFNGSCPPFGYTSIATQTTGSRGRNKKKLEIDEAEACIVRTIYDLYLFGYKGKMMGQKEIGRHLTEKGYLMRGKPWRVQKVHTILSDSLYMGDYYFNVIDSKTKQKRDPSEWVKTSISPIIDPMKFEQVRARRESRAPDKISPSVLASPTLMTGIIKCGQCGASMTLATGKGGRYKYYKCTSRKNKGNHVCTSSNLPMDKTNQQILDQLANKVFAPERVQTMMTALRKRIRSAKDTKQEEINALNRQLQNTEERQHRLLEAIETGILDLDDTVQHRAQNLKTAREALIIQIAAVRNDHSEPIEHIKASQVEKFTQILKDKLLAKDSAIAKAYLNLLVDKVVINENTATVTGSYDALAHAVTLNGTKKGHLNQVPTSVSDWGG

SEQ ID NO: 1044 - protein, 554 aa, unidentified
  source 1..554: note = uncultivated organism
MNKQTNFLVAMYLRLSREDNTGEKGSISKAESNSIGSQREMIRSFLNEQEDMELYDSYVDDGYSGSNFHRPEFKRMMQDVEAGRVNCVVVKDLSRFGRDYIETGKYLEKVFPALGVRFIALTDHYDSLSADAGEKHIVLPVKNFINDSYCRDISDKVKSQLAVKRKAGECLAPFAVYGYRKSVREKNKLVVDEYAAQVVRKIFCWKIEGMAVSAIAEKLNGLSILSPKEYKKSTGINFRGGFAGRKDSLWSSASVKRILTNEVYLGHLLQGKTQKVNYKVNISVQKPKEEWVRVENTHEPIVTTSDFETVQNLLKTDGRVSPERKEISLFMGILFCADCREQMIRRKVRYKQSEKIYYICSTKNRGQGCSRHSIEESTLTELVNLAVRRYANDFLQKDKLFQETRKQKVSLKAVSGCQKEFIRIKQEQDKYYRLCKGLDEDLRQEIITREEFERLKKEFAGRLEQLNKAEQEQEKRIQQMWADGMASVGRLEKFKESLSLEELDRHTLVSLVKGIYIYENKRIEMEFYLQDEYRIMQEYALTLSGQEGGGGRSV

SEQ ID NO: 1045 - protein, 523 aa, unidentified
  source 1..523: note = uncultivated organism
MTARTVQQLRCAVYIRVSTDEQASGNFTSLDAQREAGEAYIRSQQHDGWLPSPTTYSDTATGKNTKRPGIQRLLTDMRAGLVDVIVVYKFDRLSRSMLDFLQLIKEFDERNVILVSVSQRIDTSGPTGRLFLQILAAFGEFERELIAGRTKDKMQAMRKRGTYIGGMIPLGYDLDPHTKKLVVNPEEATIVRELFRLYLERQGLVRVVTEATARGWHTKRWITKAGKPFGGTPFTKLSLRNLLTNLVYVGKVQVDSVEYDGDHEAILDRATFDTVQEILQGNARAGRHHLGNRNPNALLRGLLRCGDCGKAMTHVPTRKPDGTTYRYYRCTTAQKEGAARCPSGSSLPAAEIEQFVIDRLRGIAEDPAQVDAIAREATVLATTRIHNVETDIATWETRVEELDREITHMRERLMQAPTQTREVFLIHLQAMETQHADLLEGLERSRVEAAALQAQRLTPRIFRTALTYFDPVWEVLYPQERARIVQLLIEGIEYSGARGTLGLTFRPSGILRLANELEEANHA

SEQ ID NO: 1046 - protein, 557 aa, unidentified
  source 1..557: note = uncultivated organism
MQRISCAIYVRKSTEKGLEMEFNSLHNQEESCKNYILSQTFNSWEYYKTYTDGGISGGTMKRPGLEDLLGDIRKGLIQTILVYKIDRFSRSIIDFHNMMKELEKCGCSFVSITQAFDTSTSMGKLTLNMLLSFAQFEREVSSERIRDKKAASKRKGFWMGGPPNLGYNVVEKQLVPNQKEAELVKLIFEKYLELGSITRVREYLEETGKTSKLWKTHTGTTRGGRKISSSMIARILRSKLYIGRIEDKMNGDSWPGRHKAIIGQKLFDQVQALMDENRNQYAETYDREGYLLSNKVVDSDGNVFKNQKCSKNSKRKYRYYILKGKYLPAGDLDEITIQLVKDLLDSQLDTIIGEPRTMEFKAIDYAALTIREQANLIKAMVDKIVFHDSRLTFFFKIEDLSYLKPFQKENYLNTKTWKMGERSENFKPYASNDGRHLVIQKSICLNNRHLSNLYVGRGKKIVSVTENSNNLIKALAIGWGYGKLSRQGMTLKDMRVSESRGNRSIYRYLSLNYLSPNIVNDIMDSRVPPHVNLQALFDIASRYPDFNDQEKAFYNNR

SEQ ID NO: 1047 - protein, 560 aa, unidentified
  source 1..560: note = uncultivated organism
MKRVRMLLRVSSNQQLEADGDLSVQRDIVKEYISRQPDWQLDEKEYFEGSNSGYKNAVADRDVLQEALQDAKAKEYDILVVYKDDRIGRRMWEIGAYVMSLKSFGVDIYTVKDGCISPESDDIMGQMMLALRYGNAQKSSSDTGMRVKDTAQKLVQKGKFMGGKAPYGYSLELSGEVSKHGRALHHLVVVPEQAEVVKYIYELSLHKEFGAAKIAKILNTHEVYKNRAPRDTWKCGTIVSILTNPIYAGYTAYKRRERIDGKYHTLDSKGWVFAEKPDPEITIIDENMWNRVQDTRKQRADKYIKSLENKNVTIIRRNSGMLALIDVLHCGYCGRKMTNGSKYNYWTIKDTGERRTSKIAIYKCQNAWNGIPHGKTKQYRADRIEPMVFEALAEYIGKLQENEDVFTQIEENQNRQKAIKQSELKKERDELESIRKKISVMEGNIPNAMTGDYPLSLEELAGIIRKHKELEKEQQKVVKEKEAELETMKVSMDDWESIRSKIPTWQDVFWNADTTTKRVLVDKLIERIDITKTNINIRFKINLNDFFTLPRITDYHDVPE

SEQ ID NO: 1048 - protein, 517 aa, unidentified
  source 1..517: note = uncultivated organism
MNKNVTIIPPSEDRPAILRVAAYCRVSTDSDDQATSYASQIRSYTELISQHEGWELVDIYADEAVSGTKTDKREDFNRLLADCRKGKIDRVLVKSISRFSRNTKDCLAALRELMRLGVTVQFEKENIDTGTLTTELMVSVSGSLAQQESMSISQNIHQSYRRRMERGEFITTKPPYGYRLVNRRELEIVPEEAEIIRWVFDAYLGGQSAKDIANELIRRGVRDRKGNVHWTTREIYYWLSNEKYVGDTLCQKTYKTGFPFVQKINRGEVDQFYVEGTHPAIVSQEVYDKAQALRQMKKKQSKGPDAVYPLSRKMCCGICGFTIYRRVTRRGTGAWSCGRHLRSAANCPTGPIPQETIYDAFLRMYNKLRLHDGIILKPALSQMEALETAVQRDNPAMLEVNKAIAQATERGYKISKLRANGLLDADACAAQMAANTAQLTQLRAKRRRLLKNDDIGEAAEALRQTVDAIRQGPERLERFDEALFEELVEQVVISPTALRFRLYGGIEVTERIGEDAK

SEQ ID NO: 1049 - protein, 535 aa, unidentified
  source 1..535: note = uncultivated organism
MAAEKPQQKKLRCAIYTRKSTTENLDMDFNTLDAQREAAELFIQSQGWLIRPDRYDDGGFSGGNIERPALKRLITDIEDGKVDCVVVYKVDRLSRSLLDFARLIELFDAKGVSFVSTTQQFNTAQSLGRLVLNLLLSFAQFEREMISERTRDKIGAARRRGKWTGGPPMLGYRVNRERRRLEVVPEEAERVRVIFQLYLRLRSVRSVTQKIQALGWKKKAFTTKDGRPTGGGEWDENTVHRLLKNPLYIGKVVYNGDVFDGEHEAIIEAATFERVQQILAAKACGRGPRRGRNPEYLLTGLLFCPKCGKALTTSSGRGSNGGRKDYRYYACRTRQAHGAGKCAGVYVPAADIEPAVIGRVREICADPSIRAEVGRRLDAGKATIADDLTEKRAALEERIETLTAEGKALVASIKQMGGKGGTLLPARLGEIEAELDGLRTQANELDDRMRGLIEAVGRVSTAVGLLESFDELWEVLAPEERVDLVRLLVERVDVDLDAGKLELHLHDLAAPFPPLPPPPQEDDKGGDEAPEEEAS

SEQ ID NO: 1050 - protein, 532 aa, unidentified
  source 1..532: note = uncultivated organism
MNERHKTHGSLALEQKRVIVIDAAERPETQKLRVAAYCRVSSDSSDQLNSFMAQLNYYTTLISGKDEWIMAEIYADEGISGTSAEKRQDFQRLLSDCRKGRVDKILVKSISRFARNAKDCLETIRELKSIGVGVCFEEQGIDTSDMSGELLTAVFAAIAQKESESISGNMRWSYKRRMESGAYVPSTLPYGYKRKDNRIVVDEDRAAVIRRIFTSYLAGQSSDDIAAALSSDEIPCRYGGTAWKSTAVRYILTNEKYTGNSLWQKYYTTDTLPYRHPRNKGERVSYYAEGTHEPIIPKEDYEAVQRLMAGRRQMIASAQNFAYPFRKKIYCGICGTIFRRKVIRNTVYWVCMGHDSHGNAFCPVTQIPEEEIKAAFLRLYHKLRLHGETILSQMLSDLQAIREQRMLWSVDIVELNKQIYELTDQNRTLADMNKLGLVDPDIFISQSNELAHQLQASKRKKEQLIGGRDDNTIPQTRALLETLEIMPEFLPDFDGEIFGDLVEKIMAESNTCLRFRLKNGLELTERIRKKVR

SEQ ID NO: 1051 - protein, 544 aa, unidentified
  source 1..544: note = uncultivated organism
MKLQDNYDVGIYCRLSRDDHNGTLESMSIANQRQVLVDYVTEKGWTLRDCYIDDGYTGTNFDRPDFKRMLHDAEIGKIDCIITKDLSRLGRNYVEAGYYTEEYFIEHDIRFIAINDGIDTMHDNNDIAAFHHVLNEFYPKQVSKKVRQVKKKSAEQGKFMGSQAPYGYMKSPEDKHILIVDDEAAIIVRRLFNEFANGNSARMIADKLNSEGVDTPRFYHYEKAGKKNPLSEQKNVWGSTTITQLLKNQVYIGNMVQGKRQVVSFKTKKMRRISPEDWIVVENTHEPLIERKLWDKVQERLNASHRKIRKTKSDVVGLFSGLVKCADCGMPLAYMRRQLKNREKGVYRCSRYNNNGSKACSSHYIDEEYISTFVLNDIRTYAHLAVTERKELAEKLYKALKKCNSSESSNIKSKVKTIQKRLFEINERMKSLYEDKCTGKIPEDIALSLMRDFTTEKSDLEKSLPVLQNKLADIGETMSSIDEWLDMISQFENITELDRETVCGLVERITVYEKDRSTSPVTQEIKIEYRFIKNLLQNEKEDIA

SEQ ID NO: 1052 - protein, 543 aa, unidentified
  source 1..543: note = uncultivated organism
MQTAVTKIWNTTLYLRLSRDDGDKEESNSIAGQRELLRDFLSKHPELRECAVRVDDGWSGSSFERPAFKEMIEDVKAGRTDCIVVKDLSRFGRNYLDAGEYIEKIFPFLGVRFIAVNDNYDSCEEKKASDDLIIPFKNLINEAYCRDISVKIRTQLEVKRKSGQYLGSFATFGYMKDEQNKNKLVVDQFAADIVRDIFKWKLEGISPQDIAGALNRLGVLSPMEYKRSLGMKYTTSFKTNSKALWSAATVLRILKNPVYTGVLIQGKETTPSYKVHKRIAKEESQWSVIENSHEAIIGKSDFESIQKVLSMDTRRSPQGETVSLFSGMIFCGSCGASMVRKTVPAGGKKYIYYVCSAHKQDKSCTPHRIRDTALEEIVLESLQQHIREVVDMSELLDITDTAPLRTAQAQKIQRQLDAKMAEHEKLQKLLMSLYENLADGIIDCEEYARLKQSFSSRADESEKQMDALRSSLDEIQEHGASNTWMDEFKKHQGITKLDRAVVVALIDKILVHNGDAIEIIYRWQDDFEWQLDMLHQAKLAEAI

SEQ ID NO: 1053 - protein, 576 aa, unidentified
  source 1..576: note = uncultivated organism
MQKPVNIEKQKAALYIRVSTTMQIDKDSLPLQKNDLINYAKYALNVSEYEVFEDAGYSAKNTDRPRYQQMMARLRTGEFSHLVVWKIDRISRNLLDFAAMYEELKRLGVVFVSKNEQFDTSTAIGEAMLKIILIFAELERKMTSERVTAVMLSRANNGQWNGGRIPFGYNYDKTTKTFSINEAEAATIRVIYDKYEETHSLLHTCKFLNENGYSTRSGIAWNPTTARTMLANPFYIGNYLYNKHDLSKSNYRLKTNRRPESEWILIEDHHVPLIEKERWLAVNELLKANRRSNKGEPRTYTRVNTHIFAGLLACGKCGSQMQSTIDRERDNGYRPSIYLCSRHRRFNDCSNKYISDIVVGPFVLNYIANIIKAQNNFGATTSLETFEKKLLRGDVFAGVKGIEGAGLQEMYDMLRSGKFGADVYEPKNISHTDNVSTDERDLLLTEKRKKERALARLKALYLYSDSDMPETEYFIERKSLTDELEQIDERLAELEKNASAAFSISDDDFIAKASYFIMSQQLQSKRYVNFDTMIRKIDTKIVKDFINSVVKKIVILDGKILSILFKNGIEHKFLYE

SEQ ID NO: 1054 - protein, 563 aa, unidentified
  source 1..563: note = uncultivated organism
MKAEEFYNTAIYLRLSRDDISSGAGNDIDGSKAVSNSISSQRDMIRSFIRKQDNMEIYDIYVDDGWSGANFDRPEFKRMMKDVEAGNVNCVIVKDLSRLGRDYIEAGRLIQKTFPAFSVRFIALTDHFDSLTADYNEKSLVVPVKNFVNDSYARDISGKVRSHQQIKRENGKFIGAFAVYGYKKSREDRNQLVPDDYAAGIVRKIFAWKIEGYSNFAIAQMLDGLGILSPMEYKKIQGEKYQTGFVTGVKTKWSAVAVKRILTNESYIGTLVQGKEERINYKVKKSVKKPEEEWIRVEQTHEAIISKEDYGIVQELLKTDTRAGGGEKKAHIYAGLLYCGDCGEPMVRRVNRYKGKEKVSFICSERNKNGECKRHTVSEKDLNNIVLAGLKTQVSLFLDKSRVLECIGQMEVNFEEVASFDAEIKRLRVEQDKYIVLRSSLYEDLKKQIITEEDFKNFREIYEQRYQELEQAIHNQEETIKKLFKSGVAAGINLERMKSVMQITELDRMTLVLFVKRILVYDDKKVYIELRHKELFSKITMLADYLEAKQADGKEESQLCWLV

SEQ ID NO: 1055 - protein, 573 aa, unidentified
  source 1..573: note = uncultivated organism
MTEKTTKRCAIYTRKSTEEGLDKEFNSLEAQRESGEIKILSQKHAGWELIPDHYDDGGISGGTMERPALQRLLEDIEAGKVDVVVVYKIDRLSRSMFDFLGMIKFFDEHNVSFVSVTQDLNTDTAMGRLVLNVLQSFAQFEREIASERIKDKIGLSKKKGMWMGGTVPIGYDAIKGKLEVNEDEAKIVQLIFNQFIETASSTAVVKHLKEKGHKTKGRTSRRGKHYPPKNFSKSALYQILNNKTYIGKIEHKEKNEVYDGLHAPIIDMKLWNRAQEILKTNIVDRRRITSDDRPYLLKGILEDPEGYAMTPTFTRKKDNKIYRYYVSTRAIKNGYSSCPLKTVSAPILEEVILGYVRRILTNTEWLNHIAKNDDNISLPDIKAMMQNFDAMWPQLFPAEQARIIQLLIHKVTVFPSKLVITFHPPGLASVLQDLLPELTFKDDEEPDMHKPMVLEIPINFKKRHRRKMITAPDGSDLISNENTNFDETLIKAITRAHKWQTMIDNGKARSIRDVAEREGIPSGYACKIIRLTELAPDITTAIINGRQPQSLQLANMMNDFPILWAEQRQHFGF

SEQ ID NO: 1056 - protein, 522 aa, unidentified
  source 1..522: note = uncultivated organism
MMAEKTVIYFPPKKRVGNKAAAEKVKKLRVAAYCRVSTDTDEQATSYDEQVDHYTEYIKKNPDWTFAGIYADDGISGTGTKKREEFLRMIDDCMAGKIDLVVTKSISRFARNTIDCLKYIRQLKAKNIPVIFEKENINTMDSKGEVLITIMASLAQQESESLSKNVKLGLQFRYQRGKVQVNHNWFLGYTKDKDGNLVIDPEQAETVKRIYKEYLEGKSCKAIAEGLMADGIPNGAGSTKWWDSNILQILKNEKYMGDALLQKTYTEDVLTKKRVENDGSVPQYYVQNSHEPIVTREYYHEVQAEIAKRARKKNSLEQKAGYRGKYALASVLICGECGSPFRRVVWNNRGKKEPVWRCRNRVVKGGDPCFAPTLHEEKLHALVLEAIRQAYDLKAPVVDQFRRNVDEVVGGGTEAELKGYEEKLKKLQAELVECVNQGRDYDELADEIRTIKAKQSQALDTKAAADEQKRQILEIQDFFSTHDASELEYDDSLVRKLIKTITVNRKTLIFEFISGTSVELEI

SEQ ID NO: 1057 - protein, 530 aa, unidentified
  source 1..530: note = uncultivated organism
MTRTRTRQQMPANPRVRCAIYTRKSTEEGLDQEYNTLDAQRDSGEAYIRSQAHEGWECLPDRYDDGGFTGGNVDRPALQRLISDIEDGKVDCVVVYKVDRFSRSLLDFAKMMEVFEKHHVSFVSVTQQFNTSTSMGRLVLNVLLSFAQFEREMISERTRDKIAATRRKGKWSGGMPLLGYDVDPRGSKLTVNDDEAVRVKAIFELYLEYQALIPVIQELDRRGWVNKRWTTRKGHDRGGKQFTKTSLYRLLTNVTYIGKLTYKDEVHDGEHVAIVGDDIWQRVQALLQRNGRTGGAPVRNKFGALLKGILRCVPCNCAMSPTHSTHKGNKRYRYYVCTNAQKRGWDNCPSKSIPAPEIERFVVEQIKCIGKDPTLLNETIAQAKSQGQSRVAELEAERRGLERELGKWNGEVRQLLDQIAPNDANTPATARLADLQERIRVTERRATEVREQVIALRHKLVDEREVAKAMSVFDPVWESLAPREQARVVQLLVERVDYDGANGKVTITFHPNGIRTLADELASQDTEDAA

SEQ ID NO: 1058 - protein, 527 aa, unidentified
  source 1..527: note = uncultivated organism
MMQKRIRCAIYTRKSTEEGLEQDFNSLDAQREACEAYIKSQMHEGWILLEKQYNDGGYSGGTMERPAFKELLKDIENDEIDIVVVYKVDRLTRSLMDFSKIIDIFDNHNASFVSITQHFNTTTSMGRLTLNILLSFAQFEREVTGERIRDKFEASRKKGLWLSGTSPYGYEKDEHHMLHPQQPYADNVRIIYESYLEIKNVLKLKKYLAEQKILTRSGKELAKGSLYHILSNKVYLGKITHKNKEYDGLHDPIISKELFNNVQNLLKANSVQRKHSTNAKTGSLLAGLLYDDKGNKMSPSYSNGKGKQYRYYVSQAIKNPADHERGEITKISAGEIETFVQNDFVKLLHNTHKMQEYLESYSVEQQKLMLDLMKIYEVDKIFLRTAIKRVDLKANCISISYDINYIIKYFATMAFNAEFKYTKDNEQLITNQIAVQISLTPQRQNKIIIPGKANYDMKLIQAIVKSFWYNKLGAERKLPIEARNGNNKRLRKLRFLPPEIIESIMNGTQAPDLTVKKLIEMAEKCCK

SEQ ID NO: 1059 - protein, 518 aa, unidentified
  source 1..518: note = uncultivated organism
MESNVTYIPPKAAKPEILRVAAYCRVSSDSSDQLHSYATQIKAYTEQIGAHADWELVDVYADEGLTGTRMDKREDFQRLLADCRKGKVDRVLCKSISRFARNTRDCLAALRELSALGVTVYFEKENIDTGTLTSELMVSVSGALAQQESISISQNQRMSYRRRMERGEFITCKAPFGYRLVEGKELEIIPEEAEWVRWIFSSYLSGKSLEWIAEQMAEAEIPTPDNAPYWQKTSILYILTNEKYIGDSLSQKYLSCDFPFRKRRNRGEADQYYIENTHPAIVSRETYEKAQQLLRQKGMRQRVEHPCSPLVRKIRCGQCGTVFSRRVGRSGLVAWTCRKHDRDAASCPVGRIPETEIHAAFVRMYNKLRANADIVLKPALAQLDDLEAALQRENPAMLEVNRAIAQAAEQSHNISKLQAAGLLDADACAAKLNAINIQLTQLRRERRRLLEHDDIEDTIGRLHQTADTIKAGPERLDTFDEVLFEELVEGIVAESQTRIRFRLHGGIELAEEVGRAKR

SEQ ID NO: 1060 - protein, 526 aa, unidentified
  source 1..526: note = uncultivated organism
MRYAVYARVSSEDQAERGTIETQLDFAAKYCDLNGIKPVSIYKDDGISGTVPFNERPGGGQALNDARNGKYDILLLYRIDRLGRATRIILNAVHDLEQCGVTVRSMTEPFDTSDPSGRFLLTILSGVAELEREDILERMWHGANRAAREGKWLGGIVPYGYFINDSGFLEISEEKMECGFSEADVVRFMYRLIAYEGKTTVDVANFLNALGVPPSYAKDNRMIKNGKRKENTAGIWRPSRIRNMIVNTTYKGIHQYGKRTNKKRELITRQVPAIVDEKTWETAVTNMHKNMWGSSRNAKHEYLLRGLIKCGICGRNYTGTTRVDKAYYKCGGKSAYHGPLPGGCKNSKNLPQKWIENLVWNDVVSFITNPGDVVQKLSKQAEDNRMGSIDYSERINTLQKSLENKDKEKQTILDLYRKGLLEQKDVEIQLKKIADEKIVLNEQIQALKDAVSLVDDTQKAIEQTINLLDLLKEKIEKGVDFKTKREVIELLVKEITVFSPVDKRELPKVSIKYRFGTIADRTGMGS

SEQ ID NO: 1061 - protein, 562 aa, unidentified
  source 1..562: note = uncultivated organism
MEKKYIEKTNDFIDVVIYARFSSLRQNETSIEAQVKECYKYCEAMHFRVIEIYEDDAKSARTADRPSFQRLINDSKKNLFKGVVCYKFDRFSRSRRDSILFKELLRQNGVKVYSVKENIGDDPSSILVESVLDGMAEYYSAELGQKVNRNMKLNAEKGYFNGGFAPLGYKVVTINLGTYEKKRLEIDPVTAKIVKEIFELRADETKIDHIIDILNHKGYKNINGKEFTRNSLQTMLKNKRYIGTNTYGDEEFPNTIPAIIDKELFDRVQKVIEKNKKGPGGAKAKEEYLLTSKIVCDCCGEKMKGVSGKAKNGSIYRYYSCKNYKDKKKCTRKNISKDYIENLVLNKCNQILDNDENIAFIAKQIYEICKKENNKNLIIKEYEKRIKIAKKAIENLLSAIENGDNVDLINKRISEKRKELEETEILLLKEKNKLANINEEHIRFFLHQLKNGDINDVKYRKKLINIFVNEIHVTEKDIIIVFNVSKQKISLAVPNTAKENIDTNPFLKGSYFNDMVSQEGFEPPTLGLEGQCSIQLSYWPISSDKIYNTIFVSNCQYFKLKN

SEQ ID NO: 1062 - protein, 557 aa, unidentified
  source 1..557: note = uncultivated organism
MKENKIYKAAIYVRLSKEDGDVSDVSKAESNSISNQKELIREFLKNKEDIVVVSERVDDGYSGVNFERPAFQLMLEDIKQGKVDCVVVKDLSRFGRNYIESGRYIEKIFPMLGVRFIAINDNYDSLIGKSQTDEIVIPFKNLINDAYCRDISIKIRSHLDVKRRKGEFIGSFTVYGYKKDVRNHNLIIVDEYAAGIVSNIFSWKIAGMSQQGIADRLNDMGVLSPAEYKKSCGSNYRAKFQTKSKASWSAVAVTRILTNENYTGTLIQGKYTTPNYKVKKTVVKNEEDWVRIENAFEAIVSKEQFNMVQELLKRDTRVAPNNKTVYLFSGITVCGDCGRQMSRKVSTVAGKKYVYYMCSANKKDGSCSSHRIKEDELEKAVITYLNAYIEELSEIKKLLGYVEKLPLQESNIKRLDMRIVQLEEEAERYEKLKISVYEDLKENLITKDEYVTLKHEFEMRRRDALDSIAQINLEIERLVQRNGKHHEWIEASISKKKVETLTRNVVVELIDHIRVYEDKRLEITFRYADKYAEALYLINNIDTNRSDKENRILQEVS

SEQ ID NO: 1063 - protein, 522 aa, unidentified
  source 1..522: note = uncultivated organism
MTQRNGSVPTPQTRCAIYTRKSTEEGLDQAFNSLDAQRESGESYIASQKSEGWVCLPDRYDDGGYSGGNIERPAVKRLLEDIDAGRIDCVVVYKVDRLSRSLMDFARMMQTFEKRGVSFVSVTQQFNTANSMGRLMLNVLLSFAQFEREIISERTRDKIAAARRKGKWAGGRPILGYDIDRTGPRLVVNDDEAQRVRAIFDLYVEKESLLQVAMELDRRGWRMKQWTGPTGLEHGGLRFDKARVRNLLSNIAYLGKVRHHDHVFEGEHAAIIEGPVFERVQQMLRSNGRTGGSEVRNKHGALLKGLLYCGPCGFAMGHSYTKKNGSRLYRYYVCGHAQKRGWHSCPSRSLPAQEIEKFVVDRIRDVGNNPSLLDATLEQAREQEEIELREAEQTQRAAEREMNRLSREIQSVAIDAAKEPHAAARLADLNERLREEEMRHTEARQQADAIGRRAISRSDLESAMAAFDPIWNVLTPREQARVLHLLIRRVEYDGEKGAVAITFRPDGIKAISNGGIEQCTAN

SEQ ID NO: 1064 - protein, 614 aa, unidentified
  source 1..614: note = uncultivated organism
MEQKIIRCAVYTRKSTEEGLDKEFNTLEAQREAGENYIKSQKNLGWVLIPEYYDDGGYSGGTLKRPALQRLLSDVQDGKVDMIVVYKIDRLTRSLLDFSQLIKTLDAHECSFVSVTQNFNTCDSMGKLTLNILLSFAQFEREVSAERIRDKIAATKKKGMWTGGSVPLGYDVEKKKLIINKEEAKIVRYIFEEYLRCRSEIQVSRNANEMGYHSKPRKVRNSSGEVALSFNHAMINNMLRNPIYIGKVPYKGEMFDGLHEAIIPMELWNQVQELKRLNRGDRFAPSRSFKNSLLKGLVECECCGTMTPTRCKKGNKYYEYYTSLRAVKEGYKLCRTGSVPAGELDKFVLDKVRNAFKSPEIIQELVHQIKPHKPEYGVREIFDIVQSVEKVFEHFEPATLQSIVSQIIEKVIVHKDKVVIRFKPFGISLLEDHIKVKNKGFNHKTLEFTYNVTLARKRGRIKIINNLPSEMPERDERLINAVSQAFKWQDLLDRTNLTIAELARREKEDRTHMGRILKLCYLSPEIITAIMEGRQPRLLNLQIFTRGQTWKQRKVKPKFKSTLMRWLMFLSIKLHLTGISPRRKLLKTSVAEMSLLGKKPSVSVWRTACPLSRN

SEQ ID NO: 1065 - protein, 532 aa, unidentified
  source 1..532: note = uncultivated organism
MSRRTRQANGDLERANGMAAAKRIRCAIYTRKSSEEGLDQEFNSLDAQREAGEAYIASQKNEGWVCSTDRYDDGGFSGGSMERPALARLLQDVEAGKIDCVVVYKVDRLSRSLLDFARIMEAFDRKGVSFVSVTQQFNTTSSMGRLTLNILLSFAQFEREIIGERIRDKIAAQKRRGKWAGGVPVLGYDVDRSNGSPRLVVNPREAGRVRDIFALYLYLGSLQRVVTDLTRRGWTNKRRITRKGEARGGRPFDASTLYTLLTNPIVTGKIVHKGQVYDGEHEAIIDAAVFDKVQHQLRGNGRTGGVEVRNKYGALLRGLLRCKPCDSLMTHTFCGRNGRFHRYYRCIRAIKNGAHVCPSTTLSAPEIERVVVDEIRALGEDRGVLDRVIAESRVAIDAELAALRRERDELGVALKRWDRELRGLVTDTSGGTGASLRLAQAHERITEGRRRRGEVEARIKEIDGTAITREEARKALKEFDSVWANLSPREQARVLKLLFSSVDYDAKAGTISVTFRPTGIAALCRRNLEDAA

SEQ ID NO: 1066 - protein, 511 aa, unidentified
  source 1..511: note = uncultivated organism
MRKPSRETRGDRSARTVRCAIYTRKSSEEGLEQDFNSLDAQREACAAYILSQRHEGWTLVPDPYDDGGYSGGNMDRPAMKALMGEVAAGRIDVIVVYKVDRLTRSLSDFARIVDVLDEAEASFVSVTQSFNTTTSMGRLTLNVLLSFAQFEREVTGERIRDKIAASKAKGMWMGGPIPLGYRLDERKLVVEPGEAELIRHIFECYLALGSGRLVVAELDRDGIRSKERINRHGRVYGRQPISRGALYAILQNRLYIGEVVHKGQSYPGQHAAIVEPQLFEQVQQTIAASRVGQRIGVRAAMPSLLAGLLWDGHARRMTPSHAARQGKRYRYYVSQTDGDTDRATPVWRMPAAEIELLVTAEMKAAIRQAQQRAITGGRLSGDAIEVLQDRCSTVVATLSEDTPARVREQLLMLIERIDVGEGSVCITFRLGSVDPLLGDQPVACEVAIGFVRTSRQVKIAISPPADHEQAPSPSLLKLVAQALPHAPRWTRATASMRWQAGSVAAASISLT

SEQ ID NO: 1067 - protein, 544 aa, unidentified
  source 1..544: note = uncultivated organism
MNAKSTSYKAALYMRLSKDDEGTGESSSITNQRNMLTAYAKEHGFLIASEYVDDGYSGTSFDRPAFRRLIEDIEAKKINLVLTKDLSRLGRDYIQTGQYTEVYFPSKKVRYIAVNDGFDSESPYTDIAPFKNVVNEMYARDTSKKIRSAFAVKIRNGNYIGNFAPYGYRKDPNDKNHLLPDENSAAVVREIFRMAADGENPAAIAAELNGRGVLSPALYRCAKHPNLDEDAYSKRKEWTAATVAKFLRSKTYLGHMVQGKTTKISFKSKMTLRNPKCDWVVVEHTHQPLVEEEQFELVQKRLQSRTRTAKGQFSNLFSGLAKCADCGRNMSTVGTRKKGSPANLACGGYKLYGGQECSNHFIDYNVLYHIVLDAMREQLRLTEDEREALYRELCDQLREEIDDEGRRSELGRLRAESEKLDRLIEQLYDDNLNGRLAEERFYKLLQKYERRSGVLGEKICELDISEDREGEAQKLREAFDRMAGEMKRYSEVPELTENLLFDLIDRIEVEQGRYEQGEHGRVKRQDIRIYFRFMTQAQTREVLM

SEQ ID NO: 1068 - protein, 552 aa, unidentified
  source 1..552: note = uncultivated organism
MKAPAAKSRLRCAIYTRKSSEEGLDQAFNSLHAQREACEAYVKSQAGEGWVIHPTVYDDGGISGGTMERPALKQLLADIDRGIVDVVVVYKVDRLTRSLMDFAKIVDRFDARSVSFVSVTQAFNTTNSMGRLTLNVLLSFAQFEREVTGERIRDKIAASKAKGMWMGGSLPVGYDAPTDPLTRALVVNPAQAELVRRLFDRYLALGSVHALKQELDAAGEVTRVHVARSGGIRGGQPYGRGTLFHMLRNRVYLGDIVHGERCYPGAHPAIVDTDTFAKAQALLDANVSARRVRAVLPGGSPLAGKIVDADGLSMTPAMAYGKLGRKYRYYVSHPLQVGAGKELDRDVIRRVAAGAIEALVLGHLCHLRLAAASGGWSAARTIINRVKLNRADVTISMIRGDLGAAAISAIRDSLPEGQQLVEIGGKAPRLELVIPGRAVFRGGRTWLASPDGASLAPRKAADPTLLRGLKRAHRVLETHNVSPLTKLEANRTARGIDDSYLRSIAELAFLAPDIQAAIVEGRQPAGLTLEMLQDTKLPIAWADQRALLGFNN

SEQ ID NO: 1069 - protein, 509 aa, unidentified
  source 1..509: note = uncultivated organism
MKVSKIEAKSFERKKLRVAAYCRVSTESDEQQNSFEAQKSHYEAWIKLHDNWEFAGLFYDLGITGTKAECRDGLQNLLLECKAGRIDYILTKSVSRFSRNTTDCISLVRELLDMNIPIYFEKENIDTGSMESELVLSILSSMAQDESRSISENNKWAIKKKFEKGSYKFSYVPYGYMRDDDGNMIINPKEADTIRYIFQSVLNGFGTDKIAKTLDARKIPTRKGGKWSGATVRDILCNEKYYGAAAFQKTYTDENFHRKRNYGEVDSFFDPEHHEPIISKNVFDRVREIIDRRATEKNVVSGDDKYQQRYVFSGKIICGECGDKFRRKIHDSGKEIAWSCRTHIQNIEKCSMKYVRDDMLKAAFVNMMNKLIYARKRLLIPLYENLSIQECDENINRIHALQAELQKMSDKKETLRKLRAQDIIDSIVFNQEMNGLESTSEEYRNEIRNLCSETNDYTELKKLIQFTNREMLTEFTDEIFEKYVSNIVIVNRNTAEFHLKCGLKIKEAL

SEQ ID NO: 1070 - protein, 556 aa, unidentified
  source 1..556: note = uncultivated organism
MARGRRETARRDGGASASPIHRRCAVYTRKSSDEGLEQSFHSLHAQRDACEAYIASQKHEGWVGLPQLYDDGGLSGGSMDRPALRRLLDDVKAGLVDIVVVYKVDRLTRSLADFAKLTELFDAHGTSFVSVTQQFNTSTSMGRLTLNVLLSFAQFEREVAGERIRDKIALSKRRGMWVGGLPPLGYDGIDRKLVVNVAEAETVRLIFQRYLDIGSIAALKEALDGAGIRSKRRCFSDGREVGDVPLSRGAIYQILRNHLYRGEIAHRGEVHRGNHEAIIDAETWAAVQAMLTAGSGRGRGSGANAQSAMAAVDASSGSPLGGVVFDDSGHRLSPVTAVRRGRRYRYYVSAPLVRGARDAEGLRIPAPDLEALVTSTLRAHLTDPAWAIDGVGAGLDGRQAQRLIAAAEAYSGSFDAASKRLRSAAQPVTRIVVGRQRFTIELDAAVLAALLAETATSVPGEPLQLAPRASTLTITVPMHTLRCGKQVRIVVGSVESDRRGPDQQLVALVSDAHRWFEDLRDGRRSRSPPSPLPRSAPSPTSAASSPSPSSPPTSSR

SEQ ID NO: 1071 - protein, 553 aa, unidentified
  source 1..553: note = uncultivated organism
MTQTPTIRCAIYTRKSSDEGLDQAFNSLDAQYEACAAYVASQRHEGWKLVPDRFDDGGLSGGTLDRPALQRLLAEIDAGRIGMVVVYKIDRLTRSLVDFGRLVERLDAMGCSFVSVTQAFNTATSMGRLTLNVLLSFAQFEREVTAERIRDKIAASKKKGLWMGGALPLGYDRHPDPQRRELVINPVEACAVQTLFTLYDDLGNLRRVETEAERLGLRPKQMVFPSGRVRGASPFTRGQLHYLLTNPVYIGRIRHKDQSYPGQHPAIVDPALWARVQAKLISASARPRGRSPTATDARILTGKLRDEAGDLLTPSHTQRHGRRFAYYVSNRLIAGGTDPSGWRLPAPALESILCQVVVAHLRRTAAGHGLLSVPDARGANGLLDRATVFADRVASDPALFGSLIASGTLAPGHLHLRLDRDVIAAGLEVPTAALSEQVLVLTCPLALRRRGVETRIIAGETIPAPDQVLQRTLAEAHVWARALRSGTSLIDLARATGHSKPYIRARLPLAFLAPRVQAAILDGRQPAELSVSQIIREDLPMDWAEQARIFGIG

SEQ ID NO: 1072 - protein, 502 aa, unidentified
  source 1..502: note = uncultivated organism
MQIKFKCAVYTRVSTDSQAEKVFNSCEAQEEKIRAFIKSQENMEVYKVYSDAGYTGANTERPALQELFKDVSRNKINLVISYKIDRLTRSPRDFYQLIEFLERHNVDFISVTERFDTSTPSGRLLRNIMLTFAQFERELISERTRDKMLQRAQKGMWNGGMVPLGYRRENKQLVIDKRCAEIVKNIFERYIETGSLVKVYQELKSRKVKDDDDVLFSKSRIHYMLRNINYTGKMEYSGKIYQGLHEPIISADLFKLAQDNHQHKGQIMRMYKQFPLGGLLKCAECGSYMTPHFANKRNGNGRKRYHYYRCTKTFKDSWESCSTKQVSATRLEDYVFQNIERISLDRHYVDSSIFALKNGHPGDHSGLEPSEEWGDLTTETFQDTLKTFIKGLAEKRGLEKNLWVKKFIKNIVYSKEQIELSLFYSTTFKARAFEVLPSRQSRDGFLNEKRTPAPKAENPQFDLLKMAPRAGLEPAARWLQGSPEFLRGLDYLFTMSRVIYPL

SEQ ID NO: 1073 - protein, 520 aa, unidentified
  source 1..520: note = uncultivated organism
MATVKTLIPKQQEKESRIRVAAYCRVSSDSADQKDSFDAQIEYYTSYIGENPDWTLADIYADQGITGTSMSKRDEFNRMIADCQRGKIDRIITKSVSRFARNTVDCLDTVRKLSALGITVLFQKEQIDTADMSSEFILALAGIQAQDESVSISGNMRWSYQERMKRGDFLGCKPPYGYTLNNGSLVINQEEAAVVRLIYEMYLSGTAKYMIASYLNEKGIPKPYGFTTWHHFTVDYILNNEKYIGDALLQKKYTTQQFPFKKERNTGQRPQYYVENSHQPIISREIYEAAKMLHQRRRKTVVSDRHFLSGKIRCSECGHTFRRFRMGNEYFWQCAYRSSGRSDCNPVYINENDLIMVLMRLINLLRENLDKIIAPTIKMLELLQCKANGTQVRIYEIDKSIAEINSQIHLLTQLQIQGILDPADFTAQNNALSEKTRRLRAERTKILRCNEHDDSMVSLKNTAEMLSDTSLLTEDNTEMMIQAVVSKINILSASDVEIEIAGGLRFAEHLPSRKRRVKNS

SEQ ID NO: 1074 - protein, 630 aa, unidentified
  source 1..630: note = uncultivated organism
MNEKKIAGLYIRVSTEDQAREGFSLPEQEKRLRMMCEYKGYEVFDVYEERGISAKTGNYRPEFERLLQDIKDKKCNTIVVLKLDRLTRSVADWEKILTFLEENDAYLDCANDEINTTNANGKMISRILTSVSQQEIERTSERTKVGMAGAIKAGHIPHQAPLGYKHEDKKLVIDYATKDVAIRIFNMYHDGLSYKKISNILNEENVLNRTWRDSTIVKILENPIYKGDFIHGKLTKHPTYYFDVVEPLVSKEYWEECQVQQKKNSRSYQRSLTYLFMQKLKCPKCKRILGGKATTKKNGNSYYYYYCHDCKINIKESVIEETMDMYMDSLVEYDSIVNQYFLPMIKQKIENPKEELEKELKSQKSKFDRIREAYINEVFTLKEYNEQRKKVEDTITELENKISETEVCEKLKFTPNDILVKRDIDFINSIKYPDKFKEKNKFWKDYTREEKAELLMKYVDEIELVEKSGMVLIDYIKFRESIANTSNDLYFKGYYDRYVPSLFGNIYGKIRFSEYLPEEEVTEQIYRLRQFYDVGYYEATYTVKDKVFYFNFLNDKKTIVRVFPLEDYRNIDPDEKMDTYNLGVLYVKEDNGTLLEHVDDVFKYIPAEYDNDILYSKMVDLKPVPYYEEE

SEQ ID NO: 1075 - protein, 519 aa, unidentified
  source 1..519: note = uncultivated organism
MAEITVIPAAEKCREIIRTAAYARVSSDSADQLNSFTAQIRYYSELLKNSSDVVLVDIYADEGISGTSSAKRDEFQRLMRDCRKGKIDRILTKSVSRFARNTKDCLEAVRELKSIGVSVYFEKENIDTAEISSEMLLTMYSVCSQEESLSISKNCRMGVHKRMADGTYKNSTVPYGYDFIDGQTVVNSQKAEIVKEIFNMFLNGHGVNDIANYLNQNNVPASQYAKKWDHTSIMFILRNEKYIGDSLFQKRYTTDTLPYRLVINNGEKPQYYAKSTHEAIISKEIFENVQALINERRKNPESKIYKAYPLSKKIFCGICGCCHRRKKRNSGIYWVCRNHDDNKDNCCSKPIPETEIYSVFIRLQNKLAANCKNILTPMLRQLQELSDKGISCNVQISEIRKEIAEVKNQRHLMATLKSQGILDAAYYTEHSTQLDRKLLNLQNQLHSLMGNDKDDEEIDCIKLLISIFENAEPIAEFDEILFGQIVEKIIVQSGTDLTFRLTVGVEFTEKIRRKERCGK

SEQ ID NO: 1076 - protein, 556 aa, unidentified
  source 1..556: note = uncultivated organism
MATKTKKKKVAIYNRVSTVEQSEKEFSSLDGQKNQCHAWLDMKNAGSDDKYKVFKIYTDTKSGKNLNRPGMKQLRKDAAKGKFDLMITTKLDRISRKLRDFLELVEELEEHDVDIAVTTQNIDTSTPAGKLSQNIMVMFAEFEREMNAARTREKRKETAKQGHWLGGYPPLGYDVIDKKLHINDEEKELVQEIFTRYLKTKSSTKVAKSLNKDGYRNKEWETKKGKMMGGSKFHKKIILRVLQSKLYIGKIEYDDETYEGVHEAIIEKATFEKAQELIEENTTQAKANTSSESPAVLKDLVGCGFCDSSFTITSTKPRDKKYHYYRCVKKNNEGKTEDHAPKDLSVPSLDEFVLHCVKFLLKEPELLEAMKKRATFESKTELESAERKINRLTDNLKTAKKDISNTLKLLTNNPDGPSAELYQEQLDDLKLEQERIEDELEYCKKRKEALENRKVVDDDTYKTILNEFIKLWDESDSRMREDLMKTVIQSLISHVDNDNTGDIEINFLADKKLEAEWTEIKKCEPGKVQVRTSGMPGSPGRIRTYDPSVNSRLLCR

SEQ ID NO: 1077 - protein, 512 aa, unidentified
  source 1..512: note = uncultivated organism
MNEKKIIRCAIYTRKSTEEGLEQDYNSLDAQRDAAEAYIKSQKQEGWVCLPEKYDDGGYTGGNLDRPAAQRLLADVQEGKIDCIMVYKVDRLSRSLMDFARIIQILDKNNVSFVSVTQQFNTTTSMGRLTLNILLSFAQFEREIISERTRDKIAGARRKGKWTGGRPILGYDILREPGGSKLMVNPPESRQVRQIFEKYLETGSLMATLKWLDEEKQRNKQYKAKDGKTNGGLVFAKSSLQRLLTNVIYIGRISHKENVYQGEHQGIVDEGLFSQVQSLLKMNRRSGGPHRNKYDALLKGLVRCKHCGCAMTHHYVLNDNKRYRYYVCINAQKRGWSNCVSPSLPAVELEEFVIGQIRTLRKDDMFLSEVLEKAQAKLYSDVEQHQAALKTSENEMRKMLRSLGEISAQAAYDSRSADKLAELQEQIKQKEQAMTVLNEKIIVARRRMVDTDEMTGAIEAFDPIWQSLTPNEQTRLIRLLVQQVEYDGENKNIAVTFHPTGIKSLTHEEVCV

SEQ ID NO: 1078 - protein, 504 aa, unidentified
  source 1..504: note = uncultivated organism
MKGRYIALYGRQSLYKEDSISVETQIEYCKYETHGEPYKIYIDKGYSGKDINRPAFEEMLSDIEKRLISSVVVYKLDRISRSILDFSNMMEVFQKYEVEFISTTEKFDTSTPIGRAMLNICIVFAQLERETIQKRIADAYYARSKKGLYMGGRVPYGFRLEKTTIDGIHTSKYVPITEEAEHIKLIYAMYAEAGTSLGAIIRYFKENHIENMRGVPWNTARLSELIRNPVYVRADADVYNFYKSQGTNIINPIEDFTGQNACYLYSGTKDESNKLSKLTDKDLVLASHEGLITSKTWLKCRNKCLENRQSATNLKAKNSWLIGKVKCGKCGYALTVTKANTKWGRYFVCSNRLNMKACEGVGMTIYADILEQYLFTAVKNKLCELNVLTTTDEPVMDHKLNERKIKLGRLEAEIEELVCKINNANEVLMKYINEKIEVLDAERTELKKTIDLVNNIPCDKNMLIIVNPADKWEKLSFTDRQAVVDALITVIYISGNQIDITWKV

SEQ ID NO: 1079 - protein, 504 aa, unidentified
  source 1..504: note = uncultivated organism
MTNRIDAVYARQSVDKKDSISIESQIDFCKYELKGGSCKEYTDKGYSGKNTDRPHFQELVRDIEKGLIQRVVVYKLDRISRSIIDFANMMELFQRYNVEFVSSTEKFDTSTPMGRAMLNICIVFAQLERETIQKRVTDAYYSRCQKGFHMGGKTPYGYKLEPTVMEGIKTKMLTVDPETADHVRLMFEMYADPQTSLGDISRCFTEKGISFGKNGLSRNALSFLLRNPSYAQADLDLYEFFKGQGAAIANDAADFAGTNGCYLFQGRDATGRKFASLKDQMLVVAPHEGLVSSEVWLQCRRKLIGNSDFGGGTTKKARHSWLAGKIKCGRCGKALVAVVNENKTIYFRCRTRMDRRMCEGCGTIRVREFEQSMYDEMRRKMAEFETLTGGNPTKANPKLTALNVELAQVETEIDKLLDTLTGASATLLSYANRKIEELDAKRQSLTKAIADMSAEAVSPEHIKRISGYLNDWDGISFEDRRDVVDGLISTIHATSDNFKIEWKF

SEQ ID NO: 1080 - protein, 1085 aa, unidentified
  source 1..1085: note = uncultivated organism
MNYNNEPIKYQESTLFAGAPNTKKRMAAYCRVSTKDEILLKSLENQISYFLHLGGNNDSWHLVGLYVDRGISGTSQKHRRSFKRLIRHCEEGKIDVIITKSISRFSRNSVDLMTILRKLRSLDVEVIFQREGIKTSEVDTDFILNVYGAFAEREAVNIAQNVEWSYRKQFERGIPKFDRILGYDVKRNKDSIEISIIPEEANIVNEIYEKFISGVSIADIAKSLNERNIPTIKNFQSWQRNQITYVLKNSRYLGDTISHPSANRLVNQISGSNEVRESILIPNSHPPIIDSDKFDAAQEIFLSRKVTKGKYRTFPLSKRVRCGRCGANFVTIRQYNNKKRWGCHVRNKDNCLCESVIFWEYELKDILVHAIESRFGSPTKKVLDKLMSIVKSIDEIDNIESQRIEYYKRLQNTKKSYSTGEVQNDNEVKRIEKEFLLFEKVSVEIEDDRYYRKDFLSHFSSFDGALKDWNDLTLAHCRALIREAVIFDKSTIKVHWCDARVTTIGNCPIHWPTNPIESKTNFKDVKNTGKKRIISTNSYQSIPKVQPVVSKINSLYEMSSSQKQKVAAYCRVSTLNEEQLHSLAIQIAYYVNLILQNPKWVFAGIYIDEGISGIKIDNRPEFKKMISNAKANKIDLIITKSVSRFARNTLDCLAVVRELKSLEKPTGVWFEKENIHTLSNMGELTLSLFSSLAQEEALNFGANIRLSKIKNIERGNFRHSGLPPYGFTIDSKGVWHVVKKQREVIQTIYSKFHQGLSLKEIVKYLADSNIPTPRNGVGWRKSYLRKLLSNQVYIGNIVYQKKFVKNSFTQETVKNNGGLPKYLIENHHEAIIDLAIWNDVQLKLDDISRGPKNKKYKADPLKNLIYCAECGKKVIVIGSRGIYKYRKCSSTSERDNSENMFRDVDCTTKGYRCETIEHAFMVLLENLRNDSAWLKEAERLALKYPLTHNQVDEKKSFEELLQSHYKELHKNIDAMSNLNNAQSVDVTELVNKILENKKNLRKFDEMLEEGKKNKESYYWFLDQINNLPVYDSSKFRISFREDIFKRVVRRAYLTSYNTMIYQFTFGSTVIDPGLDNNACKYKLIF

SEQ ID NO: 1081 - protein, 545 aa, unidentified
  source 1..545: note = uncultivated organism
MQSKVIRCAIYTRKSTEEGLEQDFNSLQAQREACEAYIKSQKHEGWQLIKTHYDDGGFSGGNTNRPALQKLLQDIEAGRIDVIVVYKVDRLSRSLHDFAKMVEVFDRHNVSFVSVTQQFNTTSSMGRLTLNVLLSFAQFEREVTSERIRDKVAASKKKGMWMGGVIPLGYDVVDKKLTINPKEAETVRYIFRTYLELGSVRKLSYRLKNEGVVTKPLASRKNRGAPFTRPGLYHLLSNHTYTGQVHFKGVSYPGLHEAIIDPELFESVQKAMIGNRTGFRAQYTWSNDSPLKGKLFDAATGEALAVTYSKRAGRRYRYYLTRELKIDTRTNSEHGWRLQAAVIEKTVDSIVRTMLAERDNILTALKQTGIPEPLIPSILDKIQTALKQEGLIAGDFIKRVSIGLQSIEVTISLTGAMPSDAQATEAILIQKIAMQMRRRNNEMRLVLDGTESTAGLDTVLVKGLAQAHVWTEELFSGKVGTLKELAQKYNVSDGYLKKLMPLAFLAPDIVLIILAGKQSDDVTKEKLVSHNFSHIWNEQLHLISS

SEQ ID NO: 1082 - protein, 586 aa, unidentified
  source 1..586: note = uncultivated organism
MEERKRKKAIYSRKSKFTGKGESIENQIDTCKHYLKTYIDTTLTDDDIIVYNDEGYTGANTDRPQFQEMMKAIKNDEFDTIICYRLDRVSRNVLDFANLYEDWQQHDVSFISVSERFDTTTPMGKAMLFIAITFAQLERDTIAERIRDNMYKLAKTGRWLGGNVPLGFMSEKTEKLNINDKVETLYKLVPIDDEIAIIKTIFQKFLEYKSQTQVESFLIQNNFKTKRNCDFSRWGVKNILRNPVYAVADKDVLNYFLENDVEVYNDKEEFNGKHGIIGYCKTEKTKTGRVKYKDLQDWIVAIGQHNGIISGKDWVQVQEILKANEDKNYRKPIKNNAILVGVLRCSHCHSLMRAKLKQNKTANGDLRFDYICDLKMKSKGEKCSCKNINGNEADELVMRGMKELANPTSEFYKAIEEIATDNDYDSKNKNDELQVLERNYSKNENEIKNLANRLALVDDEIFDVVQAQMKELKRKNNEIATNIQKLKQEQPNQIINDQETAKVVFEILTKYICRFDELDIISKRNLIKLFVGNMETDGKKIYMDLIGSRNHTITTKPQLFDDDSNVQDGLSATHNGKIVLSSDSGE

SEQ ID NO: 1083 - protein, 542 aa, unidentified
  source 1..542: note = uncultivated organism
MLPKQTNYSVGIYMRLSRDDERAGESLSIENQRAILTEYVSKQGWTVYDEYVDDGVSGVSFDRPGVQRLLDDAKNGKINLIICKDLSRFGRNYIQVGQFTDYIFPMHNIRFIALSDNVDTLNSQSAGMDMMPIVNIFNEWHCASTSKKIRAVLESGAKNGKYKSPTAAYGYIKSDDEKHTPIIDPEAAAVVKRIFEMRAKGITMAHIAEILNAEKIPSPSEYYYSKRGKPNVKSVTNLWCRTTVRRILNDPIYIGTMAQMRYTTISYKNHKRIRRDREDWITVEHNHEPIISQELWNKVREMDESVSKGKRDSCGNVALFSGMLYCQDCGYKMKKIWLNRKKGDIGYSCGYRARFGKEFCSTHTIRESDLKALVAADIQSKLRIIIDEDKARRQFLEKKSGVRSSQTAGDTKRKREIEHRLAELDTLTQSVYENMVLGKVYEDVCVKLIEKYQAENKTLQTEADAIQERLDAFNQDEQDVDEFIRRLKKYAGVEVLTREMLLELVEYITVEEAPENRNLPRIIHIYYKFLDKAIPNMHNYLM

SEQ ID NO: 1084 - protein, 581 aa, unidentified
  source 1..581: note = uncultivated organism
MSSDPRRAVRCAIYTRKSSEEGLEMSFNSLDAQREACQAFIASLRQEGWRALPTLYDDGGYSGGSMERPALKRLLEDVQNGQVDTIVVYKVDRLTRSLADFAKIVEALDERGVSFVSVTQHFNTTNSMGRLTLNVLLSFAQFEREVTGERIRDKIAASKRKGMWMGGRAPLGYDVKQRKLVVNQEEASLVNDLYRRYLELGSVSRLKVYLDQQRIKSKKRTSAAGNHSGGVSFFPGALYLILQNPIYLGRVRHRNDLYPGEHEAIIPRDLWEKVQAKLKSANQGRRNGVKTNCSSMLIGLLQDNSGNRFSPTHTVKNGKRYRYYVWEATAHGSDKQIKAIRLPAYDVERQVSLRLQSFLQSTSEVMKDLTLPEDRPELIQRLIMAAKKQAEEWSTASPATVRDFVRKVVRRVVVGADKIDVETSRRELRASFTDSQLGASCETALQSQEASSGDFIHLTVEVRLKRCGGEMRLVVSPDSSKAREITPLLKAVVRAHRWREGVLAGEVPNRIVAAKRHDLNEEYLRRVLGCGFLAPDILEAILDERHPSDLTVKRLSRRQLPLDWAEQRTELGFPPAPAAGK

SEQ ID NO: 1085 - protein, 531 aa, unidentified
  source 1..531: note = uncultivated organism
MKRNGKPNAPATLALVRCAVYTRKSTEEGLEQDYNSLDAQRDAGENYVKSLAGEGWTVLAERYDDGGFTGGNMDRPALKRLMADIEAGKIDCVVVYKVDRLSRSLLDFAQMMQTFEKYKVSFVSVTQQFNTATSMGRLVLNVLLSFAQFEREIISERTRDKIAATRRKGKWAGGWPILGYDVDPQGYKLNVNATEAERVRTIFNLYLEHESLQPVVEELASRRWTNKRWQTRKAGVRGGNRFTRTSLYKLLTNVAYVGKVRYKDEVHDGEHPAVVDPVVWQRVQAMLERNGRAGGAPARNKFGALLKGIIRCVPCGCAMTPTHSTRDGGTKRYRYYVCSSAQKLGWHTCASKSIPAAQIEELVVNQIKLVGQDPLVRREILAEARRQDEVRVAELETEQHGLEHDLRKWHGEMRSLSGQLKPNDDNGSLIARLAELQERIGTVEGRVRRIHEHIHAVHHQLLDEDEAALAVSVFDPVWGTLSPHEQARVVHLLVEQVDYDGSKGKVAIAFRPAGIKTLAREMADKREEKRA

SEQ ID NO: 1086 - protein, 516 aa, unidentified
  source 1..516: note = uncultivated organism
MNIAAIYCRLSDEDRNKSSKTEDSESIQNQKKLLLEFAGENKWDVYKIYSDDDYSGLDSERPEFNQLLSDAKEGKFNIVLCKSQSRFTRDMEMVEKYLHNKFIEWGIRFVGLTDNADTLEKGNKKSRQINGLVNEWYCEDISENIKAVFDIKRKKGEFIGSFAPYGYKKDPQNKNKLLLDLEAAQIVRMIFSWYLEGHGVQHIAFMLNQKVIPNPTKYKELSGLKYKNTFKTDDYGLWNKTTIKRILRNEIYIGHMVQAKRKKVSYKSKKIVVNSSENWVRVEDTHQPIVDNDTFLAVQNRINGRVKSTGNGKTHLFASKVKCKDCGSTMLKVTSGKYNYLRCKLYSVSPGKHMCTSHLTRLDKLTDSIAYKIKDCLSKYIDVQRIVERLEKEQQMSQSHSIYNNELEKLKSIILEKKCIIKSLYVDKIKGIIDEGQFIEFNKDFSEEIRRLFERQKSIRKEMKLNKSVYDNYREMVNNCFDFVELKQSLVNGMIDHIEIGEKTSEGQKIKIHWRF

SEQ ID NO: 1087 - protein, 568 aa, unidentified
  source 1..568: note = uncultivated organism
MRAIEVRKPAASPTKAFRCAIYTRKSSEEGLEQDFNSLHAQRESCDAYIKSQRHEGWVPLPALYDDGGFSGGSTERPALKRLLADIQSHLIDVVVVYKVDRLTRSLADFAKIVEIFDDAGVSFVSVTQQFNTTTSMGRLTLNVLLSFAQFEREVTGERIRDKIAASKQKGMWMGGWVPIGYDRKDRTLTINETEVLTVRTIFDLFLKLKNVRRVQTELARLNLTTKPYATPRGRAIGGLAFARGHIYKILSNPIYMGEIEHRGVRYPGQHPPLIDGGTWDAVQAQLATNHHANRARTNAKSKSQLAGLIYDGAGNRLVSSHATKNGKRYRYYVTAEANGRSVATARVPKLRLPATMIDELLRSKLQSFLTDKIQISLLLRETRCRPAEIGSGLKTASELADSLTSGSPMAQAVADLLARVTVSHTSLNISIKRDRLLATLTDKFVEQSQDDGQDNIISLEATVAAVPGAGSSKFIFEDQNAKTPDPVVVKAIARASTWFEQLWTGKSQSMAEIAVGENITDNYVSNLIHLAWLSPDLVGRVLDGDPKATASARAAMLTRRSDVWWRRS

SEQ ID NO: 1088 - protein, 682 aa, unidentified
  source 1..682: note = uncultivated organism
MAVAVYVRVSTEEQRERQSIVTQREFGERFCALHGSEIFHVYADDGVSGTIPIDQRPGGSDLLRDARNKRFDQILVYRLDRIGRDTRLILNAVAEFEKCGVRVKSMTEEFDTSSATGRLMLTLLSGFAAHERDVIRERSLAGTNRKAEAGVWLGGVVPYGYIKEGAKGQLRIAVNEAPIPGLDLSEADVVRTIYRMSAADKQPCQRIADYLNRIGIPCGSAQNTKVEDGKRRRRTARLWRPSHIRNMIVNRTYMGEHLYGKRTKNRGRKVIARAVASIVSEQEWLKAQEVLRSNRVIPLRKRKEPYLLRGLIKCGLCGLTFSGLRMKGKQLDHYYRCNGRQQARALYGASGHKCSAKSLNGDYVERIVWADIECFLRNPGEIIEKLKERLAAQDSDRPQKLKELGNFRDRLLEKTAERDRVLGLFRRGRIDDATLDQQLDVIDAEAAGLQAEIELRSRALSAVDQAAQLRSAEELLAALRKRLEGPIAPELKRRIVETLVERIQANTVEKWGVPQSELVITYRFSQPEESAALVIPRFHRLDVRSHPPEQLITLGDHMLRRRLVLKLLQRQVADQIGVNRASIANWESNRTEPGIEYMPAIIRFLGYNPLPQKEDWASRLVQCRTILGLTQKEAAHRIGVDPSTLAKWERGEREPTGDYAARAERFLATVEVVSALTSARLA

SEQ ID NO: 1089 - protein, 517 aa, unidentified
  source 1..517: note = uncultivated organism
MAEIKIIPARDRNEDIIRTAAYARVSSDSEDQINSFNAQIRYYTEMLSSSINTVFVDMYADEGITGTSTDKREDFMRLMKDCRRGRIDRVLTKSVSRFARNTRECLEAVRELKTLGISVYFEKENIDTGEISSEMMLAIYSQFAQEESISISKNCRMGIQKRMADGTYITTSAPYGYNLINGKLIIDKNKAKIVKKIFEMYLSGKGTLAIANELNKIKAPLPIHSVRWHHTAIKYILENERYIGDSLYQKSFATDTLPFYQVKNKGEKPKYYVTNTHKPIVSKEDFNAVQKLISDKAMPPEAKVRIESPLKRKIICGKCGSAFGRWQKKDKTFWTCRTHNQMSNEKCDTKPIVEIEIHNAFIRMFNKLTTHYSLIITPLLCQLQKLSNISELANTQVSEIRKEIAEQKAQCHLLSQLNAQGILDSVYFTSRSQDLDRNLVQLYKQLHAKLNNDEDEERLGKIKKLIAVLESSEQITEFDEEKLSSIVERIIVLSEKEIRFEIIGGIAFNEPIQRKWR

SEQ ID NO: 1090 - protein, 533 aa, unidentified
  source 1..533: note = uncultivated organism
MRKERNTVGSLALEQGPRVIAIPPVSQEKTRKLRVAAYARVSSDSEDQLHSFAAQTTHYTELIHQNPDWEFVDVYADKGITGTSAEKRDDFQRLLADCRRGRIDKILVKSSSRFARNAKESLEAVRELKALGIAVCFEEDKIDTSKLSGELLTAIFAMLAQKESEAISERMRWSYQVRMKAGKFITCNAPLGYDLVDGKLEINENEAEVVRHIFQQYLSGQSLESIAKDLTRYGVPTRAGGPCWGMTAVGYILSNEKYVGDSLLQKSYTTKTLPHRIVKNNGKYPQYYIQNSHPAIIERNTFEMVQNLLERRREALYPHSQGKYVFTGKIICQTCGSTFKRKSIDGTSVCWICQTHNRYPERCQTARLPEQQIKAAFLCMYYKLRHQGINILKQLLKDLQAAREARMLWSMDIVKLNDRITDIISQDRLLAQLKQQGLVDPDLFISRRDRLAEQLRTAKLEKERLLEAEEDQTIQQTLAIMDALESGPDLLAEFDEELFSELVEKIIVEKEGRLRFHLINGLELTEQIERTVR

SEQ ID NO: 1091 - protein, 540 aa, unidentified
  source 1..540: note = uncultivated organism
MTRAAIYVRVSTSRQAERDLSLPDQIAQCRAYCERKGWDVVEIFSEPGASALDDDRPVFQEMIYKAKRADRPFEFVVVHSLSRFSRDALHSEMYVRQLRKAGVHLVSITQDIGDDAGGEFIRKVLNVFDEHQSRENAKHVHRAMCENARQGFWNGSRPPFGYRVETKERRGNKDKRVLLVDEAEAPVVRKIFAMAAGEEGRPAGVKAIASYLNEHGITRRGQRFATGSVHDLLSDTTYHGVHYFNRTDTRNGKPRPPSQWIAVDAPAIVPEEKFNAVRALMQNRNPKRMPPRVANGPTLLAGVIRCGYCGAAMIQNTGKGGQYRYYCCSRKLKEGVTACRGVRMPMDRLDDIVVGEVAKKVLDPSRLGEMLSAYARAGAEREAGHRDRLAKLRHGHKETEAAIARLLELVEKGLMDAEDPSLRERLVGLKVRRDELAKDAADLQRHVAAGEPQITPDKTARLSRLLHDKLYHGPGEFRQAYTRLIMDEVIVTEEEIRISGSKAILARCAAQDEIPAAPGVLSFVQEWRARKDSNRPGLPF

SEQ ID NO: 1092 - protein, 550 aa, unidentified
  source 1..550: note = uncultivated organism
MKRIGIYIRVSTEEQAKIVEGSLVSQRMRLEEYVAGQNRRESNWGAIVSVYVDEGKSAKDMNRPEFQRLLTDVRMGKLDLILASELSRFSRSIRDFCEIWDLLKKHKVSFITLRDNFDSTTAAGEMMIFNIMNYAQYERKQTGERITANFQSRAKRGLWNGGVIPLGYRRDVTNPGKLLVDETESKTIQMIFDLFLEHKNLHETCRALNDLGYRTKRSQNHYTVQSLHNMLTNSTYLGLREVNKRMSEIGKSELSLVKAQWEAIINQKVFHRVKKILEGNRRRFKPMTFKTYAYPLSGLAICGECGARLNGKSAHGKTKKHHYYDHGRTLKGNGNGHKHNCRIQRLRAERVEEIVLSSLKQILSNPKMATLAVEAYQKNSNKLSPEWKTQISGMAKEIIALKKRETNLVARVSDLPPEVDASLFYKSIKDIQTQVFDKERIKIELESKQIPLSAAHGLTGADVLARVEYVINRLEDASKEDQKAVFENVIQFAEFHPTRMRLGVFMGSTTIKNGGERGSRTPGEITPTPVFKTGAIDHSAISPQDEINSE

SEQ ID NO: 1093 - protein, 504 aa, unidentified
  source 1..504: note = uncultivated organism
MKRCAIYTRVSTEEQVERYSLEAQLEVLERWAGALGYGIADTYTDPGYSGAQEDRPGLARLLTDAREGRFSVVLVYRLDRLARKVRLAYDLIERLEAWGVGLMSYSEPNINTTTPIGKAVLGIMAVFAEWERDTFAERSRLGLRKAAQSGKYLGGIVPYGYTLEEGRLTPHPEEAVVVQQMFTWVAERGWSTDRVARELNRLGIPPKYRRDGRGVRGKRTAGVWRGGGVLRLLKNRTYIGEYTYGKRTRKAQPELVKVAVPPIVEPALFEAVQDQLSRNALFAARNARSAYMLKGLIRCGTCGRAYVGSADYYACVGRVNRQASPIPSMRCTSPHVRRKDLEEAIWHDIRSFLLNPGEALQAFLKGESREENEAALLEKRLRSLLDARARLLDLYLEGGVDKESYYSRLKELDTRVKEVQAALDGARRQVIEEHRRQESLATLEELASHLRERIDMLTPEERQAVARELVEAVTVHPDRDEVQVEVHYRFGQIAPHTGRGSWPQ

SEQ ID NO: 1094 - protein, 608 aa, unidentified
  source 1..608: note = uncultivated organism
MTETALRAAAYLRVSTAKQADNDLSLPDQKRHAEAHCERRGWKLVETFNEHGASALDEDRPEFQRMVDRACSKDHPFDVIVVHSFSRFSRDAMHSEFYTRKLRKAGVDIVSITQEFATDPAGDMARQMMNLFDQYSSAENAKHTRRAMIENARQGFWNGSRPPFGYKVEVKEKRGTKEKKALVIEPSEAAVVRQVFDLCRGAEAKSKGLKAIVTYLNDRGITRRGRAWGTGSLHNLLHDATYAGTSYFNRTDSRTLIAKKFSEWVPVAVPAIVTRGIFDSVQSLLADRRPVRVPGRALSSPTMLAGVAKCLACGAAMIVNTGSGRGGHYRYYACSTLIRKGRKHCVGLRVRMDKLDGQVLEMFAERLFRPERLAALLGAYVTANAATDKARKEKLRLAKERRGDVEASIVRLVDAIEHGIMTPDDPTLSERMSKLRLQRDELDQDIKRAQLDQGPGLSALNPERLAKLCVEMRKRFADGPPELRQAYMKLLLEKAEINGVETRLTGSKALLAKFAETGGAFSVPEVLTYVREWRPHGDSNPGLHRERVPSWASRRWGPAATRGGFSPSQRANQASAERAVPTKPSTSSWVEDQAVTRRSVRVPGPNQR

SEQ ID NO: 1095 - protein, 545 aa, unidentified
  source 1..545: note = uncultivated organism
MKNNTETKIWNATLYLRLSRDDGDKEESNSITGQRELLRDFIRNRPELREYAVRIDDGFTGSNFERPDFKKMMEDVKEGRTNCIIVKDLSRFGRNYLDAGEYIEKIFPFLGVRFIAVNDNYDSLGEKSASDDLVIPFKNLINEAYCRDISVKVRTQLEIKRKSGQYIGAFAVYGYMKDETDKNRLIVDEYAADIVRDIFSWKLDGMSPQDIAVRLNQSGILSPMEYKKSLGMRFATSFKANAQAAWSANSVLRILKNPVYIGVLTQGKETTPSYKVRKRIIKPEDEWTVIPDSHEPIIRREDFESVQKVLTLDTRRSPNDSNVQLFSGMVFCGECGASMVRKTVPSGNKKYVYYVCSAHKQDKSCASHGMRDTALEEVVLETVKQYIRDVIDLDDILSMTDTAPLRTAEAQKVQRQLDKKRSEHERLQKLLMSLYENLADGIIDRDEYAKLKQNYAGRAAECEKQMDALKESIVQIKEQGGEHREWMMRFRKHQNITELERSIAVALIDRILIYKDNRVEVHFRFEDEFAWQMDILRRLQIREVV

SEQ ID NO: 1096 - protein, 540 aa, unidentified
  source 1..540: note = uncultivated organism
MPDNKPKRKRCAIYTRKSTEDGLEQDFNSLDAQREACAAYILSQASEGWEAIPELYDDGGWSGGTMKRPALKQLLDDVTANKVDVIVVYKVDRLTRSLADFAKIVEILDEQEASFVSVTQSFNTTNSMGRLTLNVLLSFAQFEREVTGERIRDKIAASKKKGMWMRGAIPHGYKVEDRQLLIREDEAEEVQYIFNRYAELKSVPKLVDDLAARDFRTRRRVLSNGKILGGEHIRTGAVTLMLHNPIYIGKIRHKDKVYNGAHESIIDNELFENVQAIFARNWRDSKLGKRSRNPSLLTGMITDPDGKPMSPTQANKGSKCYRYYSTRLKPLEDKALIWHLPAGELEGTVIDVIANSLETELIKIADGASRDQDKITRYEKAAKELPSLSIIEKRKFLLGQKAAVQVNADTLQIRLYPKELNDPIILPAAAKLVRKGSDLRLAVAPDSGPAKNEPDPVLLRLVAQAFAARDYLIDGVSSGSIAEYSGRHLRNLARLSFLAPDIITAIVRGSQPVSLTGRRLLRSGAIPLDWTEQRALFGFK

SEQ ID NO: 1097 - protein, 581 aa, unidentified
  source 1..581: note = uncultivated organism
MSLEHKPVKRCAIYTRKSSEEGLEQSFNSLDAQRESSEAFILSQRQEGWRVVPTRYDDGGYSGGTMERPALKRLLADVEAHRINIIVVYKVDRLTRSLSDFAKIVEALDARGVSFVSVTQQFNTTSSMGRLTLNILLSFAQFEREVTGERIRDKIAASKKKGMWMGGLVPLGYDLDGRKLVPNTKESEVVCKIFSLYLKLGCVSKAAIALDREKLRSKVWKTRTGARLGGVPFARGALYALLRNRLYIGEIRHRDQWYAGEHKGVVPRDVWDKVQAQLSRNLKTRRKRAREQASSLLTGLVEDAAGNRFTPSFTIKRGRRYRYYVSQAAIKNSAVQRDGPTRVPAHELESRVTEKLLVFLKSDANLFDQLGAEDESPANIRNFVVGAKKLAARLPSLSSDDLRDLFSAFLRRVVVQENSIEVILSRKELRQLSENGGKVIASNLGVRKPLDANDLISLTIEAKSKRCGGEVHLVVPPNSDSVQQPKPSLIKAIARAHGWYEKVVHGDALDMRSLARQAGLTERYVGKVFGCAFLAPDIIESILDGSQPQDLNFKKLCRHIPLSWAEQRQQFGFAPVPSKGQ

SEQ ID NO: 1098 - protein, 553 aa, unidentified
  source 1..553: note = uncultivated organism
MENKIRCAIYTRKSSEEGLELDFNSLQAQREACEAYIASQKQENWRLISRAYDDGGYSGGTLDRPALQRLLADIKAGLVDIIVVYKIDRLTRSLMDFSKIVAVLDKHKASFVSITQHFNTTTSMGRLTLNMLLSFAQFEREVTAERIRDKYAASKKKGLWMGGIPPIGYIRQDKKLLPDNEQALKVQHIFEKYIELKSLGLLKAWLDKKGIVSQRGRALSVGNLNKILHNRAYLGEVGHKGTWYKGEHSGIISEELFNKAQAIMAENYRIRREYNPNKSLLAGKLFDDKGNYMSPSWSYGRKGKKYRYYISQAVIRKEKEKIGAITKISLPEIEGFVMGWAKGFLQDTTKVYPYLQQLPIPRQKEVCEKLPLLSVSPQCVQVLIKRVDVFKEEIKISIYPEKIGNIIAALCDGKELIIDNALLKQVVENYTIPYQIATIDNGAKIIIGTVQRPTVQDQSLIHILQKAYRWHKDILDGKTIKEIALREHLSERYILRILQLSFLSPRITRHILAGSLPKSVTLKSLLMIKSGNWAEQEQLLNLQNGTSWESKRA

SEQ ID NO: 1099 - protein, 570 aa, unidentified
  source 1..570: note = uncultivated organism
MARKSRKTQAQNTPAAKEGRKETAALPTAIYARLSVENSGKDDDGNSLQNQIAVCRDYLDGCPYLRLVEVYSDNGKTGTVFDRPAWNRLMEDVRTGTIQCIVVRDLSRFGRDYVETGNYLEKIFPALGTRFISVKENFDSFTCGGSMESLSVSLQNLVNAIYSRDISKKVSTALRAQMETGSFRNRNVPYGYRWNGDRTAYAVDEEAAAVVRQIFEWKRQDVSVYAIIERLNAGGVESPERHKRRVGTRNGGNIQGEGWCPSTIRGILQNRAYIGELICGKSETALYKGLKKRAMEKDNWIIVPDAHPPIVPATDFEAVERQMQRDSSHRAASMEWSADIRAGMTDLFDRKIFCADCGKRMYFKRQRIQCKGVVFRGVYDCSTHVRRGHATCFSHSIRQDVLHEKVFHAIRDQLQVALDYEKLLKAMRGGAGEASIREKHNAAVSSIKIRLNALKKRRTGLYEDYAEGILNEEEYAFAKSTYEEQYEALTRLLDEAVERRERFLESTSPENKWLTMMRGAASAAGLTQELIDAMIDKVLVYGGGRIEVVLNYNDVFRAMCECVEQMKEAG

SEQ ID NO: 1100 - protein, 563 aa, unidentified
  source 1..563: note = uncultivated organism
MSNKIKKIYHAAIYVRLSKEDGDVATSAKAESNSILNQKNLIRDFLKDKKDIVVVSERVDDGYSGSNFERPAFQMMMDDIKKGIVDCVIVKDLSRFGREYIDSGRYIERLFPALGVRFIAINDNYDSLNGKEQSDEIVIPFKNLINDAYCRDISIKIRSHLDVKRKNGEFIGAFATYGYQKSEEDKHRLVLDTYAANVVKDIFKMKLHGMSQDAIANELNAMGILSPMEYKNANGFHYQTSFKENEQAMWSSVTVRRILENEIYIGNLVQGKRTTPNHKVKKVVERTEDEWIRIEKNHPAIITDRDFEIVQRLLGLDTRTSPNQKGVYILSGIAVCADCGMPMTRKTTTAGGKKYEYYVCSTHKSTKQCSSHAIPVEDLENSVLCLLKQHIQNVLELDEILDFIGKIPFQELDVKRLEEQKDKKRLEVERSKELRTMLYEDMKDGIISKEDYAELHEAYEKKRSMAEEAIRKIEKELKDIINNNSTKYQWINYFKEHKDIEALTRDVVVKLISCIRIHNKKSIEIEFDFDDCYIDALNQLESMEYEVETDKKGKLNISRREAV

SEQ ID NO: 1101 - protein, 529 aa, unidentified
  source 1..529: note = uncultivated organism
MSTSAITPSSTTPGIVQDAAASALMKDFIEGTLRRVDALIAAGLPALESTDAFYERISDDQEGREVGVTRQRDDNLGLAKVAGVTVPEANWFRDNDIGASTRSKKPRPEFERLLAYIVTGQIKRVFSYSNSRLTRRPMELELLIRMHERAGVQFVTKVSGTGDLATADGRMIARMLAAVDTAEAERIAERISRAMEARAQLGTNFPARRPFGWGRSDVAWKAQTSEERASLNTVESELLRSAIDDLMEGRATIRSIADRWQADGVTTITGSDWHPTVIRQMFRNPRLAGYSVYRGEVVTDEEDVIVRGQWEPLLDVDTFDRLQALLDRRGARKGAGARPGSRRYLLSGLVRCGVCRGRMTGVWVEERGTHRYLCGTGNVSTSDRHVVTATGAGVDEAITETVLARYATVKADDTSTPAFEGDARLEEVRKMLAELEAEYLDGNVPAARYYRMSGKLDTERDELVAAREAFIHATVGPPVAPLTPEMWEGMPLGERRARIERLVEAVIIKPGARTSGPVFDEDRVDIVWR

SEQ ID NO: 1102 - protein, 560 aa, unidentified
  source 1..560: note = uncultivated organism
MAEPRKVVRCAIYTRKSTEDGLDQEYNSLDAQYDACAAYALSQRHEGWTVVSERYDDGGFSGGSMERPGLSRLLADIQSGKVNIILLYKIDRLTRSLSDFARIVDVLDKTGASFVSITQSFNTTTSMGRLTLNMLLSFAQFEREVTGERIRDKIAASKRKGIWMGGPVPLGYDVVDRKLIPNATEAQTVRHIMGRYVALGSVKALVSELARDGYRTKVQIRTSTGNKGGCLFRRGTLYHLLANRIYLGEIVHKGVGYPGEHEPIMPTELWDQVQQALAARSQGGTSKHGTKHPSLLVQLVRDGEGRLMTPSHTSKGNRRFRYYVTRPDEVEGTPAWRVNAHDLERMVCAELTKLLSDARTICTLIGPADARQTEKAILNARNLAEQLNGGQSHAKQNALQNLLGGVQLHEDHVVISIHPAKFATAQGMDQGVSPAGSPYIVTCDAVRVRRGHELRLIIPSSAVATLAASQDEKLIGLLAEAHAAAELLSVNPELPLARIAAQQGKCRTWFGKLVALSCLAPDIVTAIVQGRQPATLGARRMLQLTLPVDWVGQRAMLGFA

SEQ ID NO: 1103 - protein, 602 aa, unidentified
  source 1..602: note = uncultivated organism
MPTLNSQDKPVKVAYYLRVSTDDQIDRYGIALQKRSLDAIVASRGTLEDGKTNALQLAGEQYIYKDEGVSGTIPLEDRPAFARLQEDVVNAPDGEKPFDIVAVYKIDRFARKLKILLDVIEFFEKYGIKFISVHESIDTSTPFGRAILGIVGVLSELEMETIAMRTRAGKEEAIAKGVFMGKVPPYGYIKDTERRLKVLPKEAEIVNVIFEKFVVERLPLQAICRYLEDNKIESPGVTAVTNQKRKGGISKKSNPFFWATPMIKNILGDEIYLGKYYYNKTKGRKHLPKAEWKLSVYRYEAIVDTITFAKTQTLLENRKIFNVVRHDDKHIYLLSGLLKCACCYNPERDKNEGMQTLHGEPKEIHKGSQHYTYYYKCRRKTTAKTSIRCGSLPLPAEQIEKYVIERLRELLTDPKAVFNYQLKLRSTEQELKRLNTDYDMIRRLKNGLPQRKSNLKEQQEYSYITSKELTEKLNALDSQEKEYDGKLAEWEAKISETKLDEGYIKSFEIFEKQYKKALEDINSNRETLQQLLRMIVDKIVVHSRPVKEGDIIAGRKTGDQQVPYKIEMKLHLPQEYLKLLEAKANEAWVNRPEEFGDKNVNW

SEQ ID NO: 1104 - protein, 501 aa, unidentified
  source 1..501: note = uncultivated organism
MLVHSTLRACGYIRVSTNHPKQQSSLENQKKQILQYITKNNFSFIDIYDDIKSGTISNRDGLNRLKNHIKKDVFDVIIVKDISRLTRDTSTASDIKKLLTTHKKHLIALDDSINTILDYNSISKLISKAQFHEDESRALSNRMKNSKLDNCYDGKFNGSTPPYGYYLKNFKLIKRDDISPFIVKRIFAEFIGGKSFTQIAKGLNKDKIQTPSQLTKKSNATSQWRDTTVRGILNNISYCGHLLQHKTIPLDLCDKRRQSVPEEETILVENTHEAIISIEQFELVKKKLASKISNKTRQSTYLYSNVLYCMDCGSKMHKRTSPKGEKYYICGTANKISSKLCSRNTIKENYLTNMIVENLNNYISTNNINVLNKSITKYVEDLVKSLKKSYKDCIIRIEMLEKQKADVISFFPTYISQQEYDCYIKVRNDEISKLEVEKLKYRTLINKISIKELIKLVTDIKNKSISIENFNSEILNIFVSKIEFSKKKTPKIYYNCNNSSR

SEQ ID NO: 1105 - protein, 526 aa, unidentified
  source 1..526: note = uncultivated organism
MAFRSTSRSVTVKTLVSTPVVRCAVYTRKSTTEGLDSDFNTLDAQREACEAYISSQRLEGWVLVPDRYDDGGFTGGNIDRPALSRLMAGIRNGLIDCVVVYKVDRLSRSLLDFAKLMEVFDLHQVAFVSVTQQFNTATSMGRLVLNVLLSFAQFEREIISERTSDKMCAARRKGKLLGGPPVLGYDIDWDRKRLVLNPVELQMVKGLFDLYLKMESMLEVAKEANRHGWQTKSHTSKSGKKRPGHCFNKVDVQRVLTNVTYIGQINHKGEIVQGEHPPIIKKSVFQKVQQLIKHNRHAGGKSYRHQHNALLKKLLRCGNCSAAMAHTYAKKKNKLYRYYLCTTKQKQGRETCNTPPLPAQEIEDHVVEMVKRIGKDPELVQQAFTETVEQRKRQQVRLEQEQRGLLEEQRQLENKIERLVAAIDSCNAPLATIGEQLRKAEELVSQIERRLAEIDEGLDQLESEAVDREHLVAVLERFGLLWEVLTENEKTRLVNQLLESVVYDPVSSRISLVFQPRAPSISSRGN

SEQ ID NO: 1106 - protein, 545 aa, unidentified
  source 1..545: note = uncultivated organism
MNTIHCAIYSRVSVNDEAVQTQEYNTLDNQEDSCKAYILSQKSQGWRMFDIYRDPGKSGGSLNRPALQRLLGDIRAGKIHKIVVYKIDRLTRSINDFLKLCEDFEKYGVQFASTTQQIDTGTSSGRLLLRILLEFSQFEREMVQERTRDKRWGMAKMGMWTGGYIPIGYSNQDKKLVINPEEARIVKQLFELYSQLGNLSHVAAQLNRNGYKTKYRVAKNGKKLSGTRWDKKKVALVLANPVYIGKIRFIDPKTRKEYIFDGLHQPVITDMKLWEQTRVILGKNRDLRKSYKQNKYELLLSGLVKCGTCGTMMSNSSKGKNGKLYLYYKCTSVCETGKEACPVRTVSAAELDRAVVEALKQLGADDKILEKSIREADKLQREGIGTFGDERRRLTQKQSELKEQIRQTIALLKRLPDGTQFNTVVEELAGMEKSAAEMREEFLRVQTNIDIMERQSIDAETYKRLFRQFGEMYAELNFEEQRSLIMLLVREVLYTPRQMTIKFWGDLKDIDLRAMKKSSQTEKGVQPVFVWECKPTPRAGLEPAT

SEQ ID NO: 1107 - protein, 525 aa, unidentified
  source 1..525: note = uncultivated organism
MMSKQANNRQLNCAIYTRKSTDEGLDKEFNSLDAQRECAEAYIKSQTQEGWHCVPDRYDDGGFTGGNMDRPALRQLLADIEAGKVNCVVVYKVDRLSRSLMDFARMLEVFERNQVAFVSVTQQFNTTNSMGRLMLNVLLSFAQFERELISERTRDKIAAARRKGKWSGGMPLLGYDIDGQGGKLKINEVEANKVRAIYELYLEKQSIMATIAELDERGWTNKTWKTRKGTQRGGSQFTKATLFRLLTNVTYIGKLGYKDEINEGEQDAIVDADVWQKVQSLLRRNGRTGGVEARNKFGALLKGILRCACCDCSMTPTHTTKNGTKRYRYYVCMKAQKRGWKNCKSKSVPAAEIEKFVVDKIRHVGHDAAMVDEVVEQATIQFERELGVLVAERDGLVKELEYWNEAIRIAAPTINPGDPSSKSLEQLADWHESLHRADYRHAIVTEKVQALQAQTLTRDDVVKALTSFIPIWESLTVREQSRIVQLIVKQIDYDGSTGRVTITFHPDGIKTIAMENRPALHEAAS

SEQ ID NO: 1108 - protein, 546 aa, unidentified
  source 1..546: note = uncultivated organism
MKIAALYARVSTGNQEKQETILSQVAEIKERIVKDGLMLGDSLSFYDEGWTGSVLARPGLDRLRDAVKNKLFQVLYVYDLGRLSRDFLNQMILKKEIEDAGVKIISLHDINNETPESGFAQNVMGLFHDYERIKIAERFRRGKLFKVKNGILFGWNPPFGYTYVKGDKNKSISGSFKINESEADIVRMIFKWFTEEQLTIRQIIMRLYEQKIYPRKNKDGHWATSTLSRLLRDTTYIGKTHFNKREAIEAANPHKKDGYRKIKKTSRKNRPITEWHELSVPSIIDEKTYLGAQQQLKINSQFSMRNKIHEYLLSTLVRCTCGNTRAGEGVNGHLYYRCTDRVNRFPLPKECFATGVNATILDSKVWNEIYKLVTDPQRIEKQYERWNMRITTIQKSPDFVDVPKLNKELKDQKELEDRFVKAYGAKVISLEQLQSQLVDIRLKESQIMNKLSTSHNESLSTQKSIILPDLKQFCDTMKAEIDNLNFKERQFSVRQLVDTVTTDGVTATVEGSIPLFISKENTQNYYEQRSFNRNCWITQCRKKHSF

SEQ ID NO: 1109 - protein, 553 aa, unidentified
  source 1..553: note = uncultivated organism
MTKAAAYVRVSTSSQIDGESLSTQKSIIQAYCASRGWELTKIYEDAGISGAKDDRPALQSLLSAAKTGEIDAVVVRDLSRFGRSARDLLVNIQTLKDCSVTFISIKEGIDGSGPYGQFMLTILAAISQLELEMITSRMKENRLARWRDKRIFCGKPPYGYAWNVKEKRIEIVPDQAEVYSRVVREYLDLGRSLNDISLDLNAEGVQTRSNGSSKWSSGTLSKILKCRDYCGEITVNKFKADVKGKIIAHRPESEHIVFEAPPLITQDRWEKLQKRLNSANARSGRPSNAAQEFLLHDLCRCGICGAKMRSDYGNRRVDGTRSRHYACYWHKASTKIREIKGHEKCPLPLIPAELLEWQVFYVELVKQLGLNPDQHYKPLLDNGNGGNNKIKELERKLSNIEAAAKRKEIVLRNLDSLLEHDDFDRAEYSQKRHGYLAEIHALHRKMEDTRKELEELRQRKSDKAEFARFVSEADAFKAMIHKIMNLPFSDKQRLLRGVLDGPITVGHSTLIPHCEKESEDLLEEILKHTTMTVRHNQPLLLELLADKHTMKSL

SEQ ID NO: 1110 - protein, 521 aa, unidentified
  source 1..521: note = uncultivated organism
MATITMIPAKKQVGCRAREDETPKLRVAAYCRVSTETDEQATSYEAQIEHYTEYIKKNPTWEFAGIYADDGISGTNTKKREEFNRLIDDCMAGRIDMVVTKSISRFARNTLDCLNYIRKLKDKNIAVFFEKEGINTLDAKGEVLLTIMAPLAQQESQSLSQNVRLGLQYRYQQGKVQVCANRFLGYDKDEDGKLVINPEEAEVVKRIFREYLEGRSYYDIGNGLTADGIKTAAGSDYWLASTLRKILRNEKYIGDALLQKTVTTDFLTKKRVENRGIVPQYYVEGSHEAIIPKELFMRVQEEMVRRANLETGTGKRRIYSGKYALSSIVFCAHCGDVFQRTHWDLRGRKVIVWRCISRLHKKKSQVDCSARTVKEYVLHAAVVQAVNEVYAQRDAYLPQLKANIEKVLGEDNSGPVAEVDAKIADLQQELLKKAKANQDYEMLGKEITRLREEKYQLQLEDANREGVRQKVADLETFFGELDGEVTEYDDSLVRRLIERITVYDDHFTVEFKSGIEVDVEL

SEQ ID NO: 1111 - protein, 529 aa, unidentified
  source 1..529: note = uncultivated organism
MGRSKSSQGAKATSPPTVRCAIYTRKSTDEGLDQEFNSLDAQRESAEAYIASQKHEGWICLPERYDDGGFTGANMERPALQRMLKDVEDGKIDTCVVYKVDRISRSLMDFARLMETFETHGVSFVSVTQQFHSGTSMGRLTLNILLSFAQFEREIIVERTRDKIAAARKKGKWIGGIPILGYDVQDKKLVVNPNEAERVRGIFDLYVEHRAMMPVVEELDQRGWRTKQWTSKRSNRDHGGRPITKTSLYKMLTNVAYVGKVAHHDEVYEGEHDGIVSSEIFTLVQKSLKQNGRNGGRHVRNRYGALLRGLLKCVPCETSMVHTYTKKGGRRYRYYVCLNAQKRGWAVCPSKSLNAQEIEDAVVAQVRALARHPQMIMATLVEANRQMGARGEEIKREYASLRNELKQQHARVQALVEKTLKQPGGSLTDDLAQAQEGIRVLEQRSTLLREEMARISAETVDENDLARTLTSFDHIWNEFPPREKSRLVRMIVSEVQYDGRDESVKLVFRSSGINRLCEEAGARNRKEET

SEQ ID NO: 1112 - protein, 509 aa, unidentified
  source 1..509: note = uncultivated organism
MQRRECKEFISRKDDWVFVGERMEKGISGYKVSAAKRDAIIEIREMAEKKQFDVLLVFMFDRLGRKEDETPFLVKWFIEHGIEVWSTREGEQKLDNQVDRLLNFMRYWAASGESEKTSIRVKAAHTQMTQDGIWRGGPCPYGYKLVHKGRVGKKNRQLYDLAIDEVTGPIVMELFELVSTHGCGTQRAANYLNDKYPDPKKIWTRQTVLTLIRNPIYTGRLHMNDIRSEPIEELRLVSDEEFNFVAKAIEGRIPTRYREIRQAENEAMPDDAPTKTSVYGASLLSGILYCAHCGCKLVGGYCTKQRGGKAYHRPIYRCYNSATKAKGCTGQTVYSAAKIEEAVLIQVNDYFATIRRDVDSAWKENARKRLRDSAKARQKAAEARLVKLQAHQGALKAEIMKSITGESTFDTDLLKEMMEENKQAQAATEQEILDCQNEVEDEEIRIAASATNYKNIQDWAAKFEGAPLDIKKMILARMIEKITVDRDYNIEIHFFVTVEDFDGKVASAS

SEQ ID NO: 1113 - protein, 535 aa, unidentified
  source 1..535: note = uncultivated organism
MRAVIYARYSSDNQTEASIEGQLRECMEYATYNDIQVIGNYIDRAYSAKTDNRPEFQRMIKDSYKHAFDCIIVWKLDRFSRNRYDSAHYKALLRKNGVKVVSAKETIAEGSEGILLESVLEGMAEFYSAELAEKVTRGMKENALKGLWNGGNTPFGYVVNTERKLDIDSKAAPIVAEIFKMSNDGKTVKEIFNIMSERKVTRSNGKPLRYNAIRYMLSNRVYIGEYSHMGVVIKNSVPPIVSEELFNAVQLELAKNSKAPARHTADDDYLLTTKLFFGRCGAMMVAQAGTSGTKGVVYRYYACVRQKKHECGKKPVSKTKLEDFIVHKTMEFLRDDGVIERLSAKLYELQYTKSTLLPKLQEQLKQKEKEIENIVNAVQKGYATEILLKRLAELEKEQNELNDAIAKEQLKAPIFTQDHFRMALNNFQKIDISTQDGKRKIIDAFINSIYLYDDHMKIVYNANGKEETVSLEELESSILFSSGAPNNNKTNPRDNLEFVLFIKVFIIDIIVFYPFQCEFHAVSGRRSYMKTNQNR

SEQ ID NO: 1114 - protein, 519 aa, unidentified
  source 1..519: note = uncultivated organism
MRITEITPTIQTKEEKLRLAAYCRVSSDSDDQLHSFAAQIRYYTDYTKRNPKYELVDVYADEGITGTEMGKRDELNRLLRDCKRGKIDRIITKSVSRFARNTEDLLVTLRLLKEFSVSVFFEEQGIDTNQLNAEMIVTFPGMVAQKESETISGNLRWSIQKRMEQGDYVTPRPPFGYRLIDKQLVVYEPEAIIVKQIFELYLNGKGAQQIANILNCEEVRKRSRNGKNDWERGSVLYILSNEKYIGDSLMQKNYTTECLPYRIKRNQGEKQKYYVENYCPSIIDDETFYLVQALKKQKGEHKNISKNHLFSKIIRCPVCGKAFRQQTINGKHYWCCSTFATSANCQSRRLREEMIKECFLVMIYKLKKYQKIVIEDLIKRLEYLRDRTCENIERIKSIDKEIADLSAQNLVVTKLHTSGVINVAEYSKQTSLIGNKINALRIERRKKLNESEGDVQLSKLKSLNEIILECQPNGEFDEELFTEVVERVIVNDNTKITFCLIGELMLTEEIKTKGRCKVI

SEQ ID NO: 1115 - protein, 537 aa, unidentified
  source 1..537: note = uncultivated organism
MFKIKETDNYFLDKTLNYKVGIYCRISNEDTRETYNLESESIQNQKDLLTEYVLEQGWQLVDIYIDDGYSGLNFDRPNFKRMIEDIELGCINLVITKDLSRLGRDYISTGHYLEKYFPENNIRYIALNDGIDTIGDNINNDITPFRSVINDMYAKDISKKVRSAMDSKRRKGQFIGAFAPYGYKKDKTNKNKLIIDKEVAPIIKRIYMLYLQGMGFTKIAHVLNEEGILTPTEYKTKVKKNNYKGTAKTSLWGYATIRYILTNPTYMGYLSQNKCKKINYKSTKLKSLPRKNWIIVKDTHEGIIDIETFKDVQNLIDKKFDKRQVSKNKPGLFSGFVFCADCGAHMTYHTTSSGYTYLICSTYKRYTSKYCTRHSLKEEMLKKIVIKDITKLAERFVNRGNLINIAKNKANNLPTDEISIQIKNIEKRLDEIKGIIKSLYQDKFKGIITELDFIELINEFNKEKDILNKRYNSLNEKLNSITKQNKEKNKTYQLVENLIKFRELDVYTLEKLISRIDIYENKNVKITYNFKEPTNIS

SEQ ID NO: 1116 - protein, 572 aa, unidentified
  source 1..572: note = uncultivated organism
MQKKKGIAGEETIYQGAIYIRLSKEDGDKQESNSITNQRELIYGFLKNKPDIQVCRERVDDGYSGINFDRPGIKQLLEEVKAGEINCIIVKDLSRFGRNYIETGRYIQQIFPFLGVRFIAINDGYDSARLESRADNIILPFRNLMNDSYCRDISIKVRSQIEVRQRKGDYIGSFPVYGYFRDKEHKGRLIIDETAAAVVRDIFAMKIAGKNHKRIADYLNERGVPSPMEYKALLNWRYSTSFKLKPKAKWSAMAVERILKNEIYTGTMVQGKEKTLNYKVKKRIKVAKEDWIRVEDTHEPVISKEDFTLVQKLLLWDTRTSPKEQEVYLFAGLLYCGDCNEAMVRKKQRTGKKEYTYYMCSGNKKDKTVCNSHRIKENDLKEIVLKMLRIHVFLVCSLEGLLKAIKDLPLQEHEVKKRQGQLERRKEELLRIQKLKLSLYEDYKEGLLTKKDYMEMREDYETVCLEMEEAIRLLEEEIDSFVQGQSSHNNWIDHFKRAGNVTELSRSLLILTIDKILVFDNGIIRIHFRYQNEFAAAVRSLEEIAAEASNKSGMSEREHKALQSFLAAAREA

SEQ ID NO: 1117 - protein, 503 aa, unidentified
  source 1..503: note = uncultivated organism
MYDALYTRQSVEKADSISIESQLEYCKYETRGGSYKEYIDRGYSGKNTNRPAFEEMLEDIKQGRITRVIVYKLDRISRSILDFANMMDIFQRYNVEFVSSTERFDTSTPMGRAMLNICIVFAQLERETIQKRVTDAYYSRCKRGFYMGGRIPYGFTKTETVIDGIRTSMYVPVPEEAAQIRLMYSLYADSDHSLGDIISYFNENGIKQLRGGMWSTARISDMLRNPVYVKADADVYDFFKGQGADVVNPVSDFTGRNACYLYKGTASTTRKQCDLTDKEIVLAPHEGIVSSRDWIKCRIRCLNNRQSTRTCKPKNSWLAGKVKCGNCGYGLTIAKADTKWHRYFICATASATKKAKCGGTGGTVYADVLEEYMLKAIRERLAEFQTLSKHEEHRISPKVNENKIRLTEIDKEIEDLLSKVVGANAILMQYINNKVEALDAERRLLQEETISLTHQPDNNSMNVITNHTLKWEKTAFTDKQAVVDALIKVITIADGNIEITWNI

SEQ ID NO: 1118 - protein, 526 aa, unidentified
  source 1..526: note = uncultivated organism
MTAANGNGKAPRQVRCAIYTRKSTSEGLDMDFNTLDAQREAAEHYIRSQAAMGWTALPTRYDDGGFTGGNLDRPAMQRLLDDIERGELDMVVVYKVDRLSRSLLDFARVMERFEKKNVGFVSITQHFDTSSSMGRLVLNVLLSFAQFERELISERTRDKIAAARRRGKWTGGPPVLGYRVDTDRRALAVVPEEATVVQLAFELYLKTRSIGAVAARLNSLGHTQKRHTTRSGKVVGGRPWDKNAVHRLIRNPLFAGKVKQNDELYAGEHPPLIGMDVFERVQKGLADRSTGRGARHSRRPEYLLTGILRCLPCNAAMTSSVGRGRNGKSYRYYRCRREANEGTACPTGLLAADEVESAVIAQVREAARRGDLQREILAELNEDDGSLAEAQAQRERLTARLAELNGEARRLLAAFSNGNAGSKLMVERLGELEADMDRVRLELGEVEGRLRGVAGVRHEVERVAEFLDAFDGLWDALVPAERRELLHVLVHRVAVDTATGQLRIKLHDLKERSPASAAGLAAEATP

SEQ ID NO: 1119 - protein, 553 aa, unidentified
  source 1..553: note = uncultivated organism
MRGSTGIAIRVDRVAIYIRWSTEDQGEGTTLDVQMEACRAYIISQGWAINEDLIFVDDGISGGTLQRPALGRLRAQISAGDVDCVVVYKLDRLSRSVLDMVKLVLDEWDGHCYIKSAREPIDTMTQTGKMFFYQLVSFAEWERSVIKERTFSGKLRRAQEGRNPGVTAAYGYRLGENAELVVEPAEAAVVQLIFQLYASGLGCLAVARRLGELGHPSPTGGHWSSAQISRMLANAIYTGTLVYGKQATVKGGRRVKSDKPLIIREGMAPAIVERELWEAVQLMKLNRPGVGRKGLAGRAMGSQSLLTGLLRCQCGHAYAGSGGVGARQKYRYYYCGGASSKGVGYCTTGRIRQDLLDDLVVSALLEQFSGDGVHDRLRAQMEAELLGALQEAKLAVEALGRELGKVKEKEDRLKAVFLDGQLTTLEYRELKVELSRQVADLEAKRAERMQDVERATLALKNQRLVLDRVQEIERWDLLAMREKKLLLGQFIRGIVAHRDKRTGEISCSIEWRWAGGEAQGTVYSLRQARFTEAAAEAFRHRRRGEDGRFWSGE

SEQ ID NO: 1120 - protein, 547 aa, unidentified
  source 1..547: note = uncultivated organism
MKIAIYSRKSRFTGKGESIGNQIQMCKDYIYSNYKDYENIEFAIYEDEGFSGSNTNRPQFKKLMKDIENKDFNILICYRLDRISRNVADFSSTLETLQRYNVDFISLRDQFDTSSPMGRAMIYIASVFAQLERDTIAERVRDNMLELSKTGRWLGGTAPYGYSSTPITYYDENMTERSMVKLASNKEELETVKFIFEKYIEVKSLSKLEAYLLQNYYKTRNNSDFRKSTLRAILTNPVYAKSSNEIFDYLESKGMFVCGTPDNKHGFLTYNKLKSIPSKDGHNNREIRDCSEWIVAVSKHEGIIDSDLWLEVQKIYSGNSDKFVVSARSHNALLTGILKCDKCNSPMRIIHGPVSKKTNTKLFYYSCTMKKDSKGKRCDNPNAKVRELDKVVIDAIKELGKNKKMFLEDLITKNRQNKTSVIKKDIQNNIQFLIDQKKSQIDNLINKVSLDPDISDMFIPKIKQLKDELVELNNDMQNADNKLNNIKNEELELSFIKYLLERCSIVDTLSHDETKDLIRGLVDTMTWNGETQDFNINFVGSSSSKKK

SEQ ID NO: 1121 - protein, 645 aa, unidentified
  source 1..645: note = uncultivated organism
MDSKSENKVQMIAGIYIRVSTEDQAREGFSLGEQQERLEELCRFKKFKVYKIYQDAGISAKDMEHRPSFQEMLKDMKDGKINCIVAYKLDRVTRSVKDLEALITELEDNDCYLVCDRDEVDTSSANGKFFIRMLTVLSQLEIEIVSERTKFGLGGAIKAGHLPGTCPLGHYRDKDKVVRIDNATIGIVKRIFKMYLEGKSYYQIAEILKEEKVLYSERNWTDSAIKQIINNQIYVGDYVRNKTAKDKSKVIVYRDVVAPIISRAEWEEVQKQKEKNKQAFCRDRVYIFFQKLLCPKCGSIMTCKAPGGKKKGYIYYNCSACHYNLNESYIEKKLLNFILSLIEYDQVVKKYFYPVLEEKHEYIPESIDEQIKDLEARRERIKNAFISGVVKMEDFSEDYNLIESKLNALETQKLEHMEVNNQKFSPMKIMADRDFEIESKINEEIFSSDLELQWNMKTKLEKQEFISRFIESMIIEKDSHGQYQIRKINFRSRYIQELNKLNNSLVIDLAKPSENSESGVQVLKSTPTLTKKELNEYIENLKEYYDVKYYEDYFDWSHSYLREDNILNLPREKGNEKIMRAVLVDNNKNFPVKDKNKILKGKLGIVSYREKGTSDKNELDDYLKENSNIVLYKEENYIEDDSCED

SEQ ID NO: 1122 - protein, 581 aa, unidentified
  source 1..581: note = uncultivated organism
MSKRTDISGDKKKQVRCAIITRVSTDDQARGDYSSLKSQKDICEHYISVHQLDGWVATHYFEDPGYSGKDMNRPGIQALLAEVRAKNIDVVVAYKIDRISRCLPDFYEFWGILQKNGANFVSATQNFDTSTPMGMLMLNMLLSFGQFERETTAERTFHKLAERAKHGKWNGGWVPIGYEYDKATKMLKPHPEEAELLRNMFKLAVRFQNATEVAKKLNETGQRTRQRVLIKPDGTQRVIGERRFIGDRVKAIIRNEVYKGIIKHGDSEYPAEHPALVSAKLWDEANAALQRRPDQPKRLQSRDKHFHLLKGLLVCGECGTSLTPYPSGKKDPDGNPYLYYTCTHVSKGGKASPCPVRSIPARAFEDLIISYLGEIGSHPEIIEAAVQASNDEKQKAIRPLKAKMAELERRYRALSESVRNCIELGKKKGAKNIGDDFIAEANRLSEEKLAVELEKTKVQMDINYREGVVADKQIIADALKQFGSVVKSLPEADQKELVQLIIREVSVKHFDPETDPTPKENGVFKTKIRTKWYLVNISLFASDLFPAGLQTGETSSDLKRIGSRGRTRTFNHTINSRVLYH

SEQ ID NO: 1123 - protein, 535 aa, unidentified
  source 1..535: note = uncultivated organism
MDKKKIRCAIYTRKSTEEGLEQDFNSLDAQREACEAYIKSQMHENWVLIEKEYNDGGYSGGTMNRPAFQDLLLDIENDKIDIVVVYKVDRLTRSLMDFSKIVDIFDKHKTSFVSITQQFNTTTSMGRLTLNMLLSFAQFEREVTGERIRDKIAASKKKGMWMGGIPPLGYKKDNKKLVVEENESQKVKLIYEKYLELKSVPKLMEWLKKENIRTRADKEFYKGELYHMLSNKIYIGKIIHKENVYEGEHNGIIDEITFERAQKLVYENKVDKICGTKCSSNSLLAGLIFDDKGNRMSPTHSNSHKRRYRYYVSQAIKKYKKSQAGSVSKIPAGEIEKFVILTTKEIFQNKKQMQKILSKFDVNKQIELIKIAKSIDDYTNPKIIRSIVNKVIVSDKTVEVSFDANAVKEILGLLYQGDKITLIPPSKEIELITIIKSIKISQPSKTGNILILNAKESDAPDPNPYLVNAIVKSYYYHKQIQSGKTVEDLQNEENLKDSKYIRNILNLKYLSPDLTEQILNGTQPEDLGLQKLINL

SEQ ID NO: 1124 - protein, 531 aa, unidentified
  source 1..531: note = uncultivated organism
MRAAIYCRVSSTGQEDNSSLETQEVACRAYAAEHGYVVVESHVYREVYSGAELWDRPKLSALRAAGRERAVNVVVCYAIDRLSRDPVHLGVIVSEADHAGTAVEFVTEPLDDSPEGQLIRFVRGYAARVEREKARERTLRGKHARVASGKLHNYGHELYGYRRDKERGVREVYEPEAEVVRCIFRWVTEGGSIRGVVRHLNDEGFLAPSAGKVTYKDGRTARWGNGCVHRILREEAYKGETVAWRYQREGKRGGYKRRAEAEWIRLPEGTTPPIIASEIWAAVQERLAGNAAAQATRNAARPYLLRGLVSCAVCGKPMRSAPEHDRRVYRCSSRETPTGACGGKRVPAEPIEAWVWSEIEGVLSRPEIIAAEVERQRAGSPDPGLAADRDAVTRMLIKLERQQERNVRKLAEADDDFPTDILEREIARIEQERKATRTALAEADVRLAAQNAAVVRLDDLRISCERVRANLTELDFAHRRDAVVALVERIVADGSDRTTWRLEGSIPVDAGITSSTSARYGHPPPRPRDRA

SEQ ID NO: 1125 - protein, 560 aa, unidentified
  source 1..560: note = uncultivated organism
MRTAIYVRVSTTYQVDKESLPMQKKDLIYYSENILGIPNYEIFEDAGYSAKNTDRPAFKSMMKRLKEKEFTHVLVWKLDRISRNIADFINMWEEFEALGIRFISKNDNFQTDTPMGRAMLNIIMTFAQLEREMTSMRVKATMISRAKEGKWNGTAVPFGYKYDFEKKYPVIDENEAMTVRYIFDEYEKVRSSIQIAYFLNNSNIRTKRNAKWTSSTILQILKNPMYIGILRYNYRQSGRGKIKPEEEWIVVENNHEPIISKEQFERVRKIIEYNAQTASKPLFTKHDHLLKGLVKCGFCGSMHISSLQATRRTGYTPSYYICRQKKDNKSCIKSGYFSDLFLGEFILNYMKNMLTVQRQKITAEDEMEKILLSGPIFQEVKHIDKSSLIEMKKYFFMDYIPNDISPSKAPEKNTTEQNEVLNQEKNKYETALKKLESLYLFDDTMDEKEFVEKKKTFLEKIRELEEKMGEINVSTDDTEQSEESFINKEAFNKCLIDFILDDEEYIIWKNFAAQVDKKVLIQFIRNTIKQITVGETKQVLEIVFQSGLTQKFIYDQSKNK

SEQ ID NO: 1126 - protein, 544 aa, unidentified
  source 1..544: note = uncultivated organism
MFEKTYRTVIYARLSKDDGDKTESNSISSQKLICEDYISKQSDLELVDTYVDDGYSGVDFNRPAFKRMEQAVREGKIDAIVVKDLSRFSRNYIDGGRYLEKIFPQLGIRFIAINDSYDTNKSNPQSDSFIIPFKNLINDTYCKDISVKVRTNLDVKRRNGEFVGAFAPYGYKKDEKDKNRLVVDEYAGDIVRQIFSMFKDGMSIGSIADRLNELGVLSPMEYKQSNGSNYETSFRMNNSAKWSYKAVQRILTNEVYIGVLVQGKRGTPNYKVHVIQDKDESEWIKVEDSHEALITYDDFLAVKTMLSRDTRSVASDSESNIFSGFIFCADCGQPMIRKVVPSKNKKYLYYVCSSHKRHEGCSAHSISCKEVESAVMGAIKTQVSTILDISRTLEYISTMPSSDRIVFNYEKQIEKLTEEITYCRKMKLRTYEDLSSGVIDKSEYADFRKQYTAMIDEKQEALVRIKREMKDTTINGDTERVWVSLFKQYENIQELSRRVLMSLIDKIFIYEKHGIEVSFRYGDEFSRVMEYINSYELPMAAGEV

SEQ ID NO: 1127 - protein, 526 aa, unidentified
  source 1..526: note = uncultivated organism
MTTKAPQIVRCAIYTRVSTDQGLDQEFNSLDAQYEASRAYIRSQAHAGWTQIKARYDDGGFSGGNTDRPALQQLLEDVRARKIDIIVVYKVDRLTRSLADFAKLVELFDQHGVSFVSVTQQFNTTTSMGRLTLNVLLSFAQFEREVTSERIRDKIAASKRKGLWVGGMAPLGYDSKDRKITVNEQEAETVRTIFLRYLELGSLGSLLADLRRQGITTKRRVQSSGKIIGGIPFTRGPLAHLLRNRFYVGEVPFKGEILPGEQLPILDLGLFDAVQAKLSEQLTNHVKARANSEALLMGRIFDDRGNPMRTSHARKSGIKYRYYVSSALVDGRPDEAGSISRVPAVEIETLVARAIREHVGGAPTVDDRSIIAAHQPQIVIQPKEITIRIVNGGKADASQAGDVIRVRWQKQSSKRRREVLLPASARPEDARPIRSETRATLIAAIARGRRWLDELVQNQHASPETIAHREGCSPRKVTMTISLAFVSPALVKAALEGRLPRGIGATRLCDMPAEWSRQHQALGLNL

SEQ ID NO: 1128 - protein, 575 aa, unidentified
  source 1..575: note = uncultivated organism
MNHHPDDGRKVALYTRVSTGHQVDKESLPYQRQALTAYCEHVLHLPADRLEVYEDAGRSGKNTDRPAYQRLMKDIRSDQISHVVVYKIDRINRNLVDFSVMYETLKNHRVVFISMNEQFDTSSAMGEAMLKIILVFAELERKITSERVTDIMLDRARAGRWNGARVPYGWQWDAEAKIPVPDDTEAAILQQMYDMYDETRSTVKITQYLNSHGITVKRGAGKWTTKTVADVLRNPINKGDYRYNYRESAHGKKKPEDEVIYLEGVFYELISREQWDRVNAQMNLNGETRRKAGHQSTGQLVHVFSHKLICGDCGRHYQVQKRDTMRKNGFQPSIYICGGRHRYMGCNAQSISDVILGPFIFNYIANIIRVTERRVRAGSVQELEAALLNGPEFSGIAGIDSEGLQDMFSLICSRASGRSTYSPKYTAGPAQADIRPAREEIEKCRRALERLNKAYLYSDDGMNEREYLDMKNQIEKRRVDAENKIKAASAPETASSEAFLASASSFLLAHKLRTSSHINYSEFAPTVTQEILRDFVDLVIDNITVSDSRVASIRFKNGITHTFLYKEKERPQLPS

SEQ ID NO: 1129 - protein, 589 aa, unidentified
  source 1..589: note = uncultivated organism
MKNDGQFVIYSRKSKFTGKGESIENQIEMCKQYIRMQFGNSAADDALVYEDEGFSGGSLERPKFKKMMADAQEHSFRAIVVYRLDRISRNIGDFAKLIEQFNQMKIDFISIKEQFDTSSPMGRAMMYISSVFSQLERETIAERIRDNMHELSKTGRWLGGVTPTGYASESISHVTIDGKTRKACKLKPIPEEISMIKLIFEKFLETNSLTKTETFLLQNGFTTKNGKDFTRFALKNILSNPVYLIADDAAYQYLTENNVDLFSEKSDFDGIHGIMAYNRTLQQQGKANQVKPMDEWIVSVGKHPGTIDGKAWVKVQQLLEQNRSKSYRKPRSNVALLSGLLICGNCGDFMRPKASQRLNAKGETIYTYLCSMKERSRGHVCNIKNCNGNIMDANVIEQLKLLSEDGSDFLQQLEHSKKVLTGNRQSYDEQLAKIEADITANEDEIKGLVSTLSKASGTSAEAYIVKQIDELHDKGETLKRHLDELKELTASHTLADIEYDLLAQLLASFKDSVDGMTIEQKRAAIRTFVKEIVWDGTQAHIILFGSEYAFEFPEIPVGMGNAVTSCKNTENFEKSAEMGDIEPLEVNSK

SEQ ID NO: 1130 - protein, 506 aa, unidentified
  source 1..506: note = uncultivated organism
MAATSNGTPAPKPVRCAIYTRKSTEEGLNQEFNSLDAQREAAEAYIVSQKHDGWTLVPTQYSDGGYTGANIERPGVRQLLADIEAGKIDCVVVYKVDRLSRSLIDFARMMELFEKRGVCFVSVTQQFNTKSSLGRLTLNILLSFAQFEREIISERTRDKQVAARKKGKWTGGHILLGYDLDSRAGKLAVNAEEAERIKEMFRLYLEGTPVIEIVQRFDKLGWRNKQWTTQDGKLYGGSPLRRCHIYKLLANVLYTGQVRVGDEIFPGEHEAIIDQPTFELAQVKLKDNTWKSGNPHRVKMDALLRGMIYCSCCGSGMYSTYSANKERRYRYYVCYRSQQRIEGYCTSRSVSAPLVEDAVVESIRRVGVHPDVLAETAVAARQRLAEIVTGLREELNTTNGRVKNLKSQIARVRNPEARLDEIRGQLVAGETRAEELRKEILRREKRRIDEKELRRTMESFEDVWRAMNLEEQRDLLRQLVEKVGYDGRTGKVTVSFKSAAVKEVVQ

SEQ ID NO: 1131 - protein, 536 aa, unidentified
  source 1..536: note = uncultivated organism
MEQTLERVKTVREIAPTIIAQNSEKVHRQLRVAAYCRVSTDSDEQEMSFDAQVEFYTDKIMRNPEWKLAEIFADEGISGTQAAKRPQFMQMIRQCKQGRIDMIITKSVSRFARNTVDCIKYVRELKAMGIAVIFEKEGLNTMHATSEIYLSMHGIFAQSESESLSGNVRMGKVMSAKKGNVSFSYKTFLGYRRGADNQPEIDPEQAEVVRFIFDRYLAGDSLNIIKQSLEEKGILSPARKSVWSVATLRSILTNEKYKGDALLQKTYVVDCITHKSKRNDDRPQYYVENNHPPIVSKEVFDRVQAEMARRTSKRKVKEVGTKTDSGKYSSKYALTDMLVCGHCGTPYRRCTWSKRGNKKIVWRCISRLDYGTKYCPDSPSIEETLLQNAIVDCIKQVVQDESGYATIENLKQHVSMYFGKDDENSTAADEAKASELIQAITEAASTGQYTPEMQSMVEELNRIKAKITEKKSRQTEAQESSQRIDDILAAIDKLKDTPIAFDNQAMRQIIECIKVMSKDEIVIIFKGGIERTVTLG

SEQ ID NO: 1132 - protein, 524 aa, unidentified
  source 1..524: note = uncultivated organism
MTLKRCAIYTRKSTEEGLELAFNSLDAQREACAAYILSQAHEGWEQIHEHYDDGGWSGGNIDRPGLRQLLADLVAGKVDVIVVYKVDRLTRSLADFARIVDTLDKAGASFVSVTQAFNTTTSMGRLTLNVLLSFAQFEREVTSERIRDKVAASKKKGIWMGGPVPLGYRLGDRKLAMDEHEAEIVRSIFRRYTELRSVARLVEELAHQNVRTKVRQYSNGRTAGGVHFQRGSLSQLLQNPIYIGKVSYRGELYNGEHDGIIAEDDWAQVQQIVAANRHQRKLGKQTRYPSLLTGMISDPDARPMTPVSTHKGSRRHRYYVTRLMPGEDNERAWRVPAGELDSAVMAAVCDWLRSHERPCEPGQLMSDRDLAKELPGFSVPERRKVLIGHGVKVQLRETELCLSIGGEAQPVVSMPLRMVRRGAELKVVLESGGPHRAPDPVLLKLVSLAMNARKSLFANKAHQLTSHYSKRHLWQLLRISFLAPDIVTAIVEGRQPPSLTGRRLLRVTDLPLEWAGQRRVLGFS

SEQ ID NO: 1133 - protein, 528 aa, unidentified
  source 1..528: note = uncultivated organism
MLTEIADIYVRLSSEDRDKKNKTDESESIQNQKTMLINYCIEKGWQINGIYCDEDYSGADASRPAWNQVLKDCEEGRCTIVVCKTQSRFSRDMEMIEHFIHGKFPEWGVRFVAVVDNIDTNVKGNKKARQINGLVNEWYLEELSENVKATLSVKRKNGEFVGSFAPYGYLIDPDNKNHLIIDEVAAPIVQRIFDLYIGGLGYISIAKILNDEMIPPPCVHKKELGTKYYNGNYEKNNAPRTTWSDSAVYAILRRFEYTGALVQGRQEVVNYKTGKRRKKPQSEWDIVEDTHEPIISKETFFKAQEIRLSRGRGQKIPSGSCYSLAKKVFCAECGNTMWKMSYKLRDGRYNYLSCRTRKTTNGVCQNAHSIRLDELEQIVVDEINKLLDKYYDKKQIGKLDAPKKKRNGAKTLETQIAELEEKVKRNDNRMAQMYTDKLDGVISVDEFTKYRENYQKESEDVEKRIEILKSKLVALSGGETKTDTKSILEKYRKIDTLTFEIADEFISKIFIGKLQKSGKREIKIEWKI

SEQ ID NO: 1134 - protein, 592 aa, unidentified
  source 1..592: note = uncultivated organism
MYKLASPITIRPRTAMTENKQMNVAIYLRVSTDEQIKGYGLTVQEEKLKAFIKSQEYVLDEKHIYREEGFSGTLPIEARPQLKLLFEDAKNKKFDVVLVYRIDRFFRKTRLLLEAIEQLDKQKIGFRSISEAFDTTNSAGRFMTTLLGGVAEMERDTIRERTMSGKLSAARAGKWTTGVPPYGYKVNPETKKLLLVENEASVVKQFYEWIVYERLSLGKVAERANNLGINSPKHTTIKKRKTHNFWYKRTIGRLLTNEIYTGTTYFRKYKRPFNNLTSLVSSELQRPKEDWVKIIVPPVISVDLFEKAKQQLLKNREMSSRNTKRQYLYTKIIYCGACGFKMFSGFQPARKERGGVGTKYYHGTHRKKDAVGTTKRCFKCPQYAESRLEPVWDCLKEILGDPQNVLRALEKYSFKGEDKESIKNRITQNERRLMLIAEKKSKLVQVYINSDLDEESYKKQLLEYKVEEESAKAEISKFSQQLLSKNDKLDRQKFLQGLFTKIKEKLKKIDYDDRRYIISLFLDKILLFPRSNYAEVIFKFPNSLIQNRKVEIEKQPEVLFLNIKTLSEHEIRSKMIKANPLMYKKTLAHENI

SEQ ID NO: 1135 - protein, 535 aa, unidentified
  source 1..535: note = uncultivated organism
MKRKVAIYARVSTEHEAQLSALDNQVQYYDDILKKNPDWILYDRYIDEGITGTSIKKRKNFMRMIEDAKAGRFDLIITREVSRFARNTVDTLQETRKLKNIRVEVYFVEDNIWTFNDQDGELKLTIMATLAQNESKKTSQRVKAGQMISFQNGIFYGSGNILGYDKVGKDLVINEEQAEIVKYIYSEYLNGKGTVKIADELTERGAITSTGLSRWSAAYVSRVLRNPFYSGTIVYRKSYIPDYLEQKPKMNYGEVEQVVVEGRHEPIISKEDFKRVQQIMDSHSKPIKLGRRQATGVAKNIWSKKLVCECGANFNRKIYHKNKNETTYCYVCYNKKMRPKNRYKDSCEVKEVQEWKLQYMAETIFRNLIQDTNNRKELYDRLMKGVNIDEHPEIKIKKRIDKLNQLIENESSKLDRLIDTYLDETIDVTMYDMFQKKVSSRIEKYKIEKIELEKQCESIEPLEVRIENVKKNIRRLLDINYNGVDEKIIEEFVDKIIVHKDYFEWKFNFMAETIKLEISGTSKKDGFLVEHFNDN

SEQ ID NO: 1136 - protein, 534 aa, unidentified
  source 1..534: note = uncultivated organism
MNAARYVRVSSEKQIRNTSIPNQLERTAAYATTRGWSLDPDLTFVEPGESGANLDRPALNRCRRAAQDHQYDVLVIYDLDRFNRNLRDLLNLRHEFQQLDIPVYSICDNLEMTSCDEATFIQVVLRGVFSQVEREKITRRMREGREKAARDGKYIGGLVPYGYLRDEDGYLVVEEEPAGVVRMIFRWATDEKMSGRAIARRLNALGIPSPKARLGKTTVRRDGTRHTPTWTPGTIRHIIRGEIYIGCWTYHSSTDDITIDVPAIVDEDAWNDAQTTLVRNRRYTRPPQHRYLLRGLIRCECGAAYCGRPPRRKGGAHSYRCIARYDWVRIKAQKCEGGITIPGPELEEAIWADIEEFIRQPHLVAAELVRQREPAGAAIASRLADVDRRITQRKAELERYLALYGRGMIPVKQLDEKAEETRGSLATLETYRANLIEEQQRADLWERDMASVLEALTTLRQHLDENIAWEDKRAIIEMLVKQIVAETHLDDENEPYPVIHVTYKFERPDAEAPIPIELEPVFVATNWQNWGIGI

SEQ ID NO: 1137 - protein, 509 aa, unidentified
  source 1..509: note = uncultivated organism
MQEKIKCAIYARDSTDQQGDTIENQISQGKEYISRLGDQYDAEDVAIFIDHAVSGYYTSVFERQAMKDAVAGAKRGDFKLILFKEVSRVGRDKQENPAIVGIFEQYGVRVIAINDNYDSLNKDNVTFGILSVLAEQESIKISSRVSSAKKQKARRGLWNTDAPIGYRLNSETKKLEIDPDSKEIVESIFHMYVHRGIGSFLIAQHLNRNGKKTRDGNPFSRESVKRILRNQAYIGNTVYGKKRNELRREYDDSGKMTKRKVQVKIDPKDWTIVEGTHEPIIDKETFYAAQRILAGRGHHRTPRRAYHPLTGILFCAKCGQGMVCQKRSFQSKQYRYYICKTYHKYGRNACPQANVNADELEMKVISVVRGRLSALSTSNIIASADRSVDLSRLENERKTKQKQREKLQKDQIDIFGQRDLFDDQTYQGMMVSLKKQIQTIDEEIAILDGQIKAIREESSQTANVVNIIEDFLSLDVNDTERLRTILHELIEKITLADNHIDIRYRYSIM

SEQ ID NO: 1138 - protein, 531 aa, unidentified
  source 1..531: note = uncultivated organism
MKNITIDNRHLESGHKLGLRCAIYTRKSHEEGLEQEFNSLDAQRDAGEAYIESQKHQGWILLPDHYDDGGFSGGTMDRPALTRLLADIEAGKVDIVVVYKLDRLSRSLLDFIKMIERFNQQDVSFVSVTQQISTTDSTGRMMLNILMTFAQYEREATAERIRDKIAAAKKRGKYCGGMPVYGYDVDKESKKLVVNEAEAAVVRYIFRRYCEHGSARKLCFELNEQGYRTKAWTTQKGQQRGGNTWSTSSIYRTLNNRLYLGKIVYDGTDYPGEHEALIDQQAWDKVHRIFKESKSDKVGVARAKSVAPLRGVIRCGHCKGPLSPTYTHRGNKSYSYYICLTDRAREVSTCPISRIPGNEIENAVFAQLAQILQTPTLIAKTFFALKDIRRDEQERLALQKEQLEIRIEQAMRNVDLVKTEATAPDSDPQVVAVSDDLEVLEKEFHRVSARFALLSKVDVSEADVSSAFRNMDSLWNDLFPEERNRLARLLVKKVEVFDHAIDLVLKTKGLTALAAELAGLTSESMQRKAHP

SEQ ID NO: 1139 - protein, 506 aa, unidentified
  source 1..506: note = uncultivated organism
MIAIYVRQSVDKKDSLSIEDQIERCKAEIGQESYRVYKDKGYSGKNLDRKEFPLMMNDIRAGIISKVIVYRLDRISRSVLDFANIYAVLEEYGVEFVSCNEKFDTSLPHGKAMLDISMVFAELERKTIQQRVIDAYASRSRAGFYMGGRIPYGFTKKQTTLGGLKTSQYVPEPPEIEQIKTIFEMYSKPATSLADIVRYLKANNIKKTRGIEWSSSRLTETLRNPIYVKADMDIYNFYKSRQTEIVNDTDSFIGTNGCYLYTKDVNKIVGSTKNMAHYENMVLVLAPHEGIVDSDTFIRCRLKAEQNVQIPNGRRSHTTWVSGKIKCIKCGYAMRYNKWTGKTTENEYYLCSAVNSKKCEGVGAVHKHTIESVVLEQLKEKIKSIKVEQTRPNTNQSEINKLKAIITAKESEIDKILDNFKYASQTIIERMNEEVESLAEEIKELENQIFKLEYSKNETGQIDTDSIEKIFKHWDSISKEDKAKVVDILITKVLVSKEKIEIIWKI

SEQ ID NO: 1140 - protein, 504 aa, unidentified
  source 1..504: note = uncultivated organism
MRVATYTRISTDEAHQPYSLEAQDTRLRAYVASQEGWELTRRYSDRMTGSTLERPELQRALADGRHGRFDLLLVYRVDRLARSVRGLAQILEELDHSHVVFRSATEPFDTGTPAGRMMVQMLGVFAEFERATLVDRVIAGMERKAAAGGWLGGPNPYGYRYNPAVAKLEPDEAEAATVRTIFDLYVTKKLGTRAVANWLNSHGHHTRAGRIWSAVTVFDILCNPVHIGRMEFRGASYEAPHAALVSKDTFEGAQTMLAARKQSAWKRRSNSSDYLLSGIVRCGKCGNRFLGTVAHGRKGPYRYYTCFSRNRYGRHGCQADRLPADVFESAVLASMQATYSDSDLIERAVASAKKKANATLPNKRSELRSLEAKIEKAEQALQRYFDAFESGSLAAGRLAGRMDELERRLGELRSQRETLNEELADRSIVVPTTKDIGALLTAIDDAIGNGTLSQRKALMQQLVSEIRVESRSEIFPTYRLPAPPVRVISGVVGRRGLEPAAPHP

SEQ ID NO: 1141 - protein, 560 aa, unidentified
  source 1..560: note = uncultivated organism
MADKTLRCAVYTRKSTEDGLEQEFNSLDAQYEACAAYALSQQHEGWVVMRERYDDGGFSGGNMQRPALKRLLADIEANKVDIVLLYKIDRLTRSLTDFAKIIEVMDKAGASFVSITQSFNTTTSMGRLTLNMLLSFAQFEREVTGERIRDKIAASKKKGLWMGGPVPLGYEVRERKLVLNQEEAKQVRHIMRRYLDLGTVPLLVEDLERTGYRTKIQQRTSGPHRGGCVYRRGTLYHLLSNRIYRGMIVHKGKPYPGEHEAIVEEDLWNRVQTRLQHNARGSSRRKKHQHPSLLTGKLFDGGGRTMTPSHAQRKVRRYRYYVTRPEEVDDSPAWRVSAHDLEALVCQHLAGRVGNESFVLELLDTGAHEAEGIGRALAKADLVATQVRSGSPNDRAELLGKVIERIDLHEDRVEIRIDNAGLASELGLKSMPENGELRRIIIPAVRVRRGHQLRLVIPSKESAQASPPRRDDKLVALIAEAHKTRKMVLEQPDKSIAALASENGKCRTRFGKLVRLSCLAPDIVTAIVEGRQPEALTANRLSKTELPLAWPEQRKELGFN

SEQ ID NO: 1142 - protein, 529 aa, unidentified
  source 1..529: note = uncultivated organism
MENQQINQLDESKIPLREKRILRCAIYTRKSSEEGLEQEFNSLDAQRESCEAFILSQKGQGWTQLLDHYDDGGFSGGNTERPGLKRLLADIDKGRIDVVVVYKIDRLSRSILDFTQMIDGFEKKNVLFSAVTQKVSTTDASGRMNLNILISFSQYEREIAGERIRDKLAAAKRKGKYCGGIPILGYDVNKERTRLVVNPTEAKTVDYIFRRFLQIRSMRRLAQDLNEQGYRTKQWTTKKGGPQGGFLWNTSHMYRLIKNRTYIGQVSHKEKFFPGEHDAIVEVDVWQAAQNALQESNSDKGSSPRIKTSSPLRGVIRCGHCGSSMAVTYTMKQGRRYCYYICVKDTKRAVSDCPIKRIPAADIEKAVILQLGAIFRTPQVISGVLDKTYALEKVEIDRLLLQRNDILATRIPLEQELSKLLSMPGNQAQGIKEIQNKIDAVNSRVNVLSKRHKILLGNTVTEASITKAFQTMDTFWDSLYPVEQQRLIELLVEVLEIRETGLNLVLKTAGMEDLVNNLAGISCEMKQRS

SEQ ID NO: 1143 - protein, 519 aa, unidentified
  source 1..519: note = uncultivated organism
MARVLGRVRISRLTDESTSISRQRELIEDWAKANGHEIVAWAEDVEVSGSISPFDAPELGKFLTVDGARGWDILVAWKLDRLARNAINMNKLFGWVQENNKELVCISDNIDLSTWVGRLVANVIAGVAEGELEAITERVVASKRAIRKAGRFQGGPAPFGYRTVERDGGGKELAKDPAEQKTLQWIFQQALANRPVAHIVNDLNDNTDGINESKRGGRKWYDTTVIKLLENKVYLGWTMHNGQPVLGDDGEPVRRCEPSISIEDFNRIQQLRDQRGYRVRSAPETSPLLGVIECWECGKNMHVNRHNKRGVTSTAYFCRYHEKRLTVNAKVAEETFEEMFLDTVADLPILEKRISVIQSSAEQLAEARATYKDIADYLPSAPDEAMRKELFRQLDIVGRKIQELEKSVHTSDGVSWVDTGVTYGQRWAELDTDGRRELVTAAGIRYRVRQIKPGNRWHPPILESEIILPEQLQLLANAKPVDVRDALDHERQQWWESLEEEDRQAWLGAGIEQPGVTGE

SEQ ID NO: 1144 - protein, 594 aa, unidentified
  source 1..594: note = uncultivated organism
MSGEINITLKRCAIYTRKSTNSRLELEVNSLTTQHEICSAYIASQQYRGWVALPKSYDDGGHSGSGLERPALAALMHDIEAGDVDTVVVYKIDRLTRSLLDFVRLVEVFDRRSVGLVSVSQAFDTADSMGRMILNVLLTFSQFERELIAERVRDSIRTRKRHGQVHGGLAPFGYDYRDGELEIVEAEAQIVRFIFDAFLRKGTYTAVTTAVREAGLSSSTKTMKNGNVRGGRPMSPGTVYNILRNPIYVGEIRGDNCTWPGRHEAIIDRSTWDAASELAASRTRQGPGALGTEHFLAGLLWDDLGRHMLLHLSWVEGAPYHSYVSSNAQWSQAEYRRAYRSRADRLDDVVMAALAAFLCDRRRLRAALRTHGLFGTELDRLSVCGATAAERLERTPTHDREALVAALVIRIEVAPEALTIDLRPLELRRFLEWNGQATFVGRPSDWGASNAQYTLDVPVSVIAPERWPAFIVQPRDKASARKPDAQLLILLRSARAAQALFDANRDLDLTGLARKFGRTPGYFSRLIRLNYLAPDIVAGIADGTQPEGLTRKSLAAAHIPLDWSVQRKLLGFAEPVRTTTPRNLFGRGMWPQNP

SEQ ID NO: 1145 - protein, 757 aa, unidentified
  source 1..757: note = uncultivated organism
MARKSRKDQAETYNAAVYTRVDFSTALYARLSVEDNNIEFGNSIELQREMLTDFVSKQEDMSLYDIYCDNGFTGTNFERDAFIRMMDDIKDGKINCVVVKDLSRFSRNYIEAGNYIEKIFPFMGVRFVSINDGYDSEKNAPTDIMVTLRNIVNDAYVKDISGKIKSMFETKQNNGDFIGWSAPYGFLKSEDNNNRLVIDPETAPIAKQIYEWKADGIGFATISRKLNEMGIPSPRQRNIALGRYKTPPKYLRFSVDDGNTADSESVSNQRDLLDWYISKSEDFQNGEALEFIDDGFTGTNFQRAGFISMMEAVKAKKVNCIIVKDFSRLGRNYVEVSDYIDQIFPFLGVRFIAVNEQYDSSTTNAALGVDMAMKNIIYDLYSKDLSKKVRSARKSLMKKGEYIAPFAIYGYTNKVEKKRLVVDPTSAEVVKRIFEYAVQGEKARHIAIRLNSEGVPTPNEYNRLNSTKKQHYVPMDTAPIWTGDIVRRILQDERYTGKMVCGKYTSIKRKTILIPKEDWVITPGTHEAIVSDDVFQKAQAIFRTRTEIIMPDKPKSVLTGAVKCPCCRKSLAFESRYRRAFYCHNFNLGTGCEHSRADEAVLIDTVFAAIKTKLALVQVSEQTYVADIQAKMAEHDNTMRELTVKLKKLKLSQSTALEEYLEGKIDKSELQARKSKSASLIQETEEQLASLNVQSGNTLELIEQHRPFYEQDTLTRKMVKELVKEVHISSPTVIENFWKFQEFYTYLEEGFMPELNI

SEQ ID NO: 1146 - protein, 500 aa, unidentified
  source 1..500: note = uncultivated organism
MTQRTTKQDIRKDAVYARQSLDKKDSLSIETQIEKGLALSAENAEVYKDKGYSGKNIDRPDLQRLKADIEADKIKRVIVYRLDRISRNIADFYQLYQLMEIHKVEFISISENFDTSTPMGRAMMGILIVFAQMERESIQERVKDNYYFRIEEDGRWPGGPAPKGFCNARTSDNKPTLTENDDMEMVKLAFTMYAEEANTSLAKIGRELYKKGYRSNRENGRFDSVTIARILQNPVYAVADNLLYKYYKMRKAHICSDESTWNGSTSAHIVGKKAGNANTRKYTTLEEQTVYRTNFQGVVPSTTFITVQERLGKNEKFGRANAPSKMKELAGLVKCADCGYAIKINHFPNLNCYGRSTLHCCNASIKITFPILREKVAVEIQKQLDVIACKLLESNMKAKKRSDEIAKINQEIERLVNLAALGTMNVEQVSKAIEERKHKIDEIELAQERNLSFTEQARISDCLPLVFHRLNDEEKKSVVNLLIEKISLHENGDIDIHWKI

SEQ ID NO: 1147 - protein, 581 aa, unidentified
  source 1..581: note = uncultivated organism
MARAEQKSLKCAIYTRKSTEEGLEQAFNSLDAQREACEAFAKSQAHEGWQVLPEYYDDGGFSGGNMDRPALSNLLADIESGHIDIVIVYKVDRLSRNLADFVRLIELFDQTGVSFVSVTQQFNTSTSMGRLTLNVLLSFAQFEREVTSERIRDKIAASKKKGMWMGGLVPLGYDRVEKQLVINEEEAHLVRHIYQRYLALGCVRELKAELDRDGYLSKPRPEHHKSSGRKPFSRGALYTILKNAVYVGKVHHKGALHDGRHAAIVNQQTWEKVQATLARNRSNKATRSSAKYPSLLGGLVWDDKGNRMSPTYTRRKNRHYGYYVSQAVLQYKKDEAGSVIRIPGKTLETTVTDLLLGYLNNPEQILDLLSNDDLSGDGLDKAIRAGADLTRNWRDWDTGEQITVIKDLVIRIVVARETITVQLDRNHLIRRLTGNAPVGNGGRTTEVPPIKLIARVKLRRSGIESKLVYPAGKQPQVHNRSVKALQEALLKSLQWNEDLLSGNVSSIDALIERDGLNPRQVHRLRKLAFLAPDIIERVITGDIPETLTLERMKKDFPIDWEAQRSHFGLSQLPTSDWRNRR

SEQ ID NO: 1148 - protein, 550 aa, unidentified
  source 1..550: note = uncultivated organism
MSDKLDKPKEVRVALYARVSTEEQALHGFSIDAQLSVLRNYCKLYNKKIVGEYVDRGISGKSIAGRYEMQRLLKDAEEDKFDEVLAWKISRMARKVLDLLSIVEKFEKNGVIFRSFSENFETETPMGRFALQMMGAVGELERNTIIDNVKLGMTQRSRQGRWNGGICLGYKSESVDPNNLNDTRLVIVPEEATIIRKIFNMYASGKGLRAIANSLNKEGYKTKRGNSFDTASIKEIILNPLYIGKVRFNRYENWSERRRKGKSENIILADGVHEPIITQELWDRVQAIQKSKAEKPMKNYEGNYILTGLMKCPFCGATMVGTRTNNKLKDGTKKVIRYYSCGAARSKGASVCGFHSIRADYAEEYILKRINEVVTHPKVLKRLVDKVNTHKKQMIKPLQEELQANQQAIQKVKTNRDKYLNLFDEKLIDQELLAERLQELNQEFERQVKRQDELEASLKGCDSEELSFEYVQEVMSHLNEILQEMPNDERKAFYHMVIEEIVVNQEKKIEMIKLKIDEEVQRDLIKQSLSEKQSDRDILVCKVLFFRLDI

SEQ ID NO: 1149 - protein, 537 aa, unidentified
  source 1..537: note = uncultivated organism
MDKKKVRCAIYTRKSSEEGLEQNFNSLDAQREACEAYIKSQMHEGWFLLDKQYNDGGFSGGTMERPAFKELLKDIENDKIDIVVVYKVDRLTRSLMDFSKIIDVFDRHETSFVSITQQFNTTTSMGRLTLNILLSFAQFEREVTGERIRDKIAASKKKGMWMGGKVPLGYLKEDKKLVVHNEDAQKVQMLFDKYLELKSVPKLMHYLKENEIKTKTDKYFSKGQLYHLLSNRVYIGKITHKDKVYDGEHEAIICDDFFEKVQKLLYENKVDKTCGVKSSSNSLLAGLIYDDLGNKMTPSHSNSHGRRYRYYISRALKNNEETGSVSKIPAGEVEKFVIETTKEFLQDKKQIQKIVSEYKISKQNKLIYIAQDIQDYSEPKLIRAIIHKIMVSKNLIEITYNETSIKKVLNALANNQEIVVPDKNEELTPIVISKNIRITQLSRNDNILILNAKEYDTPEPNPYLVNAIVKSHYYHKQIRNGKTIEDLQNEENLKDSKYIRNILNLKYISPTLTEQILSGTQTAELNLNKLLACLNPI

SEQ ID NO: 1150 - protein, 546 aa, unidentified
  source 1..546: note = uncultivated organism
MTKSVALYLRVSTARQAEKDLSIPDQRSQLQDYCKRKGWKVVAEYLEPGASATDDRRPEFQRMVAEASQTHPPFTVILVHSFSRFFRDAIGSGLYQRKLEKHGVSVVSITQDVGDDPTGKMVKHIIGAVDEWSSAENAKHTLRSMKENARQGYWNGAKPPFGYSVVDAGTKGDKTKRKLEIKESEAKIVRLMFETYTGAKTGQPKGVKGTTTWLNAQGYRTRDSRPFYVGSVHRILTSETYIGTHWFNKLDSRTKRTKSRKEWVAMSCPAIIPKKVFENVQAQLSARSPKRVAPGLVGSPTLLSGIARCHKCGGTMMLRTGNGRGGKTYSYYTCSKAALKGKTECNGQSIRMDQLDRLIVEQLTEKVFTPAHVSGLLAEMQKKQKATSKDTVQKVRGLQKELDDTRKRIDRLYLAIEEGVTEIDETLKDRIGGLKRKKEVLIGDIALAKNPNSFPKQLLKPKHMDSFCAGFKKTVINADKGIQKGLIGLFIDEVIVDKAKGEITISGPNNAILAALTAKDAAKPEKVRSFVREWRPRRDSNSRPPD

SEQ ID NO: 1151 - protein, 543 aa, unidentified
  source 1..543: note = uncultivated organism
MMQPAPRKAARCAIYTRKSTEHNLDLEFNSLDAQREACEAYIKSQAHEGWRLIRTRYDDGGLSGASLDRPALQELLDGVRARKVDIIVVYKVDRLTRSLADFAKLVELFDQHSVSFVSITQSFNTTTSMGRLTLNVLLSFAQFEREVIGERVRDKIAASKRKGIWVGGPIPLGYASVGKKLVIVPEEAETVRTMFRLYLECGSVGALAEELGRRNIASKARTFASGRSKGGGRYGVGALAHFLKNRFYVGDVAYRGEIHAGEHEPIVDRATFDAVQSRLAESALERHVHVADSPAILMGRIFDDRGNRMTPSHSNKAGVRYRYYVSHALLQRRKDEAGGVARVPAAQVEATVVEAVRQSLRKNAPTEGHSDVSDREAIDRFVERIVISPKSIEIHLREPRAVEATETNRSSAAPHARDSDEDTAIAPAPIITVPWNAPAFVSVKGVLHQPSGKAMLKPETRDAILLAIVKARTWIDDLVSGRVQSFAEIAQHEGKVERHVRLLAPLAFTPPGMLAAIIAGAAPSDLTVTALAQTIPNAWERSA

SEQ ID NO: 1152 - protein, 527 aa, unidentified
  source 1..527: note = uncultivated organism
MEKELLTAGSLALEQKERNVIVIDATEHPQEVKLRVAAYCRVSSDSDDQLNSFAAQTQYYTTLISGKDNWTLVDIYADEGITGTSAQKRKAFQRLMADCRRGRIDRILTKSVSRFARNTKECLEAIRELKALGIGVQFEKEHLDTASMSGEMTAAMFAAFAQAESESISKNMRWSYQKRMQEGTFNTCSAPYGFRLECGQLVINREEAEIVQFIFHAYLSGAQPLEIARELAEHNTTRQWSEQTVKYILRNERYAGNAMLQKKYTESAFPYRRRKNYGEVNMYFVSGSNDAIISEATFKQAQALLQDRAQKRVCKPNPQPLNKMIVCGCCGNSFRSKQNRGIQYMVCRTHDSNLNACGVAQIENRVFYSGFLRLYYKLKHQGVSILSQLQQNLLTIRSRRMLWSTDVIELNKQISNLTSQSHTLAQLKQQGIVDPDIFISRSNELAEQLRAAKQKKERLLDAGSDETITQTQELLDILDAGPDFLECFDEELFCELVDKIIVESNERLWFRLKNGLELPEAIERTVR

SEQ ID NO: 1153 - protein, 524 aa, unidentified
  source 1..524: note = uncultivated organism
MISTMEKKVVRCAIYTRKSNEDGLEQAFNSLHAQRAMCESYIASFASEGWLALKTDYCDAGITGGTMERPGLQKLLADVNAGLVDVVVIYRLDRLSRSLRDFLNMMEVFDLRQVSFASVTERIDTTSSAGRLFLNMILAFAQFEREVAAERIRDKIASAKRKGKYVGGRPLLGYDGDREKMRLVVNAEEAAMVRHIFHRFRQLGSCMLLAKELNAEGRRMKAWTSKKGRAMGGGEWLKTDVHHVLTNRRYIGDVIHRGEAFKGEHEAIVDRKAWSQVQSILSTNRNYRASQTRSTTTALLKGILRCGCCDAAMVPSYTTRRDKRYHYYLCHSAGKKGRDTCEIKSVAAWQIEAAVFTYVKDIFTDPEMVARTFRATRGQAAKGCKAVDRERDALVKRLSELRSSIGRLARATDDKDEGALAAELRSLNKEYAQTEDRLRDIVAGGGQDDVPSEQDVAHALRTIEPLWEELFPAEKERIVRLLVETVTVKPDGLSIRLRPMGLISLAAEVANVGTAESKLEDANA

SEQ ID NO: 1154 - protein, 562 aa, unidentified
  source 1..562: note = uncultivated organism
MFLFQRRSGKDKTGLYMRLSVEDNDKLESDSIKNQRELLRAYAESHPELEVVDEYVDDGYTGTNFDRPAFSRIMQDCEAGRINCIVVKDLSRLGRNFIGMGKLMERVFPQKGIRLIAINDNYDNAKENSAADDVVVPFKNLLNDSYSRDISTKIRSQLSLKCRRGEFIGNYAPYGYQKDERNHNHLVVDDYAASVVRDIFQWRMDGMSAQRIADKLNHTGVLSPSEYKRLAAGTYRSGFRSGEKAKWQATQIIRILTNEIYLGTMVQGKRQKVNYKVKKIRDVAPENWIRVRETHEAIITQQLFDTVQEVIKLDTCAGEGQETVHLFSGIVECGSCHQSMVRRMTSKNGKRYFYLHCSTYKNHGGCTSHIISESKLYDVVLKALQQEIAAISKIEDRLHEIDQIPRDQRKIKSFHNQIAMLEKEIEKYTELRRQLYEDMTSGIVDKEEYLEFNRTFTQKIEAAQTSQMEARRQMELLLNIEVSQLPWIEMFKKYMNLQELNRRVLVELVEKIIVIDKTQIVIRFRFQEQIDSVLAYCDECEGDADEDNVVLADEMTEEVASQ

SEQ ID NO: 1155 - protein, 544 aa, unidentified
  source 1..544: note = uncultivated organism
MTKAAAHVRVSTSGQIDGESLNTQRLQIKDYCTSRGWELVKVYEDAGISGTKDDRPALQALLLAAKAGEIDAVVVRDLSRFGRSARDLLNNIQTLKDCSVTFISIKEGIDGSGPYGQFMLTILAAISQLELEMITSRMRENRLARWRDRRIFCGKPPFGYRWNTKEKRIEIVQDQGEVYSRVVKEYLDLGKSLNDISLSLNEEGVPTRNNGSSKWSSGTISKILKGADYCGEITVNKFITDVKGKIIGNRPEAEHIVFEAPPLIMQDRWDELQKRLNSANVRSGRPSNAAKEFMLHDLCRCGICGAKMRSDYGNRRVDGTRSRHYSCYWHKTTPKLREIKGHEKCPLPLIPAELLEWQVFYVELMRQLGIEPEHYKPLLDAQHKWDSKIESLEKTVSNVKASLRRKEIALRNLDSLLERDGFDSADYFKKRNGFLEELNSLDNKLRNTQKELEELRNRKIDEAEFAKRVSGTDPFKALTHKIMNLSFSGKQRLLHGLLDGPIVVGRSTLNPHHKLDPEDEMMEILEGIEMTVRHNYPLLLYFIP

SEQ ID NO: 1156 - protein, 546 aa, unidentified
  source 1..546: note = uncultivated organism
MTKAQTITKEIYVAIYLRLSRDDQNGNTESMSISNQRDMLMSYCEERGWKIYDIYVDDGFTGTNFERPGFQRMIGDIEEGYVSVVLTKDLSRLGRNYVMTGQYTDFFFPEHGVRYVAVNDSYDSAKEDNDIAPFKNILNEMYAKDISKKVRSVRQTSAKQGKFMGSKPPFGYVKSPEDKHLLIIDPPAAEIVKRLFREFADGDSGRNIAAKLNVEGVDTPAEYYFKQTGKRSTRGDNSKQWGSCTIMQLLRNQVYIGDMVQCKRKVSSFKTKKRLVTSPEDWVVVEDTHEAIIDRFTWECVQRRMDSTKRASSHHSIRVNSTDEVNIFSGIIRCADCGAAMAFNRKVGKSGAERRFYRCSRYANSGSKSCSMHTIDADTLESIILSDIQYYAQTAITDEKKLMDRLLSFSGQERRNKKAAQEKILRDATNRISFIEDASKRLFEEKITGNVPDSLFKKMLADYERELSELEDKSADIRQRIKEEASGESDVEKWMGLIKDCVCISRLDRATAFQLIDHVDVHEQMDENGHKSQSIQVNYNFVGCLS

SEQ ID NO: 1157 - protein, 522 aa, unidentified
  source 1..522: note = uncultivated organism
MKLAMYLRLSKDDGSTDESNSIKNQRNIIKEYIFSNPDLRRYECVEFKDDGISGKREDRPEFTRMIDLIRKQEIQCVIVKDMSRFSRDQLIAGKYREQIFPFLGVRFIAVTDHYDSINYIGAYGEIDIAFKEILNDMYSEDLSDKVKSALDIRRGNGKYICEKPPYGYKKSEADRHQLVVDEPAAKVIRRIYKEYIAGKSMYALSKELNIDGIPCPAKYMQESGIFVSDKKNYSGSVWTVASVSRILHNEVYIGNLMYGKSRAKDTGLKQKVNIARDEWKRVEATHEAIIDNKLFNKVQDRLSENKTCIENGVDTEEVSLHGLVYCKGCGKKLYYDKSGRSRFCCNTRYTDKPHDKCLVSIRNEDLEGVVISEIQKYIETCVDFEKVRKLNRIKIKNSKAKMKKDIDKQSGMITRIKDELKNSFEAFASGRITKTEYLEFKSKTDVVLEDSGKKLSKLETKLQDLLREEVESYNGLHVTKDMMKIDTLSKELVELLIDKIIVSQDKQIEILWKFTPELRVIN

SEQ ID NO: 1158 - protein, 571 aa, unidentified
  source 1..571: note = uncultivated organism
MRSRQRADPLNRHRCAIYTRKSSEEGLEQDFNSLDAQREACEAYIKSQKAAGWVALPAMYDDGGYSGGSMERPALRRLLADIEAGLIDTVVVYKVDRLTRSLADFAKIVDAFDAKNLSFVSVTQQFNTTSSMGRLTLNMLLSFAQFEREVTGERIRDKIAASKRKGMWMGGVTPLGYDVKDRKLVINEHEADTVRHIFHRYAVLKSVRALKEELDAAGVVSKVRDGQRPGGVPLAPGALYAMLQNRIYRAEIVHNDNVYPGLHEAIIDEALWNDVQETLTENRVERTARSAATNPSLLAGLVYDGSGEPMSPTHANKKGVRYRYYVSQSLIKRRQPAASSTGCRVPAADLEVLVEDRIRALLKNKAVILDSAGTAPLSTRKTLMQQSANLEHRWPALSASHRRAIIRALVTRIDVRPTTVEVSICIGILTDVTNSALDIRKLPTHPTGSIEVLTVPACVRRTGMETKLLIDGAPLGHREPDRSLLRLLGQARRYNEMIVQNADMSVSDLAAKAGVTQSYFTRVFRLSFLAPEITAAILQGNQPPELTANKLKQARALSPRWPDQHRQLGFK

SEQ ID NO: 1159 - protein, 519 aa, unidentified
  source 1..519: note = uncultivated organism
MKRAAIYCRVSTDKQEEKGTSLGSQEQACREYAAKHGFEVIESLVMLEQHTGAELFDRPKLTQIRAAVKAGEIDALIFYAVDRLSRINDHTGLIVTECDYHGVSLECVSEPFDNTPEGKLMKAFRGIMAEMEREKIRERTMRGKRAKAEAGRVPASGLDLYGYVKDREQGIRTIRENEAATVRRIYEWCADGVPIREIVRRLNAEGIPSPGARVAGKSGKWATSGLHRILRDETYKGDATAFRFKTSKVPGERSRRAVLLPYEQRIKLPEGVTPAIVTPELWDVVQHRLATNKGAQTRNVREPRLLRGVVNCERCGNPMVVEHVKGHVYYRCGSRHTLKGTCGAPMVRADKLEAWAWQRLSDMLDHPQNVMKMLKDAVASSPNTALHAERDAAVAALKKLDAKAAKLLDLLTSDDEALPMDVVASKLKAVQIERKAAAARADAAVAALASGEQQHVSVASFGKVLDQVKARLRNAGFDEQRLAVEALVEDVVAGKKQETWRLNLGVPVSLDGVLFHSSS

SEQ ID NO: 1160 - protein, 554 aa, unidentified
  source 1..554: note = uncultivated organism
MNPRIRCAIYTRKSSEEGLEQSFNSLDAQREAGEAYVKSQQHEGWQAISTHYNDGGFSGGNMDRPALKQLMTDIHAGKVSVVVVYKVDRLTRSLADFAKLVEQFDKFGVSFVSVTQQFNTTTSMGRLTLNVLLSFAQFEREVTGERIRDKIAASKKKGMWMGGTVPLGYTAQGRKLIVNEPEAVTVRTNFNEFLRLGSVHSLQDWLRENDIRSRAGNHFFRGPLYTVLRNLHYLGLIKHKKESYPGEHPAIIDRATWDKVQALLDANVRGKRRKVRATKESLFTGILFDARGTLYTPTHANKNGRRYRYYTSQAVIKRTEKSNAPARIPAPDVENAVVDRILNWLQTAADLLAALRDEATAAPEGFFDRIITQAAVTAQSWRVRIAADRTHFLKSVIDRVIIQQTHVEVRLRVPALVNEILGGDQPGIGFPPFVSVECPFRHVQQGRALRLIVGNTNITTDASRQAILKAIAHARQWYEQITTGKATNIAQLAGIDGVSPRYIRMQMKLVQLSPQSIEYLMTRSESLPLSLNDLLAAIPMDWREQSLGLPAKSA

SEQ ID NO: 1161 - protein, 514 aa, unidentified
  source 1..514: note = uncultivated organism
MPQVHVIEPVHSHEPAKLRVCAYARVSSDSADQLNSFASQVRYYTNLISSNEDWTLVDIYADHGITGTSTAKRTEFRRMMEDCRKGKIDRILVKSLSRFARNTQDCIAALRELRRLGVTVVFEKEHINTGTMANEMLISMMSAFAQEESVSISKNMRKGVQMRMQNGTYQISRMPYGYEFGKNGEYVINEKEAEVVRYIFDQFLTGAGVDEIAKSLQAREVRRRDGSLRWYGYSIGYILKNEKYVGDELLGKRYTTDSLPFKQIPNRGESPKYHFADTHPAIISRNDFEKVQNLLKERSNKYGAGHHPLHPFTKILYCGGCGMPFYHRYHNNREEWVCCNHFGAASSCSTKTIAQTQLIDLYLKMLWKLQRNDCELLNRHLQMLSDIQSHFHNQQGKTQYMNEIAGLLEQSHTLHRLWTAGCVDSEFFYAKDNELQRAIRTKREILQRERDEEEKLLLLDVTGDILHIVETAQADRFEEDVFAATVQRITIDNAQVCFALKNGLEFYENRDENE

SEQ ID NO: 1162 - protein, 573 aa, unidentified
  source 1..573: note = uncultivated organism
MKTGARKVVRCAIYTRVSTDQGLEQDFNSLDAQYDASQAYIRSQAHAGWTLLRGKYDDGGFSGGNTDRPALQRLLDDVRAGKIDVIVVYKVDRLTRSLADFAKLVELFDGHNVSFVSVTQQFNTTTSMGRLTLNVLLSFAQFERELTSERIRDKIAASKRKGLWVGGMVSLGYDARDRKITINKAEADRVRDIFRSYLRLGSLNPLMADLRKRGIVTKVRTLKTGQTVGGIPFTRGSLAHLLRNRFYIGEVAFKGEVLTGQQPPILDRQLFDTVQAKLDGQINGNKAMRAKSEAQLTGRIFDDRGNRMSPSHARKRGIKYRYYISSAPLQGAAESAGSVRRVPAAEIEALIIKSVREHLKLDAQIGDRSIVEHYIARIEVRPQQLVIQLTDGTPTELASRLVVDWRKTASKRRREIMVPEGSSPDLTRPIRFENRVTLVASIARGRRWLQELIVDPLATLEGIAERESCSARKVSMTVSLAFLTPDLVKAAVDGRLSHGMGVTRLADLPAEWSRQHRMLGFRPHYARSNQSLRTRLRFPGNGILPTETEPTKMPLTPTPIVHRDCAPARKPAN

SEQ ID NO: 1163 - protein, 537 aa, unidentified
  source 1..537: note = uncultivated organism
MPNRCAIYVRKSTEHGLDMEFNSLQNQEESCKAYIASQAFNGWQYHKTYTDAAISGGTMERPALKQMLDDMAHGLVNTVVVYKVDRLSRSILDFHNMMRYFEKYGTNFVSITQSFDTSTSMGKLTLNMLLSFAQFEREVSSERVRDKIRASKAKGLWMGGNPPLGYDVVNKKLISNAVEAANVRTLFEKYLELQSVNALTEYATAHNIYAKQWTTAKGITKGGRPIAKMSMHRILRDRTYIGQIVNKTDNTVAPGEHQAILPTELFERVQTALRNNANNKSETHGSPNLLTGKLFNHNGVRFTNQRTCGKGKTNTHYYATRGFYLPTPTVDEIAIKTIIQFLDADLSALPSATVDVLKQINAHNISYAEKNGLIQSLVDKVIYSQEKLIFYLKPDTAKLQLFAKANFINQKSDPMEFTISDNHIIITVSIVLRKYVNTVFDKTKNGVLIITDNNHLIVKAFATAWKYREMYEECGDADKIIASEHTSPRQFYRYLDLAYMNPETVNRILSGKQKVNVNELFQIAKMNVLHKAPTCYN

SEQ ID NO: 1164 - protein, 571 aa, unidentified
  source 1..571: note = uncultivated organism
MLANKMSGVMQLKEKQFYAAMYLRLSKEDTDMNIGDRGSFNKSESNSIGNQRELIKSFLREQPDIELYDIYVDDGFSGSNFDRPEFKRMIGDIEAGRVNCVIVKDLSRFGRDYIESGRYIQKTFPALSVRFIALTDHFDSLSADTGESSIVLPVKNFINDSYCRDISTKVRSQLAVKRKNGECIAAFAVYGYRKSETDKNRLVIDEYAAENVRRIFAWKIEGMAVCAIAEKLNNLGILSPKEYKKSMGIPYHGGFSGTMSSGWGSATVKRILTNEVYLGHMVQGKTEKVNYKVKRQNIKPVEEWVKVENTHAAIVSTDDFAIVQHLLKADGRKSPESGTLNPFAGILFCGDCGQQMIRRMTRYNGTVKVHYICSTKNRGEGCSRHSIEENVLKEIVCESIRKFANSFLKEKELFDRAVQYETNFETVARYDKEIGRLKKEQDKYYSLCSGLYEDLREGVVTKEEFERLHNGFSQKGKELEAALQKQEQLVKEMFKKGALSAGRLKTFQDCVELKEIDRHTLSSLVRRINVFENKQVVIDFYFMDTFAVMTGLSRKILEDRAGETPEAERSA

SEQ ID NO: 1165 - protein, 520 aa, unidentified
  source 1..520: note = uncultivated organism
MRSETKSIRPDRVAIYIRWSTEDQGDGTTLAVQQEGCGHYVLSQGWQVTSTLVFIDDGCSGGTLNRPKLDELRQAIKAGAVDCVVVYKLDRLSRSVMDTVNLVLGEWEGHCHVKSAREPIDTATAMGKQFFYMLVSYAEWERGVIKERTFSGKLRRAREGRSPGGPVPFGYRLSGQAGILEVDPDRAGIVRRIFGQYLAEEGTYRIAGDLNRDGIPSPTGRKWHINTLLKMLKNPLYAGRLVYGRVTVNPRRQRDQSEPWYLKNPEPIRTESRCPAIIPAAEFDRVQALLARRSPTKVGVRALGSDHLLTGLLKCRCGAAMIAHTSVSSTKKPYAYYACQGKKGRGRGGCDGGLIPQTALDGAMRVKLAELLQGEESYRHFLTVRWASVETQIRETAERRRQAGKTLDELAGQSRRLNADYRKGEISASLYQENRREIDAEAAQLAEQAAYLERLEHSLAGQLHQRDAVAELFDLARRWDDLAVAQRKYVLRNLVDSVEAFKQPGTPEVALRVCWKFGGE

SEQ ID NO: 1166 - protein, 583 aa, unidentified
  source 1..583: note = uncultivated organism
MEVENKKRMVLLLRNSSKKQAEKKINDDGKIKYDIPLQRNILTPWAERLGYVIVKELVEGGVSGFKVSAAKRDAVIELKEMANRGEFDVLGIYMSDRLGRIADETPLIVSYLNARGIKVLSYTDGEISSKTHDEKLMTYIRYWQAEGESIKTSKRIKDAHGEAVEKGRWRGGNPPYGYRTVSKGTLNGKGRPIFDVEIDPEAAEVVRTIFRLYREHYAFKGIAKYLNDNEIPTTTGALWSWSQIEDILHNKLYIGIYELGKKAKKVRAISPIMPHLVIISEEEFYEVQELIKKNTKAPNRGRPTIRGASLLSGLLYCECGRKYTSQSYRHLNKRKDGTTWLYELHTYRCGAYRTPKVGQCYKLPIKAEILDNLVVRDAKNFMTTADFEKLLHSNDDSVHEKEVILSEQLKRLSKEKTQLEKELHKLRDEVCKVIMGESQWSQSVLSQLIETKEQDLSDIVKKQEDIEFKQKELAAYLAERKANLSELNNWAERFDIQDTPAKKAMLINAIDRITVFDDKITVKYKFKCDYFRGGTKFDIDNDKAVDEVPSGVFPCLSFVQGMSQPSRARSSSSAPLRKTRTPP

SEQ ID NO: 1167 - protein, 530 aa, unidentified
  source 1..530: note = uncultivated organism
MKRDDPKPESSVRCAIYTRKSTEENLELDFNSLDAQRESAEAYIASQKHTGWVCMPDRYDDGGFSGGTIERPAFQRLMADVEAGRVDCIVVYKIDRLSRSLMDFARIMESLERHNVSLVSVTQQFNTVTSMGRLTLNILLSFAQFEREIISERTRDKIASARRKGKWTGGAPVLGYDRERDSRGTRLIVNEGEAKRVRAIFAKYLELQSILETVHWTDAQGWVNKQYTTNRGVPRGGKDFDKSTLQKLLTNRLYLGQIVHNEQVYEGEHEAIVDEDLFGRVQAQLARNRNSGGKYQRNKHGALLKGLVRCRHCECGMSHHYASRGSNGSTRRYRYYVCQTAQKKGWAACPYPSLPAGELEQFVIDRIKETTGDPKVLAEVVARAKEQINRQADELRQHRTLRENRARRVNEDINDLTRSLGAPGVGMSVSPATASELARLQDELTTLQKEVREINQQIIELDQRMVDEDEMVGAMEAFDPMWDRLRADERTRLVHLLVQCIDYDGANDEIAITYHPAGLQALAQTEICHA

SEQ ID NO: 1168 - protein, 503 aa, unidentified
  source 1..503: note = uncultivated organism
MKKVCAIYTRKSTDERLDMEFNTLDAQREGCEAYILSQKSEGWIASKDRYDDGGFSGGSLERPALKRLLDDIRAGKVHIIAVYKIDRLTRSLMDFAKLVQVFDEYGVTFVSITQSFNTTTSMGRLTLNVLLSFAQFEREVSGERIRDKIAASKQKGMWMGGVAPVGYKIENRQLIVNEPEVKTARHIFERYLALKSVLDLKRELEIKNIKSPVRKSLKGNTYGGMNFSRGALYAILKNPAYIGKISHKGKIHEGLHDGIIPIDLWEQVQTQLKKQTVARTDQTKHRHMLQGLLFDPDGIVYSPTFTNRHGRQYQYYVSQNLAQNRSHPYGIMSRLPAHEIEKLIDNALRKDILKFVGDNDNIALTYIVENHHIIPAIELVRTCIEKITVGLNTITLSVRPVGFKKLVNEYLNLDITDCKETFRLDLPFTVAKARRGALVIEPEGPKDIFDLPSAKLKKLVQGVVWRDEHFDGLTLKEIARREGCSEAYVGTAIFSSFDILQSA

SEQ ID NO: 1169 - protein, 576 aa, unidentified
  source 1..576: note = uncultivated organism
MSQVDAKKTKRRMRCAIYTRKSSEEGLEQEFNSLDAQRESCEAYVKSQRAEGWEPLPDRYDDGGFSGGTTERPALKHLLADVEAGRVDVVVVYKVDRLTRSLPDFVRMVESFDAHSVSFVSVTQAFNTTSSMGRLTLNVLLSFAQFEREVTGERIRDKIAASKKKGMWMGGLSPLGYDAVDRKLVVNEREAETVRHIFRRYAQARSVRLLKNELDSEGVVSKVRRTRTGKVQGGKPFARGALYLMLQNRIYLGEIVHKDKSYPGEHGAIVDRELWDQVQEVLKNNRVDRQIGSGAQNPSLLAGLLYGGRGGRLTPTHAVKKGRRYRYYISQIQSAPSGEGTPAIRRIPAGDIEGIVTRRLQELLSSPRELLGVLEAHTPEAIDQKSLTGAAASLAREWTGLERSRIRGLLLAFVPRVEVHKTRVNIHIAPSRLAKILRSGSMEFPPLYKSPDEETHPVLSVPAQLKRTGMEMKMIVGGEAGKRIPDPALVRLIVRAHTVKESLPSCAGMELSELAKHHGVGDSYISRLFRLTLLAPDITRAILDGQQPPELTGARLMRDTRFPLAWDEQRRVLGFI

SEQ ID NO: 1170 - protein, 540 aa, unidentified
  source 1..540: note = uncultivated organism
MVRIAIYSRKSKFTGKGDSIGNQIEICKNYISNLDIEDEIDISVFEDEGFSGKNLERPDFQKMMEIHEIKPFNYLVVYRLDRISRNVGDCAKLIEQLNATHTAFICVKEQFDTSTSTGIAMMNIAMVFAQLERDNIAERIKDNMYMLAQNGRWTGGTTPLGYKSIKHINADTSGKSRSYYTLEIDEDTVGLVKMIFSKYSELQSLNAVEIYLNQTKNVAPNGKEWGKANVKRILENPTYCIADKDSLDYFNQLGSNVCFTEEDCDGIRGIIPYNRHVGEKNTATTPDKWVIAVSMHKGLYTGKEWIRIQNILKDNSKNCYGGVPATKQSFNKHSILSGVLYCSCSAYMRPKLYASGKMAYMCMNKEQSKKEKCSMPNLNGTELDRVVLDELFAFNITNSNVSKQIATLRKQVNNIEDDIYAQIKSLNTKKSDNVKSIENLVNALASGANQLTMDIINKKIAELSEHNNAIDMQIDELSHKEDIQSKMHSDINNLEMATIYLKENFERLSIESKREYIKKIIDKVVWDGEKAHIFITGSTD

SEQ ID NO: 1171 - protein, 526 aa, unidentified
  source 1..526: note = uncultivated organism
MYNPNLASAEPPKITVISAKSQEMAKLRVAAYARVSSDSEDQQNSYIAQVDYYTKNIATHEGWELADIYADEGITGLVASKRDDFNRMIQDCRDGKIDRVLVKSISRFARNTKEYIQYVRELLRLGVSIHFEKENIDTGKMTSEQIATIYGAFSQMESQNHSNNMRISVRIRMEKGDYVSPTTPYGYKLEERTLVIIPEQAEVVRRIFTAYLSGQGKEDIANELNRLGIPRTKDRKMWYSTTIGYILTNISYTGDMVWQKSFATNDIPFRQVRNKGERPKYFVENCHEPIVSKDEFQRVQALLETRRLQIAGTVSSALLKKKLHCGNCGTLFRRKIVNEKVYWACRRHDSHKDLCPISQVPEEQIITAILRMYHKLKRHREQILSPLLRQLTELREKELRSNRKINDIDKEIAQLTEQNLVLVRLKSKGYVDSALYLSQTGDIDFKLRELRRLRRRIMETTGEDGQIKATETMLDYLESSPEHLGELTEELFETLVENITISSETEMNLTLYNGLTLKETIERTVR

SEQ ID NO: 1172 - protein, 551 aa, unidentified
  source 1..551: note = uncultivated organism
MTAKTIRCAIYTRKSSEEGLEQDFNSLHAQREACEAFILSQRHEGWQLVKTHYDDGGFSGGNMNRPALAQLMRDIEAGKIDVVVVYKVDRLSRSLHDFARMVETFDKHNVSFVSVTQQFNTTTSMGRLTLNVLLSFAQFEREVTGERIRDKIAASKKKGMWMGGVVPLGYDVVDRRLVINPQEAERVRHIFRRYLELSSVRALRDEMEQQGILGTIRKLPSRRTSGDSRGAIYRLLSNYYYIGQVHFKGAYYDGQHEAIIERELWDKVQESLSDNKGESTGEYSRVGAILLNKKLFDAATGEPLMPVHAKKNGRRYRYYVSLSLLRSNVSAGASGWRLPGTALEKAVYGIIRTTLSQKAQISDSAIAAGLSACYVPEILARAQLIRLQPDESLDSLTKKVSIKKDGIEVELILNSLLPEKIEHNEINLRVSKPTLMQRRGSETRLVIPGTDPSTQTVDSVLVTSIARAHVWAEEILSGSVAAMTDIAIREKVSDSYVKKVMPLAFLAPDIVTAILAGRQPPHLTNQMMIRQMQVPLDWQEQRRVFGFPALA

SEQ ID NO: 1173 - protein, 545 aa, unidentified
  source 1..545: note = uncultivated organism
MTAAKPKLRRCAIYTRKSTDEGLEQDFNSLDAQREACEAYIRSQAGEGWMPVATRYDDGGYSGGTMERPALEHLLADIRARRIDTVVVYKVDRLTRSLADFAKIVEVFDGHGVSFVSITQQFNTTTSMGRLTLNMLLSFAQFEREVTGERIRDKIAASKKKGMWMGGFVPLGYEPDGRTLTINEVEAETVRTVFRLYLENGNVRRVKAEADRLGLTTKIRTGEDGQRRGGRPMSRGYIYKLLGNPLYVGRIAHKGKTYEGQHPSIVDEKTWEAVQAMLAGNTRATSSTARSTDPSPLMGKLFDETGTPLTPSHAVKSGRRYRYYVSKRLIDGTVSGGETGWRLPAREIERIVAESIRGLLTDGAALTRAARDGGMAAHRIVGLLEGAARWRGNPLALVERIDLAPDQLTICLNLSSLTDEADMVVRHIVPTRIRRRGVETKLVLEGSGGVTSNPDPALIKAVVRAHRWFDDLVSGRARSLGQIAEKEGVSDRYVSHLMPLAFLAPDTVEAILAGKQPVDLTAETLTKHTELPLTWSDQEALFGFE

SEQ ID NO: 1174 - protein, 518 aa, unidentified
  source 1..518: note = uncultivated organism
MIAAIYCRLSKEDEDKQLESESIQNQKSLLVKYAVEKGWDIYNIFCDEDYSGVDRERPAFRQLIADAQQGKFNIVLVKTQSRFTRDMELVEKYIHGLFPLWGIRFVAVVDNVDTDVKGNKKARQINGLINEWYLEDLSENIRTVFDYKRRAGQYIGGFPAYGYQKDPRDKNKLIIDPEAAEVVRRIFELYLAGNGKQHIAYLLNVDGIPNPTRYKQLKGLGYTNGHQKNGYGLWNRTTVGRILKEPMYTGDMVQGRRKKVSYKSKYVADVPQEDWITVPGTHEPIIDHETFDRVSRMLESRTRSSGTGEVHALAGKVKCMDCGSAMVKVSNTYKGERRSYLRCKLYATDKRLCSNHSIRLDALEDEVLKRLRAYIQQYYDRTAAPQLVTDSRRVKRQDALKRETATLTLEIERRSKAMRDLYLDKSKGLLDDEQFLSFNAGYLAEKATLEKRLSVLEKELTGLDSDVRDQQDIQARIEHWLQFDTLSRELAADFIDSIEVGERNPETGRQPIKINWLF

SEQ ID NO: 1175 - protein, 516 aa, unidentified
  source 1..516: note = uncultivated organism
MTNRKEQKSMKIIYARQSVFKQDSISIETQIEICRKYTEPGDDITVYADKGYSGSNTDRPQFQQMLLDIEKNGAEKVIVYRLDRISRSVLDFSNLYEFFKEYKVEFVSTNEQFDTSTPMGEAMLEITMVFAQLERESTQQRILDNYYERGKNGMYLGGQAPYGFDLTAVKDGKRKLKLLAPGCAESATLVRMFRLYGNKGYTLGGIAKELNEEQIPSPNGGEWKSETVSRVLRNPAAVKADFFVFSYYNERGCKFTNEASDFVDANGLYLYGKRATYGKKTAPGRKYSDVSEQIVTIAPHKGLVSSELFLRCQRRLDENLDLENKKHSQITWLSRLTFCEACGGKAVPKSCKNGAYHYLRCTNGNCTTKTNLGKMSELEAAVGEHLLNWADKHSQLEFGGCEEDENETNSIRCQIADTKNRIERLIETAAESKTITAKYLNEEIEKLDRQCGSLEAKLQKLIETASSSSSKGIDNLREDWGSLSVSEKNQIAEALIEKIVLSPGRAEIKWKYNFDG

SEQ ID NO: 1176 - protein, 578 aa, unidentified
  source 1..578: note = uncultivated organism
MSDHNILRKVALYVRVSTTYQVEKDSLPMQREDLINYAKYVLNIDKYEVFEDAGYSAKSTERPAYQQMMSRLRDREFSHLLVWKIDRISRNLIDFSEMYNELKKLGVTFVSKNEQFQTDTPMGEAMLKIILVFAELERKMTSERVSSVMISRANKGQWNGGKVPYGYDYDKTTKEFTINPVEAAVVERMFTMYETCPSLLAIARELNSEGITTKSGIAWTPVTVSRLLHNIFYTGAYRYNRLCESNGANKTPTFERKQEDWVIYPNHHPAIIDKARQDRVLEKLASQKRGGWEMDRGKSYMRKNVHIFAGLISCGVCGSTYQSTSDKMRSNGYVPSVYLCARRRRFSDCDNSSVSDAYLGPFVLNYVANIIKVQNSFGKSTSVDTLESKLLRGEALAGVTGIEQKGLLELYDLLRQKFTDVEFTPSLLKSNETKKPATDEKDLLLSDKRKAERALQRLQQLYLYEDDEKAISDKEYIIQRQEIQDNLARIDKRLAEIEKSESKRNISDDDFVKQATYFIMANKLNDRRYVNYSKFIQSMDKAVIKEFVQSVISKIVVLDSKIVSIRFMNGIEHKFLYG

SEQ ID NO: 1177 - protein, 656 aa, unidentified
  source 1..656: note = uncultivated organism
MATNVAKNIRKIEAKSIQLMGGLPEGTRKRVCAYCRVSTALEEQESSFESQVSYYTQYISIRTDWTLVDIYADEGISGTTTKKRKEFLRMIDDCMNGKIDMIITKSVSRFARNTEDCLHNVRKLKDKGIAVYFETENIDTLTSSGELLLTILSGLAQDSSRNQSDVTKWGILRRFESGRVLVNTTRFLGYDKNKEKELIINEAEAEIVKRIFNEYLEGKSYNAIGMELTKDGIKTVTGNVKWWDSTIGGILENEKYYGNALLQKTITVDFLKHKRVDNKGQAEQYMIEENHPAIISKEIFDRVQAEKQRRASKYKNIEGDRQKYSNKYPFSGKVFCSDCDNVFRRRMWNSNNKSKKFVWQCKTYIQKGKDECDAKAVDEDVLKDAFIRVFNRLYENGEGFIKTLTENIEKALLNKPSDKEIEVLDDKIEKMKTELKRLIRFQTHNGMDDEVYREEYKRVSDELEKLRDKRSEHDKDSILKESLKGRVAEIINAIKGRQKVLAEFDEGIFNALVEKIENVSPAHFVFELKSGMRVNEFVINEREGDKMGVENRTCVGYIRIRGNDDVILNGQKNLIENFCKENGHQLKSIYIDWMDAASDRPDLNRLLEESNNKEFDTVLVTDVSRLSRNTGEFMDILKKLKKNGVKVHSITDSRFY

SEQ ID NO: 1178 - protein, 536 aa, unidentified
  source 1..536: note = uncultivated organism
MTIRAAIYVRVSTVRQAERDLSLPDQIAQCRAYCDQRGWMVVEVFSEPGASALDDDRPVFQEMIYKATRIDKPFDFVIVHSLSRFSRDSLHSELYVRQLRKAGVELVSITQDIGQDASGEFIRKILNVFDEHQSRENAKHVHRAMLENSRQGFWNGSRPPFGYAVVTQERRGTKDKKVLAVHEEEARIVRKMFALAVGTDGRPMGVKAIATYFNERGITRRGRRFSTGGVYDLLTSSTYHGLHYFNRRDSRNGKPHPPSQWVELRVPPIIDEQIFTAVQALLQSRNPKRVPPRVVNGPTLLAGVARCGHCGAALIQNTGKGGLYRYYCCSRKLREGATACHGLRIRMDRLDQIVVDKVTDHILDPDQLNALLTGYLKSAATQADENKDQLSRMRQAHKDAEAAIVRLLGLVEKGLMEAEDPNLKERLVGLKVQRDELAQDIADLQKRITSGEPAVTPDKIKKFAIVLRDQLRNGPPELRQACARLAMREVSVKDEEIRITGSKAVLARAAAQGLDKVSPGVLSSVREWRTRQDSNL

SEQ ID NO: 1179 - protein, 557 aa, unidentified
  source 1..557: note = uncultivated organism
MKENKIYRAAIYVRLSKEDGDVSDASKVESNSISNQKELIKEFLKTKSEIEVVSERVDDGYSGVNFDRPAFQLMLEDIKQGKIDCVVVKDLSRFGRNYIESGRYIEKIFPMLGVRFIAINDNYDSLVGKSQTDEIVIPFKNLINDAYCRDISIKIRSHLDVKRRKGEFIGSFTIYGYKKDEDNHNTIVIDEYAAGIVNDIYVWKIAGMSQQKIADKLNDMGVLSPAEYKRSCGINYKAKFQTKSKALWIAVEVTRILTNEGYTGTLIQGKYTTPNYKVKKTIEKDSGDWVRIENAYEAIISREQFNLVQEILAKDTRVAPDMKTVYLFSGIAVCGDCGRLMSRKVSTVSGKKYVYYMCSANKKEGVCSSHRIREDELEKAVVIYLNSYIQKLCDMKQLLACIEKLPLQEIDVKRLDMRIVQLEQEAEKYDRLKVSAYEDLKEELITKEEYFTIKQEFETRRRDALDSIAQIRLEMDSLLKRNGKHHEWIENFTSKGRIESLTRNVVIELINQIRVYEDKRIEIIFRYSDKYDELVSLIKSTGNSQADKDKQLLQEVS

SEQ ID NO: 1180 - protein, 553 aa, unidentified
  source 1..553: note = uncultivated organism
MARKSRKDMEQQRTIPYHMVTFRVAMYIRLSVEDKKKRGNSIESQRSIIENHIALNPDFKLFDVYIDNGTTGTTFERDEFKRMLADIEAGKVNCIIVKDLSRLGRNVIDTGYYIEKYFPGNGVRFISVTDNFDSEDKNSVHGGIVLPLKNMINEAYALDISKKIRKQAQASMKAGDYIGARPPYGYVKAPDNCHKLIIDPETAPVVRQIFEWAYEKAGLNTIVKRLNDAGILPPSHDKRKKGLITHENLTGKDKWQTFTVTQILSREIYTGDMVQGKSKTVNHKQISVDEENWIVVHDTHEAIVSREMFEAVRAYREQVSENSVQREKKPYTENIFKGKIFCGCCGGSLHRQRAERKKGPDVYWLHCIANSRIAKGTCQGVMMDETDVQPVVLSSLLRQSEAILGKHLLLQRGDELVSASRSAAKAKITVIEQEIDKNRRFLKSLYENLINELLTDEEYFSMKADYEAKIADAMARIGHLEIEQEKLVEKTAKYHELSSSVNGLSRDRRLTAAIVDKLIDRITIYPDRRVEIAFSFQSEFDGVSEVLKQCANM

SEQ ID NO: 1181 - protein, 577 aa, unidentified
  source 1..577: note = uncultivated organism
MGRENGNGNEGPSKPSQVRCAIYTRKSTEEGLDQDFNSLDAQREACESYIASQRQTGWIALPDHYNDGGFTGANMNRPGLQKLLQHIQAGQVDSILVYKIDRLSRSLLDFARIIELLEKHGASFVSVTQQFNTATSMGRLSLHVLLSFAQYEREIIGERIRDKMAASKRKGKYMGGVPPLGYDVDREAKKLVVNPKEAKLVRHIFNRFLTLGSVTKLTRELNENGYTTKSWVTAKSKMREGRPWNKSHLYRLLNNSILIGRVSHKGDTYPGEHEAIIEKLLWEKVQKALSDNTRSHPDETRSKTPVLLKGLIQCGHCGTSMGATFARKNGKTYRYYLCLQARKSGYESCPVRSVAAGEVDKTVLAQVREMIGNSGLIVKETSISEESAASLRNMATLWDELYPGEHVRIARMLIEKVTVYEDRLELIIRKEGVRSLAAELGDEAERPTNNDLHEPAIIETTIPMALKRRIGRKMIVLPPGANVRAPDEDSHDPVVIAVARAHHWLEELDSGRIGSISDLARSLDLDGSYVHRILSLTMLSPEIIAKIINEKGAGYSLARLTKGFPTLWDEQKGISLG

SEQ ID NO: 1182 - protein, 512 aa, unidentified
  source 1..512: note = uncultivated organism
MAIKSNGNGTASAPTIRCAIYTRKSTEEGLSQDFNSLDAQRDAGTAYVRSQAGEGWTLLPEQYDDGGYTGANMERPAIRRLLADVQAKKVDCVLVYEVDRLSRSIRDFAKIMEILEKHGTTFVSVTQQFNTTTSLGRLTLNILLSFAQFEREIISERTRDKQVLARKRGKWTGGHIPLGYNLEAGCLVLNDEEAVRVRQIFEWYLEGQNVFGIVAKCIDLGWHDKQWTTKEGKLYGGHAMRKCHVYKMLANPLYAARIRADGEVVAANHAAVVDARTFDLVQEKLKENTRNPGTEHRPKMESLLRGLLYCSCCGSAMSPSYSSSKQRRYRYYVCLRASQRNSDGCTTRAVSAPVIEDAVLQSVRRFVLAPKVVEEAARAARQRLTEELNRHREELKTVNVRVRNAKSQLARAKAMDATREAELRGVIAVGDAKAEELRNAVARGERLRFDDSMVRQHLGNFDDVWKTMTIEEQCSLLRHLVERVGYDARGDKVKVTYNSNGISEYCQKGVPK

SEQ ID NO: 1183 - protein, 669 aa, unidentified
  source 1..669: note = uncultivated organism
MMARCYLRVSTEDQAKEGYSLGAQRDRLGAFALSQGWTVAEYYIDEGISAKDMKRPALKKMLTEIQRGEVVLVYKLDRLTRSVADLDLLLRKWEADGALFRSCTEDFNTTTAAGRLFIRLVADLAQWERENLAERTRMGMVKRAQEGEWNGGPAPFGYTAVETGERNGQKVKRMLMPNEYAPVVRELYERYVSGQGMRTLTLWLNREKGIKSPRGGTFSDATVSGILKNAVYAGLNVWSRGVKKGLRNPEAVVAEGKHEPIVSRALWSQAQQMRERRLSLPPRHATGGNILTGIGRCGACGGFLKINLGGTKGRPRYYRCGNYVTKGTCRVSSIPADVVEANFVAAVCAWAAELTDTETARAYAATHLQEEQVGRERLTPQELRRQVSQAKQAIAVWDKALEEKRIDFSVWQAKISPHSIRLRDLEAQLRVVSESREIGVALDAMITSLKSFSDLWGAATTPERKMLAGSFFKEVRVYQDRRVELLPRGGARVQPRVQYLVPPGIADKDLPPEVRAGLRLCARIAARIAGRRPSLTQVERTHFQRGPGHEQRLQQPAEVGQAAGLVAAEGTQNGIQQVRGGGENRSDCDDAPGDGQPPSAHTLQGPKDHQRRGDGDQVGDRVGQGDGKTEVGRFNPEETQLRKQHGGNDHRGTDAPDGRHLATHQAVVT

SEQ ID NO: 1184 - protein, 564 aa, unidentified
  source 1..564: note = uncultivated organism
MSAKIRCAIYTRKSSDEGLEQEFNSLDAQREASESYILSQRGVGWVALSKRYDDGGLSGGTLERPALRALLVDIEKGKIDLVVVYKVDRLTRSLADFAKIVDVFDAAGVSFVSVTQQFNTSTSMGRLTLNMLLSFAQFEREVTSERIRDKIAASKKKGMWMGGLPPLGYDVQDKKLEVNKAEAEIARTLFRLYLEHGTVKKLVEESGRLGLVTKRRIRSDGQSTGGQNFTRGHLYQLLTNPIYVGEIAHKGVTYAGQHDAIIDRKVFDAVRSRLDNNAARRKSPTNAKAPSLLTGLVYDETGDRMCPTHANKKGRRYRYYISKRLMHKAASTDGGWRLPASELEGAITRAVGDFLRDGIRVVDGLELTGMDPDRLRTVLHRAAAAAGDMEDEQREHQIQLLRRLLHRVTLHPGSIHIALTRSGLGRLILEKNRDSAMNQEGLIYLTVPVALKRRGVEAKLIVSTAQNEVAAPDESLIALLSQAHRWRDQFVAGEFSSARQIARDDGISPSEVSRIIRLAFLAPDIVKAVLDGRQPVELTPRRLMRIGELPLEWRRQRRLLGFPA

SEQ ID NO: 1185 - protein, 532 aa, unidentified
  source 1..532: note = uncultivated organism
MATTHKTDGSSASENRQVKFITIEATKQSETVRLRVAAYARVSSSSEDQLNSFAAQNRYYTDLITNNSAWQLVDIYADEGITGTSICKRDDFQRMINDCQRGKIDRILVKSLSRFARNTSDCLTTIRTLKALGVTVFFEKEGIDTANMTGEMLTAIYAAFAQSESESISSNMRWSCQKRMETGTFISGSTPLGYSLDEKTLHPDADAELVRLIFHKFLSGESSIKIAQDLNSIEIPSPKRNAHWHASTIRYILSNEKYMGDTLLGKNYHTDTFPYERRKNKGENTQYYVLGTQEQIISPEDFQRVQELLDYKGSPNIGQETIIYPFSNKVFCKHCGMHFQHKVNRAHVYWVCRNHNLSKTNCPMEPILESKIETAFCRLYYKLKRHGKDILLPMLRDYQQIRNRRMLWSEDIIELNKQISDLSSQNQMLTMLKQQGLIDPDIFIAQINDLTEQLRETKLKKERLLDAESDDYLKQTQELIDLLESGPDFLDAFDADMFGELIEKVEVESQTVLCFYLKNGLALKENIERTGR

SEQ ID NO: 1186 - protein, 505 aa, unidentified
  source 1..505: note = uncultivated organism
MASPAYRPRMGTYSRLSVAADDANTSLVGQGSTLDDVAAREGFDIILRREDNGKSGGKERANAIELLDALRDGTIDVLGVASFDRWTRMGIADAAKIIEVVTDRNNAAKRGRGRPALFIAEREGIRSDVEGWELRIAFAADIARMERERIAARQVASRARLSEARRWAGGTVPFGYRPVAGPAGGRVLVPAPYEAAVVTSIVEAALRGSSIVAIAQELTAQGVALPRSPWRRALITEGAVPSHDRDLTRGTWTGAPVRRLLRSEHLLGRVTHKGRTLDAYEPIIDLETHQRLLARFPGAGTAQPRRRWSRLLSGLLFCDGCGSKLYPVVSPSGTTRYRCAATAVGATCPHPGTGIDADALDAHVGECIARRVGHLDELERVEVRNTSTARLAEVREAITKAVTGLSARTADRVAILAQLDQLQAEEAALEALPDTTGVSWRPTGRTVAEAWAADDLAGRRRTLTTWVSHLVVAPVGKGHAQTFDSSRVLVEWDAGAVEVLADIAS

SEQ ID NO: 1187 - protein, 523 aa, unidentified
  source 1..523: note = uncultivated organism
MPEVAIYCRLSIEDRDKVGDDVSESIQNQKAMLRDYCRERDWAVYDIYVDDGYSGIDRSRPEFNRLLRDCEAGRIDIVLCKDQSRFSRDTVVIEQYINDKFLEWGIRFIGVADNADSDSESYSTMRLFTSAYNEMYVKDISAKIRRTLAFKREQGQFIGSFAPYGYMIDTENKHHLVIDKETAPVVRTIFNMYVNGEGYRRIVQRLNDEGIVSPSEHKRQKGSKYVNSNADSSSSKGMWTQSTVARILANEIYTGTLVQGKSHHISYKNKKRKKVDKTDWVRIPNAHEAIIDAETWERSQERLNSHTRVGKRSQELSPLSGKVKCACCGRPMKRNVYYNKAKTIKYYGLQCATYKTGPMNCPNKSSISGLILEKHILTELNAIIANYCQADAIQLTDIHSAQLTELELRLRTLEDRHRSAQERLVKMYKDKLDGIISDEDYALFRQNLSHEETVLSEQITEVKGQIEDCRKRQESAESQKAIIEKYTHFDKLDRSVTDEFIDFVEIGMTDENGGREINIHWKL

SEQ ID NO: 1188 - protein, 506 aa, unidentified
  source 1..506: note = uncultivated organism
MAIAIYARQSVERENSISCETQIEYCKSCLKPDERKEKILEFIDEGFTGANTNRVDFQKMMRQIERGKISKIYVYKLDRISRSLSDFTDILDTLDEYDTKFSSATEGFDTSTDFGRTICQILMVFAELERKNIVMRVTQAYESRSEKQFYMGGRRPYGFNLQETEIDKVKTKMLSLNPEEAEQVKYIFENYAVDGVSLRRLMDNLNANGIQPLKGSWSTAKLSTIIQNPIYVQADNSVYDYFKRNNAKIVSEPSEFDGVHGAQLYGKTKHKADDMSDMKLVVMKHEGLVPASTWLSCQKRLVKNKQIGNAMSNNTSWLGGKIVCNSCGRTMTCTKGAEKSDGTRTRYFSCTGKSHNRACKGVKKPVYADSLEDMVYELIAEKLADLKQHRKKISTDNTNKINVLKNELATIKKQQDKIVDILLSDDANSDVKALVDVRAKELRNKHQSIVEQIAILEEADSEMVNIVVFSKKWKTAKFKERKAVCNVLIDKIYMHEDGTAEVVWNI

SEQ ID NO: 1189 - protein, 505 aa, unidentified
  source 1..505: note = uncultivated organism
MTAIYCRQSVDKKDSISIETQEQECRARLKSGETDVTVYIDRGYSGKNTNRPDFQRLMSDVEAGRVSKIIVYKIDRMSRSVLDFELTYRELKRHHVDFVSATEDFDTTSITGEAVLRVILIFAQLERETIQKRVTDNFYSRAEKGFFMAGVAPLGYKKIADNIDGKKTSRLEEDAATSRIVKYIYRRYLSGRTIGEIVSELNSPDCGIDHGITFYNVRVSRILANPVYVRANADVYSYFRSRGAVLHNDVSEFTGLCGCTVYGRRQGKTKSKFRDLSGENIQLNRHEGFISADDWLQVQYRLNENHALKNTGSGSNSWLSGMTRCGFCGYAVSVVNGQRSGKRYVYCGGRKQHVCQHDKGGVTFDMIEDSVAAKMLEYAGKLRYHSAHRATADDSEINELKAHKMKLEDEISAIVDSFAQAENPLLRERLNERMTFLEHQLHEADARIIQHLQRADTPVDTECIARLLESWDGLGTEVKKTVARLLIAQVRVWDKNTPIEVVFRV

SEQ ID NO: 1190 - protein, 585 aa, unidentified
  source 1..585: note = uncultivated organism
MARTSKYVEKDSAISAGIMWMAGDYTRLSKEDGDKEEGDKYESDSISNQKSIIEDYLVENIDINIADTYSDDGYTGTNFDRPNFIRLIEDIRLGKINCVIVKDLSRFGRNYIEAGQYLEIFFPVMKIRFISVLDNIDSYLFPESMNNISVSFKNVINEEYCRDVSNKVKSTFNLKRENGEYIGGFGPYGYIKCPTDKNKLIIDDAAADVVRMIFKWFVGGMVVGQIAIKLNDLGILNPSTHKRSLGMKFRNPSSNKINDGLWCCSTVRHILGNRMLIGDMVQGKREKISHKIAKIREVDETKWIIKEGTHEPIIDKTTFWNVQSMLKRDKRISTKKKELDLFSGFLKCADCGRAMNKKQVNKKQQAQYHYYTCRTYETMKKSACTRHTVRSDKLERTVSAVVSRFVDMAVEMDNFISQINLSPIKMAATVKVQNLLDGKEKERRKLENILLDLYPDWKNELISKEQYLSLKVKYETELERVKSVLVEIQKTYEREKEGITNTNDFLQNFIKHKNIDRLSREVLIGLVENIFVHEGGNIEIVFKFQDAFERAAEYIEINRELLVNTAAELINRMTRQVANGLKEAQ

SEQ ID NO: 1191 - protein, 517 aa, unidentified
  source 1..517: note = uncultivated organism
MRGHKNDTPAVRCAVYTRKSTEEGLEQEFNSLDAQREAGEAFIASQRGEGWTCLAARYDDGGYTGGNMERPALKRLMTDIEAGRIDCVVVYKVDRLSRSLLDFARIMESLETNGVSFVSVTQQFNTTSSMGRLTLNILLSFAQFEREIISERTRDKIAATRRKGKWSGGRPILGFDVDPRGGRLIVNEDEAARVRAIFGLYLKHEALVPTIRELDARGWTNKRWTTKKGHVAGGRPFNKQGLSSLLRNVLYIGRITYKDELHDGEHPAIVDEEVFRRARRLLGRNGATGGKHVRNNFGAILKGLLRCVPCGCAMVPTHTLNGARRYRYYVCTNAQKRGWHDCPSKSIPAQEIETFVIDQVRAIGRDTTLLAETLEEVQAQAKTRIRDLEAEKRALGRELVRYNGELRKLAGRPATNGVATDRMADLQDRIRAGEQRATQVREELVRLGGELVDEEEAARALAAFDPVWETLTPREQVRLIRLLVQRVDYDGQKGTVSVSFHPAGIKTLSREFAEAIE

SEQ ID NO: 1192 - protein, 541 aa, unidentified
  source 1..541: note = uncultivated organism
MKYAIYSRKSVYTGKGESIENQIEMCKQYIFSKFPGAAKEDITVYEDEGFSAKNTDRPQFQKMLADIKRKGYDYVVCYRLDRISRSVSDFSALIEDLNNRSISFICIKEEFDTSKPMGKAMMYIASVFAQLERETIAERVRDNMLMLARTGRWLGGPPPTGYVSEKVQEIIMDGKLKNSCQLKENPEEIRTIDIIFEKFLELRSIHGVGKLLVQQGIKSRTGRIYSLIGIKDILQNPVYCAADKDALEYFTAHNADVCFTEKDCGQKYGIIAYNKRDYKKKQAPRLSIDKWIIAVGKHKGRISGQKWVAVQNILKDNIPDGKKPAKMQNDYSLLSGMIFCKECGSRMFAKARSGKTGNPELYDYICNNKLRGGKDLCRAKNVPGAEADDTVCEYLMKYADVNSDIFIKLEELKKELSEQTDENPLSTIESLIKKYNDETDNLINSISQGNVSQTFVQRVNARISQIDKELAALTAEYEKLKDNVNSANGSEKELELLVDMLADFKANYKSLTLHEKRAFIKILTQKLTWDGKDLHIFINGG

SEQ ID NO: 1193 - protein, 561 aa, unidentified
  source 1..561: note = uncultivated organism
MAEKQLRCAVYTRKSTEDGLEQEFNSLDAQYEACAAYALSQRHEGWVLVKDRYDDGGFSGGNMERPGLKRLLADVEAGKVDIILLYKIDRLTRSLADFSKIVEVLDRAEASFVSITQSFNTTTSMGRLTLNMLLSFAQFEREVTGERIRDKIAASKRKGLWMGGPVPLGYEVRDRKLVINETEAQQVRHIMRRYLALGSVPALAEELCADGYRTKVQRRSSGPHKGGSAYRRGTLYHLLANRIYRGFIVHKGNAYPGEHEAIVDEELWDAVQARLADNASGPSKRLKHQQPSLLTGRVIDGEGRQMSPSHATKSKRRYRYYATRSDQLEGTRAWRVSAHDLERLVCSNLAEKLTEQQFVLTLAGEDAADAAQLQKTTAEADLLAATLRSGSAYDKAELLGRLLQQVRLHEDRVEVMVDVEAARERLGLGENPPLNDKAYVITVEAVRVRRGHQLRLIVPGPEAARTTPVRRDEKLIALVAEAQQARQLVLSNPEYSLVRLAREHGRCRTRLGKLVGLSCLAPDIVTAIVQGKQPEHLTATRLISKELPLIWSDQRQELGFS

SEQ ID NO: 1194 - protein, 540 aa, unidentified
  source 1..540: note = uncultivated organism
MDEIRPLRAIVARRLSNLTDATTHLVTETESTQEFCKRKKYVIVAETEDLDVSGGKPIRERPGVGPWLTVDHLDDWDVLVLYKLDRGFRNHLDFVNFYHEFCEFHGKQIVSVNEEIDMSTRMGRFIAGILVQFAEWEIENMSQRRAAAAKVIRRKARWGGGSFTFGYLPKKEGNYWYLEPHPVYAEETRRMAEAAVAGMPAGRIAVDLNERDVPTARDVQNEFSGKPHKRYQWTTHAVVQHLRSDATRGYVLHYPPASKKGEPKPPPVRVVDETGEFVRREPLIDDELWFKLQEALDASTKKLSGKRAGGAALLQIAFCGYCGAALHKGGSAKSDGRTNDYYQCRYMRKAPGRPHCQPSRSIPKERLEQTVFDGLLDAVGHCEVTTKTVIAGDDHSQTLRRLGAQIADLTTQHYMHGGVPDFHARMAALEAEHTRISDLPREKPKIRRVSTGKTFAQLWEEMDSEQRQSYLKSAGVTALVVRSEDFTQSLVFHQTTDVADNAVLDIPVNVIRQCGDFVVNISLGTLAEQLQRASSATVSS

SEQ ID NO: 1195 - protein, 523 aa, unidentified
  source 1..523: note = uncultivated organism
MKRRCAIYTRKSTEEGLEQAFNSLDAQREACAAYILSQTHEGWELINEHYDDGGWSGGNMARPGLQQLLADVAAGKVDVIVVYKVDRLTRSLADFARIVDTLDGAGASFVSVTQAFNTTSSMGRLTLNVLLSFAQFEREVTSERIRDKVAASKRKGMWMGGPVPIGYRLADRKLIIAGEEAEVVRSIFEHYVARRSICLLTDELAARGVRTKVRAYANGRTVGGIPFTTGPLAALLKNPVYLGKVAHAGSLHDGEHEAIISQQLWDEVQHTLATNRRERREGRNARHPSLLTGMITDPEGRMMSPTFSTRGGQRHHYYVTRLQPGENRRSAWRLPARDIDRAVLTSFATWLAGLDPEMLHETRTEIRTSIPLMSVTEQRTLLLKHVAKVSIGSDELVMTFTANGAATEVRTTATIARKGAELKLVVGQSFDDTHREPDPVLLKLITLAHTAQRAKLAGSEDALVSRYSKAHVQQLLRISWLAPDIVAAIADGRQPPILTGRRLLRATNIPLCWEAQRTLFGFA

SEQ ID NO: 1196 - protein, 502 aa, unidentified
  source 1..502: note = uncultivated organism
MPVEGPKTLRCAIYTRKSTEHGLDQEFNSLDAQREACEAYIKSQASLGWKVLSQQYNDPAYSGGNLDRPALKRLLADIEANRVDVVVVYKIDRLTRSLGDFAKLVEAFDARSISFVAVTQQFNTTTSMGRLTLNILLSFAQFERELASERVKDKIAASRKKGKWTGGTVPLGYDARNRKLIPNKTEAETVRTIFRLYLQEKSFGKLVTELDRRGIVTKRRETRAPKYNGGIRFTYGPVAHFLKNRIYIGEIHYDGKWFKGEHEAIVNRATFNKVQELLRINSARRGTKYSSGNAPLTGKLYDDKGNRMGPSFSSKNGVRYRFYISRALRGRHHECGSVKRISAPEIEALVANSLESALQTSKENALQAIERIVLSHGRIVVELGDSHRHSGPIEIAWTPNVGSAVHLGAALTSSKTDEKLLKSIGRAHVWLNALTTGEHSSLDELSAAADLHPKVVRQGLQLAFLAPSLIQSALENDLTLRLKQIPKPLPLSWRKQLQFLDF

SEQ ID NO: 1197 - protein, 520 aa, unidentified
  source 1..520: note = uncultivated organism
MKTITKIEPSAARPSAAKLRVAAYCRVSTGMDDQLISLETQKTHYEELISSNPAWDYAGLYYDEGISGTSKEKRPALLRMIADCEAGKIDRILTKSLSRFARNTTDCLELTRQLLDLGVTIFFEKENLDTGSMESELLLSIMSSLAESESVSMSENNKWSVRHRFENGTYKIASPPFGYDAKDGELVINEEEAEWVRWIFAQALSGKTSGWIARELNDSNLSTKKNGKWHAGTIRGILRNEKYTGACLFQKSYTDFRFRRHKNYGEKDQFLIEDHHEALVSKEDFEAVATLMKQRAQEKNIQRGDPRYQNRYPFSGKLICGECGNPFKRHMNSTGGSRCAVWVCRQHLEDVRSCSMKSVREADMQRAFTTMMNKLIFAKQEVLDTLLETLRSDVQKESLRQIDQIDHKLELNAERKKTLTALMTRGYLEPAVFAKENSDIAAEAEALAAEKERLEKDVSGSIHQADALNDLIRYTAHAQPGTDFDGASFEKFIDHVTIRTRTEILFHLKCGLHLTERIGE

SEQ ID NO: 1198 - protein, 519 aa, unidentified
  source 1..519: note = uncultivated organism
MRCGLYIRVSTDMQKENGESLDVQLKRLHAYANSKEDWSVVEIYKDAGVSAKNTNRPEFNRMMDDVEQGKIDVILCTKLDRLFRNTRDFLNTTEYFERKNLKFVCLEGSIDTSTPAGRVFSTMRAAFAQFERETTADRVRDVMRSRAEEGKWNGGVSPYGYYSENKELKINSEEAKVIIEIYNLYVEQQSIRHIVHKLNAGGTKTRKGELWAPTSVRRILTNPFYYGMVTYSKRSHTYSGELKRNKKSILSKGKHPPIISKELFDKVQTIIEQQTKDAPRSNAKYLLTGVVFCEVCGSRMHGMIYRKPDKVHSYYRCSGNLQKGKALCPGNTIRVDELEGSIIQELKNFSVNRNRLEETLKNLTKLNSDNGDSIRDRIRSLENRLTKIEAKRQKVFELYEEGNINKSDFMSRKVLIEEEEALVKKDLEQLRDRSSGIDYNSYDLDSTLGLCRDMKEVFDELDLPDRKDLIRSLLPEVKVAKHHIDYSIKVLPKVVSYAQGSGLCVESSDTGRGSSRRPA

SEQ ID NO: 1199 - protein, 556 aa, unidentified
  source 1..556: note = uncultivated organism
MKKTKATIYYVGIYLRLSKDDRSREKHMSDIQFQESYSITNQRKVCRAYLDEQPDMVLYDTYIDDGYTGSNFDRPDYKRLMEDIYDHKVNCVIVKDLSRMGREYIELGRLLQKTFPTLGVRFIAIGDHFDSMSASASDTNIVLPMKNFINESYCSDISQKVRYVKKMQRENGEYIGPHPVYGYKRDKMWNKLVVDEYPAQIVRTIYRWKMEGISAFASANRLNEAGILSPMAYKASSGSNYHSGLKADGRTSKWTPKAVLRILRDEVYTGTLVQGKQRKQNYKIKKMINVPPEEWVRVEDTHEAIISRAEFEIVQHLLEHDGRVNETNGRINMYASLLFCADCREQMIRKRNCARKQDGFICSTYNRSEGCTRHTVVEEDLTAVVQEAVKKYALLFLDQYEWMKKTKGIQIDDRMLLESNRHLNHLAEEKADKERLMERLENDFADGILTQKDFETLHTAYQQELDDLEKTLERQEQTLKRILKNGIDAGIRLEALRRATVLEKLDRYILVNLVKNIFVYDDSRIEIEFNFMDQLQLIQDWNAIASLQKGGVAVNG

SEQ ID NO: 1200 - protein, 532 aa, unidentified
  source 1..532: note = uncultivated organism
MAVARRNLAIAKSVPGGPIRCAIYTRKSTDEGLDRDFNSLDNQREAAESYVRSQRGEGWEVLPERYDDGGFSGGTADRPALKRLLADVDAGKIGCVVVYKYDRLSRSMLDLLQMLKFFEERGVDFVSVTQHFDTTTPVGRMAMNTLASFGQFERDIISDRTRDKMRAARRRGKWTGGMPPLGYDVPPEGRRLVVNREEAEQVRAIFALYAENHSLAAVAQELNRRGWRRKSWTTKDGRQREGKPWDAVNLRRLLKGPVYIGKAKLGDQVFPGEHEGIVPKALFQKVRDLMQENRSTGGASARNKHGALLRGLLRCSACDAAMVHGWTRKNGRLYRYYVCTKAQKRGWSTCPTKSVPATRIEEFVVDQVHVVGRDPEVRRLTFAQALAQVADQRRTLGREAKRLTQEASRARAEVDRLVAAVSKASGGAGDALIDRLSVAQERFSTLERLLAEVAGQRAGLEAIRIDERDLGRVLERFDPIWDVLLTPEKERMLRLLIERIDYEGATGTLSFTFRLPGIVDLAAETKAVEKTL

SEQ ID NO: 1201 - protein, 517 aa, unidentified
  source 1..517: note = uncultivated organism
MPADPEKVAIYIRWSTDDQSEGTTLDVQSEGCQHYVLSQGWRVREDLLFIDEGYSGGSLDRPAMTRLRSAVADGNVDCVVVFKMDRLSRSVVDTVKLVLEEWDGRCHVKSAREPIDTATPAGKLFFYMLVSYAEWERSLIRERTFSGRLKRAQEGRNPGFNAPYGYRTGTRAGSLEVVDDEAAIVRRMYELYLAGAGMRTLVTTLNQQGLRFRQGRPWNDSTVRHILSNPVYTGDLVWGLRPKNPSYGKRDGEKERLKATEPLAVREGAFPPIVERILWERVQSLRQGKPGPNRGGSGRAVSSRFLLTGLARCRCGSAIIGRVGAGRSSHPYYICAGKNSKGALHCDCGYIAARQVDTIAAVELMRLFGEAAARERTADAMRSGLQQQLEMLLPEQKRAQQQALRLEQQARELRRQYRENLLSLPEYRAFQADLDQEVQSVAAQQAQLSRQIEETDQALRQQQELANTLAQVDEWESLTIPQQKLLLRTLCRSLVLFRRPASAEVDFEAVWVQAQDP

SEQ ID NO: 1202 - protein, 559 aa, unidentified
  source 1..559: note = uncultivated organism
MAEVKKETAALPTAIYARLSVENSGKDDDGNSLQNQIAVCEDYLDGCPHLRLAEVYSDNGKTGTVFDRPAWNRLMDDVRTGKIQCIVVRDLSRFGRDYVETGSYLEKIFPALGTRFISVKENFDNFTCGNAMESLSVSLQNLVNAMYSRDISKKVSTALRAQMETGRFRNRNLPYGYLWNEDKTSYVVDEEAAAVVRQIFEWKLQEVSVYTIVERLKTRGFESPERHKRRAGARNGDNIQGEGWCPSTIRGILQNRAYIGDMVCGKSETALYKGLKKHVTETDKWIVVPDAHPPIVSVSDFEAVERQMQKDSTHRETAMEWSADIRAGMIDLFAGKIFCADCGKRMYYKRQRICGCKNVTFRGVYDCSTHVRRGHATCFNHFIRQDALNEKVFNAIRDQLQVALDYERLLLAMRGGSGEASVREKHKAAVASVKLRLNALKKKRAGLYESYVEGILNEEEYAFAKQTYEEQYEALNRLLDDAVERRERFLASISPDNKWLTMMRGAAGMTGLTQELVDAIIEKVLVYGEGRIEVVLNYNDVFYAMLECVEQIKEAGGDD

SEQ ID NO: 1203 - protein, 577 aa, unidentified
  source 1..577: note = uncultivated organism
MTQLKTVHRCAIYTRKSSEEGLEQSFNSLDAQREACAAFITSQKQEGWKLLPSAYDDGGYSGGTLDRPALKQLLADVEEHKLDTIVVYKVDRLTRSLSDFAKIVEILDAHKVSFVSVTQPFNTTTSMGRLTLNILLSFAQFEREVTGERIRDKIAASKRKGMWMGGYAPLGYDCQNGKLIVNPEEAERIRLIFNLYSELGSVRTLRDRLVSLQIRSKSHVGKNGRQFGGLSYSRGALYELLKNPVYIGQIRHRELQYRGEHEAIIPLDLWDRVQAQLKSTHQGRRTGLGTASPSFLVGLLRDEHGRPFTPSHTLRRGKRYRYYFCRPSANPGKNSHPTATRLPARDIETLVVKRLQKFLTSSTEVMDQLGDSADAPALLQELISAAAQMSDQLLTMPSGEQEANFRKIVKRVVVRAKGIDLLVSRSALRRLLTDESQHPSNQTCHPAHGALQTDAFRLEAPAEIRRQGLAVRLVVAPNSSPATKPVAPTPLLKAVARAHDWSKRLLDGNALSQSDLARQLGMNHRYVDRVLQCAFLAPDIVDAILDGRQPPDLSVDKLTRNLPLDWAEQRRQLGFRN

SEQ ID NO: 1204 - protein, 582 aa, unidentified
  source 1..582: note = uncultivated organism
MDILTVRQLMRLKTIYEIPMRVTFYARVSTDSSEQLNSLNNQVTYYEEFIKQNRAWEYVTGYIDEGLSGISTKKRENFHRMVDDAKAGKFDLIVTKEISRFARNTLDSIRYTRDLLSAGVAVFFQNDAINTLDEDSELRLSIMSSIAQDELRKLSSRVKFGHQQAIKDGVVLGNSRIFGYIKDKGRLVIDEREAVMVRKLFELYATGSYSMKQIENIFWEDGYRNNHGKKISHTTMSSMISNPKYKGYYVGNKVRVIDMFTKKQKFLPPEEWVMFKDDTGQIVPAIVSEQLWEQANAVLQKRSEDVKNRQGKCNSPNLLTAKLYCTCCGVPYYRKDGKDRHGNLTSKWVCSGKIKNGAASCDSIALYEEEIKPLLLEVFQDTKTDAEALIKTYTDMYAEMAGSGTLTKQIEAQKRIIELAEQKKSKLLEYNVTGRISDADFIKMSDLCNTEIKKAEEERNVLEEQLFSGKEFQKHMERIRATLRESQNCVKTGVITRKFVDQYIDKIFVTIDEEGRVRLDVRIFTGEATEKYLQRFKVRTGQMTDTSDHKRKDPCAATTFGDEVRPGHMSKKMIEAYEQGLQ

SEQ ID NO: 1205 - protein, 523 aa, unidentified
  source 1..523: note = uncultivated organism
MSKGNGQPEAVRCVVYTRKSTDENLDLDFNSLDAQREAGEAYIKSQQHEGWVCLPDRYDDAGFSGGNIERPAFQRLMADVAEGKIDCIVVYKIDRLSRSLMDFAKIMETLEANGVSVVSVTQQFNTTSSMGRLTLNILLSFAQFEREIISERTRDKIAAARRKGKWTGGPPVLGYDRVRDHRGSRIVVNPDEAERVRAIYRMYLEQGSMLPTIQSLRALGWKTKRYETAKGTQRGGAEFDKSALQKLLTNVVYLGKVTYKDEVHEGEHEAIIDEDLFARVQGLLRRNRNSGGKHSRNKYGALLKGLVRCKACGCAMSHHFTTRGDKRYRYYVCIRAQKNGWSTCPAPSLPAKQLEDFVVEQIKTLGQDPGVLEDALRATQAHLQSDIDEMERQRAGVEKAIKELGRQVGEVAARAGFDEGATRRLGLLQAEISEREHEATEINGRIAAIRQRMLNPDELAGAVEVFDPLWETLPPAQKAKLVHLLVERIEYDGESETISLTFHPTGIRTLTAEQREEEPCPTS

SEQ ID NO: 1206 - protein, 518 aa, unidentified
  source 1..518: note = uncultivated organism
MASNVTVIPPKAVQPDILRVAAYCRVSSDSSDQLHSYAAQIKEYTEQINGHAGWELVDVYADEGLTGTRMDKREDFNRMLADCRKGRIDKVLVKSISRFARNTRDCLASLRELSRLGVSVYFEKENIDTGTLTTELMVSVSGSLAQQESVSISQNQCQSYQRRMEKGQFITCKAPFGYRLAHGKDLEIIPEEAEQVRWMFQSYLSGQSLDWIAAEMTKKGFPTTDKTPYWQHTTVLYILTNEKYIGDTLSQKTFSSGFPFVKQRNHGERDQYYTEDTHPAIITKEVFEKTQELLRRKASHTGWSYQPYLLSRRIICGVCGTPFVRREGRSGRVVWICRKHDKGASNCPMGRIPECEIYAAFVRMYNRLKQNEGIVLRPMLEQLDDLRTALLREDPAMLAVNQAIAQAAEQSHNISKLQSAGLLDAEAGAAKQSAINAQLTQLRAERRRLLKNDDVEEAAETLRQTAEAVRQGPERLDNFDEGLFDTLVERIVAESQTRLRFRLWGGLELTELLEEEVG

SEQ ID NO: 1207 - protein, 560 aa, unidentified
  source 1..560: note = uncultivated organism
MKRCLIYCRVSTTEQARGDFTSINNQEGICQHAIALKEEEGWRHVKTISDPGYSGKDLSRPGITQALAEINAGMYDVVVVYKVDRVSRSLVKFYDFYQLLQEKDVAFYSATQSFDTSTSAGKLMLNMLLSFAEYERGIIMERTSDRMRANFERGKWNGGWVPFGYDYRPEDGILVAHAEERDAIELLFTMLAEGCNPTRVADELNDRGFRTKRRELKTKNGEFKVIGGNFFNCDTVINMARNPIYIGKVRHGDKMNKGQHEGIISEILFQKVNTKLGGNGKQTGVHLYNRDEHIHLLKGLIRCGDCGSIMTPFPSGKKDKEGKPYLYYTCTDVVHDKRRSPCNLRSLPARPFEKTVKQFLRCLAENQAILNACISEANKGKGDDLQRLEKKVKRLEKRISELTGQIRRFVEFLKTADAVSDEVREEQQALVAERAKTKLHLEMAQVELSIRQREHLDIETIKGSLRMFDKVIDCLSLEDQKELMHLLIKEIRVNQVGPKKRKTPSEEGAFICKLRTRLVEVNISLYEIPSLPVTYNSGEQKFVIQSDWLRDQDSNLGPSG

SEQ ID NO: 1208 - protein, 528 aa, unidentified
  source 1..528: note = uncultivated organism
MRNGRNAVVATNAPAPAAAKTVRCAIYTRKSTDEGLDQDFNSLDAQREAGEAYILSQRGEGLVTLPEHYDDGGFSGGNLERPALQRLLTEIRAGGVDCVVVYKVDRLSRSLIDFARIVETFEKNNVSFVSVTQQFNTTNSLGRLTLNILLSFAQFEREIIAERTRDKMSAARRKGKWTGGHPVLGYDIDPRGGRLAINGDEAHQVRAIYNLYLDYRAMLPVVREIDRRGWRTKQWITKRGETEGGKPFTKGLLYRVLTNPIYTGRVEYKGQMYGGEHEAIVAAETWEKVQKILQSNGRSGGVEVRNNYGALLKGLLRCASCDAGMVHTYTAKGSRRYRYYVCEQAQQRGWENCETKSVSAPAIESAVVQQIRRIGSDPQIAARAIAKAEEQRRGQVTDLTSERQLTQKELAGMGAELRKLVPLVGRRDQMVTDRMADLQERIGQTERRLSEIQQELTGLESKAVNEDDFRAALVEFGPVWESLTSREQARIVHGLIECVAYDGKTNKVTVSFRSAGIRRICRGAEMEG

SEQ ID NO: 1209 - protein, 560 aa, unidentified
  source 1..560: note = uncultivated organism
MVPLAESKKIIRCAIYNRKSSEEGLEQDFNSLDAQWEACKAYIESQKHEGWKLVETRYDDGGISGGHLERPAVQSLLDDIDAGRIDMVVAYKIDRLTRSLADFARLVERFDKADCSFVSVTQAFNTSTSMGRLTLNVLLSFAQFEREVTAERIRDKLAASAMRGLWMGGLAPLGYDPHPDPNTRELVRNEDEAKQVQRIFDLYDEHRCLGRVARQAELEGIRSKRRTFRSGKSLGGCMMSRGAIHSVLTNPVYRGMIRHKENAYAGSHPAIIDEALWDRVQEALITRSGRQRGQGGSGDSGRSPLSGKLFDEAGNRLTPTYATTRGRRWRYYVSRSLMTGAEPTAGGCRLPAAKLELAVVKAIGNWLEKTSEQLLVAPSAEAFARVRAAFAKIGEQLSVNQTQSLARLVERIDLQPGEMRLAVHPDAIAEACGLCLEDIAPEALVHVEAFTERKRGVETILILGAETPNRDETLIKAVARAHAWAEEWKAGASLPDIARSIGWTTSPLRQRLKLAFLSPAIVQTILDGRQPVDLSLEKLLRTDIPLDWDRQAKGLGFAFA

SEQ ID NO: 1210 - protein, 555 aa, unidentified
  source 1..555: note = uncultivated organism
MKEYTYHVAVYLRLSRDDEDIDGSIKSESNSISSQRELVRSYIREHDDMELFDIYVDDGYSGANFDRPEFKRMMADIEAGNVNCVIVKDLSRFGRDYIEAGRLIQKTFPAFHVRFIAVTDNFDSQTADYYTKSLVLPVKNFINDSYCRDISQKVKSHQKIKREQGKYIGAFTVYGYKKSAEDKYKLCPDEYAADIVRKIFAWKMEGMSMLAISQRLNDLGVLSPMEYKKSHGEKLSTKFQTKMTAKWSPVAVKRILTNEIYTGVMVQGKNEKVSYKVKKTIVKPREEWDRVEGTHDAIISSEDFETVQKLLQFDTRATAGTDCANLFSGFLFCGDCKEPMARRINRYKGVSKVYYICSTRNRSEGCTRHSILEEELKTVVFQTLQAYVSVFLDVCSQLEHIQKMEIDFGEVERFDKEIGRLRQEQEKYLELRAGLHEDLKAGLITETDFKNFRAIYEKKYEDAKAALKKQQEMIQQLFRNGVASGAKLERFKAAMKLTELNRDALLCFINRIEVYENKKIYVEFRGKEEFHKMLVLQEYLNAKSKTDLGRKGEAV

SEQ ID NO: 1211 - protein, 591 aa, unidentified
  source 1..591: note = uncultivated organism
MEEKKVKIIEPAQQRKEQHKKLNVAAYARVSTGSDEQKDSFINQKKYYEAKIKSNPDYNFVGVFADEAISGTTDKRPEFQRMISLAEHKKIDVIFTKSISRFSRNVADLFQYCEQLKNHGVNLIFEEDNIELLNSSGTLLLTILGAVAQMEVENTSEHVNWTLQKKMENGELVGQANPLGYDVVDGQLVVNEEEAETVRYIFKRYLEGVGASRIAKELEKMGAKTKRNNTKWYDSSVMLIIKNEKYTGQLLQGKTYTVNPIGHKRKDNHGEARTFITENNHKAIISLEDWKKAQEITTSRCVSYVDGRKRGTTRNSNQSIFTSKIVCAYCGKNFARRKVHAGTKYEKVVWKCATACKRGKASCPECKAIEEDFIKQAVVGMIQNLIEDNESAFYLTKDRLNSLLKQSEKKKDKLREQITKCERNIQAKENKKSKLLDMHLEDKITEEEYLARKEVIDKEIASIQALLDEFASDIDYEDEKNKTNQQISKLICEGKAEGFNEELFNLLVNQITVGGKRSDGVDDPKALHIELNHLNLSTDMRSKVVNGHMVYTPGFDMEEDLKNNEQQMCSLHSGNTCGVRSAADKSRAVTR

SEQ ID NO: 1212 - protein, 561 aa, unidentified
  source 1..561: note = uncultivated organism
MIRKRCAIYIRKSTEEGLEQDFNSLDAQREACAAYILSQKHEGWAERSERYDDGGFSGGSMDRPGLRQMLEDVRSGRIDIIVVYKVDRLTRSLADFAKMVDLFEGAGVSFVSVTQAFNTTSSMGRLTLNVLLSFAQFEREVTAERIRDKVAASKRKGMWMGGSVPMGYEVVDKALVVNEVEATSIRTIFSEYLVLGCVRHLADRLKDLGIVSRRWTDRHGRAKGGADFSCGALYYILRNPVYIGRVRHKDALHEGLHQAIIDDATWRHVQTQLESHGGHKTEAVWRSASRMLDGLLFDSVGRPMRTTYSSKSVRKNGTRQSKRYWYYATMASRSAHNTKTERLPAEAIERVILNGLRARLADKRWMVEQASEHVKETELLADLLMAADNFLQNVPGDDGTVATQNVIELVDRIDVQKDRLRIAVNLQALLEGDVSTDPILSSFEIPFEMRQNGRAKPIIIAAEDVQQPDADLIDLIADARRWAVELLDGKATSIQQITDREGLRSGSVSRILPLAWLAPDISTAILEGRQPPHLNSKALRNLADLPLSWEEQRQILGFPPL

SEQ ID NO: 1213 - protein, 551 aa, unidentified
  source 1..551: note = uncultivated organism
MRQQNTTKINPAALIYCRVSTEKQEQEGTSLDSQADACIEYAKQNGYQIAEVVKETFSGAYLFDRPKLNEQRAKIRAGEYGAVVVYAIDRLSRDVAHLAILVDEIERHGAKLHFVTENLDQTAEGKLLLSVRSYVAEVERQKIRERSTRGKTAKLKAGTLFRSSKDMYGYAFDKETGKRSIKPQEAEIIRQIFNCAFDGMSMKAIAKRLNENNVESPAANKNYRNLEHFAGLRLNGRTLWQISSIRRLLTEPAYKGVTIGNRTKLVTTFENGERKTRQIKRDETELIYLPAGTTPAIIAPALFDAVQEKIKNNHGEKIKNAKGRYYFLLRGLAFCSSCGRKMYPEINGQKTPIYRCSSRDMFMKCTEGGYVSAPAIEAALWEILCLALKEPEKVLAEHQKRRANADNGRQAIQCEIDNALIQLSKLETEITNLVKRAATVDDDLWAVFQEQIRIKKNEQARFNDSIEELQGKLEACNLELGGIEALRAYSQAVGNPDNLTNDQKRLLLEQLDIKLIGNKNGYRFDMAAIGGVEFMGLETLNQDQRNPSANV

SEQ ID NO: 1214 - protein, 544 aa, unidentified
  source 1..544: note = uncultivated organism
MGQRGETVAIYSRKSRFTGKGESVGNQVELCRAYLHSTFGQTEVTVFEDEGFSGGNMNRPAFQKMMAQVRKGMLKAIVVYRLDRISRNISDFAGLIDELTKRDVAFISIREQFDTGSPMGRAMMYIISVFSQLERETIGERIRDNMHQLAKTGRWLGGNTPTGYTSESVSTMTLDGKRRKLCRLKLQPEEAQTVQTIFRLYLLLDSLTAVEAELLRRQLKTKRGNAFTRFALKGILENPVYMVADAQARAYFAHRGVEVYAPPEAFDGKRGILAYNRTDQEKGCAAVYLPMEEWIVSVGEHPGLIPSRQWIQVQEALCRNKSGAYRQPRKNEALLTGLLFCTCGSRMYPKLTGRTRADGTPIHSYVCREKIRSRKAACCCPNAGGMALDEALWHVLLGQPVHRKTFLAHLEKKRSLFRENAPKQAEQYREEWNRNEKKVNSLLDAMSLTEDPQAKSRITRRMEELLEANGQLRNRMEILAQQTAAEALNPETLEALCRDLSAFDRCMAQLPADARRHALRENVERIVWDGNTATVVWKDAGMPG

SEQ ID NO: 1215 - protein, 511 aa, unidentified
  source 1..511: note = uncultivated organism
MKAAIYCRVSTDEQAEHGTSLTTQEERSRAHVKAQGWRLVEVFVDAGESGTKNSRPALDRLMAACSRGDVEVVVVTKLDRFGRSNRHLANALGDLDEMGVRFVSLSEQFDTSTPMGKGMLAISGVFAEIEHATIRERMMTGKRAIEKQGYWTGGNVPFGFRAIADGAHKRLVVDDEAADTIRLAASLLVDQGYSTTEVSDHLNAVGRKPGRAERWDAILVRHMMRRKNNVVPKILDEARFADVQVALDATKVNRDRTDEVYPLSLRLFGTCGAQYTGVYRKELGRRYYACKNKAYENRAMRCRDRALRADDIEAIVWEQVCDLLSKPERLLELAEQYLGMHASQLAVERDGIEETETKLRAIETAIKNLLLTSAKAGLEPKDIEEAVRELTGERDALRRHMAMIESWQADSARESERMRRLWALADEAHRRLPHMSPEEQKEVLELLDVRVTVLAHATRTTPARVRIEGVVYDALLSEEKAVRELARPSHRSSSARARAAGASPRGSRARR

SEQ ID NO: 1216 - protein, 527 aa, unidentified
  source 1..527: note = uncultivated organism
MDRGSSGYGPSLKVPQMASSVPKTLRCAIYTRKSTEHGLELEFNSLDAQREACEAYIKSQASLGWKVIKQPYDDPAFSGGNLERPALQQLLKDIDAGKVDVVVVYKIDRLTRSLADFAKLVEAFDARSISFVAVTQQFNTTTSMGRLTLNVLLSFAQFERELSSERVRDKVAASRRKGKWTGGTVPLGYVAKDKKLVIDPTEAETVRIIFRRYIDLQSFSRLVTDLDKRGIVTKRRNTKVKKFNGGIPFTYGPLAHFLKNRVYIGETGHGGKWYPGEHKAIIDRKTFDKVQELLASSKTKRKVKRSESGALLMGKLFDDRGNAMSPSFSSKNGARYRFYVSSALLRGRKADAGSVARVPASDIEQALINALRERLKIGQAVTNADIVGSFVSRAELSSRAIKITATPAAKIRSNKFSIPWQMFQPSSATIIEENGERQPDAKLVQAIVRAHAWLRDLQNNSFDTVEALAASVNLHPKLVRQELRYAFLSPNIAGAIFNGDQPATLSLVLIPKTLPLTWRDQYQALGF

SEQ ID NO: 1217 - protein, 547 aa, unidentified
  source 1..547: note = uncultivated organism
MKIAIYSRKSVFTGKGESIENQIELCKEYCDIHYKDEKIEYSIYEDEGFSGKNLNRPKFKELINDIKNNKYDILICYRLDRISRNVADFSSTLELLQSNNCDFISIKEQFDTSTPMGRAMIYIASVFAQLERETIAERVKDNMVQLAKMGKWSGGQLPIGFKSEKVNYTNEEMKEKSFSKLVPIDSELEIIQFVFQNYLLKNSIREVTKTLNINNFKSKNGGSFDLTQVKRILRNPLYVKSNDMTHKYLKSINYNVYGKPNGNGYLTYNKKTDKENLIVAVAAHKGIIESSNWLHVQEILDSNKEKIASRSGTGNNTALFSGLLKCGKCGSNMVIKYNTKNKKGDNYIYYICSNKHTRFVTMKCDCPNLNVDFIDNKIIKKIQTYNRDTILESFNTRIKELKSKNDNFVSNNLQSQINLKESQVKNLISQLSNTNNELASTLLMEQINSITNEISLLKENFKNNIDNSIYIKNQIENLELSKDSFSKFDINFNNTNDINIKRNLIRSIIKDIVFNPIENDLTINFYCSDNMCFDDTSKSMDCNLYPS

SEQ ID NO: 1218 - protein, 730 aa, unidentified
  source 1..730: note = uncultivated organism
METKRCAIYTRKSCEDGLELAYNSLDAQRDAGENYIASQKANGWICLPEHYDDGGFSGGDTHRPALAKLLDDIKEGKIDIILVYKIDRLSRSINDFTKLLQVFDDYNVSFVSVTQEINTSTSSGRMMLNVLISFAQYEREIIGERIRDKVAGTRRRGILTGGMPHLGYDLMDKKMVINPAEAKTVQLIFRLYCQYRSARLVCIELNKRGLTTKCWIAKNGNQRGGKRWDMESLYRILKSPVYIGKVPWHDQLFDGIHQPIIAEEIFNETQQILRKQTAERKDYEPYSIDTYPLAGLIYCGYCHDLMLPTYSDKPNQRYHYYYCKKKKRIPGHDCPLRMFPAGDLEEILLTQLGRVFRTPSVTNEVIRQLRGSHPDIKQQEILDTLSNINALWNALSPLEKRGILRLLIRKIEVFTDYMRFFLNPLDLRQMVVEIAQQRTFKRRVGNEPEPEFDSEPIVPEFQPDGSILVSVPIIVRHKPLRTIIVPEEDRALLPLQIPVVRAIAQGRVWAQAMREGSIRDVTAIMEMTGWDRCRVIRVLGLSTLSTELVVAYCTGVEPDGLGLGKLSQQIPTSWTKQHEKFYRTPEIVNDAVERELASLALAFRPELAARWQYLFTRNPPDELHVSFMRRQIAHRLQENVFGQVPQHIEDLLWKAYTQGMKKADRHGLYIGSQLIREWKREKFVVTVRPEGYEVRGRIFKSLSGAAKFITGTNWNGADFFGIPPRQAALA

SEQ ID NO: 1219 - protein, 520 aa, unidentified
  source 1..520: note = uncultivated organism
MKTAIYTRVSTEDQVREGYSLEVQREYLLNYAKQQGYEVFEVYSDEGISAGTTDRPALQKLLKDAKAKQFELVIVYKIDRFSRRLKDLIGLVDQLASYGVGFKSATEPFDTTTSAGKLMFQQLGSFAEFERNRLAERIFPGMIKSVLAGNWHGARYSPFGYIYNKHSKLLEINESEAKVVKLIYRLYLAGKSINEIADYLNRSKHETRVGRFFYTKLIRDILRSRLYIGQIVWNKKSASQTVIAKGKHLPIISEADYEKVQKLLVERKASVRKARKGSFPLSGLLYCDNCNHRYFGVSNIANHKTGRRDRWYRCGGRQQHYVRCNNDAIKADLVEGIIFSAIADTLESDKLKDSRWLCMTASKEAVFNADLAGIKNKLKDNREKQLKLTDLHLNNLLSADTFKQKNESLRHEEEALRTQLAGLELLLLEKENSAAYLDKVKEFLASYDSEKKELTAADEKQLLSLILKKIMIKKCRNARPHPRVSAKFYEPFEKINSELNNSLNERKKCADTILKLTAAR

SEQ ID NO: 1220 - protein, 527 aa, unidentified
  source 1..527: note = uncultivated organism
MKRTAKAEPAKPTQVRCAVYTRKSTEEGLEQEFNSLDAQREAGEMYVRSQAGEGWHCLPDRYDDGGFTGGNMERPALRRLMADIEAGKVDCVVVYKVDRLSRSLLDFARMMQVFDANRIAFVSVTQQFNTAGSMGRLVLNVLLSFAQFEREIIGERTRDKIAATRRKGKWAGGMPVLGYDVGEGTKLKVNEHEAERVRAIFRMYLEHGSLLPVVQELERRGWRNKLWATRKGPARGGKAFTRTSLYKLLTNVVYAGRVKYGDETHAGEHAAVVDTALWEKVQAALARNGRSGNAVARNGFGALLKGLVRCVPCGCAMTPSHSTRKGGKRYRYYVCSSAQKRGWSTCPSKSVPAVQLEDLVVSRVQAVGSDPGLLKEVLAEAEEQAEEAAREKQLKHRAAEKDLRAWHGELKALSQRIEPRAGNGPLLARLADLQERIAAGKEQVRVLHAGIEHCRIRQLPAFEAREALALFDLVWEALSLGERTRAVQLLVGRVDYDGSRGKVSIAFHPTGIQTLGAKAASQPEVVR

SEQ ID NO: 1221 - protein, 593 aa, unidentified
  source 1..593: note = uncultivated organism
MNETEEVDEKPIRVALYLRVSTEEQAEKFGLDAQKSAVEALVKSKGKLKDGREAVVLAGKAYEYIDDGVSGTTELNERPAFIRLKEDVLNAPPGQRPFDMVAVYRIDRFARKLRILLDVLKFFEQYRIEFTSATESIDTSTPFGRAMLGIMGVIAELELETIHERTTRGKEQASEQGVAMGANAPYGYLKDKDKRLVIFPDEAKYVQKIFDMFTAGKLSPQLIADQLTQDEVLTPDASAVKYGKRKGTSRKKNEPFFWRAERVRDILKDEVYIGKLYFNKSYKGKAISKDQWRLSPISHEPIILNHIFQFAQVGLKKLADRKELTKKKQEGYLYLLSGLLKCDYCRKIVKPVESEMMSWTGGKKEIVESKKYTYHYHCNRKNTKKHSITCPTVPIPAEPLEDYIIDFIRQLLSDPKAVYEYQKQLKSTQTSIKHYETDKSNFLNLLEGLPQRKKSLLFQHEIGEINNDTLKVKLEELQAKEKQYKEKLIEIDFQLSQITLSRGYEVSLPLFAKKYKKVLDQSFKDRKELYELIHMLIDQIVVTSRPRQEGDVIAGRKKENQMIPEKIDIFLNLPQDLLRELYTHKFGVKSDTL

SEQ ID NO: 1222 - protein, 571 aa, unidentified
  source 1..571: note = uncultivated organism
MKDIRCAIYTRKSSEEGLEQDFNSLDAQYAACTAYVASQASEGWVLIKNRYDDGGISGGTLERPGLKALLADIAAGLIDNVVVYKVDRLTRSLLDFARLVEAFDKAGVSFVSVTQSFNTTTSMGRLTLNMLLSFAQFEREVTAERIRDKIAASKQRGMWMGGTPPIGYRPDGRSLAIVEEEAATVRHIFQRYFELGTVRALHDELIQQCIRQPKRTTTTGRTFGGTSFGRGQLYNLLKNPLYIGRIRHGSKTYPGSHPAIIDQETWDRVQAQFGDNAQGVQQAPTVKDPSLLAGKVVDHEGLPLVATHACKGKVRYRYYVSRHLQHGMSAANNAAASGANGVRVPARELEQLVIKAVVAELKDPIAFARKLGASIDGPRVVASLVEKAAAMVATLDGKRGLPVQNLLQRIVQRVAVRDEVVELAFEPAGLDLDLGLEADTSAVEAMSITIPARIRRSGLAVRFVLETGQHATAGAVDQKLVAAIVKAKAWWKRLQDETDMTVAGLAEAEGLSRNYVNRVLRLAFLSPAVVNAIIDGTAPTDINLERLRDVKRIAPSWTKQHRLLGLTAAQR

SEQ ID NO: 1223 - protein, 545 aa, unidentified
  source 1..545: note = uncultivated organism
MLPKQTEYKVGMYMRLSRDDERAGESLSIENQRTILTRYIEEQGWTVYDEYIDDGISGTTFEERPGVQRLLEDAQNGRINLIICKDLSRFGRNYIEVGRYIDYIFPMYNIRFIALTDNVDTANTDSASMDMLPIMNVFNEWHSANTSKKLRAVFEANAKAGKYKTTVPPYGYLKGTDSKHTPVIEPTGAAVVRRIFELRAAGNNIRTIANILNADHIPVPSDHYYSLIGKPNPIRNCGHLWDNTSVSRILNNQIYLGRLTQLRTKTVSYKNHKVIKKDETDWVVIENNHEPIISQELWDRVQAVNASVATGRHTKNFKLLPLSGLCYCADCGSKMRQHGGCERNSTSPVYVCSRYAKYGKAYCSTHTIRRELLESLVLADIQRQIDLVLNEPDIREKLLAYKKDDKTERDNAAKKRLRDIDNRIKELDRLIRSVYEDKVAGLIPEKVCAGLLGEYQEEKDDLTVEYEELSKRTDAEDQDERDVDEYIRRMKSYAGAEVLTREMALTLIEYVKVDAHPGKHKAPRTIEVFYKLIDKPLTNKHNALE

SEQ ID NO: 1224 - protein, 528 aa, unidentified
  source 1..528: note = uncultivated organism
MSTEPKRERTRCAIYTRKSTEEGLDQDFNSLDAQREAGEAYVASQKTQGWLALPDRYDDGGYSGASTERPGLTRLLADIDAGKIDAVVVYKVDRLSRSLLDFAKMMEKFDKKQVAFVSVTQQFNTGNSMGRLVLNLLLSFAQFEREMIAERTRDKMSAARKKGKWVGGRPTLGYDVDPNGRRLVVNEREAALVREAFELYLQERSLLQVVDVLNGRGDHMKSWVNKKGELRKGSAWDKGGLRRMLTNVLYLGKVNYKGEIYAGEHPPVVDARTFEQVQGLLASTSPSRERASVTRNKHGFLLRGLIRCGACESVMTSSFAYAHGKTYRYYKCTATNRRGAKACKVRSLPADEFERYIVEHIRELSRNPKLVRSTAERVKKDRETAVPALEKQQAEVGDELDKCRKEAKRLLTALANEDGGDGRFLTERLAELDARAADLERRIRELTEQIVAVRRAVIDPKDIDAVMALFDPVWDALLPKERARVMHLLIEQVDYDGKSGKVSITFHPAGVTLLAQDVNANRKKEVTV

SEQ ID NO: 1225 - protein, 536 aa, unidentified
  source 1..536: note = uncultivated organism
MKTTEPKEKKIINCAIYTRKSVSDGLERDFTTLDAQRESCESYIASQKNEGWICLPEEYDDGGFTGANTDRPALQRMMTDIKAGKINCVVVYKVDRLSRSLLDFAELLSAFEEHGVTFVSVTQHFNTQNSMGRLTLNILLSFAQFEREIISERTRDKMGAAKKKGKWIGGRPPLGYNIDKEKHKLVINQKEAELVRRIFNTYIERRSLTSATMIINDLGLTTKQHTSETGRKFGGIQFTSNGLQRLLRNPLYIGKVLYQDEQYVGEHEAIISEEAFQKAQSILAENRPEWSMKRRTKHIGLLTGLLRCKTCNCAMYFSYNVKASKYRYHYYLCMSASKRGYKTCPTRLLNAQKIEQKIIELLRTLTPLPKLDEKVWDTFTLEEKIAIIKTVLKEASFDGHKGILEIVLLKDNKRRQYKVEIKELKNLPTPPNQVNIKNEPLLRQRLILAHQIQDVIDAGQAKDLKQVAEWLSLGEVSIYLIMNTLMLAPNIQEDILLSDNQKLSSIPEYKVNEICREIYWQKQTDMWQKLLQDPTA

SEQ ID NO: 1226 - protein, 541 aa, unidentified
  source 1..541: note = uncultivated organism
MNRKVAIYARVSTEHEAQLSALDNQVQYYDDILEKHPNWILYDRYIDEGITGTSIKKRKNFIRMMKDAHEGKFDLIITREVSRFARNTVDTLQETRKLKKIGVEVYFTEDNIWTFKDDDGELKLTIMATLAQNESKKTSQRVKAGLRIAFMNGIFMGSGNILGYDKINKNTMIVNQDQADIVRYIFKEYLNGVGTTTIAKDLERKGYKTSTGLNRWNAAYITRVLRNQFYAGTIVYNKQYIPDYLEQKAKKNRGEIEQIVVEGTHEPIISKEDFDKVQAILDRHSKPSTSGDRTAIGVPKYVWSKKMICECGSTFNRRKDHTTNKGKTYAYACYNRKTHPKGGKYEYGYKYCEVKEVQEWKLEKMAEFIFRNLVGDDHNRIELELILLNGIKIDTHEADELNSEIKRYNKLIKEQSTKLDRLLNLYLDKKVNPNDYESFQKKLSDKIELYKLEIEDLEKELKRLDPPEVKIEKAKQSVRRLLDFNYNGINDLLIEEVVEKITVHKDWFEWKLVFLNEPINLEVKGKKQDYFIVEHETSDNK

SEQ ID NO: 1227 - protein, 523 aa, unidentified
  source 1..523: note = uncultivated organism
MNKPSNAPRKAAIYLRISLDREMDGLAIERQREQCEALAAYRQWEVVETYVDQSKSATDRTKVRPAYDQMVADYKAGAFDAIICYDLDRLTRQPRQLEDWIDASELRGLALVTANGDADLSTDGGRMYARIKAAVARAEMERKGARQSAAQLQRAKQGRAPKGMRPLGYAVDGDVVPDEAEAVRAIYRLFTRSDHPESLRSLARGLSGTESIPGLTPRPRHSHVVSVERAQRRIAEGKEPRAVQPDGDWSSSTVLGILRNPRYAQMSTYTPKKAQADGGRRRSWRAQILRDDAGEPIRGQWDAIVDDETWWRAQSLLDDAERVTNTSGSTKRKHLGSGLYRCGVCDAKVTGAPRGYRCAQHVQRDDQGNVTVTSLMRSGAEVDAFVLKVIAKRLKKPDALRMETVVDTASTSSGIAAAISEQRARILRAQRDYDEEIIEGRDLKRIRDAAESRIAQLESERLMHGQAAGLAPVLGADDPSEAFLNASLAVRRQVIDALVTATLLPQPRGKKGFNPDSVVIEWR

SEQ ID NO: 1228 - protein, 1049 aa, unidentified
  source 1..1049: note = uncultivated organism
MQDFTAGLYIRLSREGGDKGVSDSILNQEKLLKNYVEEKEDINFGDCYIDEDYTGTNFNRPGFQRMMDDLKSGAINCIIIKDLSRLGRNFIESSRYIEEVFPKHNCRFISVLDNVDSYENPDINTDLLLRLKNLIHDNNSQEISKKVRAVKDMQRKEGKHISNFTPYGYMKDPNNKYKLIVDKSVSHIVKSIFEWYLNGMGIIRIAERLNRYSILSPGDYKRKSGIYKDTNPKNTGWYPFIIRVILTTKAYTGDLDQRRTTTINYKDRKLIRLDDKDHIIIPNAHEPIFEQHIFEKAQEKLKNHKLRTSPSREKVYLFSGLMRCADCQYGMIRTATTIKGKKYVYYKCRSYNQRGKSVCSSSHSVREELIYAAVRCQINSNLNNLIDIKRTINNYNKSNKENNLTANILKIIEQNGKKIKKIENLKIAIYADYKKEILNEDEFLNMKKSYSKELLKLEKDIILLKEELKSENHTEKCVTPWIEEIIQYGRIFALDREIITKLVDKIYVTADKKINVKFKYENILIALLKIYTMLIQILWEVYMQTASANNPQRIWNTAIYVRISEAEKDKSESDSIVNQKKYIQKFIGKDSTLNLHEIYCDDGYSGGNFDRPAFQKLISDIDKKIVDCVIVKDLSRFGREHIKTNYYMEIYFPSNKVRFISLGENIDSYLNPKRMESIDIPFTNLINDHYLTQVSISTKSSLQIKQKEGKFVGALAPYGYLKAPYDKHKLIIDEEVKDIVVKIFNDYIKGSTLSEIAKALNYSKILSPGVHRAKKSGRIVACKWNSNAVRNILDQPIYTGDRVQGRTYSPNHKVKKRIPQPKEKWILVKNTHEAIISRKIYDKAQDILSRDIKPVRQKCKEIKPSILAGYVYCADCGGKMIRNSAVSNGKKIYRFVCSTYKNKGGKYCSSRYIQEDKLIELLFETISLYTRIAVDEAFVKRAEEMHRKGNVSSFFAIKLKKAQKELEEVKMIRQGLYKDYKLNIISASEYTDMKAGFEQQYNDLLKQISSLSKSIEFEKTKKLPINETLEYLKGHGDKTGRQDNYRRQK

SEQ ID NO: 1229 - protein, 566 aa, unidentified
  source 1..566: note = uncultivated organism
MEKQYAIYSRKSRFTGKGESIENQVELCRRYIAQQDGETAADQAVIFEDEGFSGGTLQRPQFQMLRKQAREGRFSVLVCYRLDRISRSISDFANLIEELHDMGVAFVSIKEQFDTESPLGRAMMYIASVFSQLERETIAERIRDNLHELAKTGRWLGGVTPTGYASEEVRQVTLEGKVRRSCKLTLVPEEGNLVRLIFHTFLETGSLSQTDTYLLQHGYESKNGKRFSRFTIKGILMNPVYLTADEAAYQYLTQEKAELFSKPEEFDGKHGMMVYNRTLQRPGKAQKMRDITQWIVSVGKHDGLISGEEWVRTQQLLAQNRDKGYRKPRSHVALLSGLLRCGACGDYMRPKLTQREEVGGERVYTYLCSTKERSRGACCQMPSVSGNLLDRGIRNVLKQLPEDFPEFCRQLEKRSKNLLSQVTGKEEEHDILEQQLTEKRREIEALVSTLARGEGTAAESYIMEQIEKLHIQVENGRRQLAEWQAQMQSGALPEEKLQYLGENIASFPGVIERMSLEQQKRVVRAVVKTVVWDGETATVHLLGETDVGKVLKWETWLDVPLGENSK

SEQ ID NO: 1230 - protein, 627 aa, unidentified
  source 1..627: note = uncultivated organism
MKVALYLRVSTEEQAVRGYSIEAQKEALRDYALKKGWEIAGIYEDAGFSAKDINRPALKRLLKDIEDGKINAVLVWRLDRISRSVGDFSDIVEFFEKHGVIFDSATENIDTSTPSGRALVNVLAVFAQFERESIGERTRLGKLKKVQMGNPALGLPPYGYRIEDGEYKINEAEAEVVRLIFKLCVDNHWGYRKIASHLNEIGLKTRQGGFWNHGSISSILNNPIYAGLIVWNKTKSLRGKVIKRPKSEWIKLKGNFPPIISEELFDLASSRIKERNQRGRSLSSVYPLSGIIRCGLCGMSYNVNRRKERGVVNYFCSSRKGKGSVVCNNRTVNGTKIEKLLVSKLIEITQKEKELILSSFKGENRGEEISKEIKNISTALERIEAKRKKIFELYEDEEIDKAILKERIKELESEMALLKSRQEELYLRQDREKNIEHERKLFSKAIDNFSKIINLATPSEKKALIRAIFKSIVVYPEKIDAVFKTGYCLTLTDYEKSIKEKVRPLTEEEQKQIKELVLKGNIRAKAILLSSNGLSSWKIAGILGIHPGRIRYAISEFNKRGVTSLLSDLKPKPPLPWEIKLADIMASNTQISLNKLTEELRKSGYNVSHYMVKAAIRKNKLLNILEA

SEQ ID NO: 1231 - protein, 633 aa, unidentified
  source 1..633: note = uncultivated organism
MQNTLLQIAIYSRKSKWTGKGDSVENQIVMCREYIEMFIEGGEQAEIIVYEDEGFSGKNTRRPQFQKMMRDMKEQHFDYLVCYKLDRLGRNLADLANLMEDLERKGTSFISIKEKFDTTTPIGKAMLYFSGVLAQMEREQIAERVKDNMIMLARSGRWLGGNTPLGYSSMKLEKEVSALKKKSMYCLVQNPEEIGIARYIFSYFMECRSLTKVYKSLITNDIRTRQGNEFVISGIRDILVNPVYCKADQDAYQYFYDLGCQVCIDEEELDGESGLMGYAKTTSTHYKNQSQPCESWIISKGRHQGIVSGKEFVRVQKLLAGNKEKGAAFKNTKNSVALLSGLLYCSCGHLMRPKNYPASRLTEKGERTFSYRCPYKDATHREKCDVKNVHGNTLDARVCEELIGMTNPDAGIVPMLEALLKKIRDTDMEVVSEKDLLQQEYNKKKEEIQKLIASIKNLDADSVSVQYINEEIKRTDGICRELRTRITAMESNKEANLDVTDYVGEWLKKMKHFPQIFEELTVMQKRDFLRMIIEKVVWDGENAHIYIRNPVPGRHRDIFARLKEEILRPWYPKFPTYTQCIAAAAWTYNGDETPFGNLQTDVRESGGFSFQIVIGVGNIPQRKYWLHRKCLLM

SEQ ID NO: 1232 - protein, 502 aa, unidentified
  source 1..502: note = uncultivated organism
MNYDIKYVALYLRKSRGEEDDLIKHETILKEICVKNSWKYVIYKEIGTSDSIELRPEFQRLLRDIEDNVYDAILVVDYDRLSRGDATQQDTINKILKKSNTLIITPNKVYDLNNEMDSTYTEFQGFMARQEYKQITKRLRQGKKIGAKLGNWTNGKPPFPYEYERWKDKYKEKGLVVNDDKLVIYRFIIDNALNDIPPYKIAWELNKQNIPSPNGKKWTNITVYRLLKDETHLGKIISNKQKGDGHKIKRKDVEDYIKLDRSEWVIVENCHEAVKTQFEHDKIIDMLNRRNKTPRKARAGIYGLSGLVKCGICGYNLTFQKKDTGNLLIKKCWYIDEYGNKCTNSGGSYNLLEVEIKKAIINYKNELLKQKNSNIDENIEVQNMKVLLNQYEKNLNKYIAALNKVNDTYDLGDYSRNEWLQRKNKWENEIQKVRVEIDDLKIQLSRKQTVSNEQRLFLLNYFIDNIDKIEDENSKNKLYKSILDYVTWTRKGDDLDIKVNFR

SEQ ID NO: 1233 - protein, 544 aa, unidentified
  source 1..544: note = uncultivated organism
MDQIKKRAVLYLRVSTQEQATEGYSLAAQEQNGREQAARMGYEIVQVYADEGKSGKSTKHRFAYQQMMEDAKDGKFELLIIWKLTRLSRNMMDTLQTVEELLKHNIELYSISERFDITTAMGKMMLQMLGTFAEFERNQISENVQMTMKSLVRDQERYAGGRRLGYVSGLDVDGNKQLIIEEEEAKIVRLIYSKYLEGMGYRHIANHLNRQGYRTVKSNEFSSVAVRDILKNKIYGGYIEYARYEDWDTKRRRGKNDNPIIVKGHHEPIIDEEMYQKVQDNLKQRSVNPQWNQTGQNVLTGLLKCPKCGSAMAASNVTNTLKGGVKKRIRYYSCSEFRNKGASVCSANSIRADFAEKFVAERFKELIQLPEVIEQLVYDMNHELEEQTKPLEQELAVILSEKERVSEKLLKWQESIMKDPELVEMLKEHILELQQQIQSFTNRETEILGLLRYQEDEIRVKDVRLLFNNLDVLLDEKNKREVKELYRIFIEKITFDLGTRDNIQITVKFDQSTVDQLNEAYRKAESSYEDSAFFVIRAPFQLII

SEQ ID NO: 1234 - protein, 530 aa, unidentified
  source 1..530: note = uncultivated organism
MRIATYTRISTDEAHQPYSLEAQATRLGSYVDSQEGWELVRTFSDQASGATTERPGLERALAEARAQRYDLLLVYRVDRFARSVRGLASLLEAFDAAGVAFRSATEPFDTATPAGRMMVQMLGVFAEFERATIIDRVIAGMERKAARGEWCGGSRPYGYLVDPASGHLIINCDEAPLVAVIFDRYGRKRHGAKTIATWLNSHGHRTKAGRPWNHMAVLTVLRNRAYLGEVYFRDTHHPAPHPPLIDPDTFDLAQQILRLRSEDYAHRASNASDYLLAGLITCTRCGKGYIGTAAHGNRYRYRYYTCFSRQRYGTATCSAERLPADQLESEVRGALLRTVRRHDLLEAALAAGLARSGAQRRQHQDELGVADAELTKSEEAIERYFLAFEAGTLSETTCGQRVQTLAAKIATLQARRGELAALLDAEQELTITEAHLEQLRSHVTDTIEHGDPGAQKGLLQALVARIEVESRASVRPYFRVPLDGTGLTALSPSDNGKVRPPSGSAPSAGFEPAHPAPEADALSPELRGLT

SEQ ID NO: 1235 - protein, 523 aa, unidentified
  source 1..523: note = uncultivated organism
MIAAKTAKVAAPAVRCAIYTRKSHEGGLEQEFNSLDAQREAAEAYVASQRSEGWVCLADRYDDGGYTGGNMDRPALARLLADIEAGKVDCVVVYKVDRLSRSLMDFARIMATFDGRNVSFVSVTQQFNTTTSMGRLTLNILLSFAQFEREIIGERIRDKIAAQRRKGKWAGGIPVLGYDVDRSGPSPRLVVNAEEAVRVREIFSLYLKLGSLLPVVQELEKRGWCNKAWTTRSGKPKGGKPFNKCNLYGLLTNPIYTGKIKHKAELYDGEHEAIVPAKQFQKVQARLQHNGRTGGVEVRNRHGALLKRLLHCKACGRAMVHTFTGRGSKRYRYYTCTHAIKNGHGTCPSRSLPAGEIERVVVDQIRCIGQDADLLADVLQQARKHTKAEIDRLSVECRDTERQLRRDDAEIRRLAAKGPATGDTAARIADLAERVQRAETQLAEVRKQEDALAQERIDEAELKAAFEDFDNVWGALSPREQADVLRLLIARVDYDAAESSISITFHPSGIKALSDGQMQEEAA

SEQ ID NO: 1236 - protein, 1228 aa, unidentified
  source 1..1228: note = uncultivated organism
MKGVFIMDEKTMWIQTLWNPLNERNQSPMESKAEGIRVVAYCRVSNDRNNLESLLNQISYFTNLIKSKSNWKFTGLYFDKGISGATYDQRPGFKRMLRHCEEGRIDLILTKSVSRFSRNTKELIDIVNNLKEKKIAIYFEKEHIDTALDYNRFLLNVYAALGQETIESASQLTRWGYEKRFIKGIPVFGNLYGYDVDKNKGNPIVTINEEEALVVRWIFDMFINGSTYSEIAQQLVKKGIKTKKRKSLWAKEHVLKIIKNITYTGNKIARTRTKDILTNGIKKGIRDEFYFENSHPAIISKDVFDKAQIRVEEIARRNVRRQGTYNIRPFSKRIICGYCGGTFRSRPPSSWRCRTTLIDRDFCNAQVLNDKPLLKMMLKGLEQRFDFDNKDILKNLLRFIQRINQNDHFEFHRLKYLTEIEIAYKSGNLEEADRLIQIYKEFEAKVQKIEEDRIYRDKVISWLKDIKTIEEFRKQLTIEYARAWVMEIEIYTKEAYIVQWVDEDKTVVGDCEVAKKAAVNIKEVGELENTLKVSVEDKLNMEGSQTKEIQNESTENQEGGKFLKPEVIKIRSSQNPMEQIRRSLKGHGTERIYESLSRNKKTNKTIRVAAYCRVSTNMEEQQVSIRSQTAYYTFLILKSKEWEFAGIFTDEGLSGTSMDNRTEFNKMIDDCKAGKIDLIITKSISRFSRNTLEALSIIRMLKSLLNPVYCYFEKENINSADDKSDLLLSLYLSISQEEVKNISQNVKWGIVKLAQRGIIHRTTDIYGYTIDKNRNWNVVSEEAEVIRFIATEFLSGKPYNEIIETLHDKGIKSPSGMDYWNDSQIREMLKNEKYKGDYLFQKSYTPDIIGVKPKRNNGEVAQYYIEKHHPGIIEEREWDLIQEEMERRTREPVVNPKPLQTAGRKSFYQKFYCSECGSLISRYRSKFRTREGSNWRCYDTYGKINSQCNNSKGYRQEYIELNFMKTLLEIDNIQTLVDEEIKKLTLTKEELLYESEVKKEIEELSQQLYIVVDEELNKHGQDTKKIDFLTERIIYLKNSLKEFEVRRDKVKYYKEELKELLRVCKKLRPQSVRQFHNMDVRIKPGDSIYDTTKNAKDSTYVKDGPEHFREDIFEKYITKGEIDGEGRITYTFIFDIRYGINMTYEEYLEEFEKAKADINFEELLISNEVRQLTTFCREGKTPKEMRELLKISSRVSFDKRILRPLYNAGRFTLVRGKCPNDWRYSWNC

SEQ ID NO: 1237 - protein, 553 aa, unidentified
  source 1..553: note = uncultivated organism
MAASSPRRLRCAIYTRKSTEEGLDQAFNSLDAQREACAAYILSQRHEGWQLVPDLYDDGGFTGGNMDRPGLKQLLADVREGRVDVVVVYKVDRLTPSLADFAKIVDVLDAAGGSFVSVTQAFNTTNSTGRLTLKVLLSFAQFEREVIAERIRDKVAASKARGMWMGGNLPLGYAAVDKKRVPVPDEAETVRHIMRQYLESANVLDLADALRCQGIVSKRMTGRNGMERGGTPLARGALHYLLSKRTYVGEVVHRGKIYPGEHETIVDRELFDAVQARLAARTNAPLEPGRRGTVSLLAGLIRDDLGRPMSPIHSRNHGKRYRYYASHRGDGSREPALRLPAGALDHAVRTGMRLFLADAQRVSQLNVDPAQHGNLIASFGALAYSLDGMAIAELRKLLQQAQLRVTVSRESVKAEFDLAPLAAWVGVDLEESAVIALSIAASQTTWGHEPRLRLDPPAGAPANDPNLVQLIARGFAARDQLLAMTDDDIRAMPTTQLRHLERIARLAYLAPEIIKTILDGRQPRQITARFLSRLGALPLAWSDQRKMLGFSSN

SEQ ID NO: 1238 - protein, 512 aa, unidentified
  source 1..512: note = uncultivated organism
MAATLSVVPAPNPVRCAVYTRKSTDDGLSKEFNSLDAQRESGEAYILSQRHEGWTLIPTQYSDGGYTGANIERPGVRQLLADIEAGKVDCVVVYKVDRLSRSLIDFSKMMELFEKRGVCFVSVTQQFNTNAPLGRLTLNILLSFAQFEREIISERTRDKQVAARKKGKWTGGHILLGYDLDQRAGKLVVNPEEAERIREMFRLYLEGISVIEIVQRFDQRGWRNKQWTTQDGKLYGGSPLRRCHIYKLLGNIIYTGRVTVADEIFPGEHEAIIDQKTFDLAQVKLKENTSQSGDQPRVKMDALLRGMIYCATCGSGMYPTYSASGERRYRYYVCYRSQQKLEGSCKSRSVSAPAVEDAVVESIRRVGVHPDVLAETVQQARQQVADLVSALRAELGAINGRVKNLKSQLARVRNPEAPRLAEIREQVAAGEAHAEELRKEIHRREKQRIDEKELRRTMESFEMVWKSMNLEDQRGLLRQLVEKVGYDDRTGKISVSFKSAGVKDLVQKGAIR

SEQ ID NO: 1239 - protein, 561 aa, unidentified
  source 1..561: note = uncultivated organism
MKKVRCAVYTRKSSEEGLELQFNSLHAQRESCEAYILSQAGEGWTCLKDPYDDGGISGGHMERAGLKRLIADIKLGKVDVIVVYKVDRLTRSLTDFSKLVEVFDEHEVSFVSVTQAFNTTNSMGRLTLNVLLSFAQFEREVTGERIRDKIALSRKRGLWTGGLPPLGYDAIDKKLIIHESEAKTVRHIYNRYTALKNVRKLKDELDRDGYVSKRRVAKTGRETGGKPFERGALYAILKNQTYLGMTTHKGESFDGEHEPIIDKAVFKKVQTILASNRQREKHKANAKDPSLLSGKIITDAGITLTPTHAQTHGRRYRYYVERRKPDQQASVQTRPIRLPASEIERSVCSELATYIMDPIKLIDVLGMKNAAQEAQSSICEESAEIGTILTASTKRANDNVIIRRLVQQVKLLPDMKGYTLLVDLLVLAKTLNLPHAPTKETTTLNVELELKVCNNGKKVIIGNKPAITPTPNASLINALKIAHQIKQQYMGIMPPSLTHIATSMNMNKRQVWRNLKLAFLAPDIQLSILSGTQPHGLCIQDLLDTKLPIEWLAQRTVLGFA

SEQ ID NO: 1240 - protein, 532 aa, unidentified
  source 1..532: note = uncultivated organism
MNIKSAREELINGKTIYDMNLRVAYYARVSTEKEDQLNSLENQSNYFTEMIKDNSNWTFIDSYIDEGLSGTAVKKRESFLKMINDAESGKLDLILTKEISRFSRNTVDSIKYTEILLKNGVIVHFLTDNLNTIFPDSEFRLAIMSSLAQDEVRKLSERVKFGMKRMIKDGKLIGGSNLTGYFKKNGKLIINEEEREIIEMIFNLYGTGKYSLLKISDKLKEKGYLNTKGNPYSDTTIRKIILNPRYKGYYTANISYIEDYKTHKKILNHKDEWIMYKDESKCPPIVNEKLWNKANEVLKKRSKHLNKTIISNQSYLENGSYTSKLFCKEHGCNFIKKGSGKRSLYPTWQCDKYLRHGLKGCDSPIIKEEALNNIFIKEIKKNIGNFDELKDIMVNQYKIIFEDYFHDSEEEKTIKKINKIKKQKEKLLSLHLDDIITSLEFDETNNKLTGEINILKENLTQLKNTYDMDGKNLIEIDEKITKILDIEKSISIYVKLLIDKIVISKIDNSRVNLEFNIKFKGSQKTKNIKVSL

SEQ ID NO: 1241 - protein, 541 aa, unidentified
  source 1..541: note = uncultivated organism
MSGKSTAPLSSAERQRRRASSLLLPKDGESAVTREPVRVNPRLAVYGRLSLEKDASVSIARQRETLERYVRDIGGRYDPAADYFEDDDKSAKGTVYRDGAEQLLQAIAEDRYDGIVVWELARFMRNKREARIAFGLMEQHGVEIYSHSEPVLAMSGVGRMMLEFYLDQAAKEIEKLGSRVKAAHEFMAQHGRAPAVAPFGTRKVEVPFPGGVRVKPLCRLEPDDEPREDLQGKSPAQLVREAAAAYIAGASARSVVKAWNDAGYPSVGATGWHSSTLTQLLRNPLLAGYSTFRGELVCDDAGTPRIFHAPVLDAATWADLSAVLAGRPTRRRGTNDSPMRGLLRCGSCGASMTRTGPDAHASYRCWRDGSKGTGCHNSIAAPKTEAVVIEAAVAVLGDPVRLAALHATVVQHAAAKHDALEAQAAKLRSALERLDLEQVMGTYDDPDGARRYAGIKGRLLEQLDENLAAQRKARKPRPLSLPGVEQGMTPAEAFDAATDAQRLTVLCELIEYVVVRPVTSHDGPRVYDPSRLAITWREDEL

SEQ ID NO: 1242 - protein, 526 aa, unidentified
  source 1..526: note = uncultivated organism
MKQIKDNERRCGLYVRVSTVGQAEDGESLDEQEQKLKAFCEFKGWKNYKVYREEGRSAKDTNRPALQRLLSDTEKGLINTVIVKKIDRLSRSILDFEQMFKFFEEKGVDLISLNENFDTSTAIGRSVIRIILVFAQLEREQTAERTIDIMKYRAQKGLWNGGYPPLGYDVQDGVLVPNSGEAEVVREIFETYLNTGSLSETAKILNSKGYRTKKWVTRQGKVMGGAKFNKNNLSRLLRDSVYIGKIKYDGKIYEGRHPGIVDEEVFYYVQEMLKQNRASNTGFRAGIEKFLLKGLVYCGHCGCAMAPSFAYSKGRKYYYYRCLVNNDPSKGKCPIGAVNAKALEDLIVKELQFLAESPEFVDEVVEEAIREEREEGERLKKKKQALAKRLQEVEGSARKMMNVLEGLEETDPRFAFILQKLKELGEERDGLKKEIELLEFKINEVENNYLNAESLKANFRYFKEVFEYLTPEEKYDLLHLLIKRVVYYGKEVREGQEATKIKLELWDIGPIPSGESFAERVIWLPA

SEQ ID NO: 1243 - protein, 537 aa, unidentified
  source 1..537: note = uncultivated organism
MKFFIYSRKSVYTGKGESIENKIEMCRQNIHTKFPDAADGEIAVYEDEGFSAKNTDRPQFQAMLRDIESDKPDFIVCYRLDRISRNVSDFSSLIEDLNGRGISFVCIKEEFDTSKPMGKAMMYIASVFAQLERETIAERVRDNMLMLARTGRWLGGTTPTGYTSEKRQEIVVDGKVKTSCKLKDAPEELRVVDAIFEKFLELRSVSGVSKWLIRQGMKSRGGKYYSLLGIKDILQNPVYCIADRDALSYFTAQRSDVCFDERKCSDRLGLLAYNKRDYKKKHAPRQSMDKWIVAIGKHCGRVPGSKWVAVQNILEDNIPTGKKPAKMHNDYSLLSGLIYCEKCGSRMFAKQRSGKGANPELFDYVCSSKLRGGTALCDSQNINGSQADDRVCEYLMQYTDEGSEIYGLLEKLKREIQTQEQKDPLSSLDAQMKKRNDEMDNLVNTLSQGNLGTAFIHRVNARINELDRELTELSNRRELLQKNAELVADREVQADMLSSLKKIFMSLSIQEKRTFVKLMVQKIVWDGEDLHVFMDGE

SEQ ID NO: 1244 - protein, 545 aa, unidentified
  source 1..545: note = uncultivated organism
MKAAIYLRVSTEEQREKHSISTQRQFGERYLALHNILIYSWYPDDGVSGILPLDQRPEGARLLADARTGKIDTLYVYRLDRLGRDPRLILNAINEFESLGVQVKSMTEEFDTTNPIGRFLITVLGGVAGLEREYTIARSIEGTNRLARQGAWLGGIVPYGFRAVGKGKDSRLVVSEQLIPGFAWSEVEVVRRMYYMAADEQKSCQVIADYLHALGIPPTHNYDEHDPSRGKRQKATASRWSAGHVRNMLTSTTYKGIHRYGRRTKKERTIFEREVPAIVGIDQWERAQQVLHDHMLFDPHGTAAPHSYLLRGLIKCGLCGLTYIGMHYPPYKDTERIYYACNGKVQLRGPFGAQGKKCPSKTVNAIVLETAVWNDIETFLRNPGTVLEQLAAQLHVQDEENERHRNRLAKLQQALQALTIEKDAVITLYRRGRIDEIALDRQLDDIQVEEGNLARDIEDLQEHLRHVQEKENSLQTAKELLERLSHHLEEPLTWELRRQLVEVLVEGICVDTLEERAGRKRANVTVTYRFGTSIAINTDMDSLHQ

SEQ ID NO: 1245 - protein, 659 aa, unidentified
  source 1..659: note = uncultivated organism
MASKTRTTPVALVTAAPVRCAIYTRKSTDENLDNDFNSLDAQRESAENYIRAQAQEGWLALPNRYDDGAFSGATMERPALQRLMADVRARKVDTIVVYKIDRLSRSLLDFAKLVEELEQCQVSLVSVTQQFNTTTSMGRLTLNILLSFAQFEREVIAERIRDKMAATRKKGKYVGGIPPLGYDVDRFNKRLVVNAQEAVLVRQVFRRYLELGCAVKLVQELNASGHTTKAWTTQKGALQPGQAWHKNYVYRMLRSPIYIGKVEYKGEVYAGEQDPIIDLTLWNQVQKAIAVPAKSRSNMARAETPGLLKGILRCGHCGTSMAVNFTERHGRQYRYYVCHNASQTAYENCPVKSVSAGIVEDLVKDRLRVVFRSPEVVRQTLDAIRSQQRDERQQIERELEKVREELAGVQTCGQQLVQSLKSTDTSFVRGELERLDRKRVDLEGKQAELEEQLAELAAQNPSLVDVGTELAVLDSIWDNLFPGEQQRLVRMVVDQATLFTDRLELALCGDGVQDVVDLLLAEGGAKVGVTGSRGGRGAGGNPVISIPVVFKRRGGRREIILPADAHDGEASTNKAFLITLARAFRWKDLLESGRFGSVKELAAAVGLERSYVAKLLNLTLLAPRIVEAVVAGDEPGGMSVAELRQGVTARWDDPRWSQN

SEQ ID NO: 1246 - protein, 524 aa, unidentified
  source 1..524: note = uncultivated organism
MPAALREIRPDRVAIYIRWSTEDQGDGTTLVVQQEGCQHYVLSQGWRVTPSLVFIDDGYSGSTLERPRLQALRKAVLAGDVDCVVVYKLDRLSRSVMDTVNLVLGEWDGRTHLKSAREPVDTTSPMGKQFFYMLVSYAEWERNVIKDRTFSGKLRRAKEGKNPGIPASYGYRRAEEVGRFEVDPKKAKVVRWIFRKYLDEWGAFKIADELNRTGVPSPTGLTWHKTTIIQMLKNPIYCGRLVYGRTTTNPRRQRDKSEPVYLKNPEPVVAEAPCPPLVSLSEWERAQALMSQRHRGATGVRSLASEYLLTGFLKCRCGANMASHCSSHRSGKLYFYYQCQGKENHGTHACDCGMTAMDVLDSAVEAKLQEFLQGEQSFQKLLAVRQQKLLRQLNDLESQHRQATTTLEDLEAQMRRLNRDYRTGVLSAASYEENKREVEAERDQLKAQVEELQGRKEAVVRQMREQDYLSSIFASAGHWADLDVPKRKVILRNLLDRVVAFKAPRSREVSIEVVWKFADPSLTA

SEQ ID NO: 1247 - protein, 543 aa, unidentified
  source 1..543: note = uncultivated organism
MKRNGNGNGKVRVARHIRCAIYTRKSTEEGLQQEFNSLDAQRESAEAFIASQKAEGWDCLPDRYDDGGYTGANMERPALKRLFEDVEAGRVDCVVVYKVDRLSRSLLDFARMMETFDKSQVSFVSVTQQFNTTHSMGRLTLNILLSFAQFEREIISERTRDKIAAARRKGKWMGGKPLLGYDLHLAPGGSKLVVNEGEAVRVRAIFDEYLEKQSLIRTVQVLNERGWGTKRWTTRKGNERGGQPFDKVTLFRLLSNVVYLGNVRYKDELHEGEHDPIVDEDAWTRVQQMLRSNGRSGGMHVRNTYGALLKGLLYCKPCARPMMHTYTSKRNRAYRYYTCYTAQKQGWHACPSKSVPAEQIERFVIEQIRAIGRDQSVMSMTLEQARAQALEETASLESDAAIAEREIGRIHVEISKVAADAATNGHAASRLAELHERLRETAQRLTELRDQAEQAQHGMISKAEVDYAFAAFDPLWESLSLWEQVRVLRLLIQRVEYDGANGKIAVTFHANGIRTLGRNSVADQSAFVQAQADDVETNLCATA

SEQ ID NO: 1248 - protein, 504 aa, unidentified
  source 1..504: note = uncultivated organism
MAVAKKAPGHPEPASQKSVGIWIRVSTEDQARGESPVHHEKRARFYAESKSWSVSQVYHLEGVSGKTVLEHPEAKRMLADVKSGHIEGLIFSKLARLARNTRELLDISDFFREQGADLISLQEAIDTSTPAGRLFYTMIAAMAQWEREEIASRVAASVPIRAKLGKPLGGQAPFGYQWQGRQLVPNPKEAPIRKKMFDLFLEHRRVGTVATRLNEAGHRTRSGKLFGKTAVERLLTDPTAKGLHRLNYTTARGGNGVTLKPEEEWVLTEVEPVVSVEVWDRCRSILEERERKGKPASRKPVQIFAGVTYCTCGQKMYVPSNTPKYVCQKCRNKVPVDDLDAVFHEQLKEFVFSPTEIVKYLTTADAAIAEREAELTALEESAGEVRRGMDQVMKLYLAGQISQEAVGREYGPLEARLKQIEDRIPELEGELDFLKIQKLSSDEILSEAKDLYTRWPELEREEKRRVIEQITDRITVGKDEVVIDLAYLPSPSEELATKARNLCR

SEQ ID NO: 1249 - protein, 559 aa, unidentified
  source 1..559: note = uncultivated organism
MKVALYTRVSTEDQAREGFSLEVQRTYLLQYAKNFGWDVFCSISGKDVYMDDGYSGGNMDRPAIQRLLFDARSKRFDMILVYKQDRLSRKLKDLLAILEEFESLGIGYKSATEPFDTTSSAGKMAIQMLGSCAEFERNRLVERVFPGMIVGVNKGHWQGARYAPYGYRYNKEAKKFEVHPEEAKIVREIFAMYLGGKSTSQIAGHYYNLGITSRQGGKFYTKFISCILKNKAYLGTLVWNKRHYDTKQKTRNGEGKGYKYVNNDPSKIVEVPDCHEPIIAQKEFDEAQKLLKRNRTNTIVRFKNNVYHLSGVLRCNECGGTYRGLTLTVNHRTKMRRPWYCCSSKGTSYIKCNNKSVTADAINKQVWDIIDVISKNLHVIEELGDMIKLSATEPEQCYIEQLEAKEKSLNKNLEKQKGLYEVFSEDKINIDIYKDRAELLRNEEKRLRQDVKVIQLKILEKRNAVNLVKATQDFLLKLRSNPNNEQMDYLVKTFMRIIFKGIYIQNQEIVKVDINQPWKMCYEEGLKWLKTQETTPIKAKTKASRGTGSVYYCVPSDAR

SEQ ID NO: 1250 - protein, 531 aa, unidentified
  source 1..531: note = uncultivated organism
MRARVGIYGRLSEEDKDKINKEDESESIQNQKRMLIEYALKNDWDIVDIYIDEDYSGAGVYRPEFDRMIKDCENKKIDIVLCKSQSRFSRDMEIIERYINNKFKEWNIRFISLVDNIDTDKSANKKSIQILGLTNEWYLEDLSDNIKRTIRSKKEAGQFTGSFAPYGYKRSEEDKHKLVVDPVASLIVKKIFEMYRNGNGYTKIATYLNNTNVPSPYEYKKANGSKFVCGNLGREKSYWYSDTIAKMLKDEVYIGNLVQGKTKHISYKNKKSVPVPKKDWIIVKNTHEPIIDMDTWNIVSAKFQNRAKPKKNGEIHMFSRKVYCECCKKIFYAGYSKSGNGNIFQYLTCKSRKSGVYCENNLSIRVDKLEQFILNEINEYIKVYYNSKTLNEKYQKLNTKNNKNEIQEKMKTLEKEKQDLERTQSKKNSYLKKLYEDRIDGFITDDQYRAFCKEYDEELKELQSRIDLLNDEITSLNQKHNDMIDRDKIFSKYKQIKKLDKNILDDFIERIYIGAVDKETNEREINIVWAI

SEQ ID NO: 1251 - protein, 502 aa, unidentified
  source 1..502: note = uncultivated organism
MNYKNCAIYTRVSTDNQAEKEFSSCEAQEQKIKSFVASQNDWQVFKVYSDAGYSGATLERPALQQLISDLKKEKIDIVLVYKIDRLTRSPKDFYQLIEFFEQAKIDFISITERFDTSTPAGRLLRNIMLTFSQFERELTSERTKDKMLERAKKGMANGGLTPYGYMRLDKKLIPHPKEAKEIKSIFEKYLETKSLFAVYDFLKEKGIKNKSGKNFSKTNIAHILRNVVYVGKIKHNNEIYQGVHTPIISDEIFALAQKIHKEKKKNFRVYKNFLFGGLVNCEECGSKMTSCFTNKRGGGKLKRYYYYRCTSTFQQDWQTCSVKQVSAERLENFALENLERISVDKNYLENLVFRINHSSNPELENSEIPHRAGYELTQSCSKFSPEVISNTLKFFLSGLAKKKGIEKNLWVKNFIEKIIYSKEYIKFSLFYRENWENLAAENSPALPKQGGASRRRQERENLISPKNSQFETYSMAPDSVRPRTFSIVLPNLIHQSKKRNLA

SEQ ID NO: 1252 - protein, 530 aa, unidentified
  source 1..530: note = uncultivated organism
MAAERRAIRQADGAGGLPIVRCAIYTRKSTEEGLEQSFNTLDAQREASEAYILSQQLEGWTVLRQKYDDGGFTGANMDRPALKRLLADVESGVVNCVVVYKVDRLTRSLLDFSRIIEVFDRHGVTFVSVTQQFNTTNSLGRLTLHILLSFAQFEREMISERTRDKMRAARRKGKWVGGNPVLGYDIGPQGGVLILNPEESQQVREIFGLYLEYGSLMPVVEELDRRGWRMKSWTTRDGRAAGGRPIAKNSLYNLLTNIIYTGKVDHGGKVYEGEHGRIVDDEIWDRVQSTLGRNGRRGGRNVGNKHGALLKGLVRCASCDVGMIHSWVSKQSRVYRYYVCVKAHQRGWAQCETRSVSAPVLEEAVLSQLRGLGRDPAVLRSVLGEIEQRRAVEIALLGREQADAEAQIKSAAREMAEVAPQAAHTPSALERLAQLQDHARHLNERLADVRGQLERVDDATTDPATVEAALREFNSLWEQLSTSEQERFIRILVDQVRYDGRTGTVTVGFRSMAARDLCNWAADRSQEGCE

SEQ ID NO: 1253 - protein, 543 aa, unidentified
  source 1..543: note = uncultivated organism
MEVFSVGIYLRLSRDDIAFGQAESNSIRSQRELTRNFVCRHSDMQIYDIYADDGYSGTSFDRPAFVRMMEDVAAGRVNCIVVKDLSRFGRDYIEAGRLIQKILPAFGVRFIAVTDHYDSFTADDNETSLVLPVKNFVNDSYCRDISCKVRSHQKVKRENGEFIGAFAVYGYRKADKNKNRLEPDAYAAQMVRNIFAWKLSGMSACVIAETLNAMGVLSPLEYKKSKGENYSCGYATRIGAEWSSAAVMRILSNEIYTGTMVQGKSEKINYKLKQCREKPKEEWVRVEHTHEPIVTREEFERVQKLLAWDCRAAAGRRRAGVFSGFLFCGDCGQPMIRRRNRYKGTEQISYICSTRNKGLGCTRHSISEKELKKALSDGIRVIMRTETAAQVAPQFVAQLAPQLAAQAASQLELELDRICTQEKSFDLLQRNLQEDLKAGVLTQEDFISLWDIYTKRHTKMQEAIRRQKEVIRAFQEKTARLREEPEQMQEFTEAGRDELLAFVERIDIYEDKRICIEFKSRDPFGKEGSDGDIFCRDLCQTVR

SEQ ID NO: 1254 - protein, 516 aa, unidentified
  source 1..516: note = uncultivated organism
MATISNREIRCGIYTRKSTDEGLEKDFNTLDAQREAGEAYVASQKHEGWECLPDRYDDGGYSGGTTDRPAFQRLMSDVEAGKIDCIVVYKIDRLSRSLMDFARIMETLERHRVSLVSVTQQFNTTTSMSRLTLNILFSFAQFEREIISERTRDKIASARRKGKWSGGRPVLGYDVAPQGGKLLVNEEEAYQVRAIFDLYLDYEALLPVVKDVASRGWHNKRWTTRKGREVGGRPFDKNSLYKLLTNILYTGKMTYKDEIHEGEHEAIIGIDAFNRVQRILKRNGASGGRHVRNQFGALLKGIIRCDACGCAMVPTHTTKNKTKRYRYYVCSNAQKRGWHTCPSKSIPAPEIERFVVDEIKAIGSDPALAEETLEQLRRQQEARTIELKAEKAALTREVNRAQDELRKVVERIGRDGTTGARMADLQDRIRSAETRYSEVCAELEAIESEQLDSVQAAQALASFDPLWENLTLREQAKVIHLLVEQVSYHGGDGTVAISFHPAGIQALTQRFEGASV

SEQ ID NO: 1255 - protein, 555 aa, unidentified
  source 1..555: note = uncultivated organism
MRYAIYSRKSKFTGKGQSVANQVQICREYIQFLYRDDEEMQIEVFEDEGYSGKNTNRPEFRKMMAGVAQKQFDVVACYRLDRISRSVSDFSATYMQFRKYGVVLLLASERFDTSSSYGEFMLHISSAFAQMERDLIAERIRDNMLMLARSGCWLGGATPLGFRSEETRKELADGREKSTFWLQAVPEELAVVRGLFDKYLQTQSLTQVEAWCQSRDIRTRKGNVFSAVAVREILANPVYCVADQDAYAWFFQKGCALCGELREFDTKRGISAYNRTAGEGGRQKKRPLTEWVVAVGRHQGAVPGNDWVRTQQLLERGQQRAFAYRPQNPAALLGGLFYCGRCGATMRPRVNSNKRASPNAERTFAYICERKRKSKKAQCQCPNISGNDLDKAIWEQLFDFWENPAGIAACLMRCRPELERGGAQKKAERRRICRQVEGIEKEIKNLIALLAQTNADSALRVHTEQLVKEKDAQMQKCRQVLREMAPPAEAAKEDWAKAEHLAGELRRFAGVFYNAPVPDKRELLRAVIDRVEWDGCRVDIYLAAGLSGEKALESV

SEQ ID NO: 1256 - protein, 518 aa, unidentified
  source 1..518: note = uncultivated organism
MEKITTIILPKDSAPATLRVAAYCRVSTDAKEQELSYASQIRNYTDLISQHDGWELVDIYADEAVSGTKTDKREDFNRLLADARKGRIDRVLVKSISRFARNTKDCLAAVRELLKLGVTVHFEKENIDTGTLSSELMLSVYSSLAQQESVSISQNVRQSCRRRMERGEFITMKPPYGYRLINCGEMEIVPEEAEIVRRVFDAYLSGQSVGRIVDSLIREGLRDRKGNVHWTTRQIYYWLSNEKYIGDTLCQKTYRLEFPFTQKINCGEVEQIYVEDSHPAIISREQFDKVQALRQLKKKHKTRPDGTFPLSQKMTCGLCGEAIYRRVTRGGTSVWSCRNHLRNAGSCPVGPIPESAIYAAFVRMYNKLRLHEGIILQPALGQMADLETALHRENPAMLEVNRDIAQATERNYNISKLRASGLLDANAYSAQMAANTAQLTSLRAKRRKLLQSSDIDEAADALRQTVEMIRQGPERLAEFDEALFGELVDKITVPGNDRMCFRLHGGIAVTEPLMEGRV

SEQ ID NO: 1257 - protein, 549 aa, unidentified
  source 1..549: note = uncultivated organism
MKIAIYSRKSKFTGKGESIGNQIQLCREYISAHFPEARDEEIFVYEDEGFSAKNLDRPQYREMMRNARRSPFDCIVVYRLDRISRNVGDFASLIEELNGMHTAFICIKEQFDTSTSMGRAMMNIAAVFAQLERETIAERIRDNLILLARTGRWLGGVTPLGYIGEKTEITDSEGKKRSAYKLKQIPAEIKTVKLIYEKFLEFQSMTKVATWLIHHDIKTREGCEFRLRAVKDILKNPVYCIADQQVINYFTELGSSVCFDVTETDGKRGLMPFRRTAQSGKQQHRTTPDEWIIALGKHTGIITSEVWLKAQSLIGENAHKTFYRPVRSEVSIFSGLVRCADCGNIMRPRVNSNKRRNPDGSQTFSYMCEFKERSRKSKCTMKNVNGNVLDKLICDEILKFNQPKSTVGRQLDQLMKKSSQTAEDNSAKLTELQKQIDAKQKMISNLMDALAKSEDSSAMFSYTTKEVERLDGEIKALQNEIAELSFLGDENLERHRQLDNILKSLKRFKDCFDTLSTVEKRDYMRQVIDRIEWDGKNAHIFIKRADGKT

SEQ ID NO: 1258 - protein, 569 aa, unidentified
  source 1..569: note = uncultivated organism
MTRSPARAKQIRCAIYTRKSTEEGLEQAFNSLDAQRESCAAYIASQKHEGWSALPALYDDGGYSGGSIERPALQALLGDVQAGRVDVVVVYKVDRLTRALADFARIVTIFDAAGVSFVSVTQAFNTTTSMGRLTLNVLLSFAQFEREVTAERIRDKIAASKAKGMWMGGVVPIGYRVEHRRLVPAPDEAALVRRIFERYLALGSVSRLMTELDRAAVRTPLRRHGDGGRSGGAAFSRGKLYAMLANPVFVGRIRHKAAVHPGQHAAILDESLWQAVQDKLAGNRRSRTLQIAAQSPSALAGRLFDPDGEKMRPSHAQKNGRRYRYYVSRDLVERTVEGGAHGWRIPAGEIESAVAPALAARLRDPEFQSEILRKHKGGADASHAIIARIAEVGARLDQPGSASWRDLLRSIVIRVDLTGAGLRVEASFATPRDSGDADPIDATLKHLPPFTLTAPIELQRRGPELRLVLQGAAARVSRPDALLLRTLIEARARAADYLGPEQRLTVSEVARRQGADVGDVSRSLQLAFLAPDLVASILDGTQALALTAERLKRVGELPLLWDEQRALLA

SEQ ID NO: 1259 - protein, 556 aa, unidentified
  source 1..556: note = uncultivated organism
MDILNVRQLLRQKSIYEIPLRVTFYARVSTDSNEQLNSLNNQVTYYENFIKQNAAWEYVPGYIDEGLSGISTKKRENFHRMVDDAKAGKFDLIVTKEISRFARNTLDSIQYTRDLLSAGVAVFFQNDGVNTLDEDSELRLSIMSSIAQDELRKLSSRVKFGHQQAIKDGVVLGNSRIFGYIKDKGRLIIDEREAVMVRKLFELYATGNYSMKQIENIFWEDGYRNNHGKKISHTTMSSMISNPKYKGYYVGNKVKVIDMFTKKQKFLPPEEWVMFKDETGQIVPAIVSEELWEQANVVLRKRSEDVKNRQGKCNHQNLLTAKLYCMCCGAPYYRKDGKDRQGNLTSKWVCSGKIKNGTASCDSIAIYEDEIKPLLLEVFQDTKLDAEALIKTYTDLYAEMTGDATLTKQIETQKKIIELAEQKKSKLLEYNVTGRISDADFIKMSDQCNVEIKKASEERKELEAQLFSGKEFQKHMDRIRATLREAEKCAKTGVITRSFVDQYIDKIFVTIEEDGRIRLDVKIFTGETTEKYLHRFKVRTGHMSKKMIEAYEQGMQ

SEQ ID NO: 1260 - protein, 592 aa, unidentified
  source 1..592: note = uncultivated organism
MSGHIRCAIYTRKSSEEGLEQSFNSLDAQREACEAFIRSQRHEGWQALAAKYDDGGYSGGTMDRPALKQLISDIAAGKVNTVVVYKVDRLTRSLADFAKIIDQFDARHVSFVSVTQQFNTTSSMGRLTLNVLLSFAQFEREVTGERIRDKIAASKAKGMWMGGRVPLGYDLRERKLYINIEEAERIREIFHQYICLGCVSALKDHLDKGSLRSKLRMGDRRRIGGDRFSRGALYKLLRNHLYAGEIAHKENVYPGDHEAIIDRETWDQVQKMLDENQQGERSRTRATRGSLLTGLLFDEAGNRLTPTHASKGGKRYRYYTSQAIIRRKKGDGSTGRIPALDLERAVVDRVQEFLRSPLEILSAVKEVAGGEGNYEKLLRGASQMAREWVSLLTSEQETLFKSTVDRIIVNGDSIEIRLNLKSLFAALQPEKPDEFEDHNAVDESQVVALSCPFETVHRGKALRLVLGNDQRPSSESTTAIIRAIARAKCWYDQIVAGQVAGIPQLALEYGVSRRYIKKILPCAWLGPQFVEAILKGKCSPQLTLESLVQNLPIRWDGQQSIVERWGFAHKMHQAKTRSDHCISRQENPTSRP

SEQ ID NO: 1261 - protein, 556 aa, unidentified
  source 1..556: note = uncultivated organism
MGSTIEVSKRAIRCAIYTRKSTEEGLDQEFSSLDAQRECAEAYILSQRAEGWTARPKRYDDGGFTGANLERPALRELLADVEAGELDCIVVYKVDRLSRSLLDFARLMEVFDRRKVTFVSVTQQLNSYSPMGRLTLNVLLSFAQFEREIIGERTRDKLSAARRKGKWIGGYPMLGYDADVNTKRLLVNPAEAEQVRGIFVLFLERGALVQTLDELRRRDWKLKSWTTRKGISHEGKFFDRPGLVRLLTNVLYIGEVRHHGKLYPGEQQAIVDKGTWKKVNALLEGRRRGSESGSGSQEPSILKGLLECGVCGASMVPGYGNNHGRKYPYYTCLSLQKRGAKACPGQTVVTSRIERVIVDRLYELAQDPARPELRELLQVSRREWEGLEAAERCRILTRLFERIRYDHRRQQVSLRLASTTSVPETIEASISGRLFASKDRSSASGRQPKLSRLMALALKFEDLLQEGAVKDHTEVAYRGGVTRSRISQILNLRNLAPQIQERLLLEPIPHITERMLHKLTRELDWRKQVARFNELRRLEPVTPTLGTPAAPAPVVS

SEQ ID NO: 1262 - protein, 555 aa, unidentified
  source 1..555: note = uncultivated organism
MPKYQATEYLRLSYTVDRENESDSIANQKKLIEDFLKSNPDIELVSERVDDGYSGILFDRPAFQEMMNDIMDGKINCVIVKDLSRLGREYIETGRYLRQIFPAYGVRFIAITDGIDTANEHIGDDLNISMKNIINDAYCHDISVKTRSALLVKRKNGDYVGACPVYGYQKSEENKNRLEIDEFAARVVRDIFRRKIDGASAQKIADELNQLGVLSPLAYKISRGLPHPKKGFADSPDAKWSATTIIRILQDETYTGTLVQGRQSTYNHKIKDLVDKPSDEWIRTENAHKPIIRRQDYDLVQRIIGLDTRTAPFGDKVYLFSGILVCGCCGACMTRKTNTYKDKKYFYYYCPTGKKHGCEHPVMLKEDDLVTCVLESLQAHINNVVCLDELLDSISEEQLNHELIAEYKEQIADNEAQLADVTRFKTTLYENFVSGLLNKSDYKELKNNYEGRTEILREAIRKLRQQMDSVKSNSNERLKWTQHFKRFATMTELDRRAVIALIQSVRVISKTELKITFRYQMEYEAALAKLARHEETARLQVLMPAMQSKMTREAV

SEQ ID NO: 1263 - protein, 561 aa, unidentified
  source 1..561: note = uncultivated organism
MINKKIYHAAIYVRLSKEDGDAKNAAKAESNSISNQKNLIKDFLKDKEDIVVVSERVDDGYSGSNFDRPAFQMMLEDIKKGIVDCVIVKDLSRFGREYIDSGRYIERLFPALGVRFIAINDNYDSLEGKDQSDEIIIPFKNLINDAYCRDISIKIRSHLEVKRKNGEFIGAFAPYGYKKDDTDRNSLLVDTYAAGVVKDIFRMKLHGCSQDAIAERLNDMGILSPMEYKNATGSNYRTSFKTNERAVWSSVTVRRILENEVYIGNLVQGKQTTPNHKVKKTVQRPESDWIRIEKNHEPVISDRDFAIVQRLLGLDTRISPNQKEVYPLSGLVVCADCGAAMVRKNVSAGGKKYLYYVCSRNKETKECSSHRIAADKLEGAVLELLKVQIGNVLDLQRIMGKITSIPFQELDIKELEKRIEGKEEEIKRCRELRNMLYEDMKDGIVSKEDYMELHEAYTEKRALAEDAVRKMKQEIKDILDSNTGKYQWLDYFAEHQNIGSLTRNVVVELIDCVRVKDKKEIEVVFSFSDCYQEILKSLHHAGCMASYDGHGRIHFEWKEAV

SEQ ID NO: 1264 - protein, 527 aa, unidentified
  source 1..527: note = uncultivated organism
MENVKNVAYGTHVTVIDKIDSEPVKLRVAAYARVSSDSEDQLNSYIAQVDFYTKYITTHEGWELVDIYADEGLTGMETKHRDDFNRMIQDCRDGKIDRVLVKSVSRFARNTQEYILYMRELLRLGITIYFEKENLDTGKMSNEQAVAIYGAFAQMETTGHSQNMRVSNRIRMEKGLFTISHPPYGYRLQGTELVIVPEEAEVVREIYKAYLSGQGKQDIAKALNARGITKGVENGQWCMSGIDYILSNITYTGNQIWQKSFSADVIPFKKVPNRGEKPKYYVEDCCPAIISQEEFDLAQALTQKRLESKSPRTDVDSPFKGHIFCSECGYSCRAKNIRGKRYWMCRGRNIGKELCPVPQVSDEDIAKAIERFCLKLRHARGTILAPSLKMLRELQERELRTNSKISEIDAELSQLTERNHVLATLKAKGYMDPALYLSEQAEVNKRMRDLRRLRRKIMDNTHDDRLIHQTEMMLEYLETMPDTGIGSDSAIFTMLIDRILLAPNGEIQIKAINGMVFTENTGKAVTK

SEQ ID NO: 1265 - protein, 557 aa, unidentified
  source 1..557: note = uncultivated organism
MANETAAIYCRLSQDDGSVGESGSIQTQRTLLTQYCEEHGITIGGYYCDDGWSGTNFERPDFKRMLDDIEAGKINMVVVKDLSRFGREYAQMGMYIEHYFEQKGVRFLSVAENIDSANGLDNLVLPFTNVINSFYARQSSSKTKAAFQARARAGMFIGSRAPFGYIKDPNDNHHLIVDPPAADVVRDIFRMFADGVGYVRMSKILRERGVLNPQAYFNQNNPDYFKSDYWRQPHDWHPTSIRVILNNPVYLGKTVFGRTKTKGFFDKSRVHTDEEDWIVVDDTHEALITQELWDTVHQMMAARRRENGKGEVQPFIGLVKCAGCGSALNVSYDKRKGKYTSFSCWVYKNYGKQRCTSHAISYNALSRLVLEDIRRNAIVAKKYTAKYMEMLVAAKEEKKKADTDRLKRELKAADKRIDELSKILTRIYEDVALERISEERYQAMAPGYEREQALLKAKRDELAREVESSEEVYENIERFLPVIWKYTDIEKLDARILNELIDRIVVHEKELGPDGLKHQRVDIHYKFIGYVDIDGVLSKDETAQLLREVFEDMTATA

SEQ ID NO: 1266 - protein, 546 aa, unidentified
  source 1..546: note = uncultivated organism
MRDTTPTVICIPAKPEVVLASKHQLRVAAYCRVSTDDEEQLTSYEAQKNYYTDKIMTNKEWTMAGIFADEGITGTSARKRPEFLRMIRQCKQGKIDIVLTKSISRFARNTVDCLNYVRALKELGIAVIFEKENMNTLEIDSEILITMLGAFAQSESESISANVRWGIRQAMKEGKVTIQYKYLYGYRKGDDGKPEIIPNQAEVVRKIYDLFLSGTPVRGIQEYLNTSAVPNINGEPKWARSAIDSILTNEKYCGDVLLQKTYIDDCINKKVKKNTGQLPMYLVQNHHEGIISRETFDAAQAELARRSAGKSPSKKNAPTGRSRYSSKYALSDRLYCGECGTRYQRCTWRNRDGSKRIVWRCVSRVDYGNTYCHDSPTLDEEPLHRAILAVINSAVKDKDTIIYNLKSAMEKELAPVAGQQLSLSEIDNQLEQLNIEFSKVLAEASESGDQAVHSDRFREIMQKQTALKAQRNKIQGMLVESGKAATHIEQCRQAAESIPATITEWDEALIRQVVESVTVEMDSKLAVQTKSGTEIFIDIGDVTIKK

SEQ ID NO: 1267 - protein, 543 aa, unidentified
  source 1..543: note = uncultivated organism
MNNENMRTWNATLYLRLSREDGDKEESNSIAGQRNLLRDYLKQHPDIREYAVQIDDGWSGSTFERPSFKKMMEDVKAGKTDCIIVKDLSRFGRNYLDAGEYIEKIFPFMGVRFIAVNDNYDSFREKNASDDLIVPFKNIINEAYCRDTSVKIRSQLEIKRKNGQFLGAFAAYGYFKDPQDKNRLVVDEYAASVVQQIFAWKVAGISPQDIADRLNSGGILSPLEYKRALGMKCSTPFQTNIRASWSAASVIRLLKNPIYIGTLTQGRATTPSYKVHKRIEKSENEWTVIPDSHEPIVSKADFDTVHKVLALDTRRSPDASSVSLFSGMVFCGDCGASMIKKPISSGGKKYHYYVCSANKQDKSCSPHRIRTDVLEEIVLDLVQTHISAVVDMDELLAVADTAPLRTAEAVKVQKQLDVKRADYERLQKLLMSLYENLTDGIIDKTEYMRLKQSFSQRANEAEKQMDALQERLNTIKTHTADTSWTENFKRYRNLSELDRTAVVTLIDRIMVYENNTVEIVFRWQDEFAWQMDIVRQTQLKEAV

SEQ ID NO: 1268 - protein, 548 aa, unidentified
  source 1..548: note = uncultivated organism
MAPSFLDSWGSKMPKVNCAIYTRKSTEHGLDMEFNSLQNQEEACKAYILSQAFNGWEYYKTYSDGGISGGTMERPGLKTLLNDIRARNIQVVVVYKVDRLSRSIIDFHKMMQEFDKYGCNFVSITQSFDTSNSMGKLTLNMLLSFAQFEREVSAERVRDKIAASKAKGLWMGGTPPLGYDLKDKQLIPNPQEAELVNLIFTKYLELGNIQATANWMNQQGYRSKCWQTVSGAMRGRHLFRHGSIQRILGNPVYIGKMPHLAANKVYVGKQAALVPCEIFEQVQSKIGNSKNGLREYRSYIRQKALLADKLFDDKGNPYKLTSTTKKGQKFQYYFIRNGIHIPVVQLDGFVLDTICRTDLSSLDLQTDSSQIGVNEAKTCLKRAVCIKTGTDCYLQLELDKNAFLDVCRKNPMQEPRQNDLLVPDIGKNTITLRATFYIDNVSSTRLQNGTANNILTVRQLNESLVRGLARAWQCKKMIGSGMTSREWEKASGMNKRTFARYLNLCYLSPRIVADILEYRNPRNMSLKELMNLAEGNVNFLGQEKGWNI

SEQ ID NO: 1269 - protein, 562 aa, unidentified
  source 1..562: note = uncultivated organism
MTPRRPPGSAVPAAPADKPAALRCAIYTRKSDSAGLEQEFSSIDAQRETCELFILSQGHRGWKALPDRYDDGGFTGANLDRPAFRRLQVDIEAGKVDVLVVHRVDRLSRSLLDFVKLMETFTAKGVTFVSVTQNFTTADAMGRLVLNLLMSFAEFEREMIAERTRDKIAAARRRGMWTGGQVALGYDIVQKKLVVNEAEAIVAREIFAAFIEHRSIVAVIRLLNERGRTTKRHQAESGRTRAAHPWTKDAVLRVLKNPIFAGLIRAGEKLVAGAHQALIDMGTWEKAQALLSGRAPIAAPVRNPAYFLRGILRCAACGAAMTPASTRREDAEYRYYRCLTRDKEGVGACPTKPLPAGPIEDHVVGRVREATADGRLAADVAARLAERVGAERAELQAERQTLPGAIARLSAEGRRLAEAAGATDGAARRLIEERLRNVGEDLAAREARLAAVERRLGALTSLEVEGAWVERALREFDGMWELLTLDNRARLVRAVVTAVEIDQAAGQVTVRLADLSDVAGRLRPSAAPDGREGAEALESPPEPAAGRRGAAQRAPGSEGARL

SEQ ID NO: 1270 - protein, 528 aa, unidentified
  source 1..528: note = uncultivated organism
MDQNVNYYGIILLLRQLRESGSFSEKELRRVAAYTRVSSDSDDQLNSFAAQNRYYAELISGKAEWRMVDIYADEGITGTSAAKREDFQRMMADCRRGLIDQILVKSISRFTRNTKDCLEAVRELKELGVNVRFEREGIDTANVSSELITAIYAAFAQKESESISGNMRWSNRRRMEAGTYLTPSIPYGYRIINKEIVIIPEQAVTIRKIFQWYLDGNSKDRIAHRLNEAGILSGQNKAWGRGGIHYILTNERYIGNSLWQKTYTSDTLPTTRHKNKGEHEQYYAVGTHPPIIPREIFDQAQNLLQKRETDYRKRNCSGSHPLTGKIDCGCCGSTFRRKEYRGEIRWVCMGHERSGKDCPITPISGKTIYEAICRLYYKLKHQSLPILEQMLEPLQTIRDRRLLWSEDIVSLNKKISELSSQNQTLAFLKQNGLVDPDIFISKSNELTRQLRQTKLDKEKLMAAEGDATAQRTRELIALLEDGPDFLDRPDAELMGELVEKITIESNDALRFRLHNGLELREHIERTVR

SEQ ID NO: 1271 - protein, 532 aa, unidentified
  source 1..532: note = uncultivated organism
MAERKRCAIYTRKSTDEGLEQSFNSLDAQREACAAYVMSQAHEGWELSSEHYDDGGWSGGNMERPALKQLLADITAGKVDVIVVYKVDRLTRSLADFARIVEELDRAGASFVSVTQAFNTTTSMGRLTLNVLLSFAQFEREVTSERIRDKVAASKRKGMWMGGPVPIGYRLENRRLVIEPAEAEIVRLVFKRYLALRSIGALVEDLSGRGVRTKMRTYKDGRQVGGIHFTKGMLGHFLKNPIYLGKVPHRGELHDGQHDAIIDVKLWDAVHALSKANGSDRRLGRKLKAPSLLTGLLRDPDGRPMTPVHTTRQDRRYRYYVSRLAIGEDPNSAWRLPAGDLDRLVVGLIRDWLLSGDAGEGTECAQEIADRVADRRALAIKLPVLSTPEQREVLLSLHPQVAVHADSISIKLGDDVELRCATKLIRKGMDLRLALPPDGGTAAREPAPVLLRLVAHAKAAKTLLVDGKPAPSVAHYGKRHLWQLLRINWLAPDILTAIVNGTQPADLTGRRLLRATDIPLDWGAQRRLFGFN

SEQ ID NO: 1272 - protein, 595 aa, unidentified
  source 1..595: note = uncultivated organism
MGNDDLAKIRNDVRKYVIYSRKSKFTGKGESVENQIEICKAYIKSKFDINIKDEDIIIKQDEGFSGKDVKRPQFQEMMKLVKDKQVKMIVVYKLDRLSRNVLDFCEMYNELELYDTKFASVSESFDTTTSMGRAMLMITMTFAQLERETIAERIRDNMMELAKTGRWLGGNTPMGFESEKMEKFNINGKKVSLYKLSPINDEIEIIKLIYDKYLELKSLTTLETFLLNNNLKTRRECDFARWGLKKILTNPVYAIADKDMFNYFKDNDMDIFNEEIDWDGTYGVMSYNKTSKTKTGSVKTKDKDQWINAIGKHQGIIKGKDWVEVQTLLNSNQNKAYRLPVKNNSILAGILRCEHCGNLMRPKLKDTTLPNGDRKFNYICDLKMRSRGKLCNCPNVNGNEADKLVIDGIKQLAKPTSEFYQELLKVIKDENYGKNSQTNELEVLERKHNQNLASIKNYISRIEYVDEDLLDDVQNKIKDLKQKDKEVVAKIQELKAEQPDSYTDQETAKMLIYILDNYMSNFTELDLLSQRNFLKLFIGNCSTDGKDIHIDLIGSRNHTTTYQPVFEGSENSETGTHGGQIVLLSDSSEWNFNVL

SEQ ID NO: 1273 - protein, 521 aa, unidentified
  source 1..521: note = uncultivated organism
MNSNITVINQIRIEEQEDKIRIAAYCRVSTDSEDQQNSLMAQMRYYENFLADSETERLVSVYADEGITGTRMDKREEFQRMLKDCRRGKIDRIIVKSISRFARNTKDCLSVLRELKLLGISVMFEKENIDTANITDEIMVTVMGGLAQEESASISNNVRWGIRSKMRNGTVKFHSAPFGYNLYDGDLKINPREAEIVKSIFKMFLSGMGYDSICRELNESKVIKNDKETKWFLASIQFLINEMYIGDSLWQKNYNTSMPYKKVRNKGELEKYYINNTHEAIITREEFEKVQELIEQRKHPNKNLINNYPLSKKIYCGKCGSLFKRRFINEKSYWVCREHYYNAENCQIKQISEQAFYTAFTAMYNKLKVNYRVIFTPMLTQLQELKNKKYGGNKQYIEINKEIAQLKEQTHVLARLKTKGFLDESKYIEQVTEINARIEKLSRELRKIVRCDDEDEMIERIKEIASIIENGTDLMMGFDDVMFESLVDKIVVKNREEFEFNLIGGLKFTERISNVLCNQKT

SEQ ID NO: 1274 - protein, 507 aa, unidentified
  source 1..507: note = uncultivated organism
MSTSPRIRCAIYTRKSSEEGLEQSFNSLHAQREACESYIHSQRHEGWQVVREAYDDGGFSGGSMERPALKKLLEDIARKAIDTVVVYKVDRLTRSLTDFAKIVEQFDKQGVSFVSVTQQFNTTSSMGRLTLNVLLSFAQFEREVTGERIRDKVAASKRKGMWMGGVVPVGYVVKDRQLIINPTEAEQVRGIYRMYLKFGCVSKLQEYLDQAGVRSKERTSRTGRRTGGAVHSRGALYGMLQNHMYLGKVHHQGTYYPGQHPAIVDQELWDKVQAPLAANLQAPRRRPRSVSKSLLTGLLYDPSGNRFTPSHAAKGARRYHYYVSQAVIKKPGRATDGPVRLPADELEELVISQVQSFLQSPQRMQNVLCDPTAGSVEIQRAADCARKWPAATVAQVRAVVPSVVQRVVVRDGLVELQLSKSAIREAVEFCRSQGLALSTLGRHLRKQRSKHSKSRSKGVERVRLMPVELAAPDASAIVLSINGRRVEVGSGFDAATLAQLVTVLERL

SEQ ID NO: 1275 - protein, 541 aa, unidentified
  source 1..541: note = uncultivated organism
MSRTIAPKARAQTYRTALYARLSVDDRSIGTSYSISNQINLMSDYVGGCDDLEACGIYADDGISGSTFERPDWIRLMSDVQAGKIDCIVVKDLSRLGRNYLETCRLLDRELPALGVRVIAITDNYDSACEKTASDYITVPVKNLFNDMYCRDSSVKTKASLSAKRRRGDFTGSFAPYGYMRGTGPNRHKLVVDEEAAGVVRDIFDWRVMGLTPAGIAERLNVADVPCPFEYARRRGQYRSANFVHKCTPSWDARIVIRVLENEAYIGVMCQGKTYKPDFRSHVVLPRDQSEWDRVEGTHEPIVDAATFALVQKLAERDARRSPKSDSLLPFSGFLFCADCGATMARRTVRNKSFVRYYYTCETHRKDRACCSMHKVWESALEESVLEAVHACATATLDGMAAHGSSFQHRRDRKADLLRRAQAADSAIERAKELRLHLYADFADEVIGRDEYQDLARGIDARLASLTAERTQASRDIAQLEGGADVSWHDLLKRHRSCSRIDRLTVVELIDKVLVSEGGDVEVIFRFGDPYRTSGVGGDAA

SEQ ID NO: 1276 - protein, 541 aa, unidentified
  source 1..541: note = uncultivated organism
MKIQCAIYVRKSSERGLDMEFNSLDNQELACKSYIASQAFQGWEYVKTYSDAAISGGTMARPGLQEMLNDIRDGKIKCVLVYKIDRLSRSIYDFKRMMKEDFEPHDCNLVSITQSFDTSTAMGKLTLNMLLSFAEFEREVASERVRDKMRATKSKGLWVGGVPLLGYDIQFGKLVVNETERETVNKIFNTYLASHSLLDCRDRIAALGIHGKQWTTKKGEIRGGREMTANIIERILKNQIYLGKIPNKSTGEVFDGQHPAIITQELFDAVQQKLTNNNNHKGRIQYCRGGLLFHNMIYTADGAVFKNKTGNKGLRQYKYYKCGTISLPAGDFDTIICNNVRDFLNSDMEQLPDTTRLTLKQLEYSDELARALIDRIVYHEHKLTIFINIANLDKLGAFRKDGYINTQTTPMEYCQSPDGKQIIIEQIVYLSSHTCINHRNAGCSRDLLTKAENATMLIKALAYGWKYKKAYESGIGVKALATTEKRDQRTIYKYLNLAYLSPRIINDIMDSKIPPHINLQTLFQIASKYEDFADQERVFYC

SEQ ID NO: 1277 - protein, 529 aa, unidentified
  source 1..529: note = uncultivated organism
MAIARKVTVIPAVEVFIPTNIESNSRLKRVAAYARVSTENEEQLSSYEAQVDHYTRYIKTNAEWDFVEVYADEGISATSTKKRDGFNRMITDALEGKIDLIITKSVSRFARNTVDTLTTVRKLKDKGVEVYFEKENIYTLDSKGELLITIMSSLAQEESRSISENVTWGQRKRFADGKVSLPYKQFLGYEKGEGGLPKIVESEAKTVRLIYKLFLEGKSTSWIAKYLTEHKISSPAGKDKWQETTVRSILKNEKYKGDAMLQKSFTVDFLTKKKKINEGEIPQYYVENSHPAIITPEIFELVQHEIKKRKNSKGYKTGGGCFSGKILCGECGSFYGSKVWHSTSKYRRIIWQCNSKFKNTEKCNTSHIYEDKLKQAFIGAFNSILKNKDEILQGYEAIIQALTDTSKLDKESAKFQNEMEIVTEMLRKCVKENSHSALNQEEYEERYNALVQRYESIKKGLEGINEKRLERSCKKENILDFVKEIEHREGVIIDFDEELWNGVIERVVIHSGSEITFIFKDYMELECNI

SEQ ID NO: 1278 - protein, 564 aa, unidentified
  source 1..564: note = uncultivated organism
MSKIIRCAIYTRKSSEEGLEQDFNSLDAQREACGAYVLSQVSEGWKLLPDFYDDGGISGGTLERPALQRLLADVKEGRIDIIVVYKVDRLTRSLLDFAKLVETFDDAGVSFVSVTQSFNTTTSMGRLTLNMLLSFAQFEREVTAERIRDKIAASKAKGMWMGGIPPLGYEPDGRSLRIVEEHAVLVRDIFARYRRIGNVRLVAEELAREGITTPRRQTANGKSYGGCAFTRGKLYHLLRNPVYAGDIAHKDKIYPGNHPAIIPREIWDEVQQQLTENVRGTRTAREASTALLAGKLFDAKGETLIPVHTSKPCAKGDTTTRRRYRYYVSKAAHHDAASSPRDSMRIPAKEIEQVVASELAKALADPLALARQLKIDISPAQFARVSNQLEPLRTELGHLRRSSIKHLIDLVTIHPDRLELVISAQALADMLDLHLTPDAPSTIKHMANVRLTRSGQSLRLVDDSGIPAGSRAADPTLLRLLAQAHQWWGILSRGEVDATRLANQEGVSVSWITRVARLAFLSPQVVEAILAGKAPAALDGKALLATGVIAPHWSEQARRMLVQK

SEQ ID NO: 1279 - protein, 664 aa, unidentified
  source 1..664: note = uncultivated organism
MLYIYTRVSTELQLDGYSLEAQKERLRKEASHRGMRIVGEYSDEGKSGKNVAGRPEFRKMLADIKSGKDNVDYVLVFKLSRFGRNTADTLNSLQYMEDYGVNLLCVEDNIDSAGASGKLMISVLAAVAEIERENIKEQTMAGRQQKARDGLWNGGFAPYGYKLVNVDGQKSKMLVVDEEEAKLIRLIYEKYLQGMGVNAVAKWLNENGYTKTVRQNGTVPNISAHFVTNVLDNPVYCGKILYGRRRTEKIDGTRNEFHVVKQDKESYKLYQGQHEAIIDEDTWYRVQVKRKKNAFKREKTHSLLHEHILSGIIKCPVCGSSMYGVVNRKKKKGSEEFYTDMWYYLCKNRKMVSGHLCDYKKHIRQDEINAEVIQLVKYVFCGENDMKDQILKKLGSDDSLSELLQEKERLAKEHEKLDSKKSKQLRRINELDIDDELYDDLMKTYRAGVQEINEQIAIIENQMYQNDLSIENAQGENLSAEVYKRIIDEMLDHIDDMPDSDKKLMMNLLLEKVEIYEEKQKDGRWVKSVQFKIPLNVDGKLVDTMFFDDEDTENSLSNEKHVETIVLLSKGKVDSKKIRVEFSLEDMDMSEFQDGATYPQIKEYVLEHTGLKVSNLYISQIKRKCGIGVGKNYNLPKSEDSRQPQCPPEKEKAIREAFKYFGMI

SEQ ID NO: 1280 - protein, 521 aa, unidentified
  source 1..521: note = uncultivated organism
MSKTTKTNGSLAMTPQVITIPAIEREQTRKLRVAAYARVSSDSTDQLHSFAAQNAHYSKLITDNPEWEFVEVYADRGITGTSIEKRDDFLRMMEDCRRGRVDRILTKSVARFARNTKESLEAVRELKLLGVSVCFEEQNIDTGAVSGEMLIAIFSTLAQKESESISEKMRWSYQKRMQKGHFNTCQAPLGFRLNGRELEIIPEEAEAIRRILNEYLAGKNSLDIEAMLNQERALGLKWKHKTIDYILQNERYAGNALLQKRYTTNTMPFKLKRNHGERTQYYISNINEAVISQDIFDRARFLREERRKRPGELHSQMSRHMRCVCGSRIRAKHVNARWYWVCCRHDETGTCPQMPIPEEQVEQAFLRLYFKLKHRGGDILTQLLSDLRAARSGALLWSEDIVALNKQISDIASQERLLAQLKQQGMVDPDIFISRGNLLAERRRELKLKKERLIKAEEDDTIQQTQELLDVLNAGPDWLDAFDEELFCELVDKIIAADNEMLRFRLINRLEVTETVERTKR

SEQ ID NO: 1281 - protein, 550 aa, unidentified
  source 1..550: note = uncultivated organism
MKKIRCAIYTRKSSEEGLDMEFNSLDAQRDACEAYIKSQKHEGWVLIPTQYNDGGFSGGNMERPAFKELLEDIKAEKIDIVVVYKVDRLTRSLMDFSKIIEVFDAHGASFVSITQQFNTTTSMGRLTLNMLLSFAQFEREITSERLRDKNQATRQKGLYVGGRPSIGYKRDPNVGNIVIDEEQAWLVRLAFSKYLEFKSVNKLHRYIRDEVKYRSPKGNVYTKGALTHMLKRKIYIGKLEYNGKVYDGVHEPIIDEETYNKVQEQLAVNKQHELAYMKPAHTFSLLCGKLFDDKGNYMSPSSSTGTKNKKYKYYISQAIIQNREHESGSLDKISAPEADDAIRRVVLEYLRDVKNIQPLFEDSSIKMQKQILKSLSTLEIHDRAVRAVMQKVTVSRDYIELELNRKAIKRVIEILNFDEEFCVQVDNEDIVTIKKEIRIVPAPRRGGKKILFDGDEMYNLSLVQAITRGLYYYRLWEEGRLSEKEKQSSYVRRLMSLRFLPPQLVEDILNGKQDPLLTIEKLVDMAKIENIGRGVNRGANTRGVKGRGRW

SEQ ID NO: 1282 - protein, 559 aa, unidentified
  source 1..559: note = uncultivated organism
MPRVSKRKKIENTQPQCRYYRTYLYLRLSEKDGGHGRKDSIYIQKQICIDHAKKHPELLVMKTLMDNGVTGTNFERKGFEQLMEAVRGGKVDCIIVKDFSRFGRDALDAVDLIDTIFPTLGVRFISVLDQYDSENPACTNERVNNILKHFMNDYYAREVSEKLVQAHKLSREKGEYWGSRPPYGFERSAENSKALVPEPVEREIIRKIFYWYVFEGMSSYEIARELNATHVLVPSESYDIRHYGKSKNKRKIYWTSECIRRLLQNPIYIGAAVFGKTKQMLSKNIPLHMIPKEQWEIKENVWDALVEKSVFEEAQKIGVQRWKDYLPKWSSKMDENRCANGPLLGHIYCGCCGRRLARSRKICDESQVRFEYRCRTSMFTKEPGCVTVLREKYVMEALSSALKTQIQLAIDFQQRYGMEFYSSLKRETDQNVKHAREKYEGYGRKLEQLFEHYATGILDKDEYLEIKNTYQTEKAQAHDTLISVQNHSHEILDRLRAKMDWAEALVRYQNFTEVNREMVECFIDKVIVRSAFEITVIFWFGDIFDQEISQSERGDSYAV

SEQ ID NO: 1283 - protein, 502 aa, unidentified
  source 1..502: note = uncultivated organism
MLKTYRTALYERLSHDDGTECESESILTQQQMLEDYCKTHEELIPVRHYTDDGYSGVSFERPSFQKMIGDIEQGFIDCVIVKDLSRFGRDYISMGNYLERIFPRLGIRFIAINDHIDNISGKYTMLLPIINLFNAQYSKDISQKVRSAIKTKQQSGCFTGAYAPFGYMKDDANRNHLVIDNEAAQVIKRIFDMYLSGMGKTAIASVLNSDSVLSPKAYRSHGNKAGSVTGDGTMTPWNILSIDRILRNPVYAGDMPVSKTTRIGVCGKKRLNSQHDLEIIESTHEAIINREIWIDTQRLLADRYCNAFPSSESKALFSGMLFCGICGCRMTSVNVNNKRVYYCRRYKTSGASSCRSHHITENKLKEVVLEDINSQIRHIEGIESLFAKIEKNGTATDSSAKASNRMALLMSSKQKAYEDYKDGMIDIEAYLTAKAEIDERISAARNTLSKILDMESKKSQWVDIFKTKRELSELDRTTLQTMVERIVIDGGESIEIWYKFKG

SEQ ID NO: 1284 - protein, 556 aa, unidentified
  source 1..556: note = uncultivated organism
MSEYMNTASGILYNAATYSRLSDDDADKGGKLESDSIVNQKEYIREYLKSMPEIRICSERADDGFSGVDFFRPDFQRMMEDVRAGAINCVVVKDLSRLGRNYIDTGRYLQEFANLGVRFIAINDGYDTANLQGQASTILLPIKNLMNDSYSRDISIKIRSHLEVKKRKGEFVGAFAGYGYRKDEADKNRLVIDEYAAAVVRDIFKWKLEGMSQQGIADRLNDNGVLSPAEYKRSLGMKYHTGFKSNPHAKWTAVAVGRILRNPLYIGSTVQGKTGRPNYKIKTLTPKPQESWIVVDNTHEGIVTEEEFQTVNGLMRKDMRIPSSETTVYPLSGLIFCADCEQNMVRKTVPAKGRKYFYYTCSTNRADKTACTTHNISEPQLMAAVEAAIHTHIESVINIEKTIEFIAALPEQTTDAQKVDRQIEKLKADHEQYMNFKMKTYESFISNLIDKETFQNYTAIYNDKCEEIERAIAKRQAELEAILNAGNPHNDWIEHFKTFRFKDNLLDRTCLIRLIDRILIHEGGRIEIIFKYHNEYKAALDYIEQKIKDENTKEAV

SEQ ID NO: 1285 - protein, 602 aa, unidentified
  source 1..602: note = uncultivated organism
MRKNAESIAIYSRKSKFTGKGESIGNQVELCREYVRNFFGEEYVDRCVVFEDEGFSGGNLNRPAFRDMMEGVRKHRFKAIVVYRLDRISRNISDFTSLIDELTKLEVSFVSIREQFDTSTPMGRAMMFIISVFSQLERETIAERIRDNMHELAKTGRWLGGNAPTGFKSEAVSKVTVDGKTRKSFKLVPIPEEAEIPKLIFDLYTETDSLTAVEAELLRRRIKTKQGKDFTRFAIKAILQNPVYMTADEAAYDYFTQRQADVCFPKEAFDGKRGIMAYNRTDQEKGKTTILLPVSQWIIALGQHPGLVPSSQWIKVQESLERNKSKGYRKPRNNEALLTGLLFCSCGERMYPKLSKRVTADGKPIYTYVCKMKERSKRQRCNKRNANGNLLDAAIIEQIKALTEHDSSFLTQLEKSRQFYTGNREQYETQLANLRTEYAENEKKVAGLVDALSSMGESVARVHVTKRIEELTEINREIENRIHELEGLTSANALSDTEFDLLRQMLSMFRQNIDEMSVEEKRAAIRTVVRKVIWDGVNAHVVLFGAEEGEIEYPDMVSRYTDMDDESMEEEPLEAYSDVDYGEFDDEYADDASKTSWREDSK

SEQ ID NO: 1286 - protein, 555 aa, unidentified
  source 1..555: note = uncultivated organism
MQTLLEKPEVPGITQKTIRCAIYTRVSTEEQAKKTFSSLDAQRQTCEDFIRSKATQGWVLYPERFEDPGLSGKDLNNRPGVQRLIKAVKDGKIQVIVIYKIDRLVRNLIQQLELTTMLGEKGVKLFAEGQEMDFISPGGFMTTSVLGAAAQMERMMTAQRTRDKIREAKKQGMWCGGHIPLGYDRSDAKELIPNPDEAVQVKAMFDLYLKEQSLDRALKLINAKYQTKEWTTQEGRRIVGKRFSKTTLIYILKNRLYLGQIPSGGQWGKGKHEAIVDEATFDKVQKLFAQNGHSRTSSARLVAKNKQGLLLKGLVRCEACGSVMTSYHSNGRGNQRYDYYKCTKSQHEGIEACPVKQVPARQLEQLVVDRMAELAGDPELVKKAVKAMVHNSANRLPALKAELVETSAKHRKIEDQANGLLQGFSGTAAQGNGFVVRRLNELEAELKTVQEQEARLKMDIDAQKTQAVDPEAARKSLMAFQGLYAHLETEEKQQLFRLAVREVRYDGIGHQIKLSLHPWGDEGSFGDSGVKAVQFGSPTWTRTRNPSINSRMLHH

SEQ ID NO: 1287 - protein, 565 aa, unidentified
  source 1..565: note = uncultivated organism
MKRRREEDQRKSPADKLGGRKIAVYSRKSKFTGKGDSVENQIKACHDYLRLHFSDISEGQVIEYQDEGFSGKDTQRPQFKAMMDACKRGEIGLIICYRLDRFSRKTLDFLRISEDLENWNVSFVSINDHFDTTTSTGKAMMTMVAAFAELERETIQERICDNLLALAETGRWLGGIAPTGYRSEEVLSHDKRKQYKLTLIPEEAELIRLIFRLFMESNSILSVDKYLLQNGIQTKNDRAFSRHTIKAILENPVYMIADQDAWDYFTRLELEIFSSQTAFNAKHGMMVYNKTSQSKGRGNELLPMEEWVIAVGAHEGIIPGCDWVRAQNMLAQNKSKSYHKPKSHHALLSGLLYCGECGAYMRPKLSQRKNENGALVYAYLCEKKERSNGKLCSMPRPNGNMLDALVCDEVKKLAETPEIFQERLEYYRQQLADHSGEFADEITSLAKQISELDRQIENLMMAVAKGDSQGYLSKQIDKLHERKSVLEERASEIKSLTREYLLPENEVAILVEMLISFAKTFDVMGIEEKRAALRRVIQKVEYHSNEEIKIFFTGYKFEPQGEDSK

SEQ ID NO: 1288 - protein, 557 aa, unidentified
  source 1..557: note = uncultivated organism
MKKLIFAIYSRKSKFTGIGESVENQVELCKKYIEDMYRHEFETETIVYEDEGFSGGNMQRPKFKEMLSDARKRKFNILICYRLDRVSRNVSDFSSVIEEIAGYGIDFVSIKERFDTSTPMGRAMMYISSVFAQLERETIAERIRDNMLELAKTGRWLGGTTPTGYRSQAVSKKTLDGKQRKLFKLVEVPDEKATILLIFQKYLELKSLTALQAYMLNAEIKSKNDKAYSRFALRAILSNPVYAAADQNTYRFFHSRGIFIYSDKSCFNGEYGMMCYNKPRQNIKAGDRFRDMSEWIVAVGKHKGFIPGQQWVEVQELLMKNGDKTYRKPCKNLSVFSGLVKCGVCGENMRPKIHRPDSDAFSYVCQKKENSKCSLCNNKNIPGEHFDKTMIEFIWKAVEERKGVFDELIKVIDGVMGDHNEQKENEINAFENSLSKNRQAITNLIDKLKYIDDPAISADILNEVKKLKEKNQQLEKRIDLLSQTKKQTDQYKNTAAMFQTIVSHNLNLLDSLDIQEKREFIRLLIEKIIVNGQDVAIYFLGNSSSNAALLSMSEDCK

SEQ ID NO: 1289 - protein, 614 aa, unidentified
  source 1..614: note = uncultivated organism
MGFEIAKYFDPADKRKIAIYSRKSRFTGKGDSIGNQIEDCMTECRRRAEDTGTVLSDDDVLIFEDEGFSGGNMDRPNFKKMMKAVRENQIKVIVCYRLDRISRNAGDFANLLNELEDLKVGFISRKDGFDTVTPTGRAMMMMVSVFSQLEREVIAERIRDNLTALAKTGRWLGGQLPTGYKKASTEQFTDHEGKIRKLAKIEQIPAEIEIVQKIFKLFIQLDSVTRVEAALREEKIRTRRKMDFTRHAVKDILTNPVYMIADTDAYEYFISMGTTVYSEKSEFSGSFGVAAYNKTKQATGKRKLFNPITEWIVAAGQHQGCISGSDWTKVQVMIQRNSKKSPIYKKKKTLSDVSLLNGLLVCGKCGAHMRHKLSDRVHKEFNEPTYDYLCLTKERTRRQECNCPRANGNILDRKVCEEVRRMSMDGSEFLFRLDQAKRQIRGKSEEQEKLLESLRAQVSKDESLISNLVLSMATGGEDSFVPNEYVKQEITKLDQQIKDNKQKIAELEALASNHVLSDEEFNLLRNMLASFAASFDLMSAAQKRVALGTFIDKVVWDGETAHICFWGSEGAVTALPSEKDSELPASEAEKGNSGDLVYQYTSPHTSLIWPPCPH

SEQ ID NO: 1290 - protein, 589 aa, unidentified
  source 1..589: note = uncultivated organism
MADVHPIVIYSRKSKFTGKGESVENQIEMCRQYIRLQFGDDAARQALVYEDEGFSGGTLERPQFKKMMADAKEKNFRAVVVYRLDRISRNIGDFAKLIEQLNRMKIDFISIKEQFDTSSPMGRAMMYISSVFSQLERETIAERIRDNMHELSKTGRWLGGNTPTGYESESVSHVTIDGKTKRACKLKILPEEMGIVRLIYDKFLETGSLTKTETYLLQNGCTTKNGKQFTRFAVKGILSNPVYLIADEFAYDYLTKNHVELFAKQSEFDGVHGIMAYNRTLQQPGKAHQIRPMQEWIVSVGKHRGVIEGKAWVKVQALLEQNKSKSYRKTRSNVALLSGLLVCGNCGEYMRPKLSKRQNTKGEVIYTYLCSMKERSRGHVCSMKNCNGNTLDADITEQLKHLSENGFEFIRQLEQSRRALLGGRQSCDGEISGLEAEIAANEEKIKGLVSALGKSSGTSAESYILQQIDELHGKGEGLKRRLAELKEQAFGRALADIEFDLLARTLSTFKDTVDKMTVEQKRSAIRTFVKEIIWDGTDAHVVLFGSEYEYEFPKTPVGVGNQVAGSKTEENLAEGAEGGLAEPSGADSK

SEQ ID NO: 1291 - protein, 539 aa, unidentified
  source 1..539: note = uncultivated organism
MNKQQHYKAALYCRLSVDDGNYGGSASVSIETQKVLLEQYCKDHSITDYTFYCDDGCSGTNFDRPSFRRMYDDIQNGKINLVIVKDLSRFGRNYVETGMYVREFTDNNIRFVAADDNYDSLVNGDDLLFPIKNVVNEMYARDVSKKTKAAKKAKARDGQFIGSKAPFGYKIDPSDKHHLIVDEPAAQVVKRIFRLAADGIGYNKMAKMFREEKVLTPIAYFNKNNPDYFKSDYWRKEFDWHVTSIRAILENEVYLGQLVYGKRRNKSIKSKEKVKNPKEEWIVAENCHEPIITQELWNTVHRILSAKHRPAKTGEVQMFAGLLYCADCGHCLTYSQKQRKDGTYHGSYSCWMYKTHGKEYCASHYITFDVIYDIVLTDIRKNLFRYRYDSKKFGEFLSSKYKSMTDKAMKRLETEYGQKQRRCDELNRILCKLYEDNALGKIPDSRYELMTAEYETEQAEIRKTLPDLATQLDELKRGADSTAKFINVIRKYTDVEKLDAAILNELIDKIVVHHEEKSDDGRTYQQIEIFYRFVGKLDN

SEQ ID NO: 1292 - protein, 566 aa, unidentified
  source 1..566: note = uncultivated organism
MTPEARSSRASEVRKAKFRCAIYTRVSSDAGLEQDFNSLDNQREAAEAYIKSQAHEGWILSSQRYDDGGFSGGSLERPALQSLLDAVRQRRIEVIVVYKVDRLTRSLADFAKLVELFDAHGVSFVSVTQAFNTTTSMGRLTLNVLLSFAQFEREVTGERIRDKIAASKKKGLWMGGVVPLGYRVENRALLVVDEHADFIRAIYRRYLELGSVVRLKAAFDAEGIKTPIRVNGTGRTTGGACLSRGHLYWILSNPIYIGRLKHKRQVHTGLHQAIVDEATWQQVQARLASQTQPRRGAMKDEQSFLAGKLFDDRGNLMGASFAAKRTRRWRYYVSRAALTGRAQDVGAIARVSAPKIEALVASAVQEQLAPREGGTTPKCESSLSDRASNNASGPTRRWGPPDTQITSAIERVTLGDKSIEIVLAEAAAIDERSRTIILEWMPVSSRRRREIVQTAESSGPQPMRAMRAGARNVFVRALADARRWLEELTEDSGASVAAIAARKRKSERTIRMTLSLAFLDPLLASSALEGELPRGFNRTRLIDLPMLWSEQWQVVGLRPPAVSAPV

SEQ ID NO: 1293 - protein, 553 aa, unidentified
  source 1..553: note = uncultivated organism
MQSKQEQLNNTGLYLRLSKDDERVGESLSIDNQRIILQKYIKDRCWNLVDEYVDDGYSGTNFERPEVQRLLDDAKAGRINTIVVKDLSRFGRNYIMVGQYLDYIFPAYGIRFIAISDNVDTADRNSTGMDMMPIMNVFNEWHSANTSKKIRAVLEASQKAGKYTSGYYPYGYLVGGDDNRTAIIDEPAAEVVRRIFQMRIEGASPYRIARALSDEGIPNPTLYRTKKDGGKINRQIQPWWSHKTIRDMLADPTYKGCTVQHRRSTVSYKNHRTYWRPQEEWIVKENAHEPIVSNEVWDKAQEVTKSVSRTKYTKKGVSHPLSGFLFCADCGQKMRISYSKTKLKSGKEYNCECYICRTFANLGKNYCTTHAIQRADLEALVLADIRSKLNFVLEDEAAAREEFLKGRAKRTAAARVADNKQLKAKRKRMEELDALIQSVFEDKVLKKMPENLCNSLCKKYQAEQETLKAEINALEKKLQEESKDEADVEEYIRRIKLYGSCPELTREMCLQLIEFITIDAKTERNNRWHSPAPRNIHIYYKLIDKEHATLNKN

SEQ ID NO: 1294 - protein, 528 aa, unidentified
  source 1..528: note = uncultivated organism
MDEQKKTSGSLALNSTPQVITIPPSDPVRDRKLRVAAYARVSSSSEDQLNSFAAQNAHYTELITANPEWEFVDVYADKGITGTSAEKREDFQRLLADCRRGRVDKILVKSSSRFARNAKECLEAIRELKALGVGVCFEEQGIDTSELAGEFLTAIFAMMDQKESENISDNLRWSIDMRMRAGKYNTCTAPFGYRLVGGKLELIPEQAPIIRYIYDSYLSGKTAWDIAATLNLFSEGNPWKPQRIDYILTNERYSGNALLRKRYTTNSLPRKVKRNRGERPMYFAAGVNEAVVSQEIFDKAQELRKKRWENRLPGAAGQRPLANGWLQCGCCGKVLCPRCKNGKWYMACRGHEESLELCELPPISEDAVVTAMLRLYHKLRNQGEPILHQLLVDLQAARKGKLLWSLDIVALNQKIADITRQDRLLAQLKQQGLVDPDIFISRRNELAEQLRAAKLEKERFLEAEEDQTIQQTQELIEALEAGPDFLDAFDGELFRELVDKIIVESNDRLRFRLANGLELTEPIERMVR

SEQ ID NO: 1295 - protein, 528 aa, unidentified
  source 1..528: note = uncultivated organism
MKRAPNSETDASRPMSAGQLRCAIYTRKSTEEGLDQDFNSLDAQREAAEAFIRSQRAEGLVALPERYDDGGFTGGNLDRPALERLLADIRGGAVECVVVYKVDRLSRSLIDFARIIEVFDKHNVSFVSVTQQFNTTNSLGRLTLNILLSFAQFEREIISERTRDKISAARRKGKWTGGRPMLGYDIDPRGRCLTVNADEALRIRAIFKLYLDHNALLPVVREIDHRGWRTKQWVTKRGVTRGGTPFTKGRLFRLLRNPIYIGKIDFKKQIYEGEHEAIVEAAIWETVQQILQQNGRNGGAEVRDSYGALLKGLLRCAACHAPMIRTYSTQDSRRDRHYVCAEAQQKGANCQTRSVPEAVIKAVVIRQIRRLGSDPRIVARALAKAEEQRRSSVADLTQERQAAQRELSSLGAELSKATKASCSDQPMTNGMADLQERIDKTEHRLTAILQELGSLDGDAVDHNDFRTALALFRPVWDALNSREQARVIRTLIECIVYNGKANKVTVSFRSAGIRKMCRGAGKGRRNES

SEQ ID NO: 1296 - protein, 617 aa, unidentified
  source 1..617: note = uncultivated organism
MKGQDNRKYAIYSRKSKFTGKGESIENQIELCRQHIKLHHDNVTEEDILVFEDEGFSGGNVNRPQFQAMMKQIRANQIGAVVCYRLDRISRNVGDFAKLKDEFDYYNVEFTSIRDDFDTTSPSGRAMMMMVSVFAQLERETTAERIRDNMHELAKSGRWLGGTTPTGYKSTQIVGSVTVDGKERKAYKLDIIKEEAEIIKLIFSKFIETNSLTKTDTYLLQNNVTTKNGKNFTRFSIRSILQNPVYMIADQNAWEYFDRLGVEIYAEQSEFDGKHGIMAYNKTIQKSGKSNQMRDMDEWIVAVGKHKGLIAGADWVKVQELLHQNRSKSYRKPKSNVALLSGLLYCGNCGSFMRPKLSQRTNTQGEKIYSYLCETKERSRCQLCNSKNPNGNELDKMICEQVKLISEDSSDFIKNLENVQRKLEGNREEYDQQLNALKKELQENEQQIANLVDTLAKTPNTPAFDYITEQINTLHEKNEKIKNRTHELESLTKNHLYSSEEFDKTKELLKSFGQFFDTMGVEQKRMALRAFIRRIVWDGKNVHVVLFGDTESEIDYTGFSEENPEPLGADSERNTHALSQSKKVGSGYFHERTYRYGFRGKSTDTLGYCLYRRYHRR

SEQ ID NO: 1297 - protein, 500 aa, unidentified
  source 1..500: note = uncultivated organism
MYLRKSRMDTDYDEVSVEETLSRHRQILDRFCKDKKLNVVEVLEEVVSGESLAARPQMMRLLDLISTGMYAGVVCMDIERLSRGSSMEAGYIMQIFQTNYCKIITPGKTFDLQNESDEQFTDMKFMFSRYELKTINKRLVRGRNQSASEGKFMGSMAPYGYRPYKLPGVKGNSLRIEPEEAKVVQMIYDMYGKQGMGYNAIAYALNDMHIPARKGQWSQTSIVNILTNEVYLGKIRWRREPVKKVVKDGFLTKKRIQNDDYDLYDGLHEPIITEEQWSQVKAVQAKYSHASVHTQRELKNPFAGILFCEKCGAIMKRYLPHPKESPIAWYRCQTRGCDCKMIKCEVVEDNIRDAMEEWLENYILQIEADHQPKADPIATALEAVRGQLTQLQLQQENICEYLEKGVYTIDMFTKRNASLAKEIKQLQSAEADLLRQQGEGKQKKQATVQIIPTAQHILDNYDTLTIAEKNRLWKLVMQKATVYRSPDNELTVNIYPNLPK

SEQ ID NO: 1298 - protein, 597 aa, unidentified
  source 1..597: note = uncultivated organism
MDKKRVVCLYRVSTKMQVDPTGDISMQEKACREFIAQRPDWEYLYAYSEKGVSGFAKSTDEREVLQIIKDDAYNKKFDVLLVFMADRIGRREIETLLFIDELNKLGIETWSVKEGRINLGIPEERLISYIRFWVAESESRKIGLRVGEMHRQMIKEGKYCGGPPPYGYKLVDSGLVNKKGKPIKKLAINEKEAEVVKLVYDLALNYGMGGHRIAKYLNERGIKPRKGDEWNLAVINYMLRHPLYKGYITSGKTKKKDDEYRRVHPKEWILSQKPVEELIIIPEDIWNQVQVVRNSRTPEKYRLDNLDYSKYPLQTKSPLLFTGFIYCGSCGSKLSTGYVKHEWTTKDGKTHKKSRNVYKCIRKTSGGTKCTGRCIYYPEMIEGPVLSEIYRYLDTLQSLDLSQEIDRLINQNIKSSEKRIKEIKDTIAKNEKRLAGLKEEVLKNILGEGQYLPEMLNRFYQDTVDELEKAYKELEEAQKEYERYKIELNDIIKMQETVPYWRSELEKAPTEVKKMILSKIIDKIVVYSNKGEKNCSIEIELNIEIEAFLKLAEGRNKEPNDLHEQNILKRRAANIGFANNKFKKYLRTVLYVYANGN

SEQ ID NO: 1299 - protein, 558 aa, unidentified
  source 1..558: note = uncultivated organism
MEQNTTGVFVIYSRKSRVTGKGKSVENQAEMCRRYIASVYGTQQAETALVYEDEGFSGGNLERPQFKQMMQDSHEQKFAAIVVYRLDRISRNIGDFAKLIEDLGQREIDFISIREQFDTASPMGRAMMYIASVFSQLERETIAERIRDNLHELAKTGRWLGGNTPTGYASESVTSVSVDGKPQKAYHLKPVPEEVSLVKKIFARFMETGSLTKVDQYLLERQAKTKRGKNFTRFSIRGILTNPVYMIADEDAYDYLIKNNVELFADKTAFDGVHGVMAYNRTLQRPGKTNQIRPMNEWIVSVGRHPGMVPGAVWVSVQETLERNKTKHCRSSSGSPALLSGLLICGQCGDSMRPKKTGRTTADGKSTYIYLCTMKERSHRKLCDIKNANGNMLDAMVVDAVKKLGKSSHETARQILQIKRVLYDNQAGFHDERAQVQTQIAEIDTQIKRLIDALSRAGGTAAESYIVEQIEALNQSSEAYHRHLEKLESITKQHELTDREFNTLRQTLSQFGQSMDASPVEQQRAAIRVLVKRVAWDGDTVHLYVSGGDEDMDSHSSR

SEQ ID NO: 1300 - protein, 563 aa, unidentified
  source 1..563: note = uncultivated organism
MARKSKKIDFVNVNDLGQQTVAAPDPVKSACYKVGLYARLSEETEANRERATIETQMELLRKFVAENDDMVVFKEYADISYSGTNFERPGFEEMIRDMRSGLFNCIVVKDLSRLGRNYVETGNYIERVFPFFDVRFIAVTDGYDSNKSGEELLMPLKNMVNEMYVKDLSDKMKSAYKAKWSNGEFCAGKVPYGYLKEGKHLIPDPETRDIVVRIYQMFLAGSSLKEISRTLSREVLNPSSYKKVKRGGQIGKEDMTDWRSTTVRHILTSEVYAGDYVHNKQKRSKLENVGKVKQPADQWVIIRDTHEPLISREDFNRVQEMLDKNVQNYHGTHGENGFNHAQFNLLGKRIVCADCGKVMGFRTENKNHTNRTYRCKTYLDTARNECTSHKISADAVNNAVFNEIREHMRACIDAEETVRRMNAKTENLKKYDIYGKEADRIRKELQKTTEVKAGIFEDYRDKLIDEEQYVQISEQYAAKIKELSARLDEMLKAQAKFASDYHIDEDWKAVIDKYLNKRKLTKEMAEAFVDKVVVHDNLRIEVHLIYEDILNDLKSLSAEREAV

SEQ ID NO: 1301 - protein, 550 aa, unidentified
  source 1..550: note = uncultivated organism
MAETTYNVGIYCRLSNDDERDGESASIENQKLLLQQYVRDRGWNEIDIYIDDGYSGTNFQRPGVQRLIEDAKAKRINVILVKDLSRFGRNYIEFGQYTDYLFPSIGCRFIALNNGIDTGNNDSSTDVMCFLNLFNEFYSRDTSKKVKAVKKACAENGKFMGTYPPFGYKRDPVDKHHLVIDEETAPIVRHIFDMRAAGTTFSQIADKLNKDGITPPRSLYYQRKGQNIPSEVSQEWVGATVRRILASEVYIGNMVQGKTGTLSYKSRKLKSKPQEDWIRVEGTHEPLISREVWDTAASIAQKKVRKSPTSDGIKSIFTGLVYCADCGAKMRNRVERFIRKDGTPGRYSSFICGTYIQRGKSACTIHTIYEHILAELVLSDIREKAQFAAYDRDRLLEKIIHMKNAQRQDLMASCENKLRAVSARIAELEHLMQSLYEDKYAGVIPQAVFQTLMQKYEAERAQKAATLPELERKVKEQTEGRQGADRWAEIIRQYTEITELDESILFELVDRIEIGEAKKHLGIRIQDVKVFYRYVGCVDDALAQTEQEAI

SEQ ID NO: 1302 - protein, 519 aa, unidentified
  source 1..519: note = uncultivated organism
MASKIITIEPSAVQKKIRVAAYCRVSSSSEDQLHSFAAQVQYYTKYINSNDKMELVDIYADEGLTGTKTEHRDEFNRMIADCRKGKIDRVLTKSLSRFARNTADALMYARLLRENGVSILFEKENIDTAYMSSELLLALSGAQAQEESISISKNMRWSVGRRMKNGTYLASSTPYGYKIVDREFVIVEEEAEIVRLIFKSYLSGMGKKEIADMLCSQNAPQRFAHSKWESKTVDYILKNPRYIGDALFQKYYMTDTFPFRQRKNYGEKPQFYVEETNPPIIEKADFDMVQRILDSKKCRGRKSSTTTSLNCKIYCKCGCFYKPLKISGKKYWECRKHNVDTKVCDSRRIPEKDIYEAFITMINKLRNNCKSIVTVAISQAERLNMKYGNTAGRIKEIDKNIAELSNKQLVLARLNSKGMFRAAEYSEKSGKLTAQINELRNNRKKLIQEQDENGTLSKLRKLENILLNIKEPLTEFDEEIFKAVIQKITIPSNTSICFELLGGLKVTEKIPEQARCRRT

SEQ ID NO: 1303 - protein, 560 aa, unidentified
  source 1..560: note = uncultivated organism
MKRINENAKAALYTRVSTSYQVDKDSLPHQREELINYAQYALGINQYEVFEDAGFSGKNTDRPAFQDMMRRIRQGEFTHLIVNKIDRISRNLLDFAAMYDELKELGVVFVSRNEQFDTSNAMGEAMLKIILVFAELERHVTSERVTAIMIDRAQKGKWNGANVPLGYKWSEEKKFPVIDESESKIVKKIFDMYTSGDSMLAISIFLNNNNIQTKRNGKWTTATVRQILVNPFYKGTLRYNYRSSARGKIKKESEWIILDNNHQGIVSLEQWDEVQKIIVSRRNGKGLERKKYDHIFIGLISCICGSHASGHIQYNKKEPIYSRYYCLRSHVSGRGECDNNSSVSDIMIGEFLFSYLQNMIYVQDNLDEINSLEKLEKELLYGKYLDKVSYIEENSLQDIYNNFMQKSNVRYQQKEVVQLDVEMDKEQTLLNEQQSHQKALERLNKAYLYGDGALSEREFLTERQNIQENIRKTELEIKKLQQSKNVNSDDVKFLQETSDFLIRNTIAKRGTINWREFAANINNRDVNRFLKTIINKIAFYHKKIMYIEFRNGIKHRFVYK

SEQ ID NO: 1304 - protein, 617 aa, unidentified
  source 1..617: note = uncultivated organism
MQEFTLGLVQKIKLGNGFSLGEQEEKLRQLCKYKGFEIFKVYKDAGISAKDMKHRPAFQQMLEDMKKGLINYIVAYKLDRVTRSVRDLEILISTLEENHCYLICDRDDVNTSTANGRFFVRMLTVLSQLEIEIVSERTKFGLNGAIKAGHVPGQCPLGYYRDKDKTLKIDNATKDIVIRIFEMYLEGKSYQTIANILNKEKVLYPEKKRWIDSTIDRTINNKIYMGDYERYKYDSSRETELYMDVVPPIITRAMWEEVQNQKEKNQRAYCRNRVYIFFQKLVCPNCGKIMTCKGSGGKKTKYMYYFCDNCNLYYNEDEIEDCLIDYILDLVEYDFHVNKYFYPILAEKKDDESKKITDEINKLQQQKDRLKKAYMNGILEMEDFSEDYKLIENKLSVLENKRIDALDFDKEAFNPQHLMAERDIEREKLTKHEMYKDVLLKLWTMKNKDEKQAFISKFIDTATLKKNEDGSFKIVKVNFRSSFVEQIDKLYAKGIVDFPTMLERDGKLEDVKVSVNMSSKQLDDYLSTLKKELDVSYLDLGEYYFHDDKIDENYDTKTQVAKIRNRAIEFKLKKNQKVIRLVATKEFKNFLAKPEEKLRLGLVTHTTSKKKKKWLFK

SEQ ID NO: 1305 - protein, 516 aa, unidentified
  source 1..516: note = uncultivated organism
MTNDGGTRCAIYTRKSTEKGLEQEFNSLHAQREACEAYVASQRHEGWTALAEHYDDPGFSGGNIERPGLQKLMRDVERGKVDCVVFYKLDRLSRSLMDFARLAEFFERHNVTFVSITQQFSSTTAMGRLTLNILLSFAEFERAIIAERVRDKIAAAKKRGKYLGGTPTFGYDVDYQLKRLVTNPVEAKIVRRIFKRFTETGSCLGIAKELNAEGITTKSWTTKRGSYHQGGPWNTSHVYRALNNRAYLGDTVHNGESYPGEHEAIVPKNLWDKVQQIFESGTSRKRNQETHEVKSLLRGIIRCGHCDRSMVCAYTTKKSKVYRYYTCMGAKKNGHASCPVRSVPAGEIEGAVISQLRVLLRSPEMIAQTFRAANDLDAQEIADLSLEKSSLEMRLVELKALASEMITSDDHVESPNERFVEISDDIKQARRRFSETEARIVQAQEHTSTEQDVADALRKLDPVWDELFPSEQHRILRALVEGVVVMTDGLDIRLRADGIHSVVTELKDSEERVCMV

SEQ ID NO: 1306 - protein, 566 aa, unidentified
  source 1..566: note = uncultivated organism
MAEKNNDVPVVRCAVYTRKSTEEGLDQDFNSLDAQREAGENYIASQRGEGWECLPTRYDDGGYSGGDTDRPALLRLMRDVEADEVDCITVYKVDRFSRSLLDFAKMMERLEEHGVSFVSVTQHFNTATSMGRLILNILLSFAQFERDMISERTRDKIAAARRRGKWIGGHPVLGYDIASKGGRLLINKEEAEVVRTIFEIYVRRQGLLPALQDVKRRGWRNKAWVTRKGKMRGGRDFNKVTLHRLLTNVLYVGKVPYNEEVFEGEHEAIVSEKLWDSVQSILERNRRRKQGASKRKDSSLLAGVLRCARCGAAMTHHYTAKGKRRYRYYVCINRMKNGKDACPDGALPAQQIENFVIEQLAQHRPGDNDTLSRALENFSAIWQGSFLPEKHDAFRKIVERVECNVGEGRLGIQLRLNGIKRSADSPPAQGKSNAVLERRFYFRTGPYGQKRMAVGIKPDPLQVRPGRIRRASRLMALAIHFDKLVRSNGVENYAELARLGQVTRARVTQIMNLLNLAPDIQEEILFLPRVNGRRDGITIRELQPVAAEPDWEKQRGMWSRLTGSLV

SEQ ID NO: 1307 - protein, 518 aa, unidentified
  source 1..518: note = uncultivated organism
MVIGIYPRKSVYRDNSDSVQVQVQMCKDYAGIIYKDQEIEFRIYDKDEGFSGKNTNRPSFREMMQDVKDGVLDVVMVYKLDRISRNVQEFSAMYGIFQQHDVAFVSVKESFDTTTPMGRTVMYILAAFAQLERENTSERVADNMLALGSSGKWTGGKLPTGFTSIRRKFGEKEHSFLFIDPKAIGLVKTLYDLFLSGYTITRVERYCRDNNIRSSTGHFLGSSQIHNILRNPVYCQNSLEAYYYLKEKGCTLPDKDLFDGTKGLVGYGRTKTTAASHRIQCMDSWVISVGIHDPVIPAPDWIAAQQRLGINNSFRTAKHECGILKGVLRCKCGSRMDIRTYIKNGITFSYYYCARMARQGKQTCNSGYIRVEEVENAFLGQLRNIQLDPSIITLRSQPENLLDKKAIQSEIRSMEASIKNLTAALGQAMDTAAAGYIIKQITDLDSQKSALESSLRKAELQSLAIKSLEDTRKEIYSSICYLLDNFDNISYSGKNELIRKIVKNCILDTDTKELRIIF

SEQ ID NO: 1308 - protein, 529 aa, unidentified
  source 1..529: note = uncultivated organism
MSIYTLLNICYRNCVNNITVMIMYRRISMKRINAIYARQSVDRADSISIESQIEFCKYELKGGAFKEYKDKGYSGKNTVRPQLQQLLTDIRRGEVEKVIVYKLDRISRSILDFSNMMELFQQYQVEFVSSTERFDTSTPIGRAMLNICIVFAQLERETIQKRVSDAYYSRIQKGFRMGGKPPYGYRLEEVMMEGIHTKKLVEEPQEAAIVREIFEMYEKPYTSYGDITRYYAEKGVQFYGKELIRPMLAQLLRNPVYVRADMDVYRFFKSQGTNIVSRQEQFDGIHGCYLYQGRDAAADKLQNLKGHMLVVAPHEGLVSSEQWLNCRIKLFGNKTIQANRKAVNTWLAGKVKCGHCGYALMSIKIQSGKQYLRCTKRLNNKACPGCGKIYTEEVENYVYGEMVRKLRDAQTPVGYTKLNENPQVKQIYREIEEIEEEISVLVDSLIGAGETLTNYINQRVEQLDQARQLKVEEMKTLAENHATPEQMEKVVSNISLWDDIGFDEKRFTVDKMITLLKVLPGSIQIQWKF

SEQ ID NO: 1309 - protein, 535 aa, unidentified
  source 1..535: note = uncultivated organism
MNNNDKEKIIKVALYARVSTEEQKENFSLAAQLELMRKHASDSKHEVYDEYVDDGYSGTSYERPQFQRLMQDSGQNKFQLILVYRVDRFFRNNKDLLNTVDELQKLGVSIRSITEPFDTSNYLGKFVLSLFGSIAELERNTFMERSKMGKLRRAREGYYSGSSPTRFGYKYNKETKKIEIDEKEAEAVKLIYELYNQTDSSLVRVTRKLRTLGYRTKEGNLMREDVVHDVLRDPIYTGRWYANRHDSKTGKLKPREEWIEVKVPGIVSEELFLRAQEYLNNRRNYSVRNAKYNYLLQGMIKCGDCGNTIAGTADKQFQEKNGRSYGPYFKLYYRCTHFFRNKYEKAVKCRLKYVQTGKLEDAVWNQVEQIFRNPHLIEPAMVSSDEVKKLSKETVQKEIERISLLQDGLTKEEHRILEAYRQSIISIEQLKEQMDSLRKQREMLERTRQDMRISLDETDRKTEIRQGIDCIEKIKQGIKKFNYETKKYVLKLLNTSVKVNVNGIIDMDFFLPQIPSIQEEKFLSHFKSARPISWW

SEQ ID NO: 1310 - protein, 525 aa, unidentified
  source 1..525: note = uncultivated organism
MKRAIVYARVSTERQAEEGLSIDSQIDACQHKAAELGAVVLQVYRDDGISGATDARPGFRAAINRCSAGDINFMVCWSSSRFARDQHDAITYKRELASHRTKLVYAHSSLDLETMEGWMLDSIQQVMDEGYSRQVSADTKRSMIKAAREGYFMGGRVPFGYQAVQADDGRRHRLVPLGHEAEIVRMIFRQSLEGQGAYGIALGLNGQGVTMRGKKWSKNSVLYLLKNEVYMGRVIYNRFNRKTRAERAEDQWIRVQAHPPLLAGDDFNQVQSALTGRTPGKGRPPHTAQHVFAGLMQCGNCGSSLQMTNGTGRAGRLYHYYACRAHNQGQPCAFKPVPADAFDQRMLSDLLDLVLNVDVIQRVLDGLDEAAARWVKDRASRRTAMVLELRSAEQRRGKLFDILEAAGRDTPDLAPTMTRVNELSAQIRRLENALVAIEDEQEPMVGDARVSADEAASLMRQAITGAKDLPTLRAFIATIVDHIVVNDVDLVVSYKPECLIQMDGTSVRSKHGWLPDLGSNQGPTD

SEQ ID NO: 1311 - protein, 591 aa, unidentified
  source 1..591: note = uncultivated organism
MNQPDHSGNTLLRAAAYCRVSKNLENQLDSLENQRRHYEDLITGTPGWRFAGIYAESGVSGTSSGRRPELARLMRDCRAEAIDLVLTKSISRFARNTADCLSLVRELRGLGVRILFEKENIDTGTGEGELLLSLFATIAEEESRSISGNTAWSLQKRFREGTFRLSKAPYGYRLKRGSLAVSPREARIVREIFDAALSGEGSPSIAARLNRRGIRTGTLRRDGSPGIWTSSRILGILKNQVYTGDLLMQKTWKDAQFRRHRNLGDVTQYLAVDHHPPIVSRETFRLAQEAVQQRGREKGIPYSDRASASAPDLSAPDPGDAPPLSPGCFSGRLFCRSCGKALVRITRPGRSDTPGERRLFWGCPTHRRSPRRCPQKPVSEASLQNAFLTMLNRLSFGQEALLDTWLAGCRAQILKDADARIAALREQLRQNADLQAQLSLRLSHRPGNPSADSAGSHDNPLAVDAGSRDNSSAGDAGSHAASAENPALDALRRLQKEAALLEEQLESALSGTPEQSTTEAETRKLRRLLSARRSEASFRRFSPGHFSSAVESAWLSPDGTILFRLRCGLDFTESDMFPDPPHKESGDSPLS

SEQ ID NO: 1312 - protein, 526 aa, unidentified
  source 1..526: note = uncultivated organism
MIFASYGRKSIYSDHSDSVKNQHRMNREYADFHFPGKVDSFLLYEDEGMTGANTNRPDLKRLMKDIESGIINVLIVYQLDRLSRDVRDFSNIYAFLEEHNVQFVSVKENIDTSTPIGKAMMYVSVVFAQMERETTANRVYDNMVGLSDDGWWVGGNPPLPYHRERITTSDGKQHVTIAADPDEVRQLHYMYHLFMDNNFTLSAFESYLKRNGVKTRSGKFYSISQLHRLLTMPFCVQATPDIYDFYKNKGCIMSERSPREKWDGSVGVMIYGRTTERGKKHELQPPEKWRVCLGKHEPCMDSRIWLAVQNQFTHNLFDKTPRYPLPLLKGVLRCSCGRLMGVSRKPRVDGNMTVWYYCPKRVRQGPEYCNMSQIHANLLDDKVLEIFYRIKKDPDCISDYLQTPVSQRNVKAEENVIQKNILSINAKIENLTAALADSKDGPAVKYILQSIEKHDKELHQLNRQLAELQAVERSNKNTRENLEEKKQRILNFIDNFDSFSADEKNAIAKEVIKKCTWDGRTLFVLL

SEQ ID NO: 1313 - protein, 557 aa, unidentified
  source 1..557: note = uncultivated organism
MLRCAVYTRKSTEEGLEQDFNSLHAQREACEAYIKSQQHEGWRMVRKHYDDGGFSGGSMNRPALQELLTAVERREVDIIVVYKVDRLTRSLADFAKIVELLDQNGGSFVSVTQQFNTTTSMGRLTLNVLLSFAQFEREVTAERIRDKVAASKKKGLWMGGQPPLGYDVRDKKLVINKAEAETVRLLFDRYIELGTVRRLKDEADRLSIVTKKRKSRTGKETGGKPFTRGNLYQLLANPLYIGRVRHKEKTYPGAHKGIIDQTTWDTVQRILAGNAVDRPHLTNSRAPFLLTGKVFDDIGELMLQAQTNKKGRHYCYYISKRLMHEAHKHKDGWRLPAKTLEEAIVTPITDILQDQRRLIDLLQMDNQSVQALTGLKARATIVATQLADGAPNEKKRLLQGIIERIELAPETITITLSRSGLAEALETTQPEDKSSIALTVPIHLQRRCIENKLIIRGRNANPAPDPKICQLIARARLWFDQLAAGEVENVKTIAERERLAPSEVSRVLPLAFLAPKIVEMILDGKQPEEITYWSMFRLSELPVGWISQLSALKTAQT

SEQ ID NO: 1314 - protein, 515 aa, unidentified
  source 1..515: note = uncultivated organism
MANTIQEKTCAIYTRKSSDEGLDRDFNTLDAQREACEAYILSQKSEGWRASEAQYNDGGYSGGNLNRPGIKQLIEDIRDGKVQTIVVYKIDRLTRSLSDFSKLVDVFDEYDVTFVSVTQNFNTTTSMGRLTLNVLLSFAQFEREVTGERIRDKVAASKKKGMWVTGIPPIGFYCENSQLKTDKSEIDFVLMVFERYLKLGSVHALKLELDAKNIRAPIRTSKKGKIYGGKLFTSKRLYSILNNPAYIGKIKHKDEVYDGLHDPVVSLDTWERVQKNLENNAPKRKTDNNRKPLISLLKGRLFDINGVPYSPSFSTKRNVRHCYYVSQNLLQYRDHPEDLIGRIPSAEIERVVEMEIRNHITNCWPSTSDPQQHKLLQCLLDTSGNLLIQQLVEKVTIDYDEIEIKLNLKGMKMPNTKQSQKNIFEGSGFKDTIVFPYTVIRKVAGAISITSPEKRFSLDDMRDEEVKRLIQGIDWRDQHFAGATISEICKKEGYSSSYVSKTIFKSFETLKRLST

SEQ ID NO: 1315 - protein, 774 aa, unidentified
  source 1..774: note = uncultivated organism
MTFRTTHPFQQQNRVSTYTRVSPGPFQADGFSIEAQLTEMREFAAARGWVIVAEFVDVSVSGQTMERPELDAMKAAAAEGSFDILLVHELSRLSRSSVYETFEIFEFLGRYNVGFASVKEPQFDLSSPNGRFVLTIIAAVNQYYIDILSMHTQKSKHQRAREGLYNASIPPYGYRHTGDPKTPPQIVPEEADAIRLIFERYASGRHSFMELADLLNDRGYRTRAGKRFSKDTVADMIRNQFYAGKVVYRAGSRRQDLGEVYTGLHEALIPEELWEACRQVRQQHHTVSRPFHPKVRAYLLGQLAHCHVCHRKLRVQNTPTGLYYREMSTARGFDDCPNAQLGTRADPLYAQINAIVRELSLPPDWREELSALIGEDQEVATLQNRRARLIAERRRLKEAYIRGDFDEDADLYRRDLQRIRRELEQLPSEDELHQIEQAATYLESLAEIWDEAEEGDQRDLLRLMVREVQVNVAQGRLLSLTPTAPFIPLFRALPILEERDLGAFAPVWPPEMAGSLPYPSLPSLTHPTEGLLDGVAPPFLLAWPWQPEADARISPTLSDALKERRRLSVEGGRVLEVAHPGVPTLLLDTRKWEHVTLEQRSLEQALALPEGTVAYLETPLALQAHPDRAALVDRVVQLLERQGYWHVYDLLPASMPAHWLYTYFPDTWSLALGAYWTAYQFYQALRKKGLHVRQQEHTFYQPVSLSAALEIAQGRAGPLGLLNDPAYQAGLDRLAAEVEERGGETLIGSEVTLVEVTALKGEPPPRRRRGKKAT

SEQ ID NO: 1316 - protein, 540 aa, unidentified
  source 1..540: note = uncultivated organism
MNTDQRKLMCAIYTRKSTEEGLEKEYNTLDAQYDACRSYIRSQASNGWEIIPKRYDDGGYSGGNVNRPGLRELQADIVAGRVNIVVVYKIDRLSRSLCDFADLSKLFEKHGVSFVSVTQQIDTSSAAGRMMLGILFSFAQFEREICSDRIRDKIYATIKKGIWVGGPTPFGYRLENKNLIVDAQAAEVVKRMFKRYIATGSALRVSREMNALGFRRNGGGKWNPRQVARILRNCNYIGMIRSARTDEMFEGRFDAIIDKATWDKVQKIFDESHPDQGDAPRRETTAVLRGILKCGTCGGAMGATYANYKGNKYRKYIYYRCTKDSKRSERECPLGAIPADVIEKFVFEQLGGVLRDPEVVKTVSGGDSAREAAFLRETEDLAGFWTQLVSSERSRLVALLVKEVTVWEDRVRISLTVGGRVIETPCKMKVNMGRRCIVVQKEDGSPDATDDSSEMAAGQMLVKTHQWLELLTSGTYHTKNELADAIGLSRSYLARVTQLPFLSPDIVEAVMDGKIDKASVTMLMKATSPLWAEQHRQMGI

SEQ ID NO: 1317 - protein, 579 aa, unidentified
  source 1..579: note = uncultivated organism
MAKKQKCYIYTRVSTELQLDGYSLEAQKERLRSEAKHRGMKVVGEYSDEGKSGKNINGRPEFKRMLEDIKSGKDDVQYVLVFKLSRFGRNTADTLNSLQYMEDYGVNLLCVEDGIDSAGAAGKLMISVLAAVAEIERENIKDQTMAGRQQKARDGLWNGGFAPYGYKLVSVDGQKSKMLVINEDESELIRLIYKQYLSGMGVNAVAKWLNENGYTKTVRQNGTIPTISARFVTNVLDNPVYCGKIAYGRRKNEKIEGTRNEFHVVKQDKDSYKLYKGQHEAIIDEETWYRAQAKRKKNAFKREKVHSKEHEHMISGLLKCPECGAPMYGVVNRKKKRNGKGWYQDMWYYRCKNRRIVSGHLCDYTTHVRQDEINVEVMQLVKYVFCGENDMKDQILKKLDSDDSLGEFLQEKERLTKEREKLDSKKSKLMRRIADLDIDDKLYDDLMKTYRESVNEVNEQINVVENQIYQNELAIENAQGENLSTEVYKRIIDEMLEHIDDMSDADKKTLMNLLIEKIEIYTEKQADGRWVKSVQFKIPLNIDGKLVDTMFFDDENEGEMSVSQGTTVECVVLLQRSKE

SEQ ID NO: 1318 - protein, 572 aa, unidentified
  source 1..572: note = uncultivated organism
MIRKVAIYARVSTEHEAQLSALENQVQYYEDLLKYHPDWIVYDKYIDEGITGTSVKKRKNFMRMIKDAEAGCFDLIITREVSRFARNTVDTLQETRKLKKIGVEVYFTEDNIWTFQDDDGELKLTIMATLAQNESKKTSQRVKAGQKISFQNGVVYGTGNIMGYDKIGKELVINEEQAEVVKLIFKLFLDGYGTQRIKYELEKRGIPTATGLKTWSFATISRMLQNPFYCGTVIYRKEFVPDFLEQKRKKNRGDVEQVIVEGKHQPIISKEDFEKVQKLIQSHSTIKTGTNRKQVVGAPKDIWSKKLVCECGSRMNKRIYSKSNNNIIYGYYCYKQKNEGSARKRKELGLDTAGYCDVPMTQEWKLELMATMIFKKLLTNQSRLKQIAFDMIDKVFTEQNIDEQFNNNIVMLKSKLESIKSKKDKLLNTYIEGFITKEQYSKKNEELVSEEEKINNKIKEEDQNSLTLSFDLKDKIKMMKDKISSKLDYELYNLSSGLIESLVDKIVVHNNRFEWKLNCIADISKYDNEAGELGIYFSTLVITEDDLRNYNLKNPTLKKIFQKEPIIVDIYI

SEQ ID NO: 1319 - protein, 535 aa, unidentified
  source 1..535: note = uncultivated organism
MKTLRCAIYTRKSSEEGLEQGFNSLHAQREACSAYILSQTGEGWSELPTAYDDGGFSGGSMERPGLKALMNDISKGLIDVVVVYKVDRLTRSLADFARIVELFDQKGVSFVSVTQAFNTTSSMGRLTLNVLLSFAQFEREVTGERIRDKIAASKQKGLWLGGRPPLGYDGVDRKLVVNAAEAETVRDIYRRYLELGCVRKLADDLKARGIGSKRWVGRKGHTVGGGTLERGALYHLLSNPTYRGAIRHKDKIYPDAHPAIIDEALWEAVQARLGQNRPDRSEAPKKTHADCLLRGRLEDGRGVSMTTSFVLRKGRQYRYYVAQDVNRGAAKERPRTSRMAVGVIDAFVMRETTRRLKPDHLADATPADRVDAALIGVRLSDEVVELRLRREAADLHPIQEAEPGIIDGEAAIFRLPIVLKHRQGATMIDAPNTTTPATRPDRALIRAVALAKASADQLAKGEFASVKTLAAAKGYCEHYLAKLLPLAWLAPDLIELILAGRQPAAISLKVLVDEPLPMAWSEQRRLFQRLGLAVH

SEQ ID NO: 1320 - protein, 661 aa, unidentified
  source 1..661: note = uncultivated organism
MASSSRTAKVVEAPVTKPAVRCAIYTRKSTDENLESSFNSLDAQREASENYIRSQQHEGWVILPERYDDGAISGATLERPALQRLLADVRQGKVDTIVIYKIDRLSRSLMDFTKLVEELEQFNVSLVSVTQQFNTTTSMGRLTMNILLSFAQFEREVSAERIRDKIAAEKKRGRWVGGQPPLGYEIDKANRRLVIIPDEAVVVRYVFRRFVQLRSMLMVAHEMNAKRYQSNGRPGKKPAPWNKATVYRTLNNVAYVGLIRHHDQTYKGEHEAIIDQELWDEVHAILNTNPIVRGRATRSTSEALLRGLIRCGHCDMSMGITYTKKQGKQYRYYLCGHAEKSGRDACPVKSIPAGDVEAAVMLQLRRIFQAPEILGEAFRVVQQREESDRRSLETERALLEKELTTLRTNASLLVQNTFGRMSESGDGSPQFVAEELHRMEKQAAEVQQKLNQVLAQLDMLKTAPTSEPELLEELGVLDRVWGELFPAERERILRLMVESITVTTSGLTLVLKLTGVASVLSELGADMTSPEVREKYQGTDGTLRLEIPMRFKHRSGRKEILLPDSTTAEAPDSTQESLVIAVARAHRWLALLEEGRFNSVGELAEAVDMDSSQMRRHLALTSLKPDLVRQILDGVEPEGVSLKQLLKGVEVRWVEWNGPTD

SEQ ID NO: 1321 - protein, 555 aa, unidentified
  source 1..555: note = uncultivated organism
MARVSRRGAALRPASRQEEKVWNTAVYARLSIEDGGRKDSDSIEVQAELAAQYIAGRSYLKLTDTYIDNGSTGTNFDRPEFNRLMNDIRSGRINCVVVKDLSRFGRNYVEACELLDKIFPFLRVRFISVNDGYDSETDTGLADSLIVMLKNLINDAYVKDISRKSISARKAQRERGEYTGAFAPYGYKKSETEKGKLVPDAETAPIIHDIFRWRSEGMGRAAIAKRLDDLGIPCPSMRLRNGGTVKGEGYYKASIWQPKAIDRIIKSRVYLGHLVQGKTKQAYCERQPLQFVPESEWCVVENSHEPIVSAELWNAANRVCGERREAYFENLSGQCYPENALKGLLVCAACGSKLVRKRNFTRGHEYYYYFCPLEKQHDEQERYAAIPARKMYDLVLAAVTKQVKLASDIGGNLQEHGNSSKSRSAALDANIARAERDLRDNTKKSGALYEDYVFGLLNEGEYIYAKEKYQRTDAALKQELAESRRQKETLTDAISPDSKLLAAVEAFLNPVELSRDMAVALIERIEVKNPDEIEIVWKHRDEFALMEAFAKDGAA

SEQ ID NO: 1322 - protein, 557 aa, unidentified
  source 1..557: note = uncultivated organism
MAMTNTTSIREIEAALASGYRAAIYCRLSKDDDQDGESASIANQRSMLESYCAKQGWEVVAVFQDDGYTGLNLDRPDFQRMLKAIEKGMVNLVITKDLSRLSRNYLESGRLIEEYFPRHGVRYIAMNDNVDTLRENNEIAPFKGILNEMYSRDISKKVHASYYLKATKGKFTGCVAPFGYRKDPEDRNHLLIDEETAPIVKRIFDYALAGHGPNYIRRRLEEQKVPCPTWWNRQRGLRSHFTKWEQADPENGRFIWDFTVIKDILVNPVYTGAIASQKTNYRFKLGTISEKKPEEWIIVEGMHEAIISPQDFETVQKKLRSRQRPKEDGTFSLFAGIIKCGECGKALTIRRTNAKHPQNIYSCVTYNKYGKHHCTQHRVEYGELYRQVLHKIRAAAAAALMDDTEVLDRLTDVCQTEERQQSEALARQVMKDGERLAVLERMVMKLYEDMISRRISERNFDMMMGKAQSEQAELKARLDEEKRQLADQSKLTADTRRWVEMIRKYADIQELDADTLQRLIREITIHETIDPDGTRHITAKIHFNMKPLPEALAAGNN

SEQ ID NO: 1323 - protein, 531 aa, unidentified
  source 1..531: note = uncultivated organism
MEKAEKKKINCAIYTRVSTSEGLEQEFTSLDNQRESAESYIQSQKSEGWVLLPDRYDDGGYSGANTERPALQKLLSDIKEGKINCVVVYKVDRLSRSLLDFSQLLEFFEQNNVTFVSVTQAFNTNTSMGRLTLNILLSFAQFEREIISERTRDKMGAAKKKGKWIGGRPPLGYDLDKVNHKLVVNQDEAKIVQEIFNLYLEKRSLLSVAMILNEKNYKTKSYIATKGNKFGGIKFKSTNVQLIVKNPLYTGRVSYKGQLYPGEHERIISDDVFKKAQEILANNRRERKIAGTTKHIGLLNNILRCKTCNSTMYYVYSMKGKNKYNYYLCMNAQKRGYKSCPTRLIAAQTIENKFMEFLRKIIEDPRIEASAWEALTLEEKIPILKSIVKIAHYDGDNETFEIMLQHSEISHKFALRLAELKHIPYHRRQAEIGSQPLVRQNLILAHQISQVTKERNCSLRDIAKWLGMAHPRICQIVNMLLLSPKIQEEILLSDNKALFNVPEYRLREITTEGDWNKQQELWDKLLKSDQK

SEQ ID NO: 1324 - protein, 519 aa, unidentified
  source 1..519: note = uncultivated organism
MSTKDAEAKRPVRCAIYTRKSSDDGLELDFNSLDAQREAAEAFIASQRGEGWQVIPTHYDDGGFSGGNMDRPALAALLKDVEAGLVDCVVVYKVDRLSRSLLDFTRIIATFEAHKAAFVSVTQHFNTTHSMGRLTLNILLSFAQFEREIISERTRDKIAASRRRGIWGGGRPILGYDVERSPGGSKLLVNPEEAERVRAIFAMYLELGSISRVLRRLDGLGWRNKAWTGKDGREMGGRAFDKSQLFNLLTNPAYIGKVRHKDDLYDGLHTAIITVDLFSRVSAAMRENRTSEGRGASNTRSALLRGLVRCKACGCGMTHHYTSSTGKESEKREYRYYVCTRAQKRGWDACPGPSLPAAELERFVVEQIRAFGRDHPTTAASVRAAQTRLRERAHALRAQREAESARTAALTAEARRLHEGERSPEVEATLSRLREEIRASKAEAARLEAQAAAIDSRLLDTDELAGVVEAFDPLWQSLRHEERERLVRLLVKSIEYDAACESVSIAFRSDEAPAATEAM

SEQ ID NO: 1325 - protein, 544 aa, unidentified
  source 1..544: note = uncultivated organism
MFASKETYRACIYTRLSRDDGDKPESDSIANQRALIRDYLKQHKEITIVSDHSDDGYSGVNFERPGFAEMMDEIREGKVDCVVVKDLSRFGRNYIEAGNYIEKVFPFMGVRFIAINDSYDSSDKSQLDSLVIPFKNLINDAYCKDISVKIRSQLEIKRKKGEYIGAFVVYGYVKDPEDHNRIIVDTYAAEVVRAIFRWKMAGMSQNRIADKLNSQGVLCPMEYKLSMGVKVQTNFRVHKQAKWSAVSVTRILTNELYTGVLLQGKSSTPNYKVKKRFDKEQSEWIRIENAHEAIITAGEFETVQELLGKDTRISPDEETLYPLAGYVVCGDCGQNMVRKTIPRRGKKYVYYVCSTNKAKKGCSSHSISENKLMDAVLHVIKEQISTVMRIEGLLEMAQSLPENQRNIFNYDAQIVKLQEEIERNKGFRMKLYESLEEGMIDKDEYFIFKKNYSDKISLAEKNIQSLEAERDAAVKKNAADYSWVDAFKKYEGIERVERQVVVNLISEIRVYEGNVVEIDFQHNDAIEAALKIIDTLPEDMKTEA

SEQ ID NO: 1326 - protein, 580 aa, unidentified
  source 1..580: note = uncultivated organism
MARADYGRPPTAPGAVRCAIYTRKSTEDGLEQEFNSLDAQREACAAYVLSQRHEGWVLVPGLYDDGGFSGGSMERPGLRAVLEEVRANRVDVIVVYKVDRLTRSLADFAKIVEVLDAAGASFVSVTQAFNTTTSMGRLTLNVLLSFAQFEREVTGERIRDKIAASKKKGMWMGGVVPLGYEVSNRKLVVNEVDAEQVRHLFVRYLALGTIVALHEELVATGVVSKVRIAAGGRQTGGTQFTQGALSHLIQNRTYVGEVHHRGQHYPGEHPPILDRELFDRAQRQLEDNRVARKQGRNIVDPSLLTGLLFDSAGRRMRPNHACKGSRRYRYYVSRPELALTDEPLLRVPAGEVEKAIVDQLAAALADPDLLHHLIERCGSEGVPIRQIKGMLDELVAVLLRGSKAERRSLLPTLLCRVELHKDRLEVQARVPSLSEQGAEAGPAGEVSQSLELPLTIPVSTVRAGGEVRLLLPPSPAAATGRRDPALLGLVAKAWTARQALNSRPGISVEEAAERIGLKADYFRVLVRISFLAPDILAAILEGRQPATLTRQKLARMTNLPLEWEAQRIMLGFDTKLRKAA

SEQ ID NO: 1327 - protein, 527 aa, unidentified
  source 1..527: note = uncultivated organism
MVSPSLGLRRRQNGGLMAKNSSSRNALGAGAAPAANRTVRCAIYTRKSTEEGLQQEFNSLDAQREAAEAYVSSQKGEGWQVVAETFDDGGFSGGNMERPALKRLLAAVESRAIDCVVVYKVDRLSRSLMDFARIVEVFDRNLVSFVSVTQQFNTTSSLGRLTLNILLSFAQFEREIISERTRDKMSAARRKGKWIGGHPVLGYDIDPKGGRLIVNPEEAEQVRTLFRLYVEAGSLMPAIEAARQQGLLTKRWTTAEGITRGGTPMNKNTLHGILTCALYMGKVDHKGVLYPGEHDGIIEQNLWKRVQDQLKRNRADTRSRQQNKYGALLRGLLFCAPCQSPMIHTYTSRNAKRYRYYVCYQAQREGWKACETKSVPAEAIESAVMSSIRRIGTDPSLAEAVALKALEQAADRRRELDQDLDAQRRHLRQLIKNSARGDGGAQEISATEEHIAMLTAERSSGSSNHVNAEDLRQILLEFDALWGTLTTKEQEQMIGLLIAKVGYDGRSGKVTVNFSSEGAKELCQGKQ

SEQ ID NO: 1328 - protein, 548 aa, unidentified
  source 1..548: note = uncultivated organism
MSTRTAKLRCAVYTRKSTEEGLEQEFNSLDAQREACAAYIASQAGLGWKLVPDHYDDGGVSGGTMDRPALKQLLADIEARSVDVVVVYKIDRLTRSLMDFARIVEVFDKHGVSFVSVTQQFNTTTSMGRLTLNVLLSFAQFEREVTAECIRDKIAASKRKGMWMGGVVPLGYRVEERKLVIEESEARIVRHLFQRYIELRSVPKLVEEARTIVLPQSRQRKPDKPFGRGNLYHLLSNPIYVGKIRHKDAIYDGEHTPIVDQDLFDRVQATLADQAQDRAAPTNRAGAHLLTGLLFDDTGDRMSPTHASKKGVRYRYYISSRMMKSARQDDAGWRLPASEIEALVLGEACRILHDHAMLARWLEEAGLTDSLPGCLKNAKRIDSVTLSARLRSMIRRIELHRDHIEIDIDRHGILTMLGANAGNDGALPPLTVTVPIALRRRGVETRLVMLAGNPVVRHPDNSLVHLIARAHTFLASLTEVAGRSLGDVAQFHGTDLSSISRILPYAFLSPAITEAILTGRQSPTLNAQRLLRLADLPIDWTQQQALLD

SEQ ID NO: 1329 - protein, 528 aa, unidentified
  source 1..528: note = uncultivated organism
MKEKQGNRAVLYIRVSTEEQAEDALNLVNQEKKCRSYCQQKGLTVVEKFIDAGESGRTDDRPEFQRMLVYCKSQRNNVRYVVVQDLSRFARNNRDQNDAIHQLELSGVSLRSTYESSIDETAAGKLTANIFGGFNQFFSDSHSEKQRDRKRLAIAGGRVPYRAPLGYLNISAKQGPNIIPDEERAPLIRKAFQLMSTGLHKKAEVLKTVTEEGLTTTKRKPVSGQTFNGILRNPLYAGWVALPSDPTVQPVKGLHEPLVTQEVFDRVQAVLEGKKLPVSPRRVSNPDFPLRRLVRCERCGTPLTGAYCKGRHGGRYPRYWCRKPGCRAVSLPKINLESEFQAFLGRLRADRENVANFPKIAARVWKAKQGSSDLLFKKLSSQLEEQKKLKSNLVILRVKGDVTQDEFEEAKSAITKKIYELEDKLKALDSTRSTADSFVKFAELQLTDMAHVWRIASSEQRERVQNLLFQDGLEYSPESGFLNPSKPCLFNALEAVDFQKVSLVEAAGVEPASEIAVSREIPCCVRFR

SEQ ID NO: 1330 - protein, 523 aa, unidentified
  source 1..523: note = uncultivated organism
MEEVKYAAIYTRVSTEEQRNEGCSLEAQEEELMNYAQRKGYKVYDVYSDGGYSGKDYNRPEIQRLFRDMAANKFDAIIVWRLDRLSRSNKDILTLIDNELTPRDIKLLVSTCDIDSSTIEGKMFISLQGTFAEYERNVIINRVKAGMKKRASNGEFNGGIMLGYDVVDRKLVTNEAEAKIVREIFELRAAGHGYKTIANIMNSSGHKTKKGNNFSTIAIKTILNNKEYAGLNTWGKKEDWNIKRRKGKVDVIPERKGSHQPIISMELWEKVQAVNKANAEVFTPIKSYSGNFFLSGVLKCPVCGAGMVMSKNKKRGNKGFYRYYMCQAYHQKGKVACSSNLVVADWIEQEVLKVLNELIANMDLVEDILKKIDEGYKKDKTPLESNLAELNLRKAEYEKKLNTLDEEYLAGELEVANFNRLTSKLQSEIDEITEMIEKVERELAKLQTRVDINANMVVEILMNFNELFDLADEQEKKELIRAIIKEIHVSKDRKELKQISLWIGEDICLPAKKERGTVSQVMV

SEQ ID NO: 1331 - protein, 513 aa, unidentified
  source 1..513: note = uncultivated organism
MQANLRCAIYTRVSTDNQAEVEFNSCESQEEKIRSFINSQENMDVFKVYSDAGFTGANLNRPALNEMLYDIKQNKISLIISYKIDRLTRSPKDFYQLIELFEKHGVDFISVTERFDTSTPSGRLLRNIMLTFAQFERELTSERTKDKMLQRAQKGMWNGGPIPFGYVVENKKLVIDNNEAKIVRNTYESYITSGSLSSVYDELKNNSIKGRRGHSFAKCGIYSILRNPIYTGKFRYAGKLFQGLHQPIISEDVFNLAQEIHKKRKRFLRVYKSYPLAGLIMCKECNSHMTPIHTNKKKEGKTKRYYYYRCTRTLKRDWDACGTKHVSATRLENYIFQNLERIALDRHYIDSLMFRLNNSPSGDHSGYPSTHSAHSGQAHHSLQSPTESASMGYRRGFKPTEVCSEFSGDLFQQTLELFVKGITERKGVEKNLWAKKFIKDIVYSKSDIQLNLYYSGSYEDSKSLEFGGKNKQFRGKSLDEFAPEFSNPSVCNVKNGGPPGIRTPDPLIKSYTT

SEQ ID NO: 1332 - protein, 514 aa, unidentified
  source 1..514: note = uncultivated organism
MTQPKRTVRCAIYTRKSHEEGLEQEFNSLDAQRQSAEAYIESQRHEGWQLIRKRYDDAAYSGGTLDRPALKELLADIEAGHIDCVVVYKVDRLSRSLLDFAKLISLFDEHQVSFVSVTQQFNTTTSMGRLTLNILLSFAQFEREIIGERIRDKKQATARQGKYIGGGPILGLDVVDKKYVVNREEAKHVRDIFNRFEKLESCRKVAIALNAEGLGTKCHPTKTGKTRGGKEWTGRKVYALLTNRKYIGQIVHKGKAYPGEHEAIVPTEQFERVQAQLRANKTYTHKHQVKRFILLRRMIRCGHCGSRVQPTWTKKNASRQYRYYACTRKVKDGYGRCPLPNLPAGQIETAVVDQLRALLRHPDVIARTYREINRSGNTGPDRATLDKLDELRMRREQTQKSIRALLNVADQDEGFMADELKRLSAELKSLDKSIRDTEAQAARGAPVELNRVGEALRAIDPIWDVLFPEEQRRVAQLLVEEITVSTSGIDIRFRTNGIEQVVEELRPIEERANA

SEQ ID NO: 1333 - protein, 565 aa, unidentified
  source 1..565: note = uncultivated organism
MNIEPKRCAVYTRKSHEDGLEQEFNSLDAQRDAAKNYIASQKANGWVCVNESYDDGGWSGGNVNRPALQRLMSDIRAGLIDIVVVYKIDRLSRSLTDFAELQTEFEKYGVSFVSVTQEINTSTSSGRMMLNILMAFAQFEREQIAERIRDKLSASKMKGKYVGGLLPLGYRGDSENMRMLVDSEEAKTVRLIYDEYLRTGSPKAVQRLLHDRGVRGREWVSKKGVRHGGAPLTLAVIRKILQNPIYIGKLRYRGKIYDGEQDAIIPTDLWNTVQATFRAGASGHKRSGIALNPFAGLVWCGHCDAPMFLASVTKADGKRYGYYVCHVDEKRAHHECPLRRIPAMALEKLLLNKISVLLKTPTMLTKICDGELRNVLDTRQAGEALENIATLWNEMFPVEKYKLIRSLVWRVAVPENEVRIVFHAEGIVTLLNEAGVDFSISAESTGVECVLTVPCRLRRYGGLVKLHSADAATDEPRLPIQTALIQAHRGMGQIVSGKATTMRQIAGALKMDRSFVARTLQLANLAPDIVKAIWENRQPISLTLDKLCRGIPDSWKEQRKLFLAE

SEQ ID NO: 1334 - protein, 510 aa, unidentified
  source 1..510: note = uncultivated organism
MAQVQVIQPYQPQNEELEKVAAYCRVSTDSKDQLNSYRTQIGYYTNYIAQHPGWELADIYADEGITGTSLEKRDEFKRMLADCRAGKINRVLVKSVSRFARNTLELLETTRELKGLGVVVVFEEQDIDTSQMLSEMQLTLLAMAAQEESTSISKNMRWSYQKRMESGAFVGCRSPFGYIFKEGELLPHPEQALIIQEIFSRFLAGEGKQAIANDLTLRQIPTRFGNTQWNIAGIHYILTNERYAGDSLLQKTFSSGFPSQKKRNHGQVNQYLWEETHPPIISKDVFQAAQALIQRKDNGQRERLHADLPIVCPECGYTYRRIKTRGKKYWACSFKNRGQGHCKSPRLEDEIIKTTFLNLIGKLYTHRDALLSPTLALLEEIAARQERGNTKLYEINTALAELNEKAHTLQRLHNKGFIEDGEFREQSDALAAQRKKLSDQRSQALHGSKALEALDRLRETQELLASLPEIPWEFDIDLFDKIVEKIVPISNTELLFKLKCGLELREVLPK

SEQ ID NO: 1335 - protein, 528 aa, unidentified
  source 1..528: note = uncultivated organism
MSNRSPLRCAIYTRVSTDHGLEQEFNSLDAQREASEAYIKSQAHEGWRLLPDQYNDGGYSGGSLDRPAVQNLLAAVRERRIDIIVVYKVDRLTRSLADFARLVELFDEHGVSFVSVTQSFNTTSSMGRLTLNVLLSFAQFEREVTGERIRDKIAASKRKGLWMGGQVPLGYRAQDRSLAVVTDHAEVIRSLFRRYLELGSVVRLKATLDARNETSPIRLNGKGRESGGCLFSRGHLYKILSNPVYIGQIVHKGQAHPGQHESIIPQELWQQVQTRLAQQAIRRTASRSSSEALLTGKLFDEAGHVMSPSWTSKGARRWRYYVAQAASQQQHDQNDTLRRVSAPVIENTVTQAVAALAPDGRLDAAAIRALLHRVTVEPSSLVIETSVTDEAGNPRTIRVPWLARPPKPMSDILFSERDDDSTIRPMRVEAHGRLVQALGKAHHWLDELQKGRVADTQTLAEREGCSERSIRLTLSLAFVAPDIIQTALDRKLPRGFGLSRLTGLPMDWAEQRRVLGLEVTDRHNGNSV

SEQ ID NO: 1336 - protein, 547 aa, unidentified
  source 1..547: note = uncultivated organism
MDKLIAIYTRKSKYTGIGESIDNQVEMCKKFLINKYGKQILKQIVIFEDEGFTGTNVNRPQFQKMLEEFKSGKYKMLVVYRLDRISRNVLDFCTLKDQLSDLNIDFVSITENFDTSTPMGEAMLLITSVFAQLERNTIAERIKDNMYELAKTGRWLGGNCPFGFNSKKIENTSLNGQKKYLYQLTPNPKEIEIVKLIFNKYKAFKSLSKLETYLIKHNIKTRNEIYFSRYALSNILRNIVYCKADQDIKKFLESKKIKLFNNNKKLDGTFGLISYNKRIQKKAKKRKKIIKDMKDWIIAVGNHEGIIDGKDWIEVWNTLEERTKNKRSVKINTKSNSYLSGILKCSNCGSWMRPKILKTYHENGKRNFVYLCELKSKSKKELCNSKNIKGIEIDKQILKFITSFETNNKEVIEILQKNIHYLNNDNEFKTLSNILNNNNLKIKKLITKLAFISHELSWIITDEIQTLKEENLKIEEKLKKLSTSTTNINLNETVNNIINNYHEFLEKINIDEARNYIKMLISSVYYQNNTIIINCRTTTGDSSRSNP

SEQ ID NO: 1337 - protein, 502 aa, unidentified
  source 1..502: note = uncultivated organism
MSEAAVYLRISLDRYGDGLAIDRQRDDCMRVLQERGWTLYKEYVDQSVSAYKKIDRPGYDQMVADYQAGKFSKIVCYDLDRLTRQPRQLEDWIEEAEERGLQLVTANGDADLGNDNGRLFARIKASVARGEVERKSARQRAAHDQRVKQGRITTGGIRPFGYKQNGEVFEEEAEVVRAIYDAVVAGWSLHDIARALNGEARLDGKGLPPVPKTQPHMITVQHERNARRRERGEKEKPVKDGYQWRYTTLHDILRNPRHVGYSYKQMGTDRKTRRTIIRDDDGQPIIGQWTPTVKKDVWEAVQDILSDNKRRTNSGSVSVKHMGSGIYRCGECGGTMHTHDSAYRCHHCRLNRSRKQVDEFVVAVITEALNRPDIIQQLTAARGVDVSDINEAIDKQRRRVARAERDYDDEVIEARDLTRVRDKAEAKIAKLEAKRNRALASSSTAGILAEDRPGAVFAAASQIEKRNIINSLATVTLHRGTRGSKSFNASTVEIAWKSAATE

SEQ ID NO: 1338 - protein, 587 aa, unidentified
  source 1..587: note = uncultivated organism
MTSTQKGVLRCAIYTRKSSEEGLEQSFNSLDAQREACEAFILSQREEGWKALPARYDDGGYSGGTMERPALQRLLQDVEASKVNVIVVYKVDRLTRSLADFAKIVETLDARGVSFVSVTQQFNTTSSMGRLTLNVLLSFAQFEREVTGERIRDKIAASKRRGIWMGGPVPLGYNLEARKLVPNTKEAALVSKIFSLYLDLGCVSKLAATLARENIRSKAWTTKAGIRLGGNAFARGALYDLLQNRLYIGEIRHRDQWYAGEHQGIVPRKLWDNVQARINGNRKKRHNHIRERSSSLLTGLLVDASGNRFTPSFTFKKRRKYRYYVSQIAIKNPAAKSNGPIRLPAREIENRVTEKLLSFLKSDAEVFDRLGAAAESPAASGQLVAAAKKLALRWPSLRSDEFRDLLASFVRRIIIQENNIEILISRPDLRQGLEKGDDFVPSDLDRPYQSIHPDDLICLTIAAKLKRSGGEVHLVVPPNSGGVSSPQPNPSLIKAVARARNWYERVLEGKSSNQRSLALHAGVTERYLGKVFDCAFLAPDIVEAILEGRQPRDLSFKKLCAHIPLSWIEQREQLGFSPAKNKAVPVQ

SEQ ID NO: 1339 - protein, 518 aa, unidentified
  source 1..518: note = uncultivated organism
MEKVAIYCRLSEEDRNKKFETDDSNSIQNQKAMLLEYSIEQGWEVYNIYSDDNYTGSDRNRPEFVRLLEDAKARKFDIILCKSQSRFTRELELVERYINGLFPIWGIRFVSLVDNADTANKGNKKSRQINGLVNEWYLEDMSENIRSVLTNRRKNGFHIGAFALYGYKKDPDQKGHLIIDEEAAAVVREVFTLFSQGYGKTAIARMLNDRGIPNPTEYKRLHGLRYQQPKRKNSTLWKYSAISDMLVNEIYIGNMVQGKYGSISYKTKQNKPRPKETWYRVEGTHEPIIERDLWDRVQAMVASRAKPFDVGSIGLFARKVRCANCGYTMRSSKNRGRHYLQCSNRHVAKDACIGAFISVEKLEKMVIQELNALSRTYLDQDELERNVQFSQNLEQQKINWLESKAKLQKQLEDNRAYLRTLYMDKVKGIVSEEDYISMADSFAADRERMEQQIKEADHRLDELESQMLAGDQRKELIQRYTNVEHLTREMVEILIDYISVGKRIPGTHEVPIEIHWNF

SEQ ID NO: 1340 - protein, 568 aa, unidentified
  source 1..568: note = uncultivated organism
MAEDKEKAKPRKCAIYTRKSTEEGLEQEFNSLDAQRESAEAYIKSQKSEGWELYPERYDDGGFTGGNMERPALKRLLRDAQSKKFDIVVVYKVDRLSRSLKDFVRIMETLDTAGVSFVAVTQQFNTSTSMGRLTLNILLSFAQFEREIISERTRDKMSAAAKKGKWTGRHPVLGYDIDFEKKRLVVNPKEARQVMEIFRTYLDEKSLLKTAHVINKKFHSKEWTNKKGRRKGGKKFNKNKLQYLLRNPIYIGKMRYKNGIYDGQHEAIIETKIFEQVQRVLTKNGEKKTSPNQDKHDFLLKGLIRCTACGSMMTPHFAYAHNKHRYFYYKCTQAEHLGKEGCPVRSVPARAIESLVIERLKFLSQSPVVIEKIAQKAKSLQKNEIPTLKDELARVQGELRKVTEEAQNLLNALSSNGKKETENGFIFRRLDELEETKKAKEARIGEVTTEIARWQAREIDVKVVGENLKQFNQIFDRLTPNEKKDLLRLLVSHIEYDGRTDNGNGNGSRNKPPKKGKAVLSGQIKMGLRQLPDLGLYIVNHQDQPIKLDFDESPSWLHGQDSNLQPSG

SEQ ID NO: 1341 - protein, 543 aa, unidentified
  source 1..543: note = uncultivated organism
MLNTQKKIWNATLYLRLSRDDGDKEESGSITGQRELLRDYISQHPELREYAIRIDDGFSGSTFERPGFQKMIEDVKAGRTDCIIVKDLSRFGRNYLDAGEYIEKIFPFLGVRFIAVNDNYDSLGEKKSSDDLIIPFKNLINEAYCRDISMKIRSQLEIKRKNGQFLGSFAAFGYLKDEQDKNKLVVDQYAADIVRDIFKWKLEGISPQDIADALNKLGILSPMEYKRSLGMKYTTSFKTSAKAAWSAGTVIRILKNPIYTGVLIQGKETTPSYKVHKRIAKDKSEWTVIEDSHEAIISGIDFDSVQKVLKCDTRRSPDDKAVGLFSGMLFCGDCGASMVRKTVPAGEKKYVYYVCSAHKQDKSCSPHRMRDIALEEIVLDSLRQHIREVVNMSELMNITDTAPLRTAQAQKVQRQLDKKREEYEKLQKLLMSLYENLTDGVIDREEYARLKASFTARADEAEKQMDALRESLNDIQSHGTENVWMNEFIKRQELASLDRAVVVALIDKILIHSNDVVEIIYRWQDEFAWQLDILRSARLREVI

SEQ ID NO: 1342 - protein, 545 aa, unidentified
  source 1..545: note = uncultivated organism
MPRKKKKRIKPEKIIAALYCRVSTYDQTVLDFSSLDAQEQALKDWCKDEGWQVYQVYIDKGISAKDLKRPALKMLRNDAKSGKFNQIIYTKMDRLSRSLRDHLLLTDEFDDLGIITKSKSEPFIGDGIMGRMFHQMLMVFSEMERQMIAERNHEKRYQTVKSGRPPGGRAPIGYDYINSKLVVNKKYEKIIKRIYQEYINGITPIEIAKQLNKEGFDTPVRLTQKGQNKGKKRGGKSFNKKMILDILNNKTYTGINKFYEEEFKGEHKEIISKAIFKKVKKIRKKKSLKKLPGKPKTSDLLLLGLLKCGYCGKWMTSVPSHKKTKAGLNIHYYYRCTSAIHRGAKGCKGGQVSAKAIEQFIKDWIQRFIQDNKEFKKEAESDAIKLDAIRIDKLKKKKKSIQGNLKKKKIELNNLLNIAKVASRTIKELASAIELLSKDVIDIESELSNLDLEMDIIRGRTITPKELIKSLEKIVPYLEQSSKNELRSIYNLIMKDIQIKKPTPPDEKWAITVNAWSHDSSTYILEMLSGSCYRPQLYPEQDSNL

SEQ ID NO: 1343 - protein, 585 aa, unidentified
  source 1..585: note = uncultivated organism
MITTARAVIGARVSVMRDGKVSPEVQRESGERYAAAHGWTPVGYFEDLDVSATVGPWDRPDLGPWLGARSGEWDAMIFAKVDRAFRSASDCADVVKWAEKNRKIIVFADDGIVCDYTKDTDSIEAMMSKFFLFLASLFGEMELRRIRSRTKGSHKKLKTTDRWAGGQPPYGYKVVPKPGGGKRLAVDPVSSLVVQEAGRMVLAGMSMWEVADALTAAGHPTPAAYVAAAQEGTDRKEKSKRRKAASTNWEQSSLGKILRSPATMGLKVTGRTVKDRTVARGADGMPVRMADPLFSDDDWGGIQARLTERSRTKERNHGAAPLLGIVYCAGCQSRLYRVVNTATLKNGETRTYEYYRCIKDASKPRCAGHTFKADELHRWIDSYVETDLAEVPEVTRRFVPGEDHTKELERVITNLKEVREEKDLGLYDYDGGDAEYRERLVALTGQRRALEALPHRADEWIEEPTGRSYAEVYGGMTDPAQRRALLLTDGVRLYCGPNYRHVQADDLQGRMHRHGSANAVPLAVHGPAGPLPWEAGYVEPFDPESELAPIDPEDPPIEPKSLTDLNRGDPTGDAVTARQNAGRSK

SEQ ID NO: 1344 - protein, 595 aa, unidentified
  source 1..595: note = uncultivated organism
MTAPAPLRAAAYIRVSDDAQDKDGTPETQRLRIVEYAKNRSTELERSIEIVRWYQDVYTGGDSYYDPNRRDFEALKLAMRRGDFDLILAYKDDRIARGTEIVSFCQECQHFETMVETALDGPLTTNTMIERLILFMRGGGSEEELKKIRSRASDGMAKRAHQQKRVPGCRPRYGYMYDDDRAKAKNRLVADPHTAPIVERIFREYASGRSLRAIGVGLQADGIPTPTLYANRKNPSLMWSFGTIQNIVRDPIYRGEAVALKHRNEHGKTDGKNWTRPKLRPEHERVTLPVGTVPALVEDDVFAIAQERLAVNRALSVRNNPDPDATILRSGLALCDYCGHPLVTRNAPRNSCRVYECSSNTRRRYGCPHFTISAHILDDFVWSKLSAALRDTETIRDELDRQMDADFDIAGKDDLAAIDRELGEIDRRLNGLARDVAKLAGSEYATAALLREMEMQDKHRSTIVANRADIVARQSQRLEDWASWERWADMMRDAQDEIDGYGPAERRDAMIRFGVQARVRREGDGTRIAVTAKIDLDHFAVPYQARHPIYIQRVTPETYVSERQPSEIVYDPKADPFAANERDVQLTTARRSAPS

SEQ ID NO: 1345 - protein, 544 aa, unidentified
  source 1..544: note = uncultivated organism
MTAPASRPRPAKKPKRTNQTLPAGAPRRIAVYVRRSTDDEHQPFSIDAQVAKLNSYIDSQPGWTLAATFSDDASGATTERPGLHAALTAAHAGRYDVLLVYRVDRFSRRLTDMMALVEQLDTADVAFCSATEHFDTSTPMGRMFLQLLGMFAEFERSTIIDRVINGMTAKAGKGKWTGGTRPYGYLVDHDDDRLTPHPTEAPVLREIFDLYVTARLGTRTIANQLNSRGMRNRTGKPWSGHNIGRILANRVYLGEVHFRDVVATDAHPALIDETTFAAAQRLRDARGDKQTQRAGSDSDYHCTGLITCPRCGHKYVGTSATGKTRRYRYYTCFSRTRYGAAGCPAGRIDADDLETAVLTAIAHTFTSRTDLLADVVTRARQHHHDSHAHRRAELATVETEIASARAAIDRYLTAFENGTMNDTVCAPRIATLEAKIIQLDARRTELVDLISTEPTAPGTDVLDALRHRIRRVIAAGTPAQRKELIEAMVAEIRIDGDTVYPIFLLPRDDETPAETDSTGVEEPPFRTMVRSVGRAGLEPATEGL

SEQ ID NO: 1346 - protein, 559 aa, unidentified
  source 1..559: note = uncultivated organism
MKENLPCAIYTRKSSEEGLEQGFNSLDAQREACEAFVLSQKAQGWKVLESSYDDGGFSGGNANRPALQRLLADVASKRVRIIVVYKVDRLTRSLADFAKLVELFDAHEVSFVSVTQQFNTTSSMGRLTLNVLLSFAQFEREVTGERIRDKIAASKRKGMWMGGNTPIGYISHERTLIIDEPQANRIRDIYRLYLELGCVMDLKEEIDRLGWLTPIRKTRREDAIGGKSFSRGHLYRILSNPIYIGKIPHKDAVFEGNHPAIVDGEMWNAVRDRMGGNLKRHRSRSIAADPSLLAGLVFDDRGDHLTPTHTKKGSRRYRYYIAHTLIEVGRKAAPHAVRIPAKEMENAVLSAIGEYLNDESRLINLMGNIEANVARRQLKYAAGMAKQLSEAKTSGRIEILKRLVARITVSKENLVIVVRTGQAWSLNDALDSDSPLTSIEVPVQLKRCGMAVRMIVRAPGKTANRRPDSKLIALISKAHKWFEKLTSGRYDSIKAIAQDEKVTPSYVTHVIYLAFLDPGIVQRILSGNHPLELSADRLIRMVPLPESWVEQRKLLGMNS

SEQ ID NO: 1347 - protein, 581 aa, unidentified
  source 1..581: note = uncultivated organism
MAELEKTPRRSAKKARCAIYTRKSTDEGLEQAFNSLDAQREACMAFIQSQKHEGWMVSQTLYDDGGFSGGTLERPALKRLLADIEAGEVDVIVVYKVDRLTRALSDFAKLVEIFDRRGVSFVSITQQFNTTTSMGRLTLNVLLSFAQFEREVIGERVRDKIAASKKKGMWMGGMPPLGYDVKDRKLVVNDAEARTVAVIYRRYLALKSVHALKDELAEAGIRSKRRVRPDGIEYGDQKLSRGALYLMLQNRIYRGEITHKGNSYPGEHPAIIELPLWHEVQTVLAKNRVERATGARARHPSLLAGLVFDETGERLTPTYAVKKGTRYRYYVATALLIGAGKNRSSGRRIPAGNLEGLVIERLRAFLADPAAILDALDNESDAGSGQSQLIEHGRQIAEELGAQAPNEIKTTLMTLLCRVEIKPDRIEIDLSRRRLAELLGRQPIDLMMHDQKLDRKSDDVVKLTTPARLQRVRREMRMLVENSDDHTTADPSLLRIIARAHDIQARLVQNTKLTVHDVARDERVTAAYIYNLLRLPWLAPDITTAIVNGRQPQQLNAKILMRQASRLPTDWAEQRTLLGFR

SEQ ID NO: 1348 - protein, 514 aa, unidentified
  source 1..514: note = uncultivated organism
MRNAGIYVRVSTERQAQEGYSVAAQKENLTKFAKSNDFKVFNFYADEGISGKNVEGRPAIKKLIEDIQNGKIDVVLIQKFDRLTRNISDTEDFIKLFQKYDVDVWSISDGKVDISNSNGKFMTLLKGLFAQHEREVTSERIKVALNEKARQGYTLCCSCTPYGYKREKGNKVIIINKEEAKVVKRIFKMYLDGVSFTSIAKMLNAEGIPTKHAGKTVNMKKNNVVVGSKTFVGVWMPKSVRLILSNPVYIGKVRYGIGRKDFYIGEGKHKPIISETMWNKVQDKLNKIQVKQRTKRPKDEVYFCGTLVCGICGKRLTTARTIGRLKKDGTSSVFCSYRCINQEKDICNSRYISHYKAEEAFIEYLQNNIEQFDTIDDLVIKEENVERDEIESIKRLINSKKAKQKEVMNLFMSEKIDYSKFKYMSDELDNIVKTNELKLQKLEASIGNKPVAIDKSKISKYIVDHWNYLTNKEKYDFLSEFVESIVIVNRNSDRYNGKAEVVDVMLYDYQQKKS

SEQ ID NO: 1349 - protein, 609 aa, unidentified
  source 1..609: note = uncultivated organism
MNELFSLENKYRKNANANIITDEFGNKKISVGVLDRVSTDTQAIEGDSLEMQRELAQDYVKSINGEIYKFYTEEGISASKTRIEKRPKIQELIQDIQNGNVNYVVAYKRDRIFRNAQEYMWFIQFLVDHNCEIYLTARDEQQIDLSAFKIAGASKLMEVMMAMISEMESETTSSRVSDTMINLAKKGEYTGGSTPIGYRRENGKFVPIEGVKELFHKIENLYLRGYGKFSIARWLNGGVVKGLQTLDNPIPKPIEHKSSETWNHRNIETILFNPIYTGHFSYQSKKNIDLDRMISKSELIEPIRTEERQREISLFKIQKTSNSKPPRAYNTPFLLSGLLYCSECGEKMITSTTQPKGSKKTHSYYRCASKAKQYLKGKCSSNNYSKETIEAMAIKLAIIQIRRFLESDTLSNIKLKQEVDKSLYAEKADTIQNKIKSCEKKINRYDSLIEKLDDSNDEGDIELQRHYMKKQKELLIIINNLKIEHEEISIKSEEDKSDKFNIDDLAKLANEFINHVENRPVGEQKRMLERLFSKFYVDKNGNIKLMIKVGLTDDLLKEVESNEDDTDVISFSPSGSPPVMLSVFKCGISSSRFVIKFIGSASGSLFCNV

SEQ ID NO: 1350 - protein, 511 aa, unidentified
  source 1..511: note = uncultivated organism
MNAIYGRQSVDKKDSISIDSQIEFCKKEIGDEPFKIYTDRGYSGKNTNRPEFKQLIKDIESGLINKVVVYRLDRISRSVLDFSKMIDVFEKNNVGFVSTTEKFDTKTPIGRAMLSIIIIFAQLERETIQQRITDNYYARGRRGFFMGGNAPYAFNVEKILVDNKKVSIYKENIDQVEHLKYMFETYAYTDTSLGRIIAYLNENGIKTKSGTVWDNAKLSSILKNPSFVKADPDIYTYYKNKNCIINNEISDFIGENGCFLFGKRPSNERKYTNVENHTLSIGLHKGIIDSHTFLLCQYKMDNNKQLKNTGKGKNSWLSGVIKCGYCHYSMSALIDKRYNNKYFICRKKSINVCRGHNEVIYMDKVENSIEKRIFKKVKELNVKNININKNNSVDTKINKIKIQIAEIDKQIENMINQLVNANEVVTKYMNNKITELDKEKQELIKQVEKEQVKNIKQIPINNIYAQINNWDNLDLEKKKLICKFLINKVFIFDNDIEIDWNVDEEEMNEDV

SEQ ID NO: 1351 - protein, 646 aa, unidentified
  source 1..646: note = uncultivated organism
MTTPSRIRCAIYTRKSSEEGLEQSFNSLDAQREACEAYIVSQRHEGWQLIPTQYDDGGFSGGNMERPALKRLLDDIAAKRVDTVVVYKVDRLTRSLADFAKIVEQFDKQGISFVSVTQQFNTTTSMGRLTLNVLLSFAQFEREVTGERIRDKIAASKRKGMWMGGSVPVGYDLDDRHLVVNPAGAEHVREIYQLYLKLGCVTKLKEYLKQAGILSKKRTSRTGRVSGGATYSRGALYLILHNRIYLGQITHKKASYPGQHAPIIDQEMWDQVQAQFQSNLQAPRKRPRSTEQSLLMGLLYDECGNRFTPSHATKKGRRYRYYVSQAVIKKSRGNHTGPVRIPASEIEELVLSQLTLLLRSPQRILDILVGSDASSAEMHAVMDASREWSTATPEKVRSLLRSTVKTIAVHNDRIEIEIIRSALRQTVLGVPNDPAPLSTNFDDVVMIDAAAQLKRCGGEVRLVLPPDSPGTKQQSVPSLIRAISRAHDWVDRILRGEVVNQRSIAKETGLDERYISRIISLAFLAPDLTEAIFSKASSRLIYPSMLVSGMSRTIGISSGRDCWDSKWRPSQASPERFLSGHCIAPDQLQLAIERFKIVGMQTNSPIMILLLCDKLIALIVFYAGIAFAAVISTKMCNRRMRCPAAP

SEQ ID NO: 1352 - protein, 533 aa, unidentified
  source 1..533: note = uncultivated organism
MKAAIYSRKSIFTGKGDSVENQVTFCKEYAEKYLENITEYLIYEDEGFSGGNVNRPEFQRLLKDGKAKKFDVLICYRLDRISRNVADFSTTLEMLQNNNIDFVSIKEQFDTTTPMGRAMIYISSVFAQLERETIAERVRDNMLQLAKSGRWLGGQCPLGFQSEPIVYIDSEMKERKLFKLSPIDEELEKVKMLYDKYLETSSIHQVQKFCLEHIITGKNSGQISSMSINDILRNPVYVQSDKRVFEYLEGKGINVFGSPNGNGMLTYNKVNSKGKLREMDEWIAAVGKHKGIISSEEWIKVQEALDKNKSKASIRQGTSKKSLLSGVLKCGKCGAPMRISYGRSKKDGSDRVYYYMCTLKAHSGKTRCDNPNVRGDALEEYVVKKIKSTNTEEILTKLEEYKKEAAATTTSSIYKKLIDEIENKNIQMNNLINQLSSNPSISEFIIPKIEELGKEIKDLKEKLLKAENETISIQQNVHNVEIIFQALNEFNDTFDSIEDISKKRMLLEALIDKITYNGDTKDILVDYWGSKKK

SEQ ID NO: 1353 - protein, 576 aa, unidentified
  source 1..576: note = uncultivated organism
MDKPASLRGGRRRRCAIYTRKSSEEGLEQEFNSLHAQREACEAYIKSQRHEGWTCLPQAYDDGGLSGATLDRPALQQLLADIQAGKIDAVVTYKVDRLTRSLADFAKIVEIFDAKGVSFVSVTQQFNTTTSMGRLTLNVLLSFAQFEREVTGERIRDKIAASKKKGMWMGGVPPLGYQCRDHRLIVIPSEAETVQHIFRRYAALGSVRLLRQELDAAGIRSKSWISAAGCRWGGKPLARGALYTMLRNRIYRGEIVHKDQHYPGEHEAIINEPLWDEVQAKLTANAVERATGERMLSPSLLAGLLYDGQGQRMTPSHAVKKGMRYRYYVSQPLINKAREAAPQGLRIAAAEIERIVLSAIGELISDPGRVTEALGPDVETASEQQQILVRAGEVAAAWPDLPAAQLRSAIAMLVQRITLRVEHIDIEIAGGGLYAFLRGAPAERAAVAESDHPLLLSFPTRLCRIGQGKRLVIDAAVRPGIPGQPDPKLIKLLVRGHHLKEKLRGRPGARIADLAMRERLSPSYVALLLRLTFLAPDITRAILEGRQPGGFTAQKLVTHSTLPLTWPEQREALGFA

SEQ ID NO: 1354 - protein, 588 aa, unidentified
  source 1..588: note = uncultivated organism
MKFFICFKGKEVKTLMARKSKYFSNENVVNKKIWSVALYIRLSQEDSDNGTEKQESNSVTSQKTLLNEFTDTHDDLIVYDTYIDDGFTGTDFNRPSFQRLLEDMRNGNINCVIVKDLSRLGRNYIEVGNYIEQVFPLFNIRFIAINDSVDSFKNPSSTNTILVPFKNLINDEYARDTSIKIRTSLNGKKKKGEFIGAFPSYGYIRDPKDKHKLIIDEVAAEIVKKIFHWNVNEGLGKIAICHRLNDLGILNPTGHKKLELGQNYNNYGIKDNTYTWTPSTIRNVLKNEVYIGNTVQGKRRAKSYKIHKIENVPEEEWVRVENTHEPIIDRETFEKAQELSRKDVKVSQKTNELSIWAGFLKCADCGRAMNKKSSTNKGGNKYEYYICSTYKKKSNKLCTKHTIKEEWLEKAVMQVINLHIELLIDTEEIVQQINENSFQNTKNENIANVIVTKQNKIHQISNFKRTLYEDWKNEDITREEYIEYKQKYENDIERLNQNIERLEIEKKKYESQNKDQNEWIEKFREQKGITELSRDIIIELIDCIYVKENGNIVIKFKFEDEFKRILEYIKNNKLCIIEEKLGYRLKKN

SEQ ID NO: 1355 - protein, 533 aa, unidentified
  source 1..533: note = uncultivated organism
MKAGSSQKVRCAIYTRVSTDQGLDQDFNSLDAQYEASSAYIKSQAHAGWTLIRSRYDDGGYSGGSTDRPHLQRLLEDIRSRKIDVIVVYKVDRLTRSLADFAKLVELFDTRGVSFVSVTQQFNTTTSMGRLTLNVLLSFAQFEREVTSERIRDKIAASKRKGLWVGGPLPLGYKLKDGKLLIVNEEAERVQLIFRRYLEVSGINELARDLKEKDIHTKARTFSTGKTRGGIPFGRGTLTHLLRNRFFIGEVDYKGEILPGEQPAIMDRSLFDAVQKKLSTHQSHKTLTRQKSDPLLKDLLFDDAGHRMIATHATKAGVRYRYYASQPSLHGEARTAKLGSVSRVPATEIEKAIVSAIRQHLSKQTPPGNQQDLILDQTTLISLISYIEVKKAQLAITLKPTDEAAAPEVVSTAWQKPPFKRFREILLPHGTTRENIRPDRAERRARLVSAIARGRSWLDEIVSGSVIDAEQLAKRERCTVRQVNLTLSLAFLTPPLVKAAVEGRLPRGINIERLRDPDVLWSRQFQDLGLSSN

SEQ ID NO: 1356 - protein, 512 aa, unidentified
  source 1..512: note = uncultivated organism
MPAKRESLTRVAFYTRISTDEDHQKYSLGAQSERLEAFCKAQWGDDWRLHKVFRDTESGTHMNRPGLEEMLFDAESEAFDTLLVFRVDRLSRKVRELALMVDELTKFGVVLKSITEPFDTANAAGKMMLQMLGVFAEFEHATIVERTKVGMEKKAKTGAWVGGVVPYGYQLDPERGLVINEEEALIVRKMFRMYAIGKEGSSAICKQLNEAGHRNRNGKKWGRRVVLYMLKNPTYLGKIRWREILYEGQHDPLVSDVLFEKANEVLQERNEESAGRRWHNGDDRLLTGIIKCARCKSHMFGGGGHKNGVHVPYYVCSKRTNDHECIQDYVRAELLESAIVQDLKAMFRDEQFLARVWTEANKQLGAEKPNLDQEIAKVEAQAAKTRAAIDRYFEAFEAGTLDAGLCNEKVRDLRARLEELEDEKQDLEARRERLELPAIDREMMATLVEQFDRVMAEGPNPKKKDLLRRLVKKVLVHDRRTIEIWYGLPNPQGCEDWNNWLTGPDSIGGIIA

SEQ ID NO: 1357 - protein, 541 aa, unidentified
  source 1..541: note = uncultivated organism
MNGSPKKVFRCAIYTRKSTEHNLDLEFNSLDAQREACEAYIKSQAHEGWRLIPDHFDDGAFSGASLDRPALQKLLADVRIGKIDIIVVYKVDRLTRSLADFAKLVELFDQHSVSFVSVTQSFNTTSSMGRLTLNVLLSFAQFEREVIGERVRDKIAASKRKGIWVGGPVPLGYASIKKKLVVVPEEAETIRMIFRRYLELGSEGALVDDLDRRGIRTRQRTETKDRTIGGIRFGVGPLAYLLKNRCYIGEVVYRGEAHLGEHEGVLDRDTFEAVQAKLATGVVERRLRLKASPAVLSGRVFDDRGNRMSPTHSNKLGVRYRYYVSHAILQHRKAEAGSVARVPAAEIETLVLDGVRDRLASGGAAEHPTAIADRDLIERYVDSVIVKPRALEVRLVLPDEASAQTESSINDPDSSQLPITTITLAWMAPGFAAVKGIIHAPSDQPAMKPESRDALLIAIAKARVWMDDIRLGRSASFAEIASREARGERHIRQLASLAFVSPRIVAAIVDGSAPAGLTVTGLAKAPLYSWAEQDQSIGLPQ

SEQ ID NO: 1358 - protein, 503 aa, unidentified
  source 1..503: note = uncultivated organism
MKKICAIYTRKSTDERLDMAFNTLDAQREACEAYITSQKSEGWVISSELYDDGGFSGGSLERPALNKLLEDIKAGKIHIVVVYKIDRLTRSLTDFSKLVEVFDEYGVTFVSVTQSFNTTTSMGRLTLNVLLSFAQFEREVAGERIRDKIAASKAKGMWQGGSPPIGYRIENRQLVTNLEEAQTARRIFDRYLTLGSVRALKQELEHDEIKSPVRISLKGRTMGGVNFSRGALYAILKNPAYIGKISHKGKIHEGLHEGIIPPDIWEEVQAKLKEQAVARTEQSTHRQMLQGLIYDMDGVVYSPTFTKRHGRQYCYYISQNLLQDRDHPHGVMARLPAHEIEALIEKSVRNEIGNLVDEDEGAVWEHVLKHQGAIPAYDLIRKCVDRITINLDQITITLKPKNFKKLVEEQLNVSVTGCNEEFEITASYKTGSARRGAIVIEPKGEKDVFDLPSNKLKKLVQGVIWRDEHFDGMALKDIADRENCSQAYVGTAIFSSFEILQSL

SEQ ID NO: 1359 - protein, 552 aa, unidentified
  source 1..552: note = uncultivated organism
MKVAIYARYSSVSQREVSIEEQVNYCTNYAKRHKYTVVKIYRDKAMSGKTDDRPQLQELLTDSSTHMFQAILVYSIDRFSRNLRLGQVNLHILNENGVRLISATEDFPDGAPGTLFKNMMMCYAQFYSDELSEKIRRGIRYNAENGIYNGGGISLGYRVGPDKRFEVDPDAAQVVQSVFEMYADGKTVAEIVNILNKQGKITSKGVPFNKNSLHDMLHNKRYIGYSVYKDEEYPGMMPQIISEELFNKVQERLAVNKKARAHSKAKEEYLLTTKLYCGYCKKMMTGFSGTGKQGKIYRYYICNGTKERPKTCDKKRVNKNYIEDLVVRECRRLLSAENIRRIAKEVMTMASAEKDTSELKRLKKLLIENERKQKNTIDAITESDIESVRKALGAKIPELEEEHRGLEQLIAKEEEVYPTLTEEEILFFLNALKKGRVDDVKYCKMLISVFVNRIYLYDDRITITFNSGDKPVTVNDEMLSDLEAREEEYKALFDKDRVLFFDGSGPPLPEVLIFKASGTFSCVSKHFTAFISLQKADKVTIYCRQRYQDGAI

SEQ ID NO: 1360 - protein, 522 aa, unidentified
  source 1..522: note = uncultivated organism
MGKDQALRVAIYDRLSKDRTGEADSVENRIGSCRKYIEAHGWEIVEEPFIDRDISGYHNKKRPAFERVLTGIEAGTFDAVCVWKIDRFGRRMVTAINNVQRITDSGGVLMSVSDNVDTSTAIGRGVLALMFSLAEGESESTSKRVSLAWEAVAAEGRPHIGGVKTFGFTKDCQQIPAEAAEGRWAAEQLLSGRSLNATARELNHRAQDTGGKKNWTGSSLKKWALCGKVAGLRDHRGLMTEGTWEGIITPAEREQLLVLVGTTSQGGGPKSVPLYLLVGLVRCSQCHQAVGVKHGGGGTRNYGCKTNRNPEACGKVTASVPSLDRYITEELLAYLARGRVEPVGAAQDPKVLEASIETDTERLAKLNRARFVDERISDDEWQTARDELQERIETAKGALAALETGSHLRVGDRDELDAWWAGASLEERRAAIKDAFHSITLSPATKRAGPKLDTDRVTWKWRTWSGTGRRIMEKVSAEGWEPTEADLVAYAEAQAEESERADTSRTHARFRKGADGKVERIA

SEQ ID NO: 1361 - protein, 522 aa, unidentified
  source 1..522: note = uncultivated organism
MSKDNGKPKTIRCVVYTRKSTEENLDLDFNSLDAQREAGEAYINSQQHEGWVCLEDRYDDAGFSGGNVDRPAFQRLMADVAEGKLDCIVVYKIDRLSRSLMDFARIMETFEANGVSVVGVTQQVNTTSSMGRLTLNILLSFARFEREIISARTRAKSAAARRKGKWTGGPPVLGYDRQRDNRGTRIVVNKTEAERVRAIYRMYLEEGSMLPTIQALRALGWKTKRYETTTGKVRGGVEFDKSSLQKLLTNPVYLGKVTYKGEVHEGEHEAIVDEDLFARVQGLLRRNRNSGGKHTRNKYGALLKGLVRCKACGCAMSHHFATRGNKRYRYYVCIRAQKRGWSECPSPSLPAKQLEDFVVDQIKTLGRDPGVLDDALQATQAHLQRDVEDLEAQRNEIDKAIKDLGRQVGEIAPRAGFDDGATRQLGLLQAEIHDRQQEAAELNGRITSIRQRMLDPDELAGAIEAFDPLWETLPPAQKARLVHLLIERVEYDGANETISLTFHPTGIRTLTAEREEEPCPTT

SEQ ID NO: 1362 - protein, 532 aa, unidentified
  source 1..532: note = uncultivated organism
MPYCMYLRKSRADLEAEARGEGETLARHLQTLTLLAARLSLDVPPDAIYREIVSGDTIAARPMMQRLLQEVQDGKWQGVLCTEVERLARGDTIDQGIVANAFKYSNTKIITPAKVYDPNNEMDEEFFEFSLFMARREYKAIKRRMQAGRAASVREGHYVGGKRPYGYEVVKCQGSKGYTLKQIPEEARIVRLVYDMYLYQGHGTASIANHLNSLGSTTYNGHPWDAGSVRKMLEQPVYAGFVQWLKRESKKTVTPEGYTVNRPFSDRYILAKGLHDPIVSEEEYNRVREVAASRRTIAQVQNKHIASPLAGLARCACCGYALTRRPNRDDVFLVCRKPFCHNSSVRMDTAVSAVLGALRQWVEQYSDKGSPLGTPSSKSLPLGGGAERSEAERVNEGRDLDLSAAQDALTTAQRQLTTAQEMLERGVYSVDEYINRRHALQSKIDAATEAIKEIKSRPAPADPAADIIRNLPQIRRVLVEFPHASGAPEQNALLRSVLRSVDFKKTARRQRNNDPTDFLEVFLHPLHTPEDE

SEQ ID NO: 1363 - protein, 558 aa, unidentified
  source 1..558: note = uncultivated organism
MNITDKKIVKCAIYTRKSTEDGLEQDFNSLDAQREACESYIKSQLHEGWILVEKQYNDGGFSGGTLERPAVKELFQDIEAGEVDIVVVYKVDRLTRSLMDFAKIVELFDKHSASFVSITQHFNTTTSMGRLTLNVLLSFAQFEREVTGERIRDKFAASKKKGMWMGGNVPIGYKRQDKKLVSDEETLQIVEIIFAKYLELKSVIKLKSYLDENNIKTRTGRKFSKGNLYKILSNKVYIGLIHHKGIYYKGEHERIIEEEIFNKAQELLKQNRNNNKCSLTAKSPSLLAGKIFDDNGNRMNPSHSNTRGKRYRYYVSQAIIQGYKKQAGTLAKIPAGEIENLVKKEITGFLKDQSNIQEYISAFDVHKQKLILSDISRFELRNNFIRAILAKIVLFKEKVEIIICKEQLIKALESIIINELLLDEAKLDPEYAIKITKEIRISTTSRNGGVLIIKDGETQESNINPFLVKIIAKGYYWNKLLEEGKVKTIKEITEFEKDCNFDYIKKAIRLNILSPRIVESILSGTQPEDLTVMKLYNVKSLDWREQEKLLNFNSNLTA

SEQ ID NO: 1364 - protein, 558 aa, unidentified
  source 1..558: note = uncultivated organism
MTAVLRCAVYTRKSSEEGLEQAFNSLHAQREACEAYIKSQQHEGWTLVETAYDDGAYSGGNMQRPALLALLEDVKAGKVDVIVVYKVDRLTRSLPDFARIVDVLDAAKASFVSVTQAFNTTTSMGRLTLNVLLSFAQFEREVTGERIRDKIAASKAKGMWMGGLPPLGYNASEGKLVVNTAEASQVNRLFALFLQTRSVDKLLPLAEAEGLRTKARKSSAGQTGGKPYSRGTVYHLLANRVYVGEVRHKGKHYPGQHQPIVDPETFEKVQAIIASNRHKRAMGGNATEPSLLAGLLVDGQGRRFTPTHTNRRGRKYRYYTRAAEGSDEALRLPAESLDRAVLDTLREFLKADERILSATGAKTSHDADAAIKASIAALAGLEDQKPKVLRQRLRAMVETIVLSPDQIALTLRPDALPGVTLVQTDLTAPISIVRRGRDLKLVVEGQSQGPDQKLINLIALASTWFDEVAQGRVATLTALAEREGVTPAYVAQVIDLAFLAPAIKQSILQGTQAPGLTTMTLKAMRPLPLCWEQQQDLVFKAGGWAPRAQPEVAVRVLT

SEQ ID NO: 1365 - protein, 520 aa, unidentified
  source 1..520: note = uncultivated organism
MAKPQTLRCAIYTRKSSEEGLDQAFNSLHAQREACEAYIKSQHHEGWRLIKTLYDDGGFSGGSMERPALKSLLGDIDNGLIDVVLVYKVDRLTRSLTDFARIVECFDSHVVSFVSVTQSFNTTSSMGRLTLNVLLSFAQFEREVTGERIRDKIAASKAKGMWMGGRPPLGYDVRDRKLVLNEEEAAKVRLIFQRYLDVGSVTSLAQTLKLDGIHGKRWVTQKGKTCGGSVLSRGALYGLLRNRIYLGEIVHKGEVYPGEHGALLDHDLWDQVQTMLESHRRRYASGVRENACLLTGLLFDDNGNPMSPTHAVKKDGTRYRYYVSQALLTGNKSEAGSLPRISASAIEGLVVRQLAEHLPPSPNKSELQKVGRSLVCSEVTRIDIAKDRVMIHLADQVIRVPVCLKTRGGATLLVTPQGTHQNQVLRVDPKLVRALARAWRWRRALEQGNAHSIMELANQAGHTERYITRLLRLAYLAPDIIDAILEGSQPFDLTLGKLRATEIPLDWHHQRQVFGVTTSP

SEQ ID NO: 1366 - protein, 553 aa, unidentified
  source 1..553: note = uncultivated organism
MNQGNSRTRRCAIYTRKSSEEGLEQDFNSLHAQREACEAFIKSQQGEGWRLIKTAYDDGGFSGGNMERPALKQLLDDIGRKLVDVVVVYKVDRLTRSLADFAKMVEVFDARGVSFVAVTQQFNTTTSMGRLTLNVLLSFAQFEREVTGERIRDKIAASKRKGLWMGGVPPLGYDVRDRGLVISQAEAETVTQIYQRYLELGSVRLLQDDLDRCGIVSKVRVSKKGVKSGGNSFSRGALYKLLSNPIYIGEIRHRKESHPGQHAPILERELWEKAQEHLRNHAAQHRERPTKALPSPLAGKLFDENGEPLYAQGASKGGRRYRYYVSRALVRGSAEGAPGGWRVAAPEIERAVTIASRQLLEDQTAINEAVEASADLKPALDAASQWNRRLRAEAEAPAALVELIERVELAEGGVRIALKLPMSSEHGAATVGLCRFVPIKMKRRGVELRIVLGANDDASRRIDPALLKAIARGSRWFEELASGRVRSLAEIAKREKLGRRYVERVTRLAFVAPGIVDAIAEGRPAVGMNLQMLMDGRLAFPPCWAEQERVFTR

SEQ ID NO: 1367 - protein, 532 aa, unidentified
  source 1..532: note = uncultivated organism
MIQRAKSVSATASEVPILRAACYCRKSTTKNLDSDLTSLDVQRARAEDFIRSQSGLGWVVLPERYDDGGWSGGDADRPALNRLLQDIEARKVDVVVVYKIDRLSRSLFDFTRLLRTFESHNVALVSVTEPFNSSTSAGRCLLGVLATFSEYERALCRERTKSKLMAARKAGKYTGGCAPLGLSPKAGKLVISEPEAEVVRAAFAIYIERRSYLDTATELNRRGYRTKCYEARTGRRHGGRQWDKGSVAKLLSNALYVGRVCYEGVEYPGEHEQIVDEATWNAVQAIRRANGRTDGVSPGRNRHGFLLKGLVHCKPCDAAMTSMFATKRGRRYSYYLCTRAAKEGWALCPSKSVPLAALEQFVVSKIAAIGRDPKLQAEVAAQARRLLEAEVARLRAERDSARRELKGASAALLKRIEKAGRKPADGAAPDPATEELREKVEALERRVEDLADALAAAEKKTIDSDDVARALVKFDEVFETLTTVERARLLALVLERIDYDGGTETIDLVFRPGGFEALAAENPNNTEIEEPA

SEQ ID NO: 1368 - protein, 538 aa, unidentified
  source 1..538: note = uncultivated organism
MSFGTKNDDRIALFSEQSPVWEIPSSASSGKKQRVAAYCRVSTLSETQTSSLESQRLYFERKISCNPDWTLAGIYLESGLSGTSAESRRELQRLLSDCRAGRVDLILTKSISRFARNTSDCLQMVRALVASGVDLWFEKEALRTDTMGSEFLLTILAALAEEESRSISANIKWGINTRFRSGTYIQSVVPFGYRKFQDTLVVSPEEAAVVQSIFLSVLSGIGVSSIAHDLNNKNIPSPSGRKWGRTTLLNIIRNPVYIGDMVYQKTYVDEHYRQHRNLGELCQFVFPSHHDAIISREAFNLALQNLRQRGREYGVFSAAENSENARRRRHRSVLSGKVFCARCGSVMRRSSSGRYPVFSCPGSSSSFCDNRNEMEDTIKNAFLTCLNKLSWSQRLPPDNRIIDVYIHSLQESECVRNAAHMEAIDRQISKLRKLQSSLIASPSARSYPERSAEITALEKHIAALLDEKYQLSKISDRQLLAAKLREFLSHWQIAADSSAFPNRLFSETVTRIEVHGHITVTFFFSCGLVLSESLKRDI

SEQ ID NO: 1369 - protein, 510 aa, unidentified
  source 1..510: note = uncultivated organism
MTRIHLTPTPDLNTSVLPHLGVRGLRIAIYVRISKDDTQSMAGVNRQEALCREMIAQRYPGDHTITVYSDNNISAWSGARRPDYERLMADVQAGNLDLVVCYATDRLYRRVRLLEDIITMTEVNGSFVPIVGVRSGDLDLATADGRMHARMLAAVAQHSSDKTSERLKDRNAEEAAKGFAPPGPAPYGYTRMPNPGGAKCGHTYVINEPEARIVREVVTSIEAGDSMVSIARALNYRGIPKRSGTEWKPDDIRRMVMSPAIAGLRGHTPRAKKGKVWRQSVTGKGNWKAIVPAHRWEAIEETLSDDSRRQRSPGTNYWLSTVLVTEDGRPLVGSVTRGSNGIDRRIYRPTSKPFVSIDADQVEDAVGRVLRLAGSEVVGVETPDVTDDEIALADQLEAIDAELGDLSRRVKLPTDHPDYLLPVERNGARAGLLEHRAKVIADMPAAQQRSILAPGKTLADEWDDLDAGDRRFMALDLLGHVTVTAVGRAKVPVPERLSFEKGFPVPGAAA

SEQ ID NO: 1370 - protein, 519 aa, unidentified
  source 1..519: note = uncultivated organism
MSAKTKAADTIRCAIYTRKSSEEGLDSEFNSLDAQRESAESFIASQKSAGWVCLPEQYNDGGFSGGNVERPGLKRLIADIEAGKIDCVIVYKVDRLSRSLMDFARMMETFEQHDISFVSVTQQFNTTHSMGRLTLNILLSFAQFEREIIGERIRDKIAAQRRKGKWAGGTPVLGYDVDRSGGSPKLIVNRSEAIHVKAIFELYLELGSLLPVVDELKTLGRPNKAWHTTRGKPKGGKPFDKCSLHALLTNPIYIGKVKHKNNVYDGEHEPVIEIELFNDVQTQLKSNSRLPSGQVRNKHNAFIRGLLFCKHCNSAMVHTFTNKRNRRYRYYRCAQLIKQGRTSCPTPSLPATEIERAVINEIRMIAKDEDLQEEVFSRAKAILEEDQESISRSIGNLTRQLSKDQNELQRLSESPDPSSTIATCMAGLNERIQQNETELTRLNRKVAEQKERSIEMDEVILALNDFDQLWDTLRPREQQRVLALLVSRIEFDAADNSIKIDFIDSTSASPLPKERLAPC

SEQ ID NO: 1371 - protein, 519 aa, unidentified
  source 1..519: note = uncultivated organism
MANQVKTPKVTVIDPAAPEKAKLRVAAYARVSSDSADQLNSYLAQVDYYTRHIGENPDWELADIYADEGISGLDTQKRDEFNRMMADCRTGKIDRVLVKSVSRFARNTRDTLHFMRELMRLGITIRFEKENIDTGRLSSEQTATIYAAFAQMESTGHSSNMRLSVKMRMEKGIFTPSSMPYGYHLNGLEPEIVPEEAEVVQHIFSSALRGQGRKDIARELNELGIERGHGRKVWHHTTVNYILTNSFYTGNSVWQKFCTTDTLPFRKTKNKGQLPTYHVEDDHPALISLEDFQRVQALIAQRREQFYTGTAAPRSVYIGKIYCGRCGSKFRRKGSGNKVYWDCYRHNAGKDQCASHQIPETALTAATLRLHNKLVLHGQELLQSLLDQLREIRERELRSNQKLSDIDKEIANISGQNLVLIRLKSKGCIDPALALSQADQLNRRLRDLRRLRRKVLEAADGDEQIQATEAILDYLETAQWQTEVTPDLFENLVERITVTSAEEVKFRLLNGLELAERLV

SEQ ID NO: 1372 - protein, 585 aa, unidentified
  source 1..585: note = uncultivated organism
MIAIYSRKSKFKEEGESIENQINMCINYAGNVLGLTEYEIYVDEGFSGGNTNRPKFQKLMKDIKNKKFTHLICYRLDRISRNVADFSSTLEILNKYNTAFISIKEQFDTSTAMGRAMMNVSATFAQLERETIAERIKDNLRELSKTGRWLGGPTPLGYKSVEVENLDGKGKNRKKHILELYPEEKHIIEMVYSLFLEYKSFQKVSRVLESKGIYSRTGKVFSRELVKQAITNPTYCIADTNIIEYFKSKGTETYLSNGFNGVNGIVGYNRRKDNGSFAPIEEWIISIGEHEGIVNSDTWIKCQEIVAEIKKDSKANRKGTSQEALLSGLVVCGVCGSGMAPRQQKCGEYIYRYYSCNLRNKASNRCNNDALNAYDAEEKVIERLMSITKEDIIEDFKQLEKKKYKKVSNKDIVTELNKEIENNKKAISNLVMKIAYMDNDPILLEPFKEQIKSITIQNEEINTKINQIEFENKDIDTTNETLEEILETIYHFQKFYEFTTNFEDKKRLIKSVVKFITWDSETRKLDVIPIGSDKEHPRQPLLHLGGSSRRNGTCRNDSYNGLSINGQCFHRRNKSCRPWWKVCRS

SEQ ID NO: 1373 - protein, 615 aa, unidentified
  source 1..615: note = uncultivated organism
MIAPNKKYARCAIYARVSTDDQTRGDYNSLESQHDICRHLIGVHQHEGWQETHFFEDPGFSGKNLERPGIQALIQAIKRREIDVVVTYKLDRVARSVRDFFDFWQLLEDHNANFVSATESFDTGTPAGRLMLNMLLGFGQYERELTAERISDKLAERAKRGKWAGGTIPLGYDYDPQTKKLSANQDEAALVKRIYTLAAEWGDATMIAQQLNDEGARTRQRVYQSRGSEKQVGGKRFRSDKIKQLVANPLYKGVVRHRDQEYPGEHAGIVSPKLWDKANEALNKRELEPAPAVRQSAKHQAALKGPAHCGHCGNSLIPHPSGKKDANGKQYLYYKCGCVNRDGQHSDCPLRSVPARPLEKIVVELIGELGRNPVIIKKSIAASNSQKQKSLRPLKKKLAELNKRHGEISAQLRHYLELAGKGDRHFSFEIRAEAEKLAADKHAVEIERDKVRIDIDYKERVVTDHEVIAARLSHFKDTFDALPYEDQKEALRLILKGICIKKFDPENDRLPSGKPCTTLKIRTSLYLVQLEFIASDLMPTFSRSGGESSSFSPNGGEGGIRTRGTQKVRIFSKDVLSATQPPLQRNLQTTDAFCLCQCYKRELAAAGFMAFMAAS

SEQ ID NO: 1374 - protein, 528 aa, unidentified
  source 1..528: note = uncultivated organism
MIQNVADIYIRLSDQDRNKKNENDESESIQNQRKMLVDYCRKRKWQINGIYCDEDYSGADRSRPAWNRVLKDCEEHKCTIVLCKTQSRFSRDMEMVEKYIHGKFLEWGVRFVSVVDNADTDVNGNKLSRLFNGLIDEMYLDGLSNNVKATLSIKRKNGEFVGSFAPYGYLIDPNNKNHLIIDEIAAPVVQRIFDMYINGAGYIAIAKALNDDCIPPPCERKKQLNSKYYNVNFECSTSPESRWSDAAVYTVLRRREYTGALVQGRETVSNYKTGARRKKPEEEWDITENAHEAIISTETFEAAQEIRKKRGRSQKIPTGECYSLARKVFCGECGNTMWKNTCIVRGEKHSYLACRTRKTSNTGCDNKHQIDLNALEDVILSKLNELLALYYNKKIIGKISAERHVGYNDTSVLSELKVCKDNVKRNAARLEKMLDNMLDGILPKEEYEKNRKRYLKKIENSNKRAEILKKQLAEGCGFTEEINTDKVIDSFKRIDRLTFEIADKFIERVTVYKIDEDGKRRITVEWKI

SEQ ID NO: 1375 - protein, 545 aa, unidentified
  source 1..545: note = uncultivated organism
MKVAIYIRVSTEDQAKEGTSLEVQREFLINYAKKEGWEIYHPDGKEVYEDDESGYSRERTELKRLLTDAKRGRFNMVLVYKIDRFSRKLKDLLNLVDELEEMNIGLKSATEYYDTTNSAGKMMFQQLGSFAEFERNRIKERVFPGMVKGVQRGNWQGARYSPYGYSYNKLDPEKKLRVVEEEEKIVKLIYTMYLANQSTARIAGYLYKKEYKTRSGGSFHTKLIGDILKNQVYLGKIIWNRHHYDKRNKTRKGYRYIKNEDSKVIIADGRHEAIITQEDFDLVQKKLKANRKGVMHRNGVKEYPLSGILFCGKCNHKYLGSVNISQHRLGIKKRWYRCNARQVHFIKCLNAAVRAEVLEPEIFAILEQIIEHPELKAKRFDNIVKSRVQLADEQLKEQKDKLREELKRNLDKQSRLNEAYLDNLVAIEVFKDKSILLREEEKQLKNEIARVEMRLVEKERSEQYQLLLGRVIDNYEETRKNVDIVAKKEMLRLIFKRIMVNDGKITGIEFFEPFKRFYEETKCNVTPIKTAGREESYILSPSAVK

SEQ ID NO: 1376 - protein, 511 aa, unidentified
  source 1..511: note = uncultivated organism
MRHVPSAPLSAAPTPRAIAYVRKSSVETERRSISEQETDLRRQAAALGVAVVDVQAEEASAYAERERPVFTRVLAAVESGEADVVLCWSLDRFSRRGAGHVMGLVDKGLRLVTLDGIDTTQEHGRMQVAVMAEAARMESSRISTRVRRAKSAARDEGRWHGGRPPYGYRISGKGRSLVLVVEPAEAVTLREAARQVIAGESLYAVVGWLNESGAPTPAGAAWKAKGKGLLWSSTSLKSALSTPTLAGWLPHDGDVVRDESGAAVVAHEAILPPPDWRAVQAALAARAATAPGAVSTGGRPPSRLLSGMLHCPCGTVLTANAQGYRCAGPKGRPGDRHSAVRRSAENLVASMVLRRLGALEPGDPELEAVAVAWGRMTGQQNDHERRLRADAVDVARSEVDRVIRLVAKGIVDEDEAARTLPDLRAAVVRAEGALADLGPSSVDVTFLLDLGQSADDPELGPLGKGSAWDNLSPALRRTVARAVLERVEVAVAQQGARDMAARLSPVWRKQD

SEQ ID NO: 1377 - protein, 523 aa, unidentified
  source 1..523: note = uncultivated organism
MPKVGIYCRLSIEDKDKLGSDSSQSIINQKNMLRDYCRERDWEIYDIYVDDGYSGIDRCRPEFNRLLHDCEAGNIDIVLCKDQSRFSRDTVVIEQLINDKFLEWGIRFIGVADNADTDSESYSTMRLFTSAYNEMYVKDISAKIRRTLAYKREQGQFIGSFAPYGYQIDPNDKHHLIIDEETAPVVRLIFDMYINGYGYRRIVQHLNDDGIISPTEYKRQKGSKYVNANADSSNAKGLWTQCTVSRILANEMYTGTLVQGKSHHISYKNKKRKKVDPSDWVRISNAHEAIIDAETWTRTQERLNSHARVGKRSQELSPLSGKVKCACCGRPMKRNVYYNKAKTIKYYGLQCATYKTGAMNCPNKSSISGLVLEKHILDELNAIVEKYCQTDELQLTDIHSEQLKELEHRLGTLKGKRQTAKERLVKMYKDKLDGVVSDEDYALFRESLSADEEKLTKQIAEVSQQMEDCRKRCDSAESQRALIEKYTHFDKLDRTVADEFIDFVEIGMTAESGEREIHIHWKL

SEQ ID NO: 1378 - protein, 545 aa, unidentified
  source 1..545: note = uncultivated organism
MPPLHKPLGRTGLYLRLSRDDEKEGESLSIENQRAILREYAEKNGGTIVGEYTDDGWSGTNFDRPAVKRLLEDAKEGKIDTVVVKDLSRFGRNYIQVGQYIDYIFPAYGIRFIALADNVDTADRTSAGMDMMPIMNVFNEWHAANTSKKIRAVLESNWRRGKYTNWAYPYGYKAGTDENRTAIIDEDAARVVRRIFDLRLQGHSARAIARILTDEGIPNPTAYYTRLDGKKSERNASPYWSPKTICDILKDETYLGTLTQHRTARLSYKNRQVLLVPQSEHIVKENAHEAIVDRETFEKVQAIFDGVSRGRADKAKKVHPLSGLLFCADCGKKMKFKSSGRWQKDGGGRYVCRTYTELGKKYCTSHSICEKQIESVVLQDIRSMLGRIEPEEKRIKEHFFAERTKRGCKDRLSYEKELRTLQDRLVQLEKLIESAFEEKVLGDLPESVCKDLCRKYQAEKDRAEGKIAAIGKLLEKGQSADEEAEEYVARYKNYARCGELTREMCLQLIEFITVGERPKENEPRQIHIYYKFLPIGTRTEQRQKK

SEQ ID NO: 1379 - protein, 504 aa, unidentified
  source 1..504: note = uncultivated organism
MSKGRRAAAYCRVSHDDGDSAEHESIANQRRIIEDYCARRPELDLVACYADDGFTGTNFDRPDFKRMLSDIEAGRIDCVVVKDLSRFGRDYIDMGRYLERWFPAHGVRFIAVGEGVDSARGAYDMMLPLRNVFNAQYARDTSDKVRRTFRAKQQRGEFIGAFAPYGYAKDPGRRNHLVVDEEAAAVVRRIYDLYARGMSFGAIARALDREGVPSPLAYKRQHGERLYVGQTAENTRWSSTTVGTILRSEVYRGSTVSNRFPTGQMHGKTRRAPRSEWIVVEGTHAPVVTAEQWAAVQARLPAAKPAAAAAPSLFRGLLRCGGCGGAMKRHGGRYCCLARRNCGPAACTGRSVSEATLTSLVLEDLNRVIARSRMLDAPLPTAPEPSGQDGEQESAAAVERLERLKRNAYEDYRGGVLAREEFARRKAEYDEQARALRARRVPRPAAARERAGPSAWVKRLLTRGRLTELDRATLEQTVERVCVFADGRVELVYRFSAAALSDGA

SEQ ID NO: 1380 - protein, 538 aa, unidentified
  source 1..538: note = uncultivated organism
MELCKEYIRNTFGGEYVDCCVVFEDEGFSGGNLQRPDFKRMMEEVRKRKFQAIVVYRLDRISRNISDFTGLIDELTKLDVSFVSIKEQFDTSTPMGRAMMFIISVFSQLERETIAERIRDNMHELAKTGRWLGGNTPTGFQSGSVSKITIDGKERKSYKLIPIPEEIEIPRRIFDLYMETDSLTAVEAELLRQRIKTKKGKEFTRFAIKAILQNPVYMVADEDAYDYFIGKEAEVCFPKKAFDGSCGILAYNRTNQEKGRSTQLLPASEWIVAIGKHAGVVPSKQWIRVQESLDRNKSRAYRKPRNNEALLTGLTYCSCGERMYPKLSQRTTASGDISYTYVCKMKERSKRERCNRRNANGNILDAAIIAQIQSLTDHDSSLIAQLVKSRAFYTGKREQYERQLEDLRIEHAANEQTINGLVDSLGMVGDSVAKPRLLKRIEALCEGNRDVEKRIRELEGLINVNALGDGEFGLLRQKLSMFRTSIDDMSVEEKRAAIRTVVRKVIWDGMNAHVVLFGADAGYDNVKKENGDQGTENL

SEQ ID NO: 1381 - protein, 507 aa, unidentified
  source 1..507: note = uncultivated organism
MAEITIIPARERSDEVVRTAAYARVSSDSEDQLNSFAAQIRYYTELLSNSTDAVFVDMYADEGITGTSAAKRADFQRLMNDCRKGKIDRILTKSVSRFARNTPECLAAVRELKTLGISVYFEKENIDTAEISTEMMLALYSQFAQEESMSISRNCRMGVHKRMMDGTYKTASTPFGYDYVDGKLQINPEKAEIVKQIFAWYVSGIGLSEIAARLNSQGVRKEVWRHGTIRCILTNEKYIGDTLLQKRFTTNTLPFKAVKNRGEKEQYYIEGTHEPIIEKEIFYDAQKIFSERNKPSGLAKEQSPFSKKIICCNCGTSFRRKPRKGCVCWVCRKHDTSAENCTIRQIRESEFRAAFVRLWNKLQAHYKVILAPMLRQLETLSEREKSGNVQLANLRKEIAETKQQIHMLAVLNSQGTLDGAYFKKRTQELDRKLLTAQKQLHSSLDDKDGERLDELRKLISIFERAEPIPDFDDIKFGQIVEKITVLSETEIRFDLIGGIGFTERIAR

SEQ ID NO: 1382 - protein, 513 aa, unidentified
  source 1..513: note = uncultivated organism
MKEYAMYLRKSRSDLEAEARGEMETLSRHFGILSGMADRMGITVSEDNIFREIVSGESIAARPEVQKLLHNVQQGKYAGVFVVEVERLARGATSDQGIVSDSFRYTHTKIITPVKTYDPDNEFDEEYFEFGLFMSRREYKTINRRMQAGRLQSTVEGNFIGSIAPYGYEKVKRDGYHTLALHEKESKVVRMIVEWFLYGAEVEGFDGPQLLGTTKIANRLNEMGITTKKGRRWSPEKIRTLLLNPVYAGYVKWGFKKTIKNYTDGKLTTSRPRNYDAELYPGKHPAIFTENEYAQIREKFSTNTRKSGGYGANHISNPLAHLLYCQCGKGMSRRTYNGPKQCKSAPRYLCLQQTYCHTKSVAVTDMLKTVYESLLLLKKDAETKLQNQEYVVDTKSSEIAEMKSNLAELQATETKLYDYLERGIYDEETFVARRTKLKNEIASLKNLITKKEQERPPQIDYQNRIVKLEDAIVALSDETLSAGTKNAFLRDIIEKIIYYRDDEESYHIDIFLK

SEQ ID NO: 1383 - protein, 556 aa, unidentified
  source 1..556: note = uncultivated organism
MEDLRKKVAIYCRVSTQEQAEEGFSIGEQERLIREYCSQKDYIVYDVFSDAGISGKDIKHRPQMKRLLEEAKQKKFDIVMSWKINRLSRKLKDALQIVELLEKCNIAYRSYSEPFESGTPAGKMQFQMMALVGEFERNTLAQNVKMGMCAKARAGEWCGGRAPLGYDWAKMVNENGEQEKKSKLVINKKEAKLVERIFTEFSLGKGYKAIVNQLNKEGYKTKLGNEFSVAQIKPILMNPVYIGKVRYNVRRDWNEKRRGNINPNPIIADGIHDAIIEQELWDKVQRILKNKSGKPARIYDGEYPLTGILKCPKCGSGMVISRVVCKRKDGSKNVLTYYCCGNWKNKGTAVCHSNMVLVEKVHSYVFPKIEELMDNEIFLKEILERMNGKVEHKKVVYQNEVKEIQENLKKLQERRNKIFESYEDGILNKEEFLERKNHLSEQMEQLKKQRGEKEQYLEEERKREVPVEVIQDILKNFGKLLENANLNRSIRKQLLHLLIKEITINEEKEIDSIKIKLTDELILFLQQNGGTPIKGVPSFLMFHSMGIRFMDIELIL

SEQ ID NO: 1384 - protein, 526 aa, unidentified
  source 1..526: note = uncultivated organism
MKKQIRCAIYTRKSTEEGLEQDFNSLDAQREACEAYIKSQMHEGWVLYDKQYNDGGYSGGTMDRPAFKELMQDIKDDKIDIVVVYKVDRLTRSLMDFSKIIEVFDNHNASFVSITQHFNTTTSMGRLTLNILLSFAQFEREVTGERIRDKFEASRQKGLWLTGAAPYGYEKGEHHVLKIQQPYADNVIKIFETYLETKNVRNLREKLIEAGIKSKTGKYFARGHLYEMLSNKIYIGKIVHKDKVYDGQHEAIVPIELFNQVQNILNANLKCKRHHTNAKNGCLLVGLLYDDNGNKMTTSFSSGPNKRYRYYVSMAVAKPGEYEKGEITKISAGEIEKYVQNDFIKLLKDQHFMQDYIKEYSIEDQTKILNKMQLFEPDKVFARTAIDRVDLKPDEIKVSYDITYIVKYFATLTLNAKFDYNKNDTEITERKQAVRLLQTPQRQNKIIIQGEHNYDMNLIQALIKSFWYNKLGAERRLPPEARNGNNKRLRKLRFLPPEIIESIMNGTQDPELNVKKLIAIANEHVK

SEQ ID NO: 1385 - protein, 526 aa, unidentified
  source 1..526: note = uncultivated organism
MKRTAEDKKISTIRCAIYTRKSTEEGLEQQFNSLDAQRESAEAYIASQQHEGWTCVPTRYDDGGFTGGNMERPALKRLLADIEAGKVDCVVVYKVDRLSRSLMDFARMMETFEKNQISFVSVTQQFNTTHSMGRLTLNILLSFAQFEREIISERTRDKIAAARRKGKWVGGRPIIGYDLASNAQGGRVTVNEDEAAQVRQIFELYLRHGSLIPTLREVDRRGWQAKRWTTKKGAVRGGTRFTKESLYRLLTNIAYIGKVRFHDQLYQGEHPAIVSEALWHRVQDALRHNGRNGGTGSGVTRNKYGALLKGLLHCGPCRCGMMHTYTSKGNRRYRYYVCLNAQKRGWENCPTKSIPAAEIERFVVDRIKTIGKDDEVLARTLAQARKQNQDGLDDLQSERRRLERELAKHGAEVRKLIDQAGAPGETPTAARLADLQERIRAAEQRATEVREQIITLSAKAVDEDELARALSLFDPIWDSLSPGEQARVLHLLVECVTYDGADGTLAITFRPTGIRVLADEREAVAC

SEQ ID NO: 1386 - protein, 569 aa, unidentified
  source 1..569: note = uncultivated organism
MSKKQIDVYRTGKYLRLSQGDEDIDGWDKQESNSISNQKLLIEGFIDAHDDLKLVDVFIDDGYSGSNFDRPEFQRMMTSMEAGNLDCIIVKDLSRLARERIRADELTLRTFKKYGVRFIAVSDNYDSMTANRGETHTIIPFKNLMNEQYNNDASIKVRASQNVKRMNGQFIGAFAPYGYKKAENNKNLLVPDPYAASVMQGIFAKKLAGMSASGIAKILNKNGVLSPSECKVKCGEKFNTSFKGAGQSAWSAKTVGRILKNVVYIGTLAQGKRTTVSHKVKKEIQVPECDWIVIENAHEPIISKMDFDVVQILMSRDTKAIVGQSESYMYAGILYCGDCGSSMVRRKEFYRGQEYITYICSNYNRNSKDACSRHCIREDILEEIVLGELQGYINSMCDCEKVLEHLDRLNINYDEAVAHDKEIAMLKEELTKCSVFKSSLYQDLQEEIISKEQFTRYRDEFSARKRALEQAIKEQEEIIRSIYENGIVVAKDLEQFRENLVIGKLDRMALVSFIDRILIYDDFKVEIVFKYRQEMEKVAGLIQVANEAVLEPDYTMVNGVPVLELKEAV

SEQ ID NO: 1387 - protein, 510 aa, unidentified
  source 1..510: note = uncultivated organism
MKTITELTIPKKEEKLIRLAPYIRVSSNSDDQLLSFAAQVRYYTDYTAAHSEYELVDIYADEGITGTEMKKRDDFNRLIYDCKKRKIDRIITKSISRFARNTTELLTVVRMLKEIGVSVYFEEQGIDTETLDLEMILTFPGMAAQKESETISENMRWSYQKRMESGEFNCCRAAYGYELVNGELRVNDTEAAVVRRIFDLYLQGYGKQAIANQLNTEGVPKRYGYTTWHSFTIDYILNNERYMGDALLQKSYTTDVLPYRKRRNHGERTQFYVENSNPAIVSRETYQAVQELQKSKSKGCFVKKDRYPLSTMLKCPVCGHNYRRQIVNGKAYWVCSYKASGRLECTSERISEESAKEAFVRMTDKLVRNREDLLGDLIRQLEKMQNRVSGNHEKVYQIDCLIADINAQNLVVTQLHNKGILNNAEFTAQSGELSRKVSELRSERRRILMEDEDDELIDTLHTLDETLAEYIPADTFDEDLFEQIVGSITVISGEKLSFRLAGGLVLTEKI

SEQ ID NO: 1388 - protein, 551 aa, unidentified
  source 1..551: note = uncultivated organism
MGRINRYKTNENYRLKSKYNAGIYIRLSVDDGDKDESNSVTNQRLIINDFLKNNEEEINVVDYYIDDGYSGTNFNRPGFIKMLTNIKNNNINTIIVKDLSRFGRNFIEVGNYLEQIFPMYHIRFISINDNIDSQKNPISMNNIITPFKNLMNEEYAKDISRKIRAVKKLKNDLGEYSSRVAPYGYQKSNNQHLIIDPVASEVVKTIYELSLSGVGSSSIVKELNKQGIYSRKEYSDRVIAGTLNDKSVPIKYLWSTAQVMDILRNPTYKGTLILGKWTTRSYKDKRIVKKPKKEWKVIEHDHEAIIDEATWNKVQKAIASRSREIKDKKKTNHLFTGKIYCKECGSKMQYRITTYNENIPIEHRYCLYCPKYLYYDKICTKHKIKVQDLEKIVLKAIKTQINLIVNVENTSTINIKSSAKKKREEAAINLKNIENKIKLIQESKLDVYSKFKKDELDENEYYNEMTNLTNQINDLKKSKENFLNINDTDMTIDTSWTNEFIKYKNIRSLNKKIIDDLIDKIIIDKDLNIEIVFKYRDQYEEIKKYLKGSDT

SEQ ID NO: 1389 - protein, 524 aa, unidentified
  source 1..524: note = uncultivated organism
MTRRAALYARVSTPHQAQEATIESQIAALETFARQQGYHLNPDLYFLDQGISGARLDRPALNRLRDRAAEAMFDVVLCYSPDRLARHHAHQWVLLDELRRVGVEVVFVNQPTVPEGPQGQLLLGIQGLFAEYERVQITERLRRGKLYRIRQGKLANPNPPYGYRYIPVSEPGGGRWEVHPTEAEVVRTIYRWYIEDDLTINQIVDRLRAAGNRMPPRGQRWHYSTVQTILKQPAYSGRTYYNRTRTCHEAIGRPKKSGRGIRRSPTHEPRPREEWIEISVPQIVTEDVWQRAQERLAMNQKFAPRNNKRHFYLLRGLLVCEVCGRTLAGRASGGRVRYYCTSRGKYRNPDVPPHSCSISGDIIEPLVWEAICDLLRNPNLLADAWQAQCESESPDPDEADRLQSRLRSLERQWTRLLDAFQDGLIDKEELASRKTRLDAEQRSLAHRLDQLRHHQRQKQAKAQMLEDFAAFCQKIEASLANPTPEVQQEVIRLLVDHIVVGKDEIIIKHIIPTSDDCRLLPGHR

SEQ ID NO: 1390 - protein, 509 aa, unidentified
  source 1..509: note = uncultivated organism
MANGNNGNGAPKLVRCAIYTRKSTDEGLNQDFNSLDAQRDAGEAYIRSQAGEGWTLLPDQYDDGGYTGANMDRPALRRLLADIQAKKVDCVVVYKVDRLSRSIRDFGRIMEILEKHGATFVSVTQQFNTTTSLGRLTLNILLSFAQFEREIISERTRDKQILARRRGKWTGGHLPLGYDLEDGNLVINEEEAARVRQVFEWYLEGHSVHGIVAKCEGLGWRNKEWATKEGKTFGGHPMRKCHIYTMLANPLYAARIRAADEIVAATHPRIVDDNTFDLVQQKLKENTRNPGRGGGPRVEALLRGLLYCAACGSPMSPSYSSRQNRRYRYYVCLRAMQRNGDGCTTRAVSAPVVEEAVVESVRRFAMQPEVVEAIARAARQRLTEELGRHREELKAVNVRVRNAKSQLARAKNLDAGREAALRETVSSGEAQAEQLRSLVERGERLRFDDQMVRQRMATFDEVWKAMTIQQQAALLRQLIERVGYDARGDKVKVTYHSNSIREFCKGATK

SEQ ID NO: 1391 - protein, 545 aa, unidentified
  source 1..545: note = uncultivated organism
MSKKVYRTAIYARLSRDDGDKAESNSIVSQKAMCEEYIKKAGDLELVETFVDDGYSGVDFQRPGFMQMEQAVRERRIDAIVCKDLSRFSRNYIEGGRYLERIFPQLGVRFIAINDGYDTLNGNPQSDSFIIPFKNLINDTYCKDISVKIRTNLDVKRRKGEYVGSYAPYGYAKAADDKNRLIVDEYAGGIVRQIFSLYKDGMSVGKIAGHLNDMGVLSPMEYKRSQGIRFETAFRTGSRAKWSYRAVKRILMNEVYLGMLVQGKRGTPNYKVHCVQEREESDWIRVENAHEALISYEDFMAVQGMLKRDMRSVSEGAEENLFSGFLFCADCGQPMVRKVVPGGKKKYYYYVCSTAKRHEGCSPHSIPAAEVKKAVTGAVRTQIGAVLDLAGTLDYIERLPQADRRLLNFEVQANGLEEELEKYRRMKLRLYEDLTDGVIDKKEYADFREQYSLLIEEKSAALERVRREQKNSELNGEAERVWVTLFRQYENVEELTRRVLLALVDRIYVHGDHVVEVLFKYGDEFGRMRDTVCSAGGIGGAAWEE

SEQ ID NO: 1392 - protein, 531 aa, unidentified
  source 1..531: note = uncultivated organism
MRKIRCVIYTRKSTEEGLEQDFNSLDAQREACEAYIKSQKNEGWVLLDEQYNDGGYSGGTMERPAFKKLLKDIENDEIDIVVVYKVDRLTRSLMDFSKIIDVFDTHHTSFVSITQQFNTTTSMGRLTLNILLSFAQFEREVTGERIRDKFAASKKKGLWMGGVVPLGYDKDNRTLKINEQDSLKIKLIFEKYLELKSVSRLMQYLKDKQIKTKSDKNFSKGNLYYILKNKIYTGKIVHKQNEYDGEHPAIIPTTLFEKTQTLLASNAIEKTCKNTNYSFLKGVLYDDKDNIMSPSHSNTRKKRYRYYVSQSVLGFNKDKSGSVTKIPALEIEKLVKEEVMSFLKNTTLIQPYFATLDIKQEIGIIKYLEKEETIEPAFIRRLIFKVIVQTDRIQIILKKNEIVPVLLMIVFNIKSDSSDEEHTEFISFDKKIKITKSSIRGKVIIVPADSQKIQYNVTLIKALTRCYFWHSLIQTGKCKTIADIQRFENLKDKKYIRQIMSLRFLPAQLQEDILSGTQDVDLSLKKLLKMY

SEQ ID NO: 1393 - protein, 587 aa, unidentified
  source 1..587: note = uncultivated organism
MIMVASYCRVSTDKEDQANSFEAQQRYFREYIARQPDWELFAVYADEGITGTSTRKRTQFNQMINDAHLGKFRLIITKEVSRFSRNILDTISYTRELRSLGVGVLFMNDGINTLEPDAELRLSIMGSIAQEESRKTSSRVKWGQTRQMERGVVFGRSMLGYDLMNGKLTINPAGAEVVRQIFYKYGVEKKGTSVIARELREAGVKTYSGNTNWANSHIVKILRNEKYVGDLVQKKTYTPDYLTHAKKYNHGEEPMIALTDHHAPIIDRELWDIVQAELKRRNFHGEQSSGHSNRYIFSGKIKCGLCGASFVSRKKKRQDGSFYRRWGCYTATIAGTRHFDTQGNEVGCDIGKMVRDELALDMLKQAVAALNLDRNWIADNVTALAVEAIQAGEQGSAENAEKLEHEMEQLTKKKEDVLDAFFSQSITKEEMRMMNERYDRQLAGLQTRLDAVREKEKLRYDTGQLSADVRKRVNAMLSGDTDSEVFYKNILDHMVVYPNCQVEVRLNLLPMKWVFVLERLARLKDKIQGENAPETPGCKRDTEISGASGVEKSVDLQGFLAPVCKRDPSVPMSVSSPRSSGQGMEKR

SEQ ID NO: 1394 - protein, 547 aa, unidentified
  source 1..547: note = uncultivated organism
MAEIKEAKKRIYCAAYCRKSVEERADETFGSIENQHESILNFIASHKHEGWVPLTERYDDNGFTGSNTNRPSLQKLINDIKESRVNMVVVYKLDRLSRSLVDFVQLLKFFDEHGVAFASITQPIDTSTSTGKLMLHILSSFAEFERELISERTHDKMGAARKRGQWLGGRPPFGYTRDKEGKKLVIDKAEAKIVREMFELYLKGNSLLKVASILNEKGYRSRAGKQKDGKSFGGLKFGVTQIQQAIKNVVYIGKVFYAGQVYGGQQEAMIDEQTFKNAQQVLKDNRVERKATKNIECSGLLTHILHCKTCGHSMFHTYTLKHKTHKYRYYVCTNAQKRGYNSCPTKSVNAQAIEDTVVDRLKMLFAENRKKKEEQNKQEIEALLSPVWDTLYPQEKRRILKDLVKEVDYDSNSKKLGILLNGSSLRLEFDVDLKQVRPLNKWHKEKEIEKEPPVRKMLILAYQIQQFVNEGRFKHPREACKWLNLSVTRMDQFMNTLFLCPTIQNEILSSNTPAINALTEFKIRPLLKEVSWDKQLTQWQALVENKR

SEQ ID NO: 1395 - protein, 549 aa, unidentified
  source 1..549: note = uncultivated organism
MARKSRKHAETAPVQVVQKPMFYAGAYIRLSVVDKKHKGDSLETQQAIINSFIADHSDIELRECYVDNGHSGKSFERPAFQRMIADMESGKINCCITKDLSRLGRNAIDSGYYMEKYFPSKDVRYIAVTDGHDSINGQSGGIMVSLKNMVNEAYILDVSRKIKATIQMNIRNGKFIGSNAPYGYFKSREDCHQLVVDEYAAPVVRQMFEMAADGQSHQSILAWLNDNKIMPPRRYMHSIGLASGKETGALTEWWSLRAVRDTLKNKVYCGVMIQGRSKVVDGVQVNLPESEWTITENAHDAIVSRELYDAVQEAWVRKSAPDEPYYKTPNTENVFARKLYCAQCGHALHRKRGGERFYRYFCNVSVMYAKDACNGVTITETAMKEMVFALIRKHEPFLTLALSQDVNNFAVSVSAGDKLKDELAAAKSELDKNNRFLAGLYQSLVDGDISDAEYKDMKGAYETRITSLTDQVMRLQDAVHNRAQQEKVLSKARASVRKIEQVSDLTAEIIDRLVEKIIVYHSGRIGVKFRFMDDVVHSSEELAEGGAGA

SEQ ID NO: 1396 - protein, 557 aa, unidentified
  source 1..557: note = uncultivated organism
MANRNNGIGPRSLGGAVRCAIYTRKSTEEGLEQAFNSLDAQREACAAYILSQQHEGWTMLPDVYDDGGFSGGSMNRPALQRLLDAVGQGRVDVIVVYKVDRLTRSLADFAKIVEVLDGAGSSFVSVTQAFNTTNSMGRLTLNVLLSFAQFEREVTGERIRDKIAASKKKGMWMGGPIPVGYDVIDRVLVVNEAEAGTVRLIYSLHREFSTLVALTNELERRGITSRVRTMRDGRTRGGEPYRSGAIRHILMNRLYLGETIHGDKVYKGAHQAIIEREVWEEAQTRLTNPGTRPRSGLVSPLAGRITDAAGNPLTAAHANKAGRRYRYYITKASPGSDAWRLPASDLETVVHRAIDALLDDPLRLAAEFGATNTRLTIAARHDDAIANLRRPSALAALLEALDARIVISDAAVRIEIVRSYLANLFAIPLPASGMIEAIRIEVPTSLRRRGHELRLVYTNPDVRPASRDDKLIELLGKGWAAWDQISTGPWINDATLRSHQCRLTRLRFLAPDIVTAIIDGRQPVELTARRLLRISELPHDWAGQRLALGFAAERQAA

SEQ ID NO: 1397 - protein, 528 aa, unidentified
  source 1..528: note = uncultivated organism
MSRNRQPPPDAPTTRPLVRCAIYTRKSTDENLDNDFNSLDAQRESAEMYIRSQTHEGWVALPARYDDGAYSGATIERPALQRLLADVEAGKVDTIIVYKIDRFSRSLLDFTKLIETLEAHGVSLVSVTQQFNTTTSMGRLTLNILLSFAQFEREMGAERVRDKIAAAKRRGKYVGGSPPFGYDVDHEARRLSINSEEATLVRFIFRRYLQLGSVVTLASELNAQGHRTKGWTTRKGTVRQGSPWEKNHVYRMLSNPLYVGLVEHQGQTYPGEHEAILEQSLWDEVQRYLARAGRSRGRQAGRTTPALLQGIIRCGCCDSSMGITFTTKNARKYRYYVCQRVKKASYGACPIGTVPAGDVERAVLLQLRRVFASPEMVAGTMRGVQAREDEERERLASERVELERNLGVVKGNAARLLQTRLADGAAFVSEELARLDTERVEIDRKLADVTGKLDFLASHNLTVAALTADLSRLDPIWDHLVPAEQQRVAQLLLDQVVVYPDRVEIALRADDLYSLVAELQPEEEGHVA

SEQ ID NO: 1398 - protein, 560 aa, unidentified
  source 1..560: note = uncultivated organism
MSRIACAIYTRKSSEEGLEQAFNSLDAQREACEAYIRSQKHAGWVAVRDLYDDGGLSGGTLERPALQRLLADIEAGRVQIVVVYKVDRLTRSLTDFVKIVEVFDTHSASFVSVTQAFNTTTSMGRLTLNMLLSFAQFEREVTGERIRDKIAASKAKGMWMGGLPPLGYDVADRKLVVNGPEADTVRRIFRRYAEFGSVRLLGAELDAAGIVSKRRAGAGGTPTGGKPISRGGLYLMLQNRLYRGEIVHKDKVYPGQHEAIVDTELWQVVQETLAANRQARSLAVGAEAPSLLAGLIVDGDGNRMTPTHANKRGRRYRYYVSASLLDRGEVGRGTMRVPASDVEGLVRDRLSSMLAEPKAVADALLPLELEAAHLERALRQAAGLAQRWLLLAPDDMRALVRETIARVVLAPDRITIEVGVASLARALGVSAKATSMPQPTIALSVAAALRRAGKGKRLVIGERDRTQINPGLVHLLQEAFAGRDLLLEDSDESINAITARLGRSKGHMTWALRLSYLAPSIVDDILAGRQPTDLTPHRLLRLSKDLPLDWAGQRQLLRFA

SEQ ID NO: 1399 - protein, 558 aa, unidentified
  source 1..558: note = uncultivated organism
MSRPTIRCAIYARKSSDEGLDQDFNSLDAQHEACAAYIASQRHEGWKMMANRYDDGGISGGTLERPGLQRLMAEIDAGRIDMVVVYKIDRLTRSLADFAKLVERLEAANCSFVSVTQAFNTSSSMGRLTLNVLLSFAQFEREVTAERIRDKIAASKKKGLWMGGLPPLGYDPHPDPTRRELVINTGEAKTVRQMFGLYEIHGCLNATARAAETLGLRSKRHVFSSGRVQGGLPFSRGQIHKLLTNPVYRGLIRHKDKTWPGLHDAIVDQNLWDRVQAMLQDASARRRGSKTSSQEMIANAAPLLGKVKDETGDLLTPSHTQRHGRRLRYYISNRLVSGGRDPNAWRLPATALEDAVCRVVAGHLHDHASRHSVVQSAEASASMAISKRTQALADGIRSGGIRRAVPLVESVMIARGRIQICFDRTTLASGLDLSPAELDPSLLSISAPFTCRRRGIETKIIAGDRVSQPDATLLRALRTAHLWAAALRSETSLKTIASDAGVTERYAARIIPLACLSPGLQQAIVDGTQPTTLTLERLIRNKLPLDWDDQERMLRIDG

SEQ ID NO: 1400 - protein, 518 aa, unidentified
  source 1..518: note = uncultivated organism
MRELRQEEITKIHLMAAKKGLIKLNVSIYARKSTEDKTDTSIATQIENCREFVQKYDSLFTLSEEHIFQEDKVSGMYIENRKELSKLLNLVDKGIINVVVVARSDRFSRDSANMVMLLRKLEAKGVYFIAGDDLGDDSAAGILIKQIMYATSEFHVRNTAENVMKVHTKLVKDGKTVGGLGNYGYVISERKYIQEPIEAQAVSLVFDLFLAGSSYSEISEQLDIQGYKPRFAKKFSNSGIHDILNNKRNCGISIWNSLEKRKGGNRIIKQNFDEVISEDVVANPIISKDKFDRVQAILNTKVQAKINKSGPVYLLTGLLVCGDCGGAITGTSSKSSKKKSPTRSYMCKNHSKRYGNTCLTKNINVKWLDLVVKSQITKLIKQHFKTNPMPKAFLKEYLQDEKSKIKRLSRELSLEKESLSKLVIGFHKTDNELIKASTEIEIEKVSHLIDVSKSKKRDLEEKIKASKLKQIAINSGKIKVEEMFKNDLISRRIIQTFIKKIVISNDKIEIEYKEGEIQ

SEQ ID NO: 1401 - protein, 566 aa, unidentified
  source 1..566: note = uncultivated organism
MARKSRKTTVAEPAVIKPVDKVYRAGLYARISVETERKREADTIGNQLQLLKDYVSEHSDLTVFDIYSDDDISGTDFIRPEFSRMMNDLRDGKIDCIIVKDLSRLGRNYLESGEYIEMVFPFFRCRFISVTDRFDTKYQQADISVQLKNMANEMYAKDISRKICSTMRTIQDQGKFAGSRAPYGYRLDPADKHHLIIDEETAPIVKQLFELLAEGNTVHYVATTMNARGIPSPGRLLYERGIATTDHFKNSKWYMQTVRRILQDEIYLGWMVSGKFRSTYHSTGKKGSQPVPREEWIVTKGTHEPIVTEELFNKVQEYFVRMKEEHGQTAVYNSKSKKASIFKGHLRCGECGQAMFLRNKHSHGKVTAWYYCALHENYNSSYCVKKAVKKQDVEDIALKLIRTQIKLFTDAREMIIALNKKESSKTKHRIYSDQIRNVKKQIEKYMSLKASLYEDFANGVLSQSDYISMGQEYAQKADELRIFLAELEKEAQKYSQTYAMNGSWAQIIEQYQNAETLTEEMIDAFIDEMILYNNGHVEVKFRFKDELDEVIHLAAIRQREVERYAM

SEQ ID NO: 1402 - protein, 517 aa, unidentified
  source 1..517: note = uncultivated organism
MIARAPRTPARTTTPLTVAVYCRKSVDKNKDDRFSSIESQREAVEAYAASQRGNGWVVLPEHFDDNNISGAKASRPAFNRLLEAVRAVRVNIVAVYKLDRLGRSQRNFLAILDEFEKYGVQFVSVTEHFDSTTPMGRFALGILIQVAQLEREVTAERVRDKVAASRRRGLWTGGAVPLGYRSVDKRLVIDEAGADVVRAIVAVYLETGSLTGTLEVLRGRGIVAKGGVAFTVATLRNLLRNPLIGGRIKAGDAVVKAAHEAVLDEPTWTALQMQLARPEKPVRRHRRVRTCALLANLVRCGRCGATMSYQWTGKANGRRYGAYVCQSIIRKGATACPGSRVPAAAFEAHVIEHVRAVSRDPAVLRAAVAAAASELEVLRADATASTNHAKAEVQRLLVEQARMVETVANGNERVPELIERLNAVRAEREAVEQAAAQAKADLGAMKDATINEAELRRDVASFDGAWQYLFPAERQRILGLLIERITMTVGDDGEDVAIQYSSDGARRLLAETTKEAS

SEQ ID NO: 1403 - protein, 557 aa, unidentified
  source 1..557: note = uncultivated organism
MNMHIDQLFKVAIYLRLSKEDGDLSDSQSGKRESESINNQRELILGYLARHPEMEIVGEYKDDGYTGTNFDRPGFKRMMDDIRLGAVNCVVVKDLSRFGRDYIECGKYMDVIFPKLGVRFIAMNEGIDSFKEKDNLSGPLKNMVNDGYSRDISAKVKSHLISKRKKGDFIGSFAVYGYRRADDDKNLLVIDEEAAKVVRDIFRMKIDDGLSPGAIATRLNSMGVLSPGEYKKRTGCRLHTPTKGTQALWGDIAVRRILQNEMYVGVMVQGKVMTPNYKTKKFITKDKSEWTRVEGTHEPIISRANFILAQELLMEDSRASDPSKGVSPYAGKLYCGYCGSPLAKKTVSSNGKKYNYYVCKANKLDKKKCSKHSIREDRLESAVLATIKTHIEAALSLQILFDERFARAWQTSQLGRIDNNIAVQEEIIRKNNILRLGAYEDLQRGLIDKDEYRTLREELTARITDAVAAVDELNAQRAQVAEGVPGHITWLEELCQFKEVSELSRRLVVHLVDKIQIFSDNEIEITFRYQDNVDTALRFLEEYQKNRVIVLPKLEVV

SEQ ID NO: 1404 - protein, 548 aa, unidentified
  source 1..548: note = uncultivated organism
MKKVLCLYRVSTKNQVDKADDIPMQRRECLDFIERMDDWVFWDERMEKGVSGYKVSAQKRDVILEIRTMAEQKQFDVLLVFMFDRLGRREDETPFLVQWFIEQGIEVWSTREGQQRLDNRVDKLMNFMRYWQAGGESEKTSMRVKAAHTQMTSDGIWRGGRKPYGYKLVHKGRVGKKNRPLYDLEIDETEGRIVREVFELVGERGYGTLRAANFLNEKYPNPDKVWTAQTVRSLIRNPIYTGRFHMNDTLSEPQEHLRLISDNAFEFCGYAIQKRIPRKYQEARQQEDLQVPENSTKSSVFGATLLSGLLYCTHCGKKLVGGYCTKQRKNGAYHRPIYRCYNGSVKAKDCDGQSVYSAAKIEGAVLEVVRDYFQGFKRPIDAIWQEQARQQLRSKQGNAVKAAQSQLDKLKKQQANLRNEVLKSLSGESAFDADLLRDILSENKAAIAEAENVLAQCMAEKQAEEARLAALTEQYRHIADWAQEFDRCSTDEKKMILARIIEKITVDREYHITIHFFVTLEDFRNEARTDQPKVTITETAGNIQTVAG

SEQ ID NO: 1405 - protein, 525 aa, unidentified
  source 1..525: note = uncultivated organism
MKAETAKSVRCAIYTRVSTDAGLDQDFNSLDAQRDSSEAYIRSQAHASWSLIKGQYNDGGFSGGSTDRPALQKLLADIRAKKVDVIVVYKVDRLTRSLADFAKLVELFDNHGVSFVSVTQQFNTTTSMGRLTLNVLLSFAQFEREVTSERIRDKIAASKRKGLWVGGMVPMGYEVKNRKVLVIEEEADRVRTIYQRYLELGSIYLLMADLRQRKIQTKVRHLSNGRTIGGIPLGRGTVAHLLRNRFYIGEVAFKGEILPGEQPAILDRTLFEAVQHKLDEQRINHTLTRSSSEALLMGFIFDDRGNRMTPGYARKGSKKYRYYLSSALSKGQAEHAGSVSRVPATEIETIVIDAVRKRLKENTSITDRELIDANVGRVEVHAAQIVIKLARNGDRTTSRKSDNTILYIPWKKTQMKRRREIIAPARGDMRPIRSETRLTLVTAIACGRRWLDEIVTGIVTDAEEIAAREKCSIRQVNMTISLAFLSPTLVIAAIDGTLPRGVGVARLRDAPAEWSKQHAMLGLSS

SEQ ID NO: 1406 - protein, 530 aa, unidentified
  source 1..530: note = uncultivated organism
MSTAATKRPAVSRRANADAALGSAPNNKPGTRTIRCAIYTRKSTEEGLDQEFNSLDAQRESAVAYIASQKNEGWLGVPDRYDDGGFTGGNMDRPALKRLMDDIEAGKVNCVVVYKVDRLSRSLMDFARLMELFDRKGVSFVSVTQQFNTTHSMGRLTLNILLSFAQFEREIISERTRDKIASARRKGKYQHGKPILGYDFVPAPAPFTGRRLVVNKPEAERVRRIFELYLEVRSIMHVADECNRRGWTTKSWTTTAGRTVGNREFDKTTISRLLRNPLYLGKVPHNGAVYDGEHEAIIDADLFRRVQAQLKLAGERGGASVKNSTGSLLGGLVRCRGCGCAMSPSSASKKKPDGSRTRYRYYVCCNAVKRGRQHCAAPSLPGPALEAFVLDQVKAMLADSPQMAAVVARAIDLLRQAASARIAEQTRLRAVLERLSGEEPTAATRREIERVRRTLAAVSAQVAADADRLIDEDEVAGAVEAFDGVWNAMTQAERAEFLHVVIASVEYDGQTQDVSITFYPELNPAEAPSE

SEQ ID NO: 1407 - protein, 582 aa, unidentified
  source 1..582: note = uncultivated organism
MADPRQNGSATRVRLRCAIYTRKSSEEGLEQEFNSLDAQREACEAYVTSQKHEGWTVLPALYDDGAYSGGTMDRPALQRMLEDIRTRKIDVVVVYKVDRLTRSLADFAKIVEVFDAHGVSFVSVTQAFNTTSSMGRLTLNVLLSFAQFEREVTGERIRDKIAASKKKGMWMGGLPSLGYDVKDRKLIINETEAATVRHIFQRYLELGSVRTLQTELDAAGIVSKRRIAADGSQYGAQRFSRGALYLMLKNRIYRGEIVHKGKAFPGEHSAIIEEEPWLRVQRHLEDNRVERRNGPKDKEQNLLAGILLDAASNPMTPVRVMKKSARYRYYVSRNLITGTVADNSDGQRIPASNLEALVLNRMRSLFADPVEILNAISKSRHDAPAQKRVRDAAASLSERWDRLPAESLHDLLRSIIVRAQVYADRIDLDVDSAKLASRLLNDGKGDTSQKLHAVEDGEEEHLITLSIPARLKRTGMEMKFIIQGAANATPADTSLIRLLVRAKKIGKRLFETGSPTLEDIARDEKMSPSYATRLARLTFLAPDIVAAILAGRQPADLTANKLMVDTRLPLDWRDQRAALGFA

SEQ ID NO: 1408 - protein, 580 aa, unidentified
  source 1..580: note = uncultivated organism
MGAKSSAKALAAGASGMASQMGFPTLACAIYTRKSSEEGLEQDFNSLHAQREACEAFVLSQKGLGWTLNPTTYDDGGFSGGNVERPALKRLIADVEAGKVKVIVVYKVDRLTRSLADFAKLVELFDAKGVSFVSVTQQFNTTTSMGRLTLNVLLSFAQFEREVTGERIRDKIAASKRKGLWMGGVPPVGYRAKGRTLEPEAPHAGRIAEIYALYLQLNCVRKVAAELQTRGWLTPERENKREGFGGNKPFSRGHLYRILSNPIYVGLLPHRGENHPGQHPAIVEQALWDQVQQRLEANRQGHKSQSKAVAPSLLSGKLFDETGRRLIPSHTRKGKKRYRYYVTPADDPGEPIRLPASELEKLVVRAIVEWSASEKRVLDAVGWKDAKRAQEALTGAKKLGQAIQHEAGTQIAKAVRRVEVAPEEVRIALDLVGSGVLKAETKSETKPATQSGAGQGSATISMPAKRKRCGMAVRLVIGDNIPGQSMKREPDPTLVALMTKGKAWLQQFTREGRSIEEIAERERFSVRYVNRVINIALLAPDIVQAIENGEHPEEINATKLLTSVPLPEAWGVQREVLGMG

SEQ ID NO: 1409 - protein, 560 aa, unidentified
  source 1..560: note = uncultivated organism
MKKAALYVRVSTGHQIDKDSLPHQRKELKNYCKHVLHLDNLEIFEDAGRSGKNTDRPAFQRMMNKIESDEISHVIVYKIDRISRNLVDFSLMYDKFREHRVTFISLNEQFDTSSAIGEAVLKIILVFAELERKLTSERVTDIMLDRASAGLWNGANMPLGYHWDEETKFPSPDEIERKTVELIFNMYDECHSSTIITRYLNDNGIRTKRNGEWTTKTVADIIRNPFYKGTYRYNYRNSPHGKIRPEEEWIVREDNHPAIISKEQWARCNIAMDKNATGKNLPGFEPMKKHIHIFGGICTCGECGSNMHAGKDDKRADGFWPSQYRCASRARKTVCSAKPASDVRIGPFIFKYIVNFLSAYSKRNTLLDVKELENILLDGKEFKNVAYISSSTLNEIFNLLKGRSYNVAYQATSTIKSNHESSSLLDKKRTEVEKYTRALDRLKKAYLFDDDSMSEEEYLSTKRDLEVNLIAAKNKIAELEDDIFNASIDESAFISSASSFILTQKLKSGEVNFKELMLTIDNKVLKDFIRAIVDDIVILKSMPSVITFKNGLVHEFIYKE

SEQ ID NO: 1410 - protein, 534 aa, unidentified
  source 1..534: note = uncultivated organism
MKNVTPQEKQSIYCAIYTRKSTSEGLDQDFTSLDAQREAAINYINSQKGEGWVAIEDKYDDGGYTGANTDRPALSRLIDDIKVNKISCVVVYKVDRLSRSLIDFVQMLDLFEQHNVAFVSVTQQFNTNTSMGRLTLNILLSFAQFEREIISERTKDKMAAARKRGQWLGGIPPIGYDRDKETGKLIINPHEAEIIKTIYDLYLKSYSLKLLGRELTNRGWRTKLYTTESGKEFGGNIFQTTTLNAIIRNPLYIGKVKYCGELFDGQHEAIVDEETYKRAVALLAKNRNYKELTRGQTVVNPLTKLLFCKKCQRPMFGTHTCKKQKIRYRYYVCSYAQKYGYQTCPSRSINANEIENLIAKCFFARPEGVNYREKWASLSAQDQKSILLTHLQRIEYSAEESKIFITFVDGKIQEYPADLKDVRHGNIYDPKEEIIKEPKLRQRLLLAYHVEQLIETNKTISVKQTAQWLNMSAIQLHLIIELLFISPKIQEEILLGKDTDISSVPEYKATLIAREPDWGKQYDLWRSLIKETTS

SEQ ID NO: 1411 - protein, 501 aa, unidentified
  source 1..501: note = uncultivated organism
MTRTAQYTATANRHGEPLRLVIYARISDDPHGGGVNADTQVRRCHERAAAMGAVVVAVKRDDDRTAMAKNGKRAERPAFDETMAMLINGEADGILCLHTDRLYRHSVDLEPLVDVVEKTGAMIFPLMTGELDLTTATGRIIARILAAVATGEVERAIERMKDKKDANRRAGIQSGGPRPYGYCATKPTPKGMPPEVQKINKREADWIRFASVKVLAGSSLRSVCAAMNAGGARTPKGNTWSATTLKQCLTSMRLAGLIEHDGAIIGPATWDAILTESDVRTLRRMLSDPARRTSAGNSTRWLLSGIAVCGMPGCGQPLKAGGKNRTGQHTYRCPESSHVTRACGPLDEYVSSSLVDHLIRTAAVDTDAGAPPDDGPDLEAEATRIRTRMTALADAFADEDDADPVAYRAASARLRDRLADVERRMAERVVTASLDDVEDYGLSPEEFWPQYTLEKKRALVAARMTVTVLPAKKGRPAGHVPGTPYFDTAAVRIEWKPVPAR

SEQ ID NO: 1412 - protein, 561 aa, unidentified
  source 1..561: note = uncultivated organism
MAEKRLRCAVYTRKSTEDGLEQEFNSLDAQYEACAAYAVSQRHEGWALVPYRYDDGGFSGGNIERPGLKRLMADVASGQVDIILLYKIDRLTRSLTDFAKIVEVLDRAGASFVSITQSFNTTTSMGRLTLNMLLSFAQFEREVIGERVRDKVAASRKRGIWMGGGVPTGYLVNNRKLVVNQPQAEVVRSIYRRYLEVGSVVELVDGLNNSGLRTQVRLSQRGNVSGGVPFSRGMLFRLLTNPVYRGMTVHKEMTYPGEHKPIVDQALWDEVQAMLRERTQGHSRRLKAKEPSLLVGLVFDGEGRGMRPSHALKGKVRYRYYETRTEMVDGSPAWRVSAHDLERIICQRLADMLGNQRELTQAIRQTLDARETETLLGSASSVVKALREGSIPRRLDLIVKLSPRVDLAAHEITIRLDPSRLLQALGADAAVNGDSTPIALTCAATRVWHGRQRRLVIPGPVDETNFRYRDPNLIRLMGEVYEARELVLANAHKTISAICRETGRCRVRLNQLLKLSCLAPGIVTAILEGRQPVGCANVTTLLLRTDFPLDWAEQRAMLGFA

SEQ ID NO: 1413 - protein, 543 aa, unidentified
  source 1..543: note = uncultivated organism
MLDRNGNGNGNGRKAGGNGETKPTVRCAIYTRKSTNENLDSDFNSLDAQREACEHFIQAQAHENWKALPEHYDDGAYSGATMERPAVQRLLRDIEAGRIDVVVVYRLDRISRNLLDFTQTQHFLDQHNCSFVSVSEQFNTKTPMGRFAMHVVSSFSQMEREVIAERIRDKVAASKRRGKWLGGVPPLGYDIDRENKRLLVNPDEAVMVRYIFRRFLVLRSAVGILKELKEKGWRMKSWTTVKGRKHQGQPWNKNQIYRLLNNPLYIGLVKHKDQTYPGEHEAIVEKKLWDEVQAILGEDGKMRGNHGRTKTPALLSGLIRCGHCGTAMGITFSQKGSRTYRYYLCVKAAKQGYHDCPVKTLPAAEIEEAVIDQLRVVFRSPELVAATARNVQGLEEAEIKRLAQEKETAEQQLQVLRAAANRLLQSGAGANQSIAFIQGELSKLDADTQAAERQLRMIEKELTFYRDKPSGVAEVLHELTVLDDLWDELFPPEQERIIRVLVEQVLIYTDRIEVTLRGEGLNSINSEMQPDPDDERETAHAKP

SEQ ID NO: 1414 - protein, 537 aa, unidentified
  source 1..537: note = uncultivated organism
MPRKPPQQVERTATGPVRCAIYTRKSSEEGLEQPFNSLDAQREAAEAYIASQRHQGWIALPERYDDGGYSGGNMERPALQRLLASLQAGGIDCLVVYKVDRLSRSLLDFARIMGVLEQRGTSFVSITQQFNTTSSIGRLTLNVLLSFAQFERELISERTRDKMSAARRKGKWVGGIPPLGYDVAAGGGRLVVNEGEAEVVRKVFTLYQERRSVLAVAEELNRLGRTTKQWTSQRGRPHAGMPFSKNAVSVILNNLTYTGQVRYRGETYAGEHVGIVPPGQWEQVQGSLQSRRGIERKGGRGETSLLSGLLYCAHCGVSMVASYTNKGGRRYRYYLCLRAQQRGWKNCPTKSVSAVQIEEAVWERVRTITPLESAAEPRAAEPRECAGESVRQAVERITYDRAQKLVRLTLRKEFGGEEFAIPLVRLGHQEKLGRLPRITRLMALAVRCQELLRTGTVQNYAELARLGIVSRPRMTQVMNLLNLAPEIQEEVLFLPEVEGGREPVSERALRRLPGVISWKDQLEIWNQLRGQRPSPAV

SEQ ID NO: 1415 - protein, 511 aa, unidentified
  source 1..511: note = uncultivated organism
MASGNNGAPGKPVRCAIYTRKSTEEGLDQPFNSLDAQREAAEAYIRSQASEGWTLVAEHYDDGGYTGANMDRPALKRLLADVQAGKVDCVVVYKVDRLTRSLFDFARIIEVLDKHGASFVAVTQQFNTTTSFGRLTLNILLSFAQFEREIISERTRDKQIAARRKGQWTGGHLILGYDLDPRGGRLVVNPEEAERVRAIFNWYLEGEPVARIVERCAELGWRNKQWTTRKGRVYGGYALRKSHIYHLLANPLYTGRVRADGELHRAEHEPIIDQRTFELVEEKLKQNAPARLNPHRRRTEALLRGLLYCASCGAAMYPTYSSNGRRQYRYYICVRATRADDGYCPTRAVSAPAVEEAVVESLRRFAVVPEVIEACARATRQRVFERLAGLREKLQEVNARVKNWKSQLARMCGPDSEREAALREQIAAGEAKAAEVRKEILRLEKLRLDEKALRDEAGGFDQLWKAMLLEEQVRFVRCLVEKVGYDGRIGKVRVSFKSSGIKALCQPGVDQ

SEQ ID NO: 1416 - protein, 560 aa, unidentified
  source 1..560: note = uncultivated organism
MIRQRCAIYTRKSTEEGLEQSFNSLDAQREACAAYILSQKHEGWAELSDRYDDGGFSGSSMERPGLQQLLEDVRAGRIDVIVVYKVDRLTRALSDFAKMVDVFDGAGVSFVSVTQAFNTTSSMGRLTLNVLLSFAQFEREVTAERIRDKVAASKRKGMWMGGAIPLGYDVEDKALVVNPDEATAIRTIFAEYLALGSVRQLRARLDALGIVSKQRTNRFGRVSGGTTFSRGALYNILRNPIYIGKVRHKEELHEGLHEAIIDDATWKLVQTQLADHGGKKIRSTRRPAMRLLDGVLFDAKGRAMRTTYASKSIHTDGTTRTKRYWYYTTAVSVSENKTETERLPADEIERVVMNALNERLADMRWLADQISGQVRETTAVCILRTIEQRVVEDDMTNIDAQSQDFLSIIDRIATHKDRLVVSLNLAAITEPEAAHTPIPATFEIPFQKRQNGCAKPIIIAADNAPQQDPDLIALVADARRWASELLEGRASSIQQITEREGLRSGSVSRILPLAWLAPDISTAILEGRQPPHLTAKTLRALPELPLDWAEQQRILGFAQS

SEQ ID NO: 1417 - protein, 567 aa, unidentified
  source 1..567: note = uncultivated organism
MEYRGLETRGKELACDMKIWQAALYVRLSREDGDKSESDSIVNQKELLAEFVRLEPDIEIFDVYVDDGWSGTTFDRPEFRRMEEDILKKRVDCVIVKDLSRFGRNYIDSGHYFERVFPLLDVRFISITDNVDSYKNPQSMNNIMVPFKNLINDEYCRDISNKVRSSLDMKRKQGKHIGSFACYGYMKDPNDHNHLVPDPEAAEVVRDIFQWFVEGTSLIGLAKKLNAMHILNPTAYKEAKGFSYRHPQIKINDGLWSDGTLRRILTNRMYVGDMVQGVNKIKSYKVQVAQRQPEDKWIIVEGTHEPIVSRELFDKAQSIMSRRTRTTPGETTMNIFAGLMRCADCGKAMNRKQIKQSYGMYRYYVCSTFKKLDKGACTKHSVRLEKVEEAVLAAIQMQIQLAVDMKQAIDVINKSAAVNTQSGKLQKQLEQAKKEEANAEKLMLDLYPDWKAGMITAEEYQKLKAKFEAQREDARVRIRNINMQMAEVEKGQDSANEYIQNFMKFKNVDTLTRDLVVSLIDNIFVYEGGDIHIDFKFQSPFLMAKEFIENNASALSEEVKKKALLSA

SEQ ID NO: 1418 - protein, 522 aa, unidentified
  source 1..522: note = uncultivated organism
MNFAIYARKSVYSDKSDSVKNQISMCRDYIKLKYNEEGNISEYYDEGLTGANTNRPELKRLLADIDDGLIDVLAVYQLDRLSRDVRDFSNIYGILTEKRVEFISVKENIDTSTPIGKAMTYITMVFAQLERESIAARVTDNMIGLAKKGYWTGGNPPYGYVREKIIVDGKKHTTIRIDPEAAEWVKGIYRDFLDNDYSLQGMETAYKRAGIKTQTGAFFSTTQLYKILTMPYCVANTPEVYDYYESLGCKMDPGSPRDVWKGDKGVMIYGRSTEKNKKHQIQPKEEWLVCIGLQDPFIDADTWLEAQSHLARNKFKRERKYDVPLLKGTLRCAKCGCLMQVSRKKLKNGIFSAYYCITRQRKGIDVCDMGQTDIRKLDTEVLRIFSQIEADPETIMQYASIQEDAQEEPAVNYTAKISSLNAQIGRLTHSLAIARESTASKYILAEIERLDANIEALKREQEMQKADKRRTAREKKSVEQKAEELKKMFSDLSGLSADEKNRIVKEVVEEMTWDGETLFLRL

SEQ ID NO: 1419 - protein, 559 aa, unidentified
  source 1..559: note = uncultivated organism
MDKVKRVALYARVSTEEQAEQGYSIEAQRAVIKEHCQRYNKVLVEEYVDAGVSGKEISKRLELQRLLKDAKENKFDEVLVWKFNRMSRRTIDLLEIIEQFEKYNVTFNSISEHFDTSGPIGKFMLQCIASIGELERNTIVENVKLGLKQRARQGWHSGGRALGYITVPTKDSSREGKNDLVIKEDEAVIIRKIFSMYCAGNGFRAIANYLNRNKYKTVRGNTFSMDAIREIIDNPLYKGYVRYCRYESWSEKRRKGKSLEPILVKGHHKAIISEAQWDKAAVIRNSRKKVTAKVYGSQNLLSTLLRCPQCGAPMIISRSITKLKDGNRKVYRKYSCSVAKHKGAMVCRHNSVPADAAEKYVINKIRDVLKNLKLVQTLVDLLRERISKDGMERKTRLQEIKDKLGDIVERRKKIMELYLDGTIDKDLLHKRLELIDSDNEALSEERSRLESFADLPGEMINPEYISQLLDQFEDIIQKASGEQKILLLRLMIDKITVSNHKIDTIYMRLGYDIKKDHIEGIEEVEPSTAKEAVGGLFLFMNQEKPMEVPLIIEIGRECK

SEQ ID NO: 1420 - protein, 549 aa, unidentified
  source 1..549: note = uncultivated organism
MSVIAIYPRKSKFTGKGESVQTQIDLCREYCNAHFENPSYLIYDEDEGYSGGNTNRPAFIKMMKDANEHKFEILCCYRLDRISRNVSDFSQTLDELHTLGIAFVSLKEQFDTSSPMGRAMIYIASVFAQLERDTITERITDNLKSLAKEGHWLGGTPPTGYKSKPVSFSRNGKTRKYYTLTECANELSIVKILFSQYLEKNSYAGVETYCLKHCIQSRNGKNFSRATIKAILQNPVYCIADNDAWTYFSQGDFNLCAKQSDFDCTHGIQAFSRTTNHRPSSVFKPTSEWIIAVGKHRGIICGRDWVRVQNISKKQTSSAYQLPSSNATLLSGVIKCGQCGGYMRPKMHSGTRLDGTRGVSYHCVLKASSRGTRCQMKNIDARMVDRLVIRELALLADHYQRISTQHYIDFSLISLQRDALKSQLTAAERELGSLQAKQSRLINHMSDQQLSGELISTITKEHQRFESSINTVHATIDRINTSLQTQTNGLSIADFHTQLHSPFSAQFDCLSYGDKRWFVQSIIKSVIWDGSHIHISLAPAINGAFTKQN

SEQ ID NO: 1421 - protein, 519 aa, unidentified
  source 1..519: note = uncultivated organism
MSIEQDTQVRSHIGARTDRGNAARARGGHPAGVAVAEQVLIYLRISEDRTGEEAGVERQRTDCLALCGRLGFEVTGDEVFMDNDISAYLKKKRPGFDQLIEQVKLGPARIVVWHVDRLYRRPRELEDLIDLVETHPIRIEAVMGGAFDLNTHEGRLMARQLVAIASYESGHKADRIRRANQAKAERGDWHGAAKFGYGTGGVLIPEEAAVVREMADRFLAGHSLRSITQWLNEESGVPAPRAHTGRTLGVWSPTTVKSILVSARISGQRAYDPGVRDDGPTGREILGPGNWEAIITPEETERIRAIFASPDRRVGATSQTLLSAIATCGRCGAGLVSGVSSRYTKRGQKTPKLFYRCAAVPGRPERGGLSVSREGLDQLVANAVITRLADTTMPPETTAGDGVGAAMTRIVAARQRLEDLARDYGAGLLTRSQFHAGRTAAQNAVHDAEIALGKVNRTSALKGLPVGDVDALWKAWESEWTIAQKRAIITAMVDSIVVNPDPNCGSRFRPQRVDLTMKA

SEQ ID NO: 1422 - protein, 582 aa, unidentified
  source 1..582: note = uncultivated organism
MSCDRKPVVRCAIYTRKSSDEGLEQSFNSLDAQREAGEAFVLSQRHEGWQVLSARYDDGGYSGGTMERPALKRLLEDVQAKKVNVIVVYKVDRLTRSLADFAKIVEALDARGVSFVSVTQQFNTTTSMGRLTLNILLSFAQFEREVTGERIRDKIAASKKKGMWMGGPVPLGYNLEARKLIPHPTEGELVRKIFALYLKLGCVRKLQAQLNRENVTTKPWVTKAGIRLGGNPFARGHLYYLLRNHLYIGEIRHRERWYPGHHSGIVPKDLWDKVQAQLNSNVRTHHNRARDESASLLTGLIEDGEGNRFTPSFTIKGGRRYRYYVSQYSISNVPGERKVPTRLPAHEVETRVTERLRRFLESDGELFDGLNSTGDNPALLHKLVAAAKRLAARLPSLPSDDLRDLLASFLQSVIIRENDIQVTIRRRDLRQLLEHGDNVIPTILVPHRKPIDSSELICLSIEARRTQYNGQVHLVVAPNSGAPVRHPRPALIKAVARGRAWYEKLLAGKVVDIKSLADETRLTPHYVRNVLACAFLAPDIVEAILEGRQPIALKFENLYKHIPLSWVEQRQQFGFPQNPPPR

SEQ ID NO: 1423 - protein, 548 aa, unidentified
  source 1..548: note = uncultivated organism
MSDTNIKIWDTCGYVRLSREDGDKEESNSVTGQKDLIRDFLSRHPELRECDMKVDDGYTGSNFDRPAFQKMMEAVKAGKINCIVVKDLSRFGRDHLEAGEYIERIFPFLGVRFIAINDHYDSEHRNVESDELIIPFKNLINEAYCRDTSIKIRSQLEIKRKRGDFIGSFAVFGYLKDPEDKHRLVVDDYAADVVRDIFKWKLEGISAGDIADRLNAMGIPTPLDYKRGLGMRYTTKFRTKEESTWSAGMILRILKNPIYIGVLEQGKVTTPNYKVKKIVEKPREEWAVVEDHHEAIIDRFDFESVQKVLALDTRTSVGGRAVELFSGMVYCGECGASMVRKTVPSGRNKYVYYICSAHKSEKSCSPHSLRDCVLEEIVLEALKQHIRQVIDLSDLLDMTDVAWLKKAGIQKLNTRLAKKQEEIDRCQTLLRSLYENLADGVIDREEYQELKKTYTRRKAEAEEQAEGIRVEMSQAMDSSEKGRAWMEQFRKHQNITALDRTLVVSLIERIMVYRDKRVEIVYRWQNEFRWQVELLQRAQQSFSQREAV

SEQ ID NO: 1424 - protein, 503 aa, unidentified
  source 1..503: note = uncultivated organism
MHSGMKDSGQAKSVGIWIRVSTEDQARGESPAHHEARAREYAKFNGWPVKEVYDLSGISGKTVMDHPEARRMLADIRRGHVRALIFSKLARLARNTKELLEFADIFRRDGADMISLQERIDTSTPAGRLFYTIIAAMAQWEREEIADRVKASIQVRAKLGKSLGGAAPFGYKWSDNKLVPDATEAPIRRRMYELFAKEKRKKGVARLLNEAGYRTRKGARFTDTTVVRLMQDTTAKGQYRANHTYRDGDGKLLLKPESEWVYSPVEAIVSEELWNQCNAILADRKDKKPLGPKPVHLFAGLLYCGCGQKMYVFSRSPKYICPKCRSKITIEDIEAIFREELNAFFVAKERVEQHLAHADENLVAKKDQLAAHARQLEKVRTEMRKTFQAYQADQLSVDGFGKLYRPLEDQERSLAAALPKLEGEVDALEMRRLSADEVVAEAANLYLSWPKLSPEEKRRIVESITEKIVVTGNEIDITLSHMPSSEELTKRQQNLSGSWRQRA

SEQ ID NO: 1425 - protein, 515 aa, unidentified
  source 1..515: note = uncultivated organism
MLSQTDIRQVENVAKLWWAKNENKKIPCAIYARRSTEDKAETSIPDQISACRDYAEGVQALEIIGEYSDEDRSGMFSDNRDGFQEMMKEVENGKIKVVIVYSLDRLARKMSDGLRARDDILSKNGLVLSTKESFERDATGELTRRLFMTFYQYLPESTAEHVMRHSMELAEKGLCAGGQPPYGYKVISGEFVIDEEERPAVEYMFQSILAGKSYSTISKDLAGMGYLTRETKSRKEQPFSKTTILGMLTNPKYKGLFIYNKEGAKKKKRRVLVKEYQEVRAEIPAIISEEDWEKVQQILATRTNDDKSNGHGEYPLTGLVFCDCGETMHGSASIGGRNKKRYRRYICSTKRKKGQCKSTPINADYLELAVANVVAPIVNDLLANNSVQVKIAQKAKSNISVMITANKKRLSRLEKDYKNALVGLGRLDDEEAEMAKEEIAQMRLLVEKRKAQISELQAKANNAKAIISKLKQGVAITGKELQESETIFRALATNLIERISVSQKEIQIQFKDITK

SEQ ID NO: 1426 - protein, 512 aa, unidentified
  source 1..512: note = uncultivated organism
MAATSNGTTAPKPVRCAIYTRKSTEEGLNQEFNSLDAQREAGEAYILSQKHDGWTLVPTQYSDGGYTGANIERPGVKQLLADIEAGKIDCVVVYKVDRLSRSLIDFSKMMELFEKRGVCFVSVTQQFNTNSSLGRLTLNILLSFAQFEREIISERTRDKQVAARKKGKWTGGHILLGYDLDSRVGRLAVNPEEAERIREMFRLYLEGTAVVEIVQRFDKQGWRNKQWTTQDGKLYGGSPLRRCHIYKLLGNVLYTGQVKVGEEVFPGEHEAIIDQQTFDLAQKRLEENAWTPGNAHRVKFEALLRGLIYCSCCGSGMYSTYSANKERRYRYYVCYRSQQKLEGYCTSRAVSAPSVEEAVVESIRRVGVHPDVLAETVRLARQQLAEIVTGLREELNTTNGRVKNLKSQIARIRNPEAARLAEIREQLIAGETRAEELRKEILRREKQRIDEKELRRTMESFEDVWKAMNLDEQRNLLRQLVEKVGYDGRTGKVTVSFRSAGVKELVQKEAVR

SEQ ID NO: 1427 - protein, 567 aa, unidentified
  source 1..567: note = uncultivated organism
MEQRKTPIRRCAIYTRKSSEEGLEQDFNSLHAQREACEAFIKSQAGEGWRLVKTAYDDGGLSGGTMERPALQRLLSDINQSLIDVVVVYKVDRLTRSLTDFAKMVEVFDARGVSFVAVTQQFNTTTSMGRLTLNVLLSFAQFEREVTGERIRDKIAASKQKGMWMGGLVPIGYDVIERRLVVNQSEAETVRGIFRRYLELGTVRLLMEDLNQRGIRSKVRVAKNGKQSGGNRFYRGALYEMLSNPIYLGEIRHKGLRHPGLHEPIIDRELWEATQLLLGSKGARRTPRAKRSAPSPLTGKLFDESGQSLTPTHAAKGERRYRYYVSRNLINGKTDSTERGWRLPAPEIERTVASAACTMLGDEAAIANAADAAGLAGHRFPSIFSGAAARTKQLQSEVEAGAALNALIDRVELIDTGIQVTLELPIEYSQERHDANATVLTITREFPMQIQRRGFEMRLVIPGSRAPVPMVDLTLLKTVARTHQWSNDLINGRVQSIGELARREEVTPRYVRKLLNVAFLAPRIVEAIAEGRHPPELTAEALTKRIDLPLLWSEQERAVGISSLARK

SEQ ID NO: 1428 - protein, 549 aa, unidentified
  source 1..549: note = uncultivated organism
MRIAIYSRKSKFTGKGESIENQIDMCRSYIFSHFPEVSEDNISVFEDEGFSGQSLNRPQFKNLMEIEKEVPFDVIVVYRLDRISRNVGDFAGLIDELNGYKTAFVSIKEQFDTSTPMGRAMMNIAAVFAQLERETIAERVKDNMYMLAKTGRWLGGTTPLGFDSEKVDYIDDKGVSRKCCKLTENYTQLETVRLIYKKFIELHSMKKLETYLLNRKITTQNNCQFYVTTIRTILSNPVYCMADEFAYDYFNNQGCGIAAAREECDGSRGFIGYSKTETSSGGERVINDRREWIIAIGRHKGIISGEEWVEVQSILEENADCKIKYKQSHNPAALLSGILFCQCGSHMRPKYHRVNKKGIKPFSYMCELKERSKKEKCDCHNLNGMTADRLICSILLNYDIPDNIFNKYLDKLSKSRLKIETEELIKSQEAIKTKKQREISALIKALTADVNETTIQYINKEINAINDAISAADSEIKRLKLIETGHNQSKNNFDTSKKAFEYFKENFDNLSVDYKRRFIRQNIKKIIWNGRTLRVFIWGRRSDDTSCQS

SEQ ID NO: 1429 - protein, 547 aa, unidentified
  source 1..547: note = uncultivated organism
METETKQKKRIYCAAYCRKSVEERTEETFGSIENQYESIQSFITSHKQEGWTSLPERYADNGFTGSNTNRPSLQKLINDIKEHKVDLVIVYKLDRLSRSLVDFVQLLKFFDEHGVAFASVTQPIDTSTSTGKLMLHILSSFAEFERELISERTRDKMGAARKRGQWMGGRPPLGYDIAKDSKKLTVNQGDAKLIREIFNLYLQGNSLLKVAQIINEKGYRTKQATAKNGRKFGGIKFGITHIQSIIKNVLYLGKVCYADQIYDGQQEAIIDEETFKKAQEKLKENRVERRATKNIECTGLLTHILHCKTCGHFMFHTYTLKHKTHKYRYYVCTNAQKRGYNSCPTKSINAQAIEDTTVDCLKRIFIDNRKKGDHPNKQEVEALLSPIWDTLYPEEKRRILKILIKAVDYDSTSKKVGIVLNGSDTRLEFEVDLKQVRPLNKWRKEEEIKNEPLIRSTLVLAHQIQLLVNEGKIQHPRNACKWLNLSVTRMDQIMNTLFLSPAIQDKILSLNTPAINALTEFKIRPLLKEVNWDNQLAQWQVLTVDNR

SEQ ID NO: 1430 - protein, 565 aa, unidentified
  source 1..565: note = uncultivated organism
MKKLKLKPNQKIAIYSRKSKFTGKGESIGNQIELCKEHIFKHFGIDDESLIELYEDEGFSGKNTKRPDFQRLMQDCRNKKIRCIVCYRLDRITRNTCDFALLINELDKYGIDFVSISENFDSNTLTGRAMMNICCTFAELERGTIAERIKDNMQELAKTGRWLGGTTPLGFKSKQIQTSTSPNGKSRTAFQLQPIAEEQTIVKLIFQKFLEYNSLTKTETYLLNAQIKTRNGIPFSIFAIRCILANPVYASADSDTFDYFSKLGVILCNDEKNFNGTHGIMAYNKTYQTCEESHKMHDYEDWIVAIGKHKPTITGKEWVKVQNFLEQNKPKSYRKPKNNNALLSGLLICGHCGAFMRPKAYRRIDENGNRTFSYLCETKEKSRLQQCDTKNPRGNELDKMVCDEIKKLSRSNSTFHKQLNIIKKQILATEEHSNSELTLLQTSLTKKEKQISNYIKAISETNQTAATERIMTEINKLHAETEALQQQITELSELTNNHGELLPTLDALTEKLSSFADTFDILSINEKREILKLLIEKIVWDGVNVHLYLYGTNYEKTEPQPRGCK

SEQ ID NO: 1431 - protein, 543 aa, unidentified
  source 1..543: note = uncultivated organism
MQKEISRIWRATLYLRLSREDGDKEESNSIAGQRSLLRDFLKQHPDIQEYAVQVDDGWSGSTFERPAFKKMMEDVKAGKTDCIVVKDLSRFGRNYLDAGEYIEKIFPFMGVRFIAVNDNYDSYREKSASDDLIVPFKNLINEAYCRDISVKIRSQLEIKRKNGQFLGPFAAYGYFKDPQDKNRLVVDEYAAGVVRQIFAWKLEGVSPQDIADRLNGEGVLSPLEYKRSLGMKCSTPLQTNVKASWSAASVIRLLKNPLYIGTLTQGRHTTPSYKIHKRVEKDESEWSVIECSHEPIVSKGDFETVQKVLALDTRRSPEETQISLFSGMVFCGDCGASMIQKPVSAGGRKYHYYICSANKQDKSCSPHRIRSEELEKIVLGSLQRRIASVADLEYILSITDTAPLRTAEAVKVQRQLDEKRADYEKLQKLLMSLYENLADGIIDKTEYMRLKQSFTQRAADAEKQMDALRERLTTIKTQATDLSWMENFKRYRNLSALDRKAVVSLIDRIMVYEDNTVAITYRWQDEYAWQMDIMRQAQLKEAV

SEQ ID NO: 1432 - protein, 554 aa, unidentified
  source 1..554: note = uncultivated organism
MGTERRGSAGQTGLRWGGDVRISEDEWVKDPKTGKMRLSEKGITRQKEDITELADRLGGEIVEWYPENDTSAYKKRRIRLPNGRSVWRVYRPEFRRMLADYEDGKIDGIIFYDIDRLARQPRDLEDLIDLVEYYKRPVETVTGNIDLRTSNGRAMARVLVAMANKSSEDTARRVARAKLQIAQQGNGTRFTGSRRRFGYREDGSLNEKEAALIRDAAKRFMAGESWNGIVRNFNESGIRPVYANVWSTTSVRQILLSPSIAGIAVYNGSLREENKTGRPKNLYSDPEAVALKDAAGRYVMGNWKPVLSVDEWKALVAESEGRKKGAAFSAKGTRKYLLTGLLRCGRIHENGAICNRSLSGFERRYKSGRIVYSYRCPNPTKGGCGGIERSMPKLDKLIEDLLFAHLAENAPDSTEESDESDETDPDAIQLAEIQESIRKLRMGYAAVPRTVSDDTMFSVLPQLEATERDLKAKLRKKAKARLGRLSRAKTPEEVRREWDEAADNAVRRAILSRYLKAVIVRKSGRRGPGGLDYSAIEPVWREDGDYMPLDHVFH

SEQ ID NO: 1433 - protein, 581 aa, unidentified
  source 1..581: note = uncultivated organism
MADARQSLRRPVKRSRCAVYTRKSTEEGLEQDFNSLDAQREACAAFVQSQKHEGWTLLPTTYDDGGYSGGSLERPALKRLLADIEAGRIDVVVVYKVDRLTRALSDFAKLVEVFDRRGVSFVSITQQFNTTTSMGRLTLNILLSFAQFERELIGERVRDKVAASRKKGIWMGGIVPLGYDVKDRKLVVNKAEARTVVDIYRRYLRLKSVRALQAELDATGIKSKRRVRHDGTVRGNQSFSQGALYLLLQNQTYRGDAKHKGNAYPGEHAAIIDKPLWDAVQTVLAENRVERAAGVNTRAPSLLTGLLFDEAGERLTPTWSIKKGTRYRYYVSTSLVKGSRNAHSTRRRIPAGDVENVVIERIRKFLSNRGELLGAIDERDRDRIGHRHLIARGHQFAKELGQAPEKHRPFVQSLVPRVEIEATSVNIDISLARLTTLLDSNHMELPCAHAIGPSDPVLTLTTPVQLTRVGEQMKLLVEDTDDNREPDMGLLRVLARAYDVQRRLCNDPSLTVREIACQEQITSNYLYVVLRLRWLAPEIVTAIVNGRQPPQLSTKRLMRLMAKLPADWPAQRALLGFAERW

SEQ ID NO: 1434 - protein, 519 aa, unidentified
  source 1..519: note = uncultivated organism
MQITEITPKAQSEERIRLAAYCRVSSDSEDQLHSLASQIRWYSDYGKRNPQYQIVDIYADEGLSGTEMENRDELQRLLKDCRRGKIDRIITKTVSRFARNTEELLATLRMLKEFGVSVFFEKQGIDTAQLNMEMIVTFPGMAAQQESEAISGNVRWGVKRRMENGDYIISRPAYGYMLKDKKIVINEDEAKVIRRIFDLYLHGMGTQQITDLLNREKVPTSNRKKGAEWGRNAVRYILHNEKYMGDAIFQKHYTTETLPYRRIRNNGEKPMYYTENYNPPIIDENTFNAAQNLIKQKAEREKGQKTSSSSMKLYCPECGRLFGRQTLKGHNYWNCSKLTSNRSKCKSRRVREDMVCYAFLTMTYKLKAHRCEVLDELIQQMENLRTITGENSERIRQIDKQIADLCAKRLVVARLHTNGVLGMAEYSTQDFEIGDKINRLRTERRKKLSEDENDMAISELKALNDEIKDYSPSSVFNAELFDRIVEKIIVKDNSCLIFHLIGGLTLTEKIKEKGRCKTK

SEQ ID NO: 1435 - protein, 906 aa, unidentified
  source 1..906: note = uncultivated organism
MKDNDKRLWVQTLWNPINDKHQSPLESKKPGIKVAAYCRVSISEEEQLKSLENQVHHYTHYIKSKPNWRFVGIYYDKGVSGASTSKRRGFQRLLRHAEEGKVDLILTKNISRFSRNSKELIDIVNHLKELEVGIYFEKEKIDTSTDYNKFLLSTYAALAQEEIESLSNSTMWGYEKKFMQGKPKFSRLLGYRLVGLGDDQRIEVIEEEAETVRKIYSKYLEGLTYADIARYLSAGGIKTVEGKPLWSGRVIKTVLTNVTYTGNKLSREMQRDLFTRKINYGKRDQVFIENTHEPIISIEVFNQVQKKVEETTQKRGPIKPKAYNPLAQRLICGKCGYMLSCAYKKDNQNYRCRSRVMKICDSITYSKPMIRDMMLKAMKFKYDFSNDEIIAELLKEIQIINQNDHFEFHRLKYITEIEIVKRKLALGELADTSINVERMEKEYREFEAKIAKIEDDREIRLNAVAWLKEHKTRDDFVSGVTSEIMRAWISELTIYTPNDFIVHWIDGSQSKIGDCDGHEEVKQRNEKIRDEKLEIVHANSIVEKIERKETEELHLLKREKGKEDKIFKREEDADLSINTNADIIKIEPGQKDYVMKSLNKSLNANYLLQDPTLNLSNKDKPKLRTAAYCRISTDSEEQMVSLKTQVAYYTYLILKDPQYEYAGIYADEGISGKSLKNRNEFLKLMDECKAGNVDLILTKSISRFSRNSLDCLEKVRMLKNLPKPVYVLFEKEGIFTKDEKSDLMISIFGSIAQEESINTGEAMAWGKRRYAERGIVRPSNLPYGYRTGANGEWEVVEEEAAVIRKIFRDTINGRTYNEIAKDLNFNGVKTSKGTGQWWISTVKNVLTNEPYRGNYLYQKTYTKDTLTDKRVKNDGFLPQFLIENHHIPIIDNYVWERVFMPDPIVL

SEQ ID NO: 1436 - protein, 577 aa, unidentified
  source 1..577: note = uncultivated organism
MSQPKRTLRCAIYTRKSSEEGLEQDFNSLEAQREACEAYIRSQAHEGWKALPARFDDGGFSGGSLERPALQQLLVEIREKRLDVIVIYKIDRLTRSLMDFAKLADLFDQNGVSFVSVTQQFNTTTSMGRLMLNVLLSFAQFEREITGERIRDKIAASKKKGMWMGGTVPIGYDVENRKLVVNHKDAETVRTLFRLYLEFGSVRKVWAEARRLNLRTAIRVSSNGIQTGGKPFCPGNIYNLLQSPYFIGRMPHKGQSYASSHPAIIDPETWEAVQAKLAANRVDRRFDRNSKHKNPLVGILYDAKGVRFTPSHARKKGQKYRYYIDPALTTGVTPAKAHLPRIPALEIEHAVRRTLMDLLKDGPKLLEIVDDDLGGARTERLLTNARGLAAALAEATPLSWMSLVRPALMKVIVEEATLCLCISKERLCKVLLGEADEISASGNGIADGSQTYNLRVDARIRMRGGVMKLVVGNGGTIFEAPPEITLLRTIARAHDWAERLREGKVNSVREIAKEEGLTDSYLTRVIRLGFLAPVIVNLIVEGRASPDTTVGRLFREDIPQIWIEQESRIAGPSQPRG

SEQ ID NO: 1437 - protein, 569 aa, unidentified
  source 1..569: note = uncultivated organism
MKEQKSPAIAIYSRKSRFTGKGESIENQIELCKKYIDVNYPDTPEDSILIYEDEGFSGGNTERPQFQKMMEDARKKKFSVIICYRLDRISRNIGDFAKLIDEFKALKISFESIKEKFDTDSSLGRAMMYIASVFSQLERETIAERIRDNMHELAKTGRWLGGNTPTGYKSTQVQKITVDGKKRSAYKLDIVQDEMELVKTIYSRFLEMNSLTKVETYLIQNHLKTKMGKDFTRFSIKAILQNPVYMIADMDAWNYYEKLGVELYADKTEFDGKHGIMAYNKTIQQAGKANQFRNIDEWIIAVGKHEGVISGKEWVAVQNYLEQNASKAYRKPKSTMALLSGLLYCGHCGSYMRPKVYNTEYAEGEKRYSYLCEMKEKSRMHECNMKNPNGNVLDRAICEEVKKLSENSSEFVKQLEESKKAIKANTSEYDRRMEHFKNLLSDNEKEIKALVSKLAETEGTAANGYITDQINELHEKNESIKKSIEELESLTKENVLSHEEFDILRELLSSFASTFDTMTIEQKRMAIRNFVKKIVWDGENVHVYLFGANEDEIELPNEAETEPLRGGSK

SEQ ID NO: 1438 - protein, 577 aa, unidentified
  source 1..577: note = uncultivated organism
MAKIVEIIEPSKTKKSDGKKYNVCAYARVSTSSDEQRDSFINQQKYYEEKIKNNPNYNFVGIFADEAISGTTDKRPDFQRMIRLAVQGHIDIILTKSISRFSRNVADLLKYCEQLRDNNVNLIFEENGIELLNSTGSLLLTILGAVAQMEVENTSEHVKWTLTDKMRKGKLVGQANPLGYDVVDGKLVVNEEEADYVRYIFKRYLEGAGAHTIAKELSNMGIKTKKRNNTNWHESTVMGILKNEKYTGLLVQGKTYTVNTMGHKRKDNNGEANCYKVKDNHEAIISQEDFDKVQTIIASRRTTTNSDGIKRGTTTNSTQSEFTSKIVCAYCGKHYVRRITHPGTKYQKIKWCCSTVAKRGKANCPKSIIIDDDYLKKGVVGVINNLREDKDFAFYLPQQKLNELLKNADENKDKFEGEIKQYRRNLDLKVRKKSKILDMFLEEKITEDEFIIRREAIDNEITAIKKSLNELEALCYDEEVKKKSSKQIVQLMSEGKAEGFNKELFDLLISQIVVGGKRTTDFVDDPKSLHYELISYNLYTDMKKVVTNGELRYTMDGNLEEESHENYEVLEDKKKQN

SEQ ID NO: 1439 - protein, 529 aa, unidentified
  source 1..529: note = uncultivated organism
MQVYKTIKYIRLSYTDDKSVESDSVANQRRLIDDYIARHPEIEVVAEKIDDGYSGVLFHRPGFQQMLSDIEAGHINCVIVKDLSRLGRNSIDTGYYIEQYFYAHNVRFIAVTDQFDTADPGNLHGGIMLPLKNMINEAYSLDIGRKIKAQARQAMKDGDYIGARAPYGYRKDPDNCHKLLIDENTAPVVKQIFEWAYERVALNRIVRNLNEMGIAAPSHYKKSTGEITSPGLIGSGKWQTRTVMKILESEVYTGDLVQGKTKMVDHQQVKADDDNLIIARRTHEPIISHELFTAVQEYRKQVCEESRAVPKRPYTPNIFKGKVFCADCGRSLHRQRAERKKGPDIYWFHCLTNSRVAKDTCKGVMMQETELIATVTTILEKELSVALGMSLPLFQLEARQKQKKDGLKSQMSAKRQEIEKQRRLIRGLYENFVQGILTSDEYFELKAGYEESITVLSGDIEALEKDMDALDDQLVRYRAMEKDAKSLAQDHVLTAELIERLIERIEIDHERNIRVFFRFKSEFQGEAVK

SEQ ID NO: 1440 - protein, 536 aa, unidentified
  source 1..536: note = uncultivated organism
MNQNSGQNNIQVAIYTRVSTEEQREGQNIDSQIHELKKYAQEKDYVVAKEYKDEGWSGGLLARPALDELRDDASKCLFEAVLINDVDRLAREVAHLGVVKKDLENKGVRIIFRKLPSGNSPTDNLMINMLGSFAEFEREVIADRTRRGRRYKAEVRKLIVGHTPPYGFDYIKKDKDKGSEGRYEINEKEARVVRKMFELVDTNHFTAHDLSRWLLDNKIITRKGGKKWSVSSICRILRRTDYIGLAHYNKSQAVEPVKVRNESKYRKQKKSSRKLRARTEWIPIPIPQCKIIEGDRFYHVQEILNKNKVFSKRNGKNSYLLSGLIYCLCGSRYAGEPQHGKPFYRCRNRISNFPLPKTCHNGSILGKTLDDVVWNTVSNALQNSTLLRQQVESLREHYKNKPSKIEGEIKHLENQLGIVEKEENRLFEAYKVGLITIVKYKDEIEIIGNKRAQLKKELSALQSDNIMPRQLLRKSLIYHSKILKHSLKFLEGNPEEKKKFLRNLIRRGVINNRELELDCALAVVNEPKVGIVSQQY

SEQ ID NO: 1441 - protein, 519 aa, unidentified
  source 1..519: note = uncultivated organism
MSIAIYSRKSKFTGKGESIENQIIKCKKFINFKFSDLPDKEIEVYIDEGFSGKNEDRPEYKKMISKVKDEKINKIIIYQLNRLGRNARDIHNTMEMCTNLNCIIYSATEGFDSSTSFGRAVIGILASLAQLERDQLVERIKDNMYTLARMGRWLGGQSPLGFDCIRKTYRDENMKERYMTILTKNPKELKLVKKIYSKYFELQSLSQVYKWILAENIKGKNGGIIDKNSINVILQNPVYVQSSPEVLEYLSTLNYEVCGEANGNGILRYGKTEGKIAAVSNHKGIITPKSWLKVQSIIKNNTNKAPRLGRTNTALLTPLLKCSCGSSMRVIYGKPYPDGTKRFYYTCTLKNNSGKIKCNSKNLNGLEIENLIIENIKFKSSEYIFSALENLIQSTDKNEKVNKLNTLLKEKTSLNSKISNLINKLSLTNNEEISKLLLDQIEMLKNKVKNIDLKIENFNKIEHETIDVYTKTSTEIEKFDNFKNNFDNLDFERKKKCLKEIVDQIIWDSDSKEITITYK

SEQ ID NO: 1442 - protein, 515 aa, unidentified
  source 1..515: note = uncultivated organism
MIAAYVRVSTQRQALVKEGSLKNQEERIRSWFDYYNTQNGKSLNWDKNVVIFREEGKSAKDIKQRPRFREMLDEIQGGRIHNVVVASIDRIFRNIRDALDFITLINKINVDFTSLKENFDTSTATGRAFLNIMMVFAQMEREQTSERVRIGNRQRIDRGLWTFARVPYGYEMDKSNIGTLHVIDSERAGVELAFSKYQEKGSIRDVVRIMNEQGFRTKSGTLWKHDTIYRLLKNKAYIGLVQINKKNQSKSNDNLPKADRYMERKGNWEPIIDDDLFLRVQELLHGNGTSKTNRIKVNKYPYIFQGGILQCSHCGGIMSGTSTKKKSKKYIYYYCNNCRFQVTSSRLEGIVFKIISDILESDPIIKKVLEKVQKRRNGINLSLSNSYINAKKVFSAIQKKIEVQTIALGNTKSDSIIETIHETLRDLLKQKDHIQYVIEDLEMQIQSWERKGESLQSLDNITFYRKVILEHMSRVHIRQIMPLLFSRIVVGDNRITLGIKGESGFKEFDICVEND

SEQ ID NO: 1443 - protein, 568 aa, unidentified
  source 1..568: note = uncultivated organism
MAKAQGTRCAVYTRKSSEEGLEQSFNSLHAQREACEAYILSQRHEGWSVIATSYDDGGFSGGTMERPALKALLADISAGQVDVVVVYKIDRLTRSLFDFAKIVETLDSHTASFVSVTQSFNTTTSMGRLTLNVLLSFAQFEREVTGERIRDKFSASKKRGMWMGGNIPLGYDLKSRKLVVNNKEAETVRTIFGLYVDLGAVRKVKAEIDRLELRTKLHTSESGVTRGGLPFRIGHLYTILRNHLYCGEIKHKGEIHAGDHEPVIDQALWDRAQAQLASNAAIRRSGKSSKDPSLLAGLLFDGKGNRMTPSHAVKNGKRYRYYISNHLIAGKSRGRDSDPGDGLRIAAQEIEGHVITAIAMFLADQQKVVAEFCPVDVAPTVARAAIGQARSLGRKLKAAENPDRYELIRSLIVHVRIDDTSMCVQLRRSCLREKLSPPIDAVSRDIEVPLQLKMPAELRRLGKEKRLIVAAHAPKTNPDAVLIKAIVRGHQWFDLLKNRTALSITDIANAEKLPRTYISSVIPFAMLAPDITGAILEGTQPIDLNLDRLINFSLPIGWAEQRSVLGFE

SEQ ID NO: 1444 - protein, 526 aa, unidentified
  source 1..526: note = uncultivated organism
MVPVKVLVYSRVSTDAQERDGTSLDTQERACREYAQAKGWTVVECIKDTASGSNLDRPGIERVRQLLSQGFVDVVLAYAVDRLSRNQIHIAVLLDDIEKAGATLEFVTEDFENTPVGRLILNVRAFAGEVEREKITERTMRGKLERARAGKLPQGTGKGCYGYRYTKETGRRETDPFQAVVVQRIFQQYIDSQSFSGVSNELNETGIPAFSGGRWYPLTIRRILMNETYTGRAVYRKTKRLRLRRNNGHGPASRVVDQPQKEWVAVEGSTPRIVDEALWQRVQEILNDPERTRRRPTPRHYALRGRLKCGICGSAMVGQTLTVRTKPYQYYRCRHVYDKNTSRTCTARYVDRPRLEKAVWAEMKRVLTNPDIVLQELKRVASEDTHDDQGEQLEQALADLASQEKRLVDLYTVGGITAAAVREKSADLSKRRKVLEAQRASVQVTPKPSFEDVDADGLQRVCAAVADWVDQADEKDRRLALEALQVSISATKGAATMSGVLPTDTPGFITDEQSSRCSYNGDQIRS

SEQ ID NO: 1445 - protein, 661 aa, unidentified
  source 1..661: note = uncultivated organism
MIAIYCRVSSDEQADRGTIDNQKQFAEQYCRLHNLSIYDYYMDDGVTGTMPIHKRPAGQRLLRDAANKCFDTVVFYKLDRLGRSLRVILDAVGQLEQLGISIKSMTEQFDTTTPAGRFGLNIFATVAELDRETILDRMHQGALRHARLGKWLCGLPPYGYKVVDGYLVPDEQPIDGLPYSPADVIRMIFELAAKGQSTISIANHLNDLGIPSKYKLHNTSRKCSGYWYQSKVLSILHNTVYYGYRVHGKLSDSPKAEQIEQTVPAIVDKELWDSAQTKLKLNFMQPTLVKQREYLLRGLIKCGRCGSSYCGITTGVGKNSHGKPTTYYACSGKTKARPKATAHLRCHATNVKADWLEDIVWADCMQYVMAPGKVIVDSKAVFDAEAAQRELDAMTASMATLDKERQSAISLAIKGIISDDDLAAQLSDIDTKRQQLASKIADAKAVMDKQLSDDNDINTIYERLQQLKQQIAAGIDFKAKRAIIQELIERITITSQESDNRDIPSIDVDIKYRFPVSRIFPDNNPHAQLCEHKSGQIEPLWHKIKRLRLAKGYTIKGLAERSGLSFATISALESGQPVYKLSTLASISHALDIDSSLLTDAKNMPEDTLAQKIEKARIMHCHTRQQAMEAIGISNHTYMSVLKGRRQPCEKTMAKIIKYIK

SEQ ID NO: 1446 - protein, 572 aa, unidentified
  source 1..572: note = uncultivated organism
MTTASGKVVRCAVYTRVSTDAGLDQEFNSLDAQFDAAQAYIRSQAHAGWSMIKTRYDDGGFSGGSTDRPALQKLLADIRDGKVKVIVVYKVDRLTRSLADFAKLIELFDRHGVSFVSVTQQFNTTTSMGRLTLNVLLSFAQFEREVTSERIRDKIGASKRKGLWVGGVVPLGYHAKDRKITMVESEAATVRHIFRRYLELGSLNLLLSDLRAAGVTTRVRALAGGRTVGGIPFTRGPVAYLLRNRFYIGEVRYKGEIFPGEQPPILDRGLFDAVQARLEQQRTHHTTTRQTSDALLMGLIFDDQGQRMTPTYAVKNGVRYRYYISSSLHQGSKARAGTLNRVPAIEIETLVIAAVRKRFTVQMTAHPGSRTMRKANANDPAGPTDKSLIATHVLRVDVMSGQLAVTLKSVHRGSEPQDAMCGTIAEQLSPPAGNKVSSNEEHRNSMGAQLLIPWIKRPSKLPRKIIRPSNVALGTDNRPIRAETRAKLVAAIAKGRHWLDEIIVGTVNIEQIANRERCSIRQVNMTISLAFLAPNLVQAAVDGRLPRGIGVSNLRDAPAEWSQQLSLLGLSS

SEQ ID NO: 1447 - protein, 555 aa, unidentified
  source 1..555: note = uncultivated organism
MTKPVPSAPPPRRVALYLRVSTDLQAGRDEGSLDTQEARLRAAVKSRAEDCEVRHVFREEGESGKSLDRPEVQKLLAAIRAGEIDLLIVTRLDRLSRSLLDFFEINRLLEKHHVQFQSLNETFDTTTAMGMAMLKIVLVFAELERAQTAERTKVAMKARAERGLWNGGSPPLGYTSLENGHLEVHATEAEIVRLIFDRYTELRSTVKLARWLNDRGHRQKAFTSRRKGSAGGKPFSISVLQGMLANRLYLGEIKHKGELFAGQHEAIVTPELFERVRQILVDNNRNLRVAPARAKYDYLLTGTLRCACGYALTTSAGRAKGRSYHYYRCVGIQKVDRHACPVKNVRADLADATVMEIIREAARDPKMLAAAVEEANRIAQQTVAPLRERVAAMKRDLAAAERTAEATLDTLLMVGLSDSPTAKRRLAEAEEKVGQVRLALAEAEGELAVREGEQLDAEVMAQALGSFDEAFDHLTSDERREFLRLMIKQVVVYKDRIVVDLYEGRQATGYLVAVTTGAQTDEEAAKARNPGRVDQGFVTESRWLPLPDLNRGPSD

SEQ ID NO: 1448 - protein, 521 aa, unidentified
  source 1..521: note = uncultivated organism
MNKSAKTNAAQPANAVIYARFSSHNQTEQSIEGQLRVCYEYAQREGYNVVGEYIDRAISGKTDDRPDFQRMISDSKKKAFQYVIVYKLDRFARNRYDSAIYRHKLKANGVKVLSAMENIGDNPEGIILEAVLEASAEYYSVDLSQKIKRGSRESALKGQFLGGSVPYGYKVLDHHLVIDPEKAPVIQYVFEQYAKGVPKKDIVDELNARGYRNSVGKPFGNTAFQTALHCEKYIGVMRWNDVENECPALIDKETFDKVQERIARNKREGGRNGAKMEYLLTGKCFCGPCGSPMVGVSGTGKMGEMYYYYQCQGRRIKRNGCRKAHEKKDFIEWYVVEQTVEYVLTPERMKQIAVAVVAEYDKEFNDGKVRDLESRIAKLDRDMDKLVDMLMDTPKSARARINKKIELADQQKTDLEIDLAKLRIANGIRYTEADIIAWLKQFCKGDLFDESFRRRIIDTFVNCVYLYDDRVVIFYNIRGGKQISYMEMQEAVDGVEFEDDAPTDYKGPAGSYTKRHAPPNK

SEQ ID NO: 1449 - protein, 532 aa, unidentified
  source 1..532: note = uncultivated organism
MKIAAIYSRKSKFTGKGESIINQIELCKRECSHLNIDKFIIYEDEGFSGKNIKRPQFQKMLIDAKEKKFHVLICYRLDRISRNIADFTSLINQLDSLQISFISVNEQFDTSTPMGRAMMYIASVFAQLERETIGERVRDNMLELAKSGRWLGGQTPLGYESKKLTYLDSEFKEKSMYTLSPIKKELNIVKTIYDKYIQKKSISQVFIYIFKNNIKTKNGADFNKKRIQLILRNPLYVRANQEVMNYLKVTGMNVMGKANDKHGILIYNKSKGARIKRDISEWIASISTHDGIIDACTWLKIQQILDVNKNKAPRLGTSSAALLTGILKCSKCGKNMFVKHGHISSKTNKKIQYYVCSTKDYSKGMRCNNPNIRVDELENVVINNLKNISIDKTILLKELNKIKIEISRNNLMLSEINNLPELINTKQTQINVLINQLSLDNQISKYIRPQIIKLGTDIDNLNIKYDNLKSISYNTNKNESNVNMFLYYLNDFPSFINNLNFNKKRLLINDLVASISWDGSKGIVKIKFISLK

SEQ ID NO: 1450 - protein, 545 aa, unidentified
  source 1..545: note = uncultivated organism
MTRAAAYLRVSTSGQIDGESLSTQRSSSQDYCASRGWELSKVYEDAGISGAKDDRPALQALLSAVKAGEIDAVVVRDLSRFGRSARDLLNNIQTLKDCSVTFISLKEGIDGSGPYGQFMLTILAAIAELEMEMITSRMKENRLARWRDKRIFCGKPPYGYRWNTKEKRIEIVLDQGETYSRIVKEYLDLGKSLNDISIDLNAEAIPTRNGNSSKWSSGTLSRILKCGDYCGEITVNLYLTDATGKVIAHRPKSEHIVFEAPPLISKAKWDRLQERLDSANSRGGRPSNAAQQFLLHDLCRCGICGAKMRSDYGTRRVDGSRFRHYACYWHKAGPKTREIKGHQKCLLPLIPAELLEWQVFYVELMRQLGIEPEHYKPLLDAQHKWDGKIEALSKTLSNVKASLRRKEMALRNLDSLLESDGFDSTVYSRKRHGFLMEIKTLDQKMKDTQKDLEELRQRKSEEAEFAKMVSGTDPFKTLTYKIINLPFADKYRLLRGILDGPIVVGHSTLNPHVGRDPEDEMMKILEGIEMTVRRNNPLLLELLPE

SEQ ID NO: 1451 - protein, 503 aa, unidentified
  source 1..503: note = uncultivated organism
MNYKNCAIYTRVSTDNQAEKEFSSCEAQEQKIKSFISSQNDWRVFKVYSDAGYSGVTLERPALQQLLSDLKKEKIDIVFVYKIDRLTRSPKDFYQLIEFFEQAKIDFISITERFDTSTPAGRLLRNIMLTFSQFERELTSERTKDKMLERAKKGMCNGGNTPYGYARENKKLIPCPKEAEEIKSIFENYLEIGSLSKVYKMAIEKGIKNKRGKNFSKTTIFSILRNVVYVGKIKYNDEIYQGTHESIISEEIFALAQKIHKNKRKNFRVYKNFLFGGLIKCEKCGSKMTSYFTNKRTNGKLTRYYYYRCTSTLGHDWQACSVKQVSAERLENFCIENLERISVDSDYIENLVFRLNYELQNNQPNSQNEALRTPHEAEYELTPACSKFSQFSSEKIAHTLKFFLSALKTKTGVERNLLAKRFLKKITYSPESIRISFVLGENLFNSLQTENPACEVRGGAEFSPEKLSALRRKANNEFVAFNRAPILRRSSNGIQKKVLNYFI

SEQ ID NO: 1452 - protein, 538 aa, unidentified
  source 1..538: note = uncultivated organism
MKTAILNIERIMPAPGGAREMTAIAPTGAAGGRLKVAAYARVSSDSEDQMHSYISQMRHYAGIISGNPEWEYVDVYADEGLTGLDAGKRGDFQRMLADCRKGKIDRILCKSVSRFARNLTDCIEAIHELKQCGVTVLFEKENIDTARINSEMLLAMHAGGAQRESLSIAGNLRRGVRMRMKTGDFLPSSAPYGYRLNTKARTLEIEPDQAEVVTRIYAAYLAGRGIHGIADTLNREKVPRECRTAKPDGNPGKWHPTAVRYILTNISYTGDMIWQKKYTTDTLPLRMVKNNGEKPRYHVQNSHPPIVSHEDFENVQLLMAGRRDQFYKGTPAADTMLSKAVYCECGSLCRRKVTGGKTYRTCRTHDGNGKHECPVRQVPETEILAAFARMWEKLRGHRDEILSPLAEHLKLVTERKYRSDATLTEVNKELISLTEQVHVLERLKGKGYLEPALYLSQRHEFDRKIKALRRTKERLMGDDLGGCALPVEDLVIALEAGAPEVEGFAEIVERVTVMAEDKVRFRLRCGLELTESIERAVR

SEQ ID NO: 1453 - protein, 530 aa, unidentified
  source 1..530: note = uncultivated organism
MKTKQKIIHPEVPRAALYTRVSTEEQAKTGFSLAAQEERCRNFAAGKGWEIVDVYCDDGHSAKDLNRPQIERLISDAKRRRFDNVVFLRLDRLSRDIGDMTMLRKLFTGLAIGMVSLSEDFDTSTSSGRLAINMHGSIAQYEREVTADRVRMGLERSWSEGHWHGGEAPFGYDYDKEKKRLVINSSEAGVVRLIYRLAIEAAIGARFITRHLNGTGVLRRGRLWSLNSVLYILRNPLYCGYLQSRSDPPQQIKGLHDPVIAVATFERAQRVLDSRKALSGQVALSPNLFSGLSFCGECGSRLHLSRTAKKTSTKPGGGYRYYFCSGKREGGPQTCRLPYANGEIFDQQVIDAIFNAVTDRENLRKYVSEFISAQTSESVGLKERVVEIVAEKRRIGDQVAQFSDILVEECDPETSQLYRNHIKELLQQKSELEREHRALQAKFGESHNRLADENQVLALTENLRELFYRADDNVRRLLLRSILDRVTVFYDKSVEVQLKIPLSAGVSGDSSGNGGVKVGPPGVEPGTSGL

SEQ ID NO: 1454 - protein, 576 aa, unidentified
  source 1..576: note = uncultivated organism
MSRKAANRTRRSGKIRCAIYTRKSSEEGLEQEFNSLQAQREACEAFIKSQRHEGWVCLSDGYDDGGLSGATMERPALQRLLAEIQAGRVDIVVVYKVDRLTRSLADFAKIVEIFDAKGASFVSVTQQFNTTTSMGRLTLNVLLSFAQFEREVTGERIRDKIAASKKKGMWMGGVPPLGYQARDRGLVVVDSEAETVRCIFRRYAELGSIRLLQEELDAQGLTSKCWTSASGRLRGGKPFARGALYLMLQNRIYRGEIVHKERSYPGEHAPIIDQELWDTVQARLAGNAAQRSAGGRTAQPSLFAGTLFDGDGNRMTPSHAVKKGTRYRYYVSRPLITKDQADRSAGRRIPAAEIEQLVASRVRQWLLDPGSIYKATSAWLREPSAQQRLIARAAEIGRQWSELPPARRRAVLTALIERVDVGVDQIDIRLRPPRLGALLDVACVPLQSVTDDEIQILSIPVRLRRAGREIRMLIDGTDPFATGKPDARLIKLLVRAHRFNTTLVQSDGVAFAAFAVREGVSRSYFTRVVRLSYLAPDITQAILDGRQPRDLTAEKLLAHSRLPLAWRDQRAALGFA

SEQ ID NO: 1455 - protein, 559 aa, unidentified
  source 1..559: note = uncultivated organism
MARAERPAPRRCAIYTRKSTEEGLDQAFNSLDAQREACSAFIRSQRSEGWVELPEAYDDGGISGGTMERPGLRRLLDDIRAGRIDLVVVYKVDRLTRSLADFSKLVEVFDATGAGFVSVTQQFNTATSMGRLTLNMLLSFAQFEREVTAERIRDKIAASRAKGLWMGGPVPLGYDARDRKLVVNPAEAETVRRIFARYLAAGSLRRLMAELRRDGIVTKHRPQRSGRVTGGTEFTAAGLTGLLRNPVYIGEARHKGTRHPGQHEAIVAREVWEAVQVRLDAGAQEGRAAVASSPLAGRITDAGGQVLTPSHASKVGRRYRYCVSRALVTGLAADCPEGMRLPALPVEQMVRRALAGMLGEAATVAALAPADAAAEALLRDRLAGLAGRLHEASGSDLAEIAAGLDLKVRIGTADLRLEVDPVALAEHLGLPGTTTGERLVASVPLQMRRRGQETKLVIGAAEPHTPDPALVSAIADAEVWAAQLLSGGSSLQALARDLGREHRLVARTLPLAFLAPDIRSAIRAGTQPPELTATALRRLDPLPLRWEDQRRALGFCVET

SEQ ID NO: 1456 - protein, 552 aa, unidentified
  source 1..552: note = uncultivated organism
MRQQEKPVRFCLYSRKSKATLKGDSIGNQIEMGMRYIRDRYPDASPEDIDIFEDDGFSGKNTKRPGFTRMMAGVTRGDYAYLIVYRLDRISRSVGDFADILKVLERTHTQFISLSENFDTASVMGRAMMSIASVFAQMERETISERVTDNMLLLSHTGRWLGGRTPAGFKAVRVDADPARGIAKAYSMLAEDAAEMNAVCRAITLYRRLGAIRATTQALFQENVRINGQRQLSDFALKSLLTNPVYCVADQDAYDYFYQLGCAMPRERADFNGTFGCMPYNRHNVKPGSRALRAPEEWVIAVGSHRGVISGRDFAALQRRLAQNALLHPREQAARNSYALLTGLLVCGRCGAKMYTQPQSDGHGGRRASGAFLYVCERRKRFGKDACDCPSVSGVQLDAAVREALAAYRSDDTAFGARLAGLRDVQGRRHTADSELAAVQAAVAEAEKKLHTLLNRLADPELPEEALRYIRAQSREMAERIATDRERIERLKAAEAQSDRVEQGYRQICALLDRFSADYGSLSIPEQRDVLRGVIDRVEWNGESAQIFPIQP

SEQ ID NO: 1457 - protein, 521 aa, unidentified
  source 1..521: note = uncultivated organism
MATITMIPATRRVGNRGREEEAPKLRVAAYCRVSTETDEQATSYEAQIEHYTEYIQKNPTWVFAGIYADDGISGTNTKKREEFNRLIDDCMAGSVDMVVTKSISRFARNTLDCLNYIRKLKDKNIPVFFEKEGINTMDAKEEVLLTIMASLAQQESQSLSQNVRLGLQYRYQQGKVQVCTNRFLGYDKDEDGKLVINSEEAEVVRRIYREYLEGRSYYDIGKGLAADGIKTAAGSDYWLASTLRKILRNEKYIGDALLQKTVTTDFLTKKRVANKGIVPQYYVEGSHEAIIPKELYMMVQEEMVRRANLETGTGKRRVYSGKYALSSIVYCAHCGDVFQRTHWNVHGRKKIVWRCVSRLHKKDRDFDCSARTVTEADLHAVVVQAVNDVCAKQDAYLPQLKANIEKMLCDDNAGPAAELNRQIIELEQQILQRTRARQDCDDLGQEVIRLREDKYQLQLEDATKENTRQKIAELEKVITEIGGKVEEYEEALVRKLIERITVHDDYFTVEFKSGIEIDVRL

SEQ ID NO: 1458 - protein, 519 aa, unidentified
  source 1..519: note = uncultivated organism
MIAPVKIRCAIYTRKSTDEGLDQDFNSLDAQREAAEAYIESQKHEGWIALPDRYDDGGFSGGTIDRPALKRLMNDVEADRVDCIVVYKVDRLSRSLLDFSRIMEMLDKHHVSFVSVTQQFNTTSSMGRLTLNVLLSFAQFEREIISERTRDKMSAARRRGKWVGGMPVLGYDVDPAGGRLILNGDEASRVRAIYELYLGNQSLLETVKELRKRGWSPKRWTTKKGIERGGAPFDKTSLYRLLTNVIYTGRVNHKGTIYQGEHEAIVDEATWQRVQECLHGNGRGGGGAVRNKHGALLKGLLYCIPCESAMIHTYVARKNKRYRYYVCVRAQKEGWDTCPSKSVPALEIENFVVDQIRRIGRDPQLASEVLEQARAQLKKREDELLGEQRLLQNELRRCGAEMARLMGSLRGGDGSQLTERLAELNERIRVTEERLATINEQVAGFDRQAIDEADLKMVLSQLDPIWESLTLKEQARVVHLLLTSVGYDGGAERISVSFSPEGVKLLSHEMQPCEEEVLV

SEQ ID NO: 1459 - protein, 539 aa, unidentified
  source 1..539: note = uncultivated organism
MTRSNKPIPCAIYTRVSSDSGLDQEFNSLDAQYDAASAYIRSQAHAHWTQVRTRYDDGGFSGGSTDRPALQRLLADVKAHKVQVIVVYKVDRLTRSLADFAKLVELFDAHGVSFVSVTQQFNTTTSMGRLTLNVLLSFAQFEREVTAERIRDKVAASKRKGLWVGGMVPLGYALKDGKLSIVEEEADRVRLIFKRYLALGSVNRLVLELRERDIRTRIRQLSNGKTRGGVPFTQGPLFYLLRNRFYIGEVAYKGEICPGPQPPLLDRALFDAVQVRLTEQRSHHVTTRTSNGAPLRGLLFDAAGNPMIPTHATKLGLRYRYYVSQPYLRGLAKPPAGAIVRVPAAEIEMAVTKTIEEHRRHITPEHKDTTDRTGLLADVARIEVRNSELAVCLKARDDRQQEGDADQAAAGDRAPSLLIPWTKPPPKRFKEILLPAAIERHRVRPIKFERRAALLKSIARGRAWLDEIVAGTTTVEQISARQRRSVRHVNMTISLAFIAPALVKAAIEGRLPRGIGVAALRDAPAEWSLQFERLGLAPS

SEQ ID NO: 1460 - protein, 542 aa, unidentified
  source 1..542: note = uncultivated organism
MKVCCYTRVSTLHQIDKDSLPMQRNDLEQYCKLILGTTNFEIFEDAGYSAKNTDRPAFQNMMTRIRQGEFTHVLVWKIDRISRNLSDFANMWEEFQQYNVQFISKVEQFDTSTAMGRAMVNIIMVFAQLEREMTAMRVTATMISRAEQGKWNGSRPCYGYTFDKEKMFPVPDENEVSTLQMIFNKYEEIRSTNKLAQFLNANGYKTKRGGLWSSKTVNQILSNPFYIGTLRYNYKKSGRGKIKPEDEWVVLENNHEAIIEKEQWDRVQAILQHNATHQFRQITQKYTHIFSGLLECQKCGGGLSAYKDRVRANGYRPSVYSCSNMGHGRNCDMSSYVSDMIIGEFVLNYMSNMLTAQKNGIDNLEDTLLRGKIFKDVAYITEDSIESLSYILNGESELNKLSGSKIEEIDNSALIQRKAKLERALQRLENLYLFSDTDMSEKDYLNKRTPLLNELNSIQVQTTNTKKNISLLVDNKQMDKCVIDWRLGKGEYIDYKKLVLDLDEKVLKDFFNIVIERVIVGDKHRIHEIRFKNGLSQKFLYR

SEQ ID NO: 1461 - protein, 509 aa, unidentified
  source 1..509: note = uncultivated organism
MAVYFSRTETIKKVIAYARYSSDHQNPISIEIQIEGIREYCKKNGYEIVATFADEAKSGGGTGKRTNYLKMLDEIKNNLLDFDALIVYRYDRAGRNVHDMKVLEAILLENKKRFISATEKMAETTAGIFHKNIQYAVNEYERGVIGDRSFDGLKSNARDGLHCGGVPPLGYMLDEEQKLIIDVTEAEAVRKIFEMYDDGYGYGNIAARLNEMGYLTKRKLKFKKNSIHDILINEKYQGTYCYNKAYPRDPNGKNNSHKYKDDEDIIRVHDNHPAIIDKEMFARVQERIKLKSRKARESKNNYILRGMIQCRNCGAMLHGDVNRDSKNKSIIRSHYRCPNKKVKACDVKPVNRFILEDFVLELLHKSIFQNANIEQITELINHIIENDEDMLHKIKRYKEALKEQKQQEENLYRSLKYSKSDSMISRITNQIEELSAEQAEFKEKIQVMEEMQQRRFTQEQVQEAIQGLNEYVKANNTQKVKNYLSSYIKKVIVDNEDIEIIFNEENKCA

SEQ ID NO: 1462 - protein, 571 aa, unidentified
  source 1..571: note = uncultivated organism
MKRLNCAIYTRKSSDEGLEKEFNSLDAQREACAAFILSQKHAGWACLPDLYDDGGLSGGTMDRPALQRLLGDIQAGKVQIVVVYKVDRLTRSLADFAKIVDVFDAHSASFVSVTQQFNTTTSMGRLTLNMLLSFAQFEREIAGERIRDKIAASKAKGMWMGGNVPLGYDIKDRKLIVNEVEAETVRMIFRRYAELGSVRALGHELDRLGVVSKRREGAAGILSGGNRFSRGALYTLLQNHLYRGEIAHLGNIYPGQHEAIIDAQLWEVVQEKLSGNRQARALGAAAEEPSLLAGLIADGSGGRMTPTHAVKKGRRYRYYVSTSLITGARSDHAKGWRIPAGDVEASVVDRLRAFFASEPEIGEALSCFELDASSLHLAFSKSTQLAVEWATLPPIRIRELVRSLIGTVEVHDEKVIVSLKRKEMASVLLGDAFSLPTITGPETFELRIEAKLRRAGKGIRLVVGGGVAEKLDGRMAALMRDAHATREALMTGRDATIDAMAQRFGIKRDYLSMHMRLTYLAPDIVRAFMAGRYPPELTPARLLSLCKDLPHDWQLQRAVLGFETQSRAGDA

SEQ ID NO: 1463 - protein, 524 aa, unidentified
  source 1..524: note = uncultivated organism
MSRRQASAKKTATAPATRCAIYTRKSSYEGLQQEFNSLDAQREAAEAYIASQKNEGWLCLPDRYDDGGFTGGNTDRPALRRLMADIEAGKVDTVVVYKIDRLSRSLMDFAKIVETFERHKVSFVSVTQHFNTTNSMGRLTLNILLSFAQFEREIIGERIRDKIAASRQRGKWTGGTPILGYDVDRSNGGPRLVINPEEASRVCQIFELYLELGSLLPVVAELERRDWRNKAWKTRDGRVRGGLPFDKCRLYNVLTNVLYVGRVQHKSDVYAGEHEPIVSDDLFARVQQQLQRNGRNGTVEHRNRHGALLRGLLYCKACGRAMSHTFTSRGNRRYRYYTCTTVTKRGRQACATDSLPAIEIENAVIDQIRCIGRDPTLLGDTLEEARKQVELAMARLAGERRALERGLGRLQAEICRAAADGDATTRMLDLNNQVEANERRVSEIDARLAELEAERVDAPDVTAAFADFDNVWTALSPREQARVLNLLVRRVDFDAADGTIAVTFHAAGIGELADGAPRGAEESA

SEQ ID NO: 1464 - protein, 505 aa, unidentified
  source 1..505: note = uncultivated organism
MTRAVIYARYSAGPNQTDQSIDGQLRTCEQYIKNKGFSYIGHYADKHISGKTDKRPEFQRMINDAEQGLFDVLVVYSTDRFSRSKYDSAIYKKKLADLGIKICYAAENIPDGPEGILMEALMEGWAQYYSEELSRKIKRGMRESEMKAKWLGGFRKPLGYIITEDKDFEIDPKTAPYVVEVYKKYLAGDNYASLSRYLSRNGIRTPAGNEYKTDAIKRILRNKLYIGTYTHGETEIENAVPRIMDDSLFYKVQKKMKTTKKPYTAKGEFLLSGKLYCAACGEKMSGTSGTSKTGTMHYYYKCKNKCRKNISREKLENFIVEQVKSTFNEPTELDNLANKLFILQNNENTAEETTEAQTKALRDVTRQINNITNALANRPDSTALLDKLDELEAQKADLKMEIAANKKGPTLSLEAIKAGLQVFLDGFYFDDEETTKKRILEAFVYKVVLSGSSVIIQFNIGDTDGLKTTDLIEFDQTTDWWNKQEFSRTLVVSSGTALLLCQLKA

SEQ ID NO: 1465 - protein, 551 aa, unidentified
  source 1..551: note = uncultivated organism
MTRETEIGQPPTERRCAVYTRKSSEDGLELEYNSLDAQYDAAVAYIRSQAGNGWRLLEKRYDDGGFSGGNTNRPALKELLADIEAGEIDIVVVYKIDRLSRSLCDFTDLSRTFERHGVSFVSVTQQIDTSSPAGRMVLNVLMTFAQFEREMTSDRIKDKMLATRMRGMWTGGIAPYGYRIEDKRLVPDPQGAEAVRFVFRRYAETGSPKTVAAEVSRQFGPRGDGSAWNTANVYRMLRNSIYAGMMPHKRTGQTFKGRHEAIVDAGLWEDCQRIMDEASSLKPAERRESTAILKGLLKCGHCGGAMTPAFANKKAGKRYCYYRCVAAAKAADTDCPVRNISGEAVERLVLENLGAAVRSPEFVRLAAGEGGWTQDEVRAALADFPAFAESLASPEKARLVRCLVEEVVVRDDGVDIVFRKGLSGDRGDVNDLARVHVECSLQKGPTRRTFAKADGESRADAARATPIVAALGRAWKLRGLVRDGVYNGQAGIARALGISRTHLAEGFVLTRLSPVILGKLVRGELPEATAERFGRVTTPFWHEQHRLLGIE

SEQ ID NO: 1466 - protein, 565 aa, unidentified
  source 1..565: note = uncultivated organism
MARKQSPKAPAHSSANGISTLSCAIYTRKSSEEGLEQDFNSLHAQREACEAFVLSQKSLGWALVPTAYDDGGFSGGNVERPALQRLIADIEAGKVNVIVVYKVDRLTRSLADFAKLVELFDAKGVSFVSVTQQFNTTTSMGRLTLNVLLSFAQFEREVTGERIRDKIAASKRKGMWMGGVPPVGYRAHNRTLEPEEPYASRVVEIYRLYLQLNCVRKVANELQARGWLTPERENKRPGFGGNKPFSRGHLYRILGNPIYVGLLPHQGENHPGQHPAIVDKALWEEVQQRLKSNRQGNKTRVSQAGPSLLLGKLFDEMGRRLSPTHTKKGQKRYRYYVTSADEPGEPIRLPAADLERLVVRAIADWSADDKRVLDAVGWKDAKRAEEALKAAKQFGHAIQQTSSPKISSCVRRVEVAPDKVRISLDLVACGIHPEKGGGGRREVSIEIPAKRRRCGMAVRLVFEDQKALSAKREPDPTLVAMLAKGRVWLQQFTREGRAIEEIAEKERLSTRYVNRVINIALLAPDIVATLERGEHPEEVNSTKMLTAVPFPERWEEQREALGLEG

SEQ ID NO: 1467 - protein, 682 aa, unidentified
  source 1..682: note = uncultivated organism
MAKKQRCYIYTRVSTELQIDGYSLEAQKERLRSEAKHRKMQVCGEYSDEGKSGKNIAGRPEFKKMLSDIKSGKDDVDYVLVFKLSRFGRNAADTLNSLQFMEDYEVNLLCVEDGIDSAGAAGKLIISVLASVAEIERSNISEQTMAGRRQKARDGLWNGGFAPYGYKLVAVEGQKSKMLVINEDEAKLIKLIYEKYLSGMGVNAVAKWLNDNGYRKTVRQNGTVPLISDHFVKGVLDNPVYAGKIAYGRRRNEKVAGTRNEFHVVKQDKDSYKLYPGKHEPIIDEEAWYKVQVKRMKNAFKREKTHSLLHEHVLSGIVKCPVCGAPMYGVVNRKKKKGSEEFYTDMWYYICKNRKMVSGHLCDYKKHIRQDEINAEVIQMIKYVFGGKNSMKDNVLNKVGTDDSLKELEAEKTRLADERAKLNTKKAKQLRRINELDIDDDLYDDLMKSYRAYLGEINDQLASIENLLYQNELAIENAQGENLSTEVYKRLIDATIENIDDVSDADKKVLMNALLEKVEIFKEKQKDGRWVKSVQFKIPLNIDGKLVDTMFFDDDEDTENSLSNEKHVETVVLLSYKKPDGHINIKVEFGEGEGKVPLDNIAKRAEEYKPKERVTYKMIKEYIEAKYGFKVHTAYIAEVKRDLGLPMYDAPNAVEELQQPRKHPTAEKVEAIKDALKYFGVI

SEQ ID NO: 1468 - protein, 602 aa, unidentified
  source 1..602: note = uncultivated organism
MDNLAYKLGSRAVSNRYRTNQNDKVRVCFYGRVSTQHEAQINALDNQLQWYESVLKDHPNWEKVKVYVDKGISGTQAKKRHGFMQMIEDASKGMFDLVCTREVSRFARNTLDSLDYTRRLKNMGVEVFFYNDNIWSCESDGELRLTIMSAMSQEESKHISDRVLAGHKTSREKGVLFGNGNILGYRLVKGKTSVENTYEIIEEEAETVRLIYDLYLSGIGMKAIASKLVEMHRKKANGGYNWEISAVQRILNNKTYAGYIGYNKSYTASFLEHRRVHILDRSQYEYVKGNFPPIVSEDTWNRVQALKAKKTIRIGEQTRGKPMATDKWGKTLVCECGSPCKKYTWRVNQNGEKSNGYRCRNQIAYRKRDFYVKNGLDGTGFCNVPAICEWKLDFMAKAIFRRLWKNQKESISELMETIEEHYTVDKEEHSERCEVEKLQRELDRLQKRKNNLVDMRLDDLIDETQYQKKYNLITARIEEVEVSLQKLQCDGKEIEPVDVSAEIQKIQEYLDKACNLEEKQVSAELVEALVERVTPTEEGVFKWYLKEENSDMEMQFQEEQYVLMDRFTLGFEEARAYRKSFGNFIRARQWKDLVVEVYIKKL

SEQ ID NO: 1469 - protein, 545 aa, unidentified
  source 1..545: note = uncultivated organism
MDGQKKTSGSLALNSTPRVITIAPSTPVRDRKLRVAAYARVSSSSEDQLNSFAAQNAHHTEIITANPEWEFVDVYADKGITGTSTEKRDDFQRLLADCRRGRVDKILVKSCSRFARNAKECLESVRELKALRVGVCFEEQGIDTSKLAGEFLTAIFAMMDQKESENISDNLRWSIDMRMRTGKYNTCFAPFGYQLVGGKLELIPEQAPIIRYIYDAYLAGKTAEDIAATLNLFSDDRPWKPQRIDYILTNERYSGNALLRKRYTTDTIPRKVKRNRGERPMCFVAGINEAVVSQEIFDKAQELRKKRWENRLVDPDIFISRQNELAEQLRAAKLEKERFLKAEEDQTIQQTQELIEALEAGPDFLDAFDGELFRELVDKIIVESNDRVQVRRQERTTPCKKSPAQKELRKLCGGSPPAWVERQVLGLLNRLIQHPERITCPVLEDEPPPEVKKLRRGLDELLHRPPVDEVQTRDLAFRLADLQLNAIGPEEYETLRLRRLFQGWAPMAELEQELLHQSVRRIAVSNGTVTVLLKNNQTLEGGHYT

SEQ ID NO: 1470 - protein, 512 aa, unidentified
  source 1..512: note = uncultivated organism
MNTKSESKRIGIWIRVSTEDQVRGESPETHERRARLYAEAKGWNVVEVYRLDAVSGKTVKDTPEAKRMLQDVRDGHISGLVFSKLARLARNTKELLEFSEIFREYGADLISLAESIDTSTPAGRLFYTMIAALSQWEREEIAGRVAAAVPIRAQAGLPTGGQAPYGYEWKDKKLIINKAEAKVRKLIFELFREHKRKKLVARLLYQQGYRTRKGGEFSDTTIDRLLKDPIAKGNRRANYTRIDEKKGTWEFKPESEWIHLEVEPIVSEELWQECNFYLTNQREKRKRTKPVVHLFSGLTFCTCGQKMYVPSNAHKYTCYKCRNKIPLEDLEAIFHEQIKNFLISDEEISNQLHKANEIIKEKVELLAVLEKDAAKISRETDRLYDLYQSELIDKYGFKEKYKLLAERRDQLNDQIPKLQAEVDILKISQLSQETAIEESRNLYDRWSSLPFEEKRRTAEAIVDKIIIGDGEIDINLFYTPPPTNLGSSEIYGSINSIYTPVNHDKKATQPQR

SEQ ID NO: 1471 - protein, 514 aa, unidentified
  source 1..514: note = uncultivated organism
MTKRTPTPAPGTDTKRCAIYTRKSTTMGLEQEFNSLDAQRESGLAYIQRQTGWKVVDERYDDGGFTGANTDRPAFTRLLADVEAGKIDVIVVYKVDRLSRSLLDFAKMMERFTAAGVSFVSVTQNFSTADAMGRLTLNMLMSFAEFERSMISERTRDKIAASRRKGKWTGGPVPFGYSVKDKKLLVNEVEAQIVLEAFTLFLQHRQMAMVARTLTERGLLPRGSSRPPEEGLRWSKDAIARVLRNPLYAGFMMYGDELHPGEHPRLIDESTFRHAERILAGTGRELRFTGTNPDYVLRGLLRCGLCREAMCPGSTTKNGKVYRFYRCSKRDKHGKEACRARALPAGALEDFVAQRITTATADGTLAVHVKAALDARIDGKRKAIEKIRADLPGRVAAASVAASKYTEELGKFEGRARELVEAKLRAETDRLVAAERQLAETERDRLDLEVAEREAKWIADALRDFARIWTAMTPENQGRLLRALVAAVRVKEETGVVEVELVKFAADAGSKEAA

SEQ ID NO: 1472 - protein, 592 aa, unidentified
  source 1..592: note = uncultivated organism
MPKSRERTRRPSRRLRCAIYTRKSSDEGLEQAFNSLDAQREACAAFVLSQKHEGWSVLPTVYDDGGYSGGTLDRPALQRLLADIADAKVDVVVVYKIDRLTRSLFDFAKIVEAFDARAVSFVSITQQFNTTTSMGRLTLNVLLSFAQFEREVAGERIRDKIAASKKKGMWMGGLPPLGYDVRDRKLVVNEEEAQTVLHIYRRYAELRSVRALKVELDAAGIRSKRRTLADGTAYAGHRLSRGALYLMLQNRIYRGEITHKGNAYRGEHRAIVDDPLWDKVQAVLAENRVDRNTGADAKYPSLLAGLAFDDSGERLTPMHAVKKGTRYRYYVSKPLITGAAKDHSQGRRIPAGNLEALVIGRLRDFLADEGAMLNAISDAEQNGAQQKRLIARGRQISDELPTLAPNVVRSILMTLVNRVDIKSEHVEIRMYQRGLHGLLKAESMEASLAEGAPASHAGGTLKVKVKARLQRVGREMKLIVHNAEDRMIADPGLLRIIARAHDFQERLMQDPNLTVPAIASQERLTIGYLSRLLRLPSLAPDIVTAIINGKHPPELSAKRLMRLALKLPTDWPEQRKLLGFRSDKASLSHAPA

SEQ ID NO: 1473 - protein, 533 aa, unidentified
  source 1..533: note = uncultivated organism
MSKYKAISYTRLSYTNEKDNESNSISNQKALIRDFVKRHSDIEIVSEKVDDGYTGVLFDRPAFQEMMEDIRAEKVNCIIVKDLSRFGRDYIQTGKYLRQILPSLGVRFIAINDNIDTLKENCTGLDVSLKTIINDAYSQDISKKIRSVLEQKRKEGLYVASFTPYGYQKSKENKNQLVVDEQTAPIIKDIFKMKLDGMSAAKIADILNEKGVLSPVMYKKQNGYAYAKGGYAATENAKWSAKAVLRILKNEIYTGTMVQGKKTTYNYKLKNIIQKPKEEWIYVKNTHEAIISKQEFDLVQSILLLDTKTAPHKESVYLFSGLLICADCGNRMTRKSVTYKDKKYFYYYCPTGKKGCTSSHMIKEDNLIACVLESVKKHISSVISLEKLLNNIEKERMNQKIAQKYGNEIVQKEQVAEELKTFQSSLYENYIKGILPKQDYRMLKEEYTTKLETVKKEISALNEKLEKELWHNRKEWIEHFKKFSNITELDRNAVIQLIQSVKIFEKKQIEITFRYQSEYEETIKMFHSQKEVI

SEQ ID NO: 1474 - protein, 535 aa, unidentified
  source 1..535: note = uncultivated organism
MKAGIYTRKSKYTGKGESIETQIQLCKEYCEKNGISIYDIYEDEGYTGANIDRPDFKRMLKDSKAKKFDVLICYRLDRVSRSIIDFSSLVNDLQELEIEFVSIKEQFDTTTPLGRAMMYIASVFAQLERETLAERIKDNMRELARTGRWLGGKCPTGFESVPVTYYDDKMKKKKLYKLNPINSELKVIKELFNKFIKLGGIYKLQGYCYKNGLKSKNNKDFDIRALKFILSNPVYAVADELTYEYCKLKEMDIAAKEEDFDGTRGIMSYNKRDVRKGKGPKDKDPSEWIISVGRHKGVIPAKDWIMAQNILNTKAPSYRSGTSKVGILSPLLVCSNCKSKMRIVYKYTDGEIKSYYYKCRLKENSRCTQCNIKNINGKKADESIVGKLKTIALNRQAIIEEYKNKENEANKNFNITNRDKKDLTKEQSNLKKQIYNLTLQLSENIKSAAAQYIIVQIEDLDKRIKEINKELDRIETNNEHNKIRQMNIDVLEQNLKIFLNNFDDMTVEEKKIILKSIVEQINWDGENLSIKLLEI

SEQ ID NO: 1475 - protein, 520 aa, unidentified
  source 1..520: note = uncultivated organism
MARRRPTRRRDPITADTPLRVALYTRRSTDDEHQPYTIEAQTDRLTAYVASQPGWKITAHFTDDASGATMDRPGLAAALQAAEAKKYDLLLVYRLDRFSRRIRDLATLMDDLEEVGVHFRSATEPFDTASAAGRLFVQMLGAFAEFEREVIIDRVIAGMERKAANGEWTHGPRPYGYTIDPDTHRLIPHPEERQVVTDIFTRYATTRAGTRAIAAQLNTEGKRTKAGRPFSGWTVHAMIGNRLYLGETSFRDVVTTDAHEPLIDPAAFDQCQRILNARGEPGSSRGASNSGYLLSGLITCPQCGCKYVGASATGKLRRYRYYTCFSRTRYGTAGCTGPRIDADLLDPAAVEALIAFYARTDLISTAIANEYTRRADDTAQHTAELETITGRITGTQTAIDRYLAAFETGTLDDATCGTRITALTSQLDQLTDRRAQLTDLIATPPQPVSPDTIEQIHQNLAEIMRTGTPGQRKAIMETHIAEIQFDGDRLIPVYRISVDEFRTRVGDVGRAGLEPATEGL

SEQ ID NO: 1476 - protein, 542 aa, unidentified
  source 1..542: note = uncultivated organism
MFCSERRYDYKILTDQNYIAACYCRLSKEDELDGSSVSIETQQKILSDYCERHHIIIYDYYIDDGWSGTNFQRPSFNRMLSDIELGKINMVVVKDLSRFGRNYIETGHFLENYFPEKNVRFVAVGDNVDTQNEYDYDDLIIPIRNLFNQAYPADISKKIRQAFKTKANNGEFFGAYAPYGYKKSETNKNILEVDAEASETVVNIFKLVAYEGYGYKRLSKKLRQDKILMPSAYRAKCASKPLGDNPYNWNAISLKLILNNQVYLGRMVNAKTKKISFKNKKIVKVPQEDWIVVENTHPPIISMQLWNDVHKKLNERKRVCNTGQTHMFAGLVYCDTCGSTLSMAHNGSGHKVLSCTRYKQKGRDMCSCHYIRYDDLYNIVLNDIKAHIAQLSIDEKAFTSRVKKQYDVLNGKDTDKIEKCIHEYEKQQAEYDRRFYTLYNDRLTGLLPEDKFTMLSRRLESEQQEVKSHIAALNSQLDEYKNEESQIQRFLDILREIKDLQSLDKVLLNKLIDKIIVSEREIVDGKRLQNIEIHYKFVGNIE

SEQ ID NO: 1477 - protein, 554 aa, unidentified
  source 1..554: note = uncultivated organism
MFERPETQIITAIYLRVSTLDQAEHGFSIDAQRETLLNYCAQTGRTVYKVYCDRGLSGKSTEKRYELLRMLEDAKKGLFNEVLVWKISRLARRNLDLLRIVEELDSYNVSFRSYSENFETASPMGKFALQMMGAVSELERNTILENASMGTKQRVRTGGHVAKAPLGYRIAVLSLSGRKRETRMEVVPEEAAIVRRIFEQFASGRGYRSIANELNRDGHKTKEGNPFSICAVKDILDNPFYIGKVRYARYVNWSEKRRKGKNSQPMIAEGQHPPIIAEDLWNKVQYLRRQKGESSPKRFHGDFLLTGLLRCPQCGSAMTASRTNNKDKNGNPVVRLYYSCSAMRSKGSSICSANSIRKQDAERYVFDRLKEVLSKPHILRGIVKGINEKKAERIKPLQDELEAVRSRIAEVQAKKTKYLELYEEDGFDRKLLAERLNELESELDRLHARKSELEYELDGDRSEPVSYEAVRSLISRFDQMLRFSNADQRKTLLHLIVKRITLNDKRQIDKIELVFDEESERHFLSFAPAAAEAEGASLLREEVPKLKQKLTVVV

SEQ ID NO: 1478 - protein, 542 aa, unidentified
  source 1..542: note = uncultivated organism
MRRVAAYCRVSTGRQADADLSLPDQQRQIRQYCERHGWELVRIYTEPGASARDDERPEFRAMIEDATSAARPFDVIVVHSLSRFFRDEALGELYVRRLRRHKVELQSVTQQIGSDPLSDLARRVVGLLDEHTSKETAKHTLRSMEENARQGYWNGSRPPLGYQVVAAGQKGQRIKKRLAVDAAEAELVRRIFRLYAEGEDGSGPLGTKKLALHLNAAGLRTRIGKPFTPKLVHEILTRETYIGRHYFNTVDSRIKEAKPRDQWIEVAVEPIVDAEMFEVVQSCLRERNPKQTPGQVSGSPHLLTGILRCGYCGGAMTMGAGKSGRYKYYRCCTKGRLGPSACVGQSVPMLSTDEAIVRRFRECILDPIVLESLVEGLRSRIEVDRQTSGASSAARRIAEAEAAVDRLFQLVATGAIAADNPDLKRHLQMATANRDQARSAHAEASSRGERPLPQPSLARYRALADGLKAILPSAAIPARKRAIRTIVDRIEMKGRELRFIGNARKLALLAGKATESGVIGFMAGWRPQRDLNPCSQRERLMS

SEQ ID NO: 1479 - protein, 502 aa, unidentified
  source 1..502: note = uncultivated organism
MKTASKEDTAKNVGIWIRVSTEDQAQGESPEHHEKRAREYAKFNGWNVREIYDLAGVSGKTVMEHPEAKRMIADVRRGHISGLIFSKLARLARNTRELLDFSDMFRENSADMISLQEKIDTSTPAGRLFYTMIAALSQWEREEIADRVKASIKIRAKLGKSLGGAAPFGYMWKDNKLLVNPTEAPIRKRMYELFAENKRRKGVARLLNSAGYRTRKGARFTDTTVMRLIQDPTAKGLYRANHTYRDSKGKLINKPESEWVLTPVEPIISQELWKQCNDILNEREGKRPLGPKPTHPFAGLLFCGCGQKMYVFSRTPKYVCSKCRTKIPIEDIEAIFCDESKDFFAQPDRIKRHLASANQYLMDKKHQVEAHTRQLEKVRAEMRKTYQLYQADHITPEGFGRVYKPLEEQERALTTELPRLQGEVDALEVRQVSADEVVAEATNLHKLWPAMNIGEKRRIVESIAEKIVLTRDQIDITFAYMPSCEELTKRQRNLSGSSPPPA

SEQ ID NO: 1480 - protein, 576 aa, unidentified
  source 1..576: note = uncultivated organism
MKRVRMLLRVSSNQQLEADGDLSVQRQLVLEYIEKRSDWKLDEKEYFEGSNSGYKNSVADRDVLQDALQDARNKEYDILVAYKDDRIGRRMWEIGAYVMSLKNCGVDIYTVKDGCISPESDDIMGQMVLALRYGNAQKSSSDTGMRVKDTAKKLVQRGKFMGGKAPYGYTLELSGEISKHGRALKHLVVDEKKAEVVIYIYNLAVQKEYGSVKIAKILNSHDQYKNEAPNDVWKAGTIASILTNPIYAGYTAYNRRTRSDGKYHKIGSDDWIIAEESNPEIAIITTDIWNRAQDMRKKRADGIAKKEEHRPYNINVIKNNTGTLALIDVLYCGYCGRKMTNGSRYNYWKIKSTGERRSGKVGLYKCQDMWSGTVHPGRGFYRADRIEPIVFSAISEYIGKLQENENVFQEIEVNKQAEKRRMNSELDKDRQELAKIQKKVDVMEENIPQAMTGEYPLSLEDLVRLIDKQKDMYRKQQEIIKQKERKMENMDVSITEWDYLKKQIPTWQQVFLEADAHTKRVLVDKLIERIDIKEEQITIRFRIRLEDFISNPEKTSQNLLATASDKSIILNDIKIK

SEQ ID NO: 1481 - protein, 503 aa, unidentified
  source 1..503: note = uncultivated organism
MAVAKKAAGHPEPASQKSVGIWIRVSTEDQARGESPEHHEKRARFYAESKSWNVLEVYHLEGVSGKTVLEHPEAKRMLADVKSGHIEGLIFSKLARLARNTRELLDISDFFREHGGDLISLQEAIDTSTPAGRLFYTMIAAMAQWEREEIASRVAASVPIRAALGKPLGGQAPFGYQWQGRQLVPDPAEASVRKKMFDLFLEHRRLGTVARLLNEAGHRTRGGNLFGKTGVERLLTDPTAKGQHRLNYTTAKGTRVMLKPEEEWSIVEVEPIVSVEVWERCNSILQERERKAKPATRKPVQIFAGVTYCTCGQKMYVPSNTPKYVCQKCRNKVPVDDLDAVFHEQLREFVFSPTEIAKYLTTADAAIGEREAELVALEEGATEVRRGMDQVMKLYLAGQISQEAVGREYGPLEERLKQIEDRIPELQGELDFLKIQKLSSDEVLSEARDLYSRWPELEREEKRRVIEQITDRITVGKDEVVIDLAYLPSPSEELATKARNLCR

SEQ ID NO: 1482 - protein, 515 aa, unidentified
  source 1..515: note = uncultivated organism
MDYTVNGTPEKNIRCAIYTRKSTEDGLDQDFNTLDAQRESCENYIKSQASRGWTINPAKYDDGGFTGANVERPAYSRLIADIRAGKIDRVLVYKVDRLSRSLADFANIMAMFDKAGVSFVSITQHFDTSSSLGRMTLNILITFAQFEREMIAERISDKIASSRKRGKYIGGIPVLGYDVEDKKLIPNYDEANQIKSIFNLYLERESVKQTAIQLNKWGWTTKRWITKKGKATGGLKFTQTNVHSLITNPVFIGKVTFKGEIYEGEHNAIVDEKLFSDVQELLKKNKNGNHASKRRKLNALLRGVLYCSNCGHRMSYTYSSKKTQSKTYYYYVCSNKIRNTKRACNSRPLPAVKTEEFVVSHILKLGQNNHVIDALILKAQNDKMLQVAKLQDEKSMVNYNLDIAIRQINIVDENSKDDNYLLIRDQIERYQTQINEIDYKISSLKNLEVNSEEISSVLTKFMPIWDSLTHDRKERVINLIFEKITWRSDEESLDFIFNPIGISLLKNGGTFEYIS

SEQ ID NO: 1483 - protein, 546 aa, unidentified
  source 1..546: note = uncultivated organism
MKKCGFVIRVSTDRQAMNKEGSLKNQLQRLRAHVEYKNVACGEQWVEVERYILKAVSGKDSFRSKEFARLFEDIRKGKINTVICTALDRISRSVKDFLNFFEILNKYNVEFVSLKQNYDTTSPQGKLFITIMMALAEFEREQTSERNKDATMARAERGLWNGGQLLGYDLDPNRKGYLIPNEKEKALVNFAYDTYLQCGSVLETAKIMNKYGYRTKEYTSRRDKFHPSEEFCYSSLQHILTNYAYIGKKEINKKKRTRNQEKLPEGERYRIVDAVWEPIVDEEKFYSVQALLKKNRVSKHNEAKPVKHNYILNGGLLWCGKCGEEMEGRSGTGARGLRYYYYICKNKECKFKVPAGEIEGIVLKRIRELSTKKDIMESIIKSTNEKLQMKLPELKEQKTLLQKELTEIKNFADGIINKWASLASEDSSLFLKDKLDQLGKRRKEIETGIQALEKMIEEIERESVTQELVMLALNKFTDVFDHIQPYQQKELLSLVLHKAILTPDSIKIALYGRPPEIGLLSLSESDLRSQTPTWLLGQDSNLQPIG

SEQ ID NO: 1484 - protein, 544 aa, unidentified
  source 1..544: note = uncultivated organism
MNDPLVRVATYGRISTDEINQPYSLGAQRDRLDAYIASQDGWQIVARYEDRASGKNLARPSLAVVRAAAARKEFDLLLVYRVDRLSRSIGQLAALIEELDKAGVAFRSASEPFDTSTPAGRMMMQMLGVFAEFERATIVERIGAGMERKAKLGGWTVGTYPFGYRKLDGVIGPSVDPAAAPIVREIFERYTQDRAGSTEIAAALNARGIRTRYWKPWSRTAVLDVLRNRAYLGEVSFRAVWYDGHHEALIERTVFDAAHTILEGRTVESGRRKSDGSDYLLSGLYIVCDRCGHRMIGAAARGRGGKRYAYYTCYARSRYGNSHCDQARLSKDELEEAVLAQMREVYANTALIESALTEAQAALAKTETARSERLAAIEAEAADLRTRIERYFASFEAGQLSPQLAGSRAEALQSRLQVLEDERVTIGSQTPVEPVSADDVAMISWSLTEALDDVLKAIPTPRAKALLRLLIEEIRVVSPMDIRPTYRVPAMAAPAEPLPAAADAVRRAEAMVVLACQTANRSAGTVRCRAGNAEEGRSGRTGTR

SEQ ID NO: 1485 - protein, 541 aa, unidentified
  source 1..541: note = uncultivated organism
MNRVNSYRNIRVAKYIRLSREDGDDRESESVENQRDIIDNYILGHEELIEVGEYVDDGYTGTNFNRPGFQKMLKDIEEEKIDCIITKDLSRFGRDHIDTGYYLERFLPANNIRYIAIGDNVDTIKPDGLQFLTFKLSFNDYYAQDISNKIKSVKQRKIEKGEYQAGIPPYGYKKDTEIKNHLVPDKYSLEIVKEIFDMYINKGMSTIKIADELNRREIEPPAMYLKIPTYMKRKSVNPNGKYVWLRAQIGKILRNEVYLGSVVGRKFQKVSHKIAKVRCTKKEEHIVLENMHEPIIDIETWNKAQNKLNGYTKTRNRKYDHPLKGLVYCRECGNKATLRCREEKRKDGSIWRATYFICSKRNNYSALCDNKQISANLIEEAVNKKIKEEIKKINFSEKELKQVYEHAEKQAKRKSNLLQTKLQELKQTLKNIENTIEEIYQDKINKILQIEDFKVIYEKKQKERNKILKEIKEIEKELKETNQKSPKINFKEIKQIANEFLKMEKPNKMILEKLIERIEFDKEKNVKTKFTFQNPPNIRIK

SEQ ID NO: 1486 - protein, 608 aa, unidentified
  source 1..608: note = uncultivated organism
MSPRAIKGGSAGRTGKAPHPDPNRTGTAARVGPVRCAIYTRKSSEEGLEQDFNSLHAQREACEAYVASQRHEGWSVLPAVYDDGGFSGGSLERPALRTLLAAIDAGGIDVVVVYKVDRLTRSLADFAKIVEVFDARQVSFVSVTQQFNTTSSMGRLTLNVLLSFAQFEREVTGERIRDKIAASKRKGMWMGGTVPLGYSARDRSLAIEPAEAETVRRIYDLYCELGNVRLVQQEAERLGLRSKRRPRPDGRILGGVGFTRGALYKLLSNPVYAGDIVHRDKRHRGLHEAIIPPEAWEKVQRQLSSGAVRSRGQASATSPSLLAGLIVDGTGAPLTPTHANKKGRRYRYYVSRVLVAGPQAERAPSTNGGAGGHAATSWRLPAGEIETLVIDAVHDLLIDQSRLMDQLGLGLLRPDALDAALAAGAQLADTLKGAGGSEQRDLLQGIVTRIEIQAEQVCIAIKANALRGELAAPLGMPDGSATGGAGDDRLAITIPIRLARRGSELKLILAERPETRRDRNLIDRLARGYFWFEQLRTGAVSSLAEIALREGITVQKVRRGCDLAFLSTDMIEAILAGEQPIELSTETFKLAYPLPIGWEEQRRILGFA

SEQ ID NO: 1487 - protein, 549 aa, unidentified
  source 1..549: note = uncultivated organism
MARTAKRYQEATQKKKSSILVYTAAIYARLSVDNDKKKSESIDTQIALIKEFVQKNNENPDRKYEIVIYGTYSDIGKTGTNFARDGFEQMMQDVRDGKVNCILVKDFSRFGRNYIETGNYLENILPFMRVRFISVCDNYDSFALDAKNQELSMNIKNLINDAYAKDIATKQRAAKRIAQKNGEYVGAKAPYGYCSEKVNGIYKLVIDPEPAKIVRRVFEEYASGRSIRHIVEGLFHDEVHRISDYNRYHHVYRQNEEELFQWSARSVCEVLRRNNYYGDLVQRKRESRFLRGEKGCDELDVSQWIVVPQTHEPIISRELFEKVQSMLNEAERGKNQNLCKADERAFFSVFYCGDCGRKMCTRKIEGRVSYYCGAYQYLDKRKCTSKVISENKMQKIVRDEIVDKFKLSKLRKKDMSGISNSVYEEKIKEIRKEIDCLDNETERRSRELAQIFMKYKEGNVLVDTYKKMKEERDNWKLFCEERKKELEIKIRKLQKQQKEESRFLRSLVDLKGTFHINADLAESLIERMYLYDDGRLEINFRFKEAVENE

SEQ ID NO: 1488 - protein, 571 aa, unidentified
  source 1..571: note = uncultivated organism
MRRFAWYGRLSTKDKQDPTLSFPSQREICATKAAELDGEIVCDFTDQEAGRRDDRAGWADLLREAKERDARRFDAVIIYSTSRLSRDLFHALTYEREMTRAGIEVFYALTAGDQTSPEGRLIRHMFQALDQFEVEKLGREVRRGQTQNTRQGYRNGGRAPYGYRLKHEPHPDPARAKAGDTKSRLVVERDQAPVIAEIFERFLSGAGYKEIANHLNRPGGPPPPSHVDKRRNASGKWAKTTIKAMLENPVYTGHLYWNRLDSRAHKQGVGPVTRRSRDEWIEAAEQHEPLITEEQFERAQAEMKRRSTGHGNRRRRSQKRFYLLRGIVHCATGHNPLRMQGRGRKGEPTYYTCGYRATYGDRAAEAVGHGKWQYVREDKLTHLIDSFFATRIFGPKALNHFQAQSSALAGSLDTQSDGTRKRVARQLSEVDQKIERQLAAIEAGVDPVVVGERIRSLKGEREEAQAVLQQFDQARRDSTAVDPEDTRTVLGSLPDLAAELADADPELQRAVFEAFRLRVEIDRNGGRVHLRALVSSAFDSAKDLVDIGGAGTAALSDRAIPLRGFEPRFPD

SEQ ID NO: 1489 - protein, 504 aa, unidentified
  source 1..504: note = uncultivated organism
MQRPALQQLLEDIQAGRIDTVVVYKVDRLTRSLADFAKIVDVFDAQGVSFVSVTQQFNTTTSMGRLTLNMLLSFAQFEREVTGERIRDKIAASKAKGMWMGGTPPLGYDAIDRQLQVNPQEAETVRHIFRRYGEIGKVDALRRELAGQGVVGKLLQRQDGRAAGGRPLQRGALYRMLQNPLYRGQIRHRDQIYEGQHPAIIDEALWLQVQAQLAANRIADANKSNARSPSLLAGKIQTNQGHPFTPSHANKAGKRYRYYVSRPTDTGVDGETPHRRWRIPARELEHLVLDNIRRFLGDARQLRAILTAAGVPELDQLQALDRAETIAWQRSEATVSDGRLQLRSLIERITIAEDGITIALAISALLGMLDCKSNGVANDQTHELSVPARLRRAGMEMRLVDERAAAAGPDATLVRLLTKAWAIRNDMLRGDGRSLTEIAAAHSIGDSYAGRLLRIAFLAPEIVEAILAGKQPVGLTANRLATIPEIPADWAEQRMLILGTKALV

SEQ ID NO: 1490 - protein, 525 aa, unidentified
  source 1..525: note = uncultivated organism
MSRQKNTKPTTTTPTIRCAIYTRKSSEEGLDQEFNSLDAQRESAEAYIASQKAEGWVALPDQYNDGGFSGGSIERPALERLLRDIDNGKIDCVVVYKVDRLSRSLMDFSRIMESFEKHNVSFVSVTQHFNTTHSMGRLTLNILLSFAQFEREIIGERIRDKLSAQARRGKWTGGIPILGYDVDRSGGSPKLVINAKEAARVREIFRMYLEKGSLLPVVIACSQKTWVNKRRVTKKGKKLGGRPFDKATLYMLLTNPMLTGKIKHNGELYEGEHEAIIDQETFDQVQHQLSLNGRTGGAEVRNKYGAILKGLLRCKCCEAAMCHTFSGSSKKAFHRYYRCSRAIKSGRQACTVGTLPAAEIERVVVDEVRRLGTDKALLAEVLKDAHVAIDAELAELRREHDELVREAKRHHTELRQLIEAGNTSTESMNRIADLNQQTAEADRRLPELEQAIAELEAESVSQAEAQKVFGDFDGLWDSLIPREQARLLKLMLTVVEYDGDAGTVAVTFRTTSIRTLITQRIEEAA

SEQ ID NO: 1491 - protein, 558 aa, unidentified
  source 1..558: note = uncultivated organism
MLAKDKYGMDMTSKKRCAIYCRVSTEEQANMGYSLDEQERLLREASVTLGYEVVDIYCDRGISGKNIKGRPEMKRMLKEAQEGKFDVVLCWKVNRLTRNLLDLLEMANLLEKYNVGIKSYSEPFETETPQGKLLFQMMAAVGEFERGTISQNVKMGLLARAREGKWNGGKVLGYDIVKVEGELKQKGKGSKLEINPKEAEAVRLIFKLYAEGKGYKAIVNHINKLGYKTKRGNLFSVSAIKEILLNPVYIGMIRYNVRQEWNEKRRRKINPNPILVEGEHEAIIDQKLWERVQYNLQQSKGKPTRIYDGEFPLTGILRCPECGAGMVISRTSKERKDGTRYKITYYSCGQWKNKGTQACHSNSIRTEKVHEYVYGKLSEFTSNEKLIKQVVSNINKSNKQRVAPSQQELNRLEKVLGEIQRKKVKVQGMYEDDLITKEEFLNRMKGLRGEEEEVKVAMYSCKEVIQDGVSEPIPYQIVQQVLGDFERVIKTCETQEQRKRLLHMVIDKITINANRDIESIQLKLTDNLINFINQSTEVSQEDTSVFMLTGGYNLIIKI

SEQ ID NO: 1492 - protein, 565 aa, unidentified
  source 1..565: note = uncultivated organism
MPDHPPLRRCAIYTRKSSEEGLDQAYNSLAAQRDACAAYIASQKHEGWVMTGKTYDDGGFSGGSLQRPALQMLLDDMARAEIDIIVVYKIDRLTRSLADFAKLTEVLDRHNVSFVAVTQQFNTSTSMGRLTLNVLLSFAQFEREVAGERIRDKIAASKRRGMWMGGHPPLGYEAKDRKLIVNEGEAETVRHIFRRYLELRSVRLLQQDLAQSNTRSRKITREDGTTGGGLSFSRGALYTILKNPIYRGLIPHKGEVHPGDHDRIIDEPLFREVQTALASAGPGEKAKTKRSSPAILKGLVFDAAGHRLQPTHSARGAWKYRYYVSSPLLRGQSAEGHGIRVPAADLETIVITTLADRLKDKARLKDTLGQACPASALPEVISAGAQLAKNISSQLVEATGLLQDLIARIVVSKAAIRMEIKVKALAVLLLKEKAEDPHHQPPKATQEIIIPGQVLRCGKQIRLVLGQDTNTSAAPNQRLIDEIIRARRWFNALSSGEVSTIAALARRDRCSASYVSLKIGLAFLAPEIVEAILEGTQPDTLTPERLKKACPLPASWDEQRALLLA

SEQ ID NO: 1493 - protein, 549 aa, unidentified
  source 1..549: note = uncultivated organism
MEEEKKKIKCAIYTRKSSEEGLELEFNSLQAQRESCEAYVKSQKHEGWILIEKHYDDGGFSGGTLERPALKNLLKDVENGFVDIIVVYKIDRLTRSLNDFSKIVEVFDRKQISFVSITQQFNTTTSMGRLTLNMLLSFAQFEREVTGERIRDKYAASKKKGMWMGGNPPMGYYRKEKKIYPSEHADSVRTIFNKYLELKSTAKVKHWLDENNIKSQNGKTLSVGNVNSILLNRAYVGEVGHNGVWYKGEHEAIINNDIFDKVKEIMSVNRVERKKYKPTHSLLSGKIFDDKNNYMSPSWSTGSKGQKYRYYVSQAVIRHVKQKIGKITKISAIEIEKFIDDWFMEIFNDKNEMLKLYNKLDVNKQKVFIKNLEKFIVTRDIEKLLISKVQIFKDKIFLSINKMQLIELLRSIYENETVKVLPEEDLTERITFERVYSVGIVDNGSKIILGNYYDKNANKNKTLIKAIIKSYQWSKEILSGNVSISDIVKREKLTERYVSSILHLSFLSPKIVIGIFEGKQTNYISLQKVKTIKNLNWNDQEKCFFETTY

SEQ ID NO: 1494 - protein, 548 aa, unidentified
  source 1..548: note = uncultivated organism
MIIKRRCAIYTRKSTEEGLDMAFNSLDAQREACEAYIKSQRSEGWLLLPTAYDDGGFSGGSMARPGLKRLMADVQAGKIDVIVVYKVDRLTRALSDFAKIVDVLDAAGASFVSVTQAFNTTTSMGRLTLNVLLSFAQFEREVIAERVRDKIAQSKARGIWMGGSVPYGYDVVDKKLVPNLNEATQVRRMFERYLVLGAVRPLVAELRREGLLNRPRKGREGEVQARPFARGQLYWLLSNVTYIGKVQHKGRVYEGEHEAILPLALWEEVQAQISASRVRRTKAPAQRSASWLVGKIRDTQGRVMSPSTSVDGAHRNRYYASIRGAPGHDGEPIEAKPVRVPAAAIEKAVGHAIAEVLAPDRVVALALAHGHRDDLEQLMAKAAELAVMATHGDHEGRVALCQSVGLTLVVSADAVEGSLSTTGLLRALGCSDVSPSDDDKVALDIPTERLIRPRSTTLVFKSAQSQEPDMALVELMARAQRTRARMLAGEIDPANRHARRLVRLAYLSPAIVTAIAEGRQPKGMTSGSLFRMTGLPLEWTEQERMVLG

SEQ ID NO: 1495 - protein, 502 aa, unidentified
  source 1..502: note = uncultivated organism
MNKTKFKQCAIYTRVSTDMQAEKEFSSCEAQEEKIKSFIQSQDNWQVYKVYSDAGYTGANTNRPALQELLEDIKQRKIDIILAYKIDRLTRSPKDFYQLIEILEQYNVSFISITERFDTSTPAGRLLRNIMLTFAQFERELTSERTKDKLLERVKKGMWNGGHTPFGYEKKNKKLIINRKEAENVRLIFETYLETGSINELYDLLKEKNIKNRQGKIFSKNHLALILRNITYTGKIKYAGQIYQGIHQPIISEELFELAQKTHKRRIRKFRIYKHFLLGGLIRCKECGYQMSACFTNKYKSGKLKRYYYYRCTSINKKGWRACSIKEVSAERIEKYILENLERIYLDKNYIENLVFRLNHSLNTTSEDGIEPSKVCSKFSMETIISILRSFLFGLAIQKGTERNLLAKRFIKEIIYSKENIKINLFYSENSENSKNFSADKSPVPPKRDGAEIPSDNKENLIFSNKSEFVSNTTSGRNKSFQTFSIILPNLIHKSRKKNLTR

SEQ ID NO: 1496 - protein, 511 aa, unidentified
  source 1..511: note = uncultivated organism
MFGNAIVDKKRVAIYIRWSTDEQSQGTTLEVQRDACRHFLLSQGWEFREDLVFVDDGYSGANLDRPAMTALREAAQAGRVSAVVVYKLDRLSRNLLDCVTLVRQEWAKVALFSTTEHFDTQSSLGQMVFNLLVSFAEFERNVIRERTMSGKKKRREQGRNSGFRYPYGYKKGAEAGFEIYEEQAQVVRRMFRDYIHGMGIASLADALNKDGIPAPKGGLWRACTVSLILTNPFYAGHYAPGAARERIGNQKEVRPSPVFIRNAVPAIVTQADYDKAQRVRQERLHPGWPVRVSSDYLLSTVLKCGKCGGPMMGHANQEGRQYYRCANAKDLRNCDNGGVPKDEIEERVLEEVRRAYSPERMLEHLAQIQESRLKELERCRKAIQEMDAKITERNRKRERIDEEYLAGEIDSKMYKRLIERLEEEVVNLTEQREGAIDELRLVERLPVNEERIRQMAEQLDGLSELSGDQVRKVLRSLFTSLTAYRVKKRGRWNLEPVEMVMEHNVKVLAGN

SEQ ID NO: 1497 - protein, 564 aa, unidentified
  source 1..564: note = uncultivated organism
MSRPSPSSATPKRPRCAVYTRKSSEEGLEQGFNSLHAQREACEAYIKSQAGEGWLALAGVYDDGGFSGGSMARPGLAKLMADVDSGRIDVVVVYKVDRLTRSLTDFAKIVERFDAREVSFVSVTQAFNTTTSMGRLTLNVLLSFAQFEREVTGERIRDKIAASKAKGMWMGGVLALGYDANGRTLAIHAAEADQVRHIFARYLALGSVHALRDELEAEGLVSKRRLAASGVASGGVPFSRGALFHLLSNRLYLGEIVHKGQSHLGLHPAIIAPGLFEEVQQRLAEHAGEKRQAREGMAAADAPFTGKVFDDAGNPMSPVTARRVGGGVYRYYVSAALQLGRPDRAGSLARFPARALEDLIRDRAGKLGLAATSAADQSMPTPREAVERIDVGQHRVVITFAAEVEDGPAPPRMIAALTTGDQLSVQDQRFVLTVQAGLRRRGGSKVVMGPGGAPAVDRPRIDPALIKALARAETWKEKLQSGGASTMDALIKADGVDRAYAQRIIRLAFLAPDLKRSILEGRAPAGLTLQRLMQGGVPLLWSDQRDAVSEWRMPKDHVRAVLPR

SEQ ID NO: 1498 - protein, 571 aa, unidentified
  source 1..571: note = uncultivated organism
MSINKLDLYRTAIYLRLSSGDEDRGTEKMDSNSITNQRLLITEYISKRPEFKLVDTFIDDGFTGSNFNRPGYQQLMKAMEDGKIDCIIVKDLSRIAREHIGGDELILKTFDKYGVRFIAITDGFDSLTADHGEKHIMVPIKNLINDNYCQDISTKVRSSQQVKRANGEFIGAFAPYGYQKSEGNHKQLVPDKYAAGIVTDIFAKKLLGMSASAIAKELNRNGVFSPSEYKKKNGQKYATSFQGAGDAKWSSQAVGRILKDEVYIGILAQGKRTRINHKVKKDIYVPKCDWTIIEDAHESIVSKTDFYTVQSLMSRDTKAIVGEKKAYMYAGLLYCGDCGMSMVRRSYGYRGRAVVNYICSNYNRNGKEACKRHAIREEVLDEIVLGQLQQHIGKMKNSEVLLKHLNDMEVNYEDAVAHDNEIVRLRKEQIKYAALKSSLYGDLQEGILTKEQFERYRETYSEKEQELSDAIEKQKSIIQSIYNHGLTVSNELKKFREDFSVEMLDRITLVTFIDRILIYDDTVEIVFNYSDEVEKVAGIMKTANMLLEQEVLEADAQIIDGNYVIELKEAV

SEQ ID NO: 1499 - protein, 585 aa, unidentified
  source 1..585: note = uncultivated organism
MSDRRSNGADHRQRKLRCALYTRKSSEEGLEQDFNSLDAQREACEAFVASQKREGWVLLPEMYDDGGFSGGTLERPAFQRLLADVSAGKVDVVVVYKVDRLTRSLSDFAKIVEVFDKNGVSFVSVTQQFNTTSSMGRLTLNILLSFAQFEREVTGERIRDKIAASKKKGMWMGGQPPLGYDVKDRKLVVNTQEAETVRQIFRRYLELKSVRLLKADLDAHGIVSKARMASDGSAYGSKPLARGALYLMLQNRIYRGETVHKDKSYPGEHDAIVDERLWNEVQVILRTNRIERADGRADNRPSMLAGLLFDAQGERMSPSHANKRGTRYRYYISRSLIDGTAKTSIGGQRIPAVALEALIVRNVRQWFADPGKIHQFLGGEVSDAIRQKRLIDRANKFAATWNDLSADDVHVFIRAVTARVQVHAERIEVALERGRLLRWLDGKRQDDDRSTGRDRSASESDSVVISIPVRLRRAGKEMRLVVDDGSEQPHPDPALIRLVIRAHGIRDQLLHDRSLMLEEIAKSHGFVPSYATRLFRLTLLAPDIVAAVLGGRQPPELTARKLMDDTRLPLDWNEQRRTLGFVQPL

SEQ ID NO: 1500 - protein, 553 aa, unidentified
  source 1..553: note = uncultivated organism
MKTVRCAIYTRKSSEEGLEQAFNSLDAQREACAAYVLSQASEGWTELPDVYDDGGLSGGSLERPALQRLLSDVATGKVDIIVVYKVDRLTRSLLDFAKLVEAFDRAGVSFVSITQSFNTTTSMGRLTLNMLLSFAQFEREVTAERIRDKIAASKAKGMWMGGVPPLGYAPDGRTLKIVPDHAGLIRDIYGRYLVLGNVRLVKEQLERDGLFAPPRVTASGRALGGGPFSRGQLYTILKSPIYAGNIGHRGAIHPGQHEAIIDRETWDRVQAMLADHLQGERRAARAASPSPLAGKIIDASAAPLIASHACKGSRRYRYYVSRPVDRAGSPTLRIPALEIETVVADCLARAFEDPVGLSATAWLAVAPTDYVGFVERAARCATKLQRRDRLMLRALLTRVQVFDARIEIECDSKAVGVALGVGQAGNARPSFILGSEVRLTRSGRAMRLVQGNGASPGQLPEAALVRLVVRGRSWWQELRSGNVTVTLLADREGICRSYVTRVVRLAFLAPPVVDAILAGALRAEVDAGALTSPGAVDMGWTDQVRRLMPRGES

SEQ ID NO: 1501 - protein, 1118 aa, unidentified
  source 1..1118: note = uncultivated organism
MPDKVYRTAIYCRLSREDGDKVESNSIASQRAICEDYIARHEDLELVCEPFVDDGYSGVSFNRPQFKKLEEAIRKGALDCIVVKDLSRFSRNYIDGGRYIEKIFPQLGIRFIAINDAYDSLTGDPQSDSFVIPFKNLINDSYCKDISMKIRSSLEVKQKSGEFVGSFAPYGYMKSPENKNQLIVDEAVSEYVQMIFSMYKDGFSIGRIAKRLNQMGVLSPMEYKHSAGVKFDTVFKTSDTAKWTYKAVQRILTNEVYIGVLAQGKRGTPNYKVRVVKSKDESEWVKVENAHEALVSYEDFMAVKVMMQRDMRCSPDQDEAHLFSGFLFCGDCQQPMIRKTVPSKAKKYIYYVCSTNKHSRTCSPHSIAAKEVEEKVFRAIHDQIELVINLEHALAMIERLPSQSRKAFNYEAQIAKIGEEIERYQKLKLGLYENFIGGVIDKSEYFEFRNSYTKIIEDKQEALLRVKKEMKQAVTTGTTERNWVTLFKQYENVEELNRRVLMSLVDRILIHENHAIEIVFKYKDEYQQTLEYVLGYADELDIAVLRRDEHMARKSRKQIAVEEPVIESVSSEVFSTAIYARLSVENSGKSEKVDVIANQIEICKSYIAERPYLNLIDTYVDNGRTGTVFDRPEFNRLMNDIRTGRIKCLVVRDLSRFGRDYIEAGTYLERVFPQIGLRFIAIKENYDNFDTDGSGESLIIPLQNMINTLYSKDISRKVSTALKAQMESGDFKKRNLPYGYRWDEEHSNMVFDEETAPIVQKIFQWKIEGLSLPAIADRLDAMNAPNPEFQKYQVGVRTGNATAKKIWNKSSLTSILDNPHYVGDTVLGRTLNAIYKGVKNQHINREEWIVFPNTHEAIISREDFQKVRELRDAAARTRVEKMERTEEIRATLINLFEDKIVCADCGRKLYFHRKRVDKRKDGAWYAFYECSSSVKRGNLCTPHYTRQDKLEADVLAAIQLQVKAALNYDKLLAKLRNSEGERSIRDQQNALITSLNLKLSGISKKRTRLYEDFTEGILDEEEYVFAKKAYDEQYANLSRRLDEAVQRKVKFAEAMSEDNKWLTLMKSVSGATMLSQELVDESVELVKVHEDGSIELVMKYGDIYALTVQSIKEVQEAM

SEQ ID NO: 1502 - protein, 526 aa, unidentified
  source 1..526: note = uncultivated organism
MMTVTPVPTICGLYTRVSTRNQADTEYSSLETQREKLEAYCKSQDQYVIYRVYEDAGFSADTMNRPALKELLQDIRAGRITCVLAYKIDRLTRSVKDFHVLMDLFDRHGAKFVSITQSLDTHHPMGRLLRNILLDFAQFEREMTADRTRDKMQQRATKGLWNGGNVPFGYRNEDKRLVRHPEEAACVQFMFQHFAQDPSLTRLRAELQRRGWSPRTGKPWGKMTLDYILTNPIYCGRIQFNDQLFPGEHEALIEEGLYYKVQSLPREHSRAETKIQRPFLLKGLLRCSVCQSVMTPHYTQKRRKDQSINRIAYYRCTKTMQHNNTVCTIKALNADTVERQVIEYLSTLSQQAEWVKVTVEELNRDQKEQVRPLEQEGIRLKASLNRLEREIDRLVRGVGQGTVSVQRLEDEMRRQQQEQHSLETQYQAVQRQIQEHTAREYDSEVVLRNLKNFQRIFAALLPKEQMEVLRCLVRDIIVHPDKLVFNIFELAEVGTSSQERKGWLPNSDEDEQWTCLVRIQSGKETC

SEQ ID NO: 1503 - protein, 545 aa, unidentified
  source 1..545: note = uncultivated organism
MSQKMYRAVIYCRLSKEDGDKVESNSIAGQRAYCEDYISKQDDIVIVREPIIDDGFSGVALEREGFKELEVLVRTGKVDCVVVRDLSRFSRNYIDAGTYLEKIFPSLGVRFIAINDNYDSLTSDPQSDSFVLPFKNLINDTYCKDISVKIRSSLEIKKKNGDYVGNYCPYGYKRDEVNRHKLVVDEEVRENVQMIFSLFKDGVSIGKIADRLNQMGVLSPMEYKRSQGIKFETVFKTSKNAKWEYNTIKRILVNDIYIGVLTQGKRGTPNYKVKVIQNKDESEWISKEDNHEPLVSHEDFMAIAEMLKRDMRSKADDSENTMSGFLFCADCGATMVKTVSTSNGKKYTYYVCSGHKKHKNCSTHTTPVSEIEDAVLNAVHDQVELVVNLDKAMELINELPHKDRRIFSYEKQIEVLTEEISRYQKLKLSLYENLTEEIISKDEYFEFRTTYTNIIEEKEAARKRLEKECKQAVDTGTTTKNWVALFKTYENIEELNRRVLMSLVDRVKVFGNHKLDIVFKYADEYKEAIAYILSFEQNEIKEGVA

SEQ ID NO: 1504 - protein, 559 aa, unidentified
  source 1..559: note = uncultivated organism
MSEQTRFRCAIYTRKSSDEGLDQDFNSLEAQREACEAYVRSQAHEGWKLIPERFDDGGFSGGNMDRPALARLMDQLRRGEIDIIVIYKIDRLTRSLTDFARLAETFDKHKVSFVSVTQQFNTTTSMGRLMLNVLLSFAQFEREITGERIRDKIAASKKKGMWMGGVIPMGYDARNRQLFINGDEAATIRQVFQLYLEVGTVPALLDRLRAENILTAPRLSANARKHGSRHFTRGHLYKLLSNPIYIGRVPHKKVSHPGKHEPIIDAKTWAAVQAQLLSNTQGPRSRRRRAEPETHLLSGLLYSDKGHRFIPTHANKGSRRYRYYVEDVAGGTTPTRLPANEVEYATLSALQMYLQDRQQLVSDLGEIPAAQVTEAIRNARQFAERLEQRSSTSVHGSLRELIAKVHCSHTQLELELSRQSLHDLLQVRRPQNTDWPSNLSSATDVLTFRAPVSIRRRGPQMKMVVAGQEQTQPDIKLINALVKARGWAQRLTNGRATSIAQIAAEEKVGAAYVSANLPLAFLAPQLVEQVLSGKWSGKGSLLRRLAAIDPSWRNQVSGT

SEQ ID NO: 1505 - protein, 553 aa, unidentified
  source 1..553: note = uncultivated organism
MRSERGKTALRCAIYTRVSTEHGLEQEFNSLDNQREASEAYIKSQAHEGWKLIRTHYDDGGYSGGSMDRPALQRLLDDVRARRIDVIVVYKVDRLTRSLADFAKLVELFDAHQVSFVSVTQAFNTTTSMGRLTLNVLLSFAQFEREVTGERIRDKIAASKRKGIWMGGVVPLGYRVENRALHVVEEHAAFVRDLYRRYLEIGSVVRLKAILDREDARSPLRTDGTGKTIGGGLVSRGHLYKILSNPIYLGRLTHKGQTRDGLHDPIVDQATWDRVQLLLAEHAQRRADNCLNSDALLAGKLFDDRGNRMSPSHAAKDRQRWRYYVSQAVLQGRKHEAGSVARVPALEIERRVAEAVRAASSASKVQGWQELHQPKASGHSASTNSPAMRPSDHDATLRAAIERVVMCRTTIEIGLTEMASDDQNRILIIPWTPPSPHRRREIIQGEDERPSATRPMRTEARAVLTDALRDAHRWLDELTTSPHLNIESLAAREGKTERWIRRTISVAFLCPALVKAAIDGRLPRGFGVKRLMDLPMVWPDQWSALALRAPAER

SEQ ID NO: 1506 - protein, 539 aa, unidentified
  source 1..539: note = uncultivated organism
MTKVVRCAIYTRKSTEEGLDQAFNSLHAQREACEAYVKSQIGEGWKASPTLYDDGGFSGGSLDRPALAKLLAEVDAGRVDIVVVYKVDRLTRSLADFAKIVERLDGAGASFVSVTQAFNTTTSMGRLTLNVLLSFAQFEREVTGERIRDKIAASKAKGMWMGGILPLGYDKPTDSATRALVVNPEEARTVERIFRTYLEVGSVHTLEARLAEDGVRSKARRSRRGDLTGGGKLARGALFHVLKNRVYLGEIPHRDVTYRGNHPAIIEREGFDEVQAVLGSHRREWRERPLRSADMVLKGKLFGADGEPMSPSFTHRGEAKVYRYYVSAPLQQGRAMKATPGAVRRVAADEIESLLEREMRARLGAGEDKPLRDLLAGVKRVDLEPEAVRITCTHSKLTRTALAGAEPHPSDPALAIVVLPVRCRLRAGRTRIVAPVGPETVVQTRRDPALIRGLQQAHRTMAAIGWRADGSVADGKAMAVPTNPYQRKLCRLALLAPDIQQRILDGRQPRDLTLDFLIRASIPTAWPAQRIAFGFVDRP

SEQ ID NO: 1507 - protein, 509 aa, unidentified
  source 1..509: note = uncultivated organism
MPQVQVIQPIQQQPKRLRVAAYARVSSDSEDQLNSLSVQVDYYTHLIQENPNWDFAGIYADEGITGTSTKHREQFNRLMDDCRAGLIDRVLVKSASRFARNTADALASVREMKSLGVTVAFEKEGFDTETANGEMILSMICATAQEESLSISKNLKWGIRKRMQDGTYMNAATPFGYHLENHQFIPCEREGAVVRLIFEQYLNGMSIARIASYLNENYPKNEGKWHYSGIKKMLCNEKYIGATLYQKQYTGDTLPLKPIKNHGQMPKYYNPNSHTGIISADDFQKVQQLLREKNIPGRSARQSIFTRMLYCADCGTVFSRKENASHNPVWICRKHMQNVSLCRVRPIYEAELKSAFLAMCSKLQVNRKRVLEPIEKDLLHLRYILEQKDKEAADIHEDIRCLTKKNHNLERIYNMGGIEAVQYWERRAAIEREITEKRLLLTRRTFNNSIEKELQRTKKISECVVSELPLTGFDEGVFKKMVDCVLIDGTGITFKLINGVEFTEARKVQ

SEQ ID NO: 1508 - protein, 517 aa, unidentified
  source 1..517: note = uncultivated organism
MSTPIVRVGLYTRISTDETNQPYSLGAQSDRLQAFVASQPGWTIVETYTDQASGKSLDRPALTAARAAAVGGRFDLLLVYRVDRLSRNLGDLIGIGDELRRSGVGLRSATESFDTADPTGRMLFQLLGSFAEFERTTMHDRINAGLERKASRGEWTGGRPPFGYLKQRDESFLRPDPATAPIARSIFTRYVQTRDGARAIAAWLDAQGIRTRNGSQWGTSGVLHLLRRRTYIGEVSFRGEWRPSAHEPIIERELFDAAQAILDARAASPAICRSNPGDYLFSTLSIICDRCGHPMVGASARGRGGKRYPYYTCSTRARRGPTGCDQERLPKDELEAAILGQMTEVYADTSLIAAALEEAQVEARARDAERGAERRRLEAHASELRRKIDRYVVAFEAGELHGSFLQNRANELQSQLAAVETALSQEPPLEPASGQADVGLVSWNLSKALGDVLAGTSPRLTKELLRILIKEIRVVSPQDIRPAYRVPESEVRILGDLVELQGLEPWTSCMPCRRSSS

SEQ ID NO: 1509 - protein, 546 aa, unidentified
  source 1..546: note = uncultivated organism
MKKIRCAIYTRKSSEDGLEQEFNSLDAQREACASYVASQKHEGWALLPDAYDDGGLSGGSLERPALKRLMADMRNGLIDQIIVYKIDRLTRSLADFSKIVDVLDAAGASFVSVTQSFNTATSMGRLTLNMLLSFAQFEREVTAERIRDKIAASKRKGLWMGGLVPIGYDADGRTLSINENEAITIRTLYDLYEAHKSVRVVKEQAGTLGLVTKVRHSGDGSIKGGGSFTRGHIYHILTNPLYAGRIRHRKLIHDGQHPALIDPDRWDQIQIMLQDGASKDRRARSKTASSTLCGKLFDETGDRLTPSHTKTKAGKRLRYYISHRLIAKAGEQDLDGWRLPAPDLEASVAAFIRKTFSATSIVVQLKPCVSTHDIGNAQSKLTEWLASTSQKQILQLASTVTIKPGELKVQLDRTQIAEIFDIAAKTLNEDALHISCLFQTRKRGVETKLILADLPSGQDDKLIRNIAKAHSWFKQIKLGKTFEQIAKTEQTSKRRVQQMIDLAFLAPDIIRDVLEGNQPTGLTSDWCKQHNLPADWNDQRSLLKTL

SEQ ID NO: 1510 - protein, 571 aa, unidentified
  source 1..571: note = uncultivated organism
MYSSKEGKRSVIYIRVSSERQVKGYSLDGQKHVLTEWAQRQGMTVVEIYVEEGKSGKSIEGRTEFQRMLTDIQENGGIDYVIVFKLSRFGRNARDVLNSLEFIQKYGAHLLCVEDGLDSSTSMGKMMITILGAVAELERENICIQSYLGREEKAKSGGWNGGFAPYGYRLDKSEGEGKGKLVTIEEQREVVKIIFQKFLYENMGYTAITGFLNRMGYKRPPAKNAVKPSYGEWSTGQVKRILSNPLYTGKIAYGRRRTEKVAGTDNTYHLVKRDNYIVSNGFSHEPFISEEEFERAQEIMTLRAKKGNHNIGQAKAHLLSGIVRCPQCGAPMQIAATKWENADGTARRRESYVCSYAAKHRGSKVCKRNGIDAEQVENEVMEFTKKLVKNPKFVKDLESRIGNAIDLTEVEQEIMGIQAHKKKLERSCSNLEIDIDNIDDTEDAYASRRRADMARRLDSIYTELYQTEDALQAAKIKLETLRQENLNVQTIYSLLSSFDKIYDKMSREERRSMIKYMIAEVQLYMPDERKDKGCCCKSITYRFPIEQVVLDDFSDKGVRVETVCLLQRDKQ

SEQ ID NO: 1511 - protein, 522 aa, unidentified
  source 1..522: note = uncultivated organism
MRIATYTRISTDEVNQPYSLGAQSERLASYVASQEDWELVGTFTDQMSGAKLDRPGLGGALRAAKAGRFDLLLVYRVDRLARSVRGLAEILETLDGAGVGFRSATEPFDTTSPAGRMMVQMLGVFAEFERATIIDRVIAGMERKSSQGGWCGGAKPFGYRAAIGEGRLEVDEAEAPLIPVIFDLYANKRLGAHAIAGWLAQAGLAGRSGKPWSHKSVLTVLRNRTYLGQVHFRGTWSDATHAPLVEKSLFDAVQAILAERGEDVSKRASNSSDYLLTGLVVCGTCGRRYTGTAAKGRNATYRYYTCGGRQRYGSTACSADRLPAEALDDAVVRSLLSVYENSDLFANAVAEAHHRATLGRTRHEGELAALDAELTKNESAIDRYLRAFETGSMPEALCGQRVKSLAAQSTALRVRREELADEMADTSMAAPSADELTMLRQRVTEAVSEGSPGPVKALLQHLIHEIRVDSRDAIHPIFRVPLGGDNPVGDAVRAPSPSVEVKGLEPSASTLRINNGHFRHLV

SEQ ID NO: 1512 - protein, 546 aa, unidentified
  source 1..546: note = uncultivated organism
MSEKVYRTAIYARLSKEDGDKVESNSIQSQKTMCEEYIKNHKELELVETFVDDGYSGVDFERPDFRRMEEAIREKRIDAIICKDLSRFSRNYHEGGRYLEKIFPAMGIRFIAINDGYDTINGNKSSDYMNLLFKNLINDNYCRDISMKIRTNLDVKRRRGDFVGAFAPYGYLKSQVDKNKLIVDEYAGNIVRQIFTFYKDGMSICQIADNLNDMGVLSPMEYKKSIGINYETPFKTGKPARWTYVTVKRILTNEVYLGILIQGKRGTANYKVHKVQKRDKSEWIRFDDAHESLVTYDDFMSVREMLCRDTRATGKGSEENIFSGFIYCAECKQSMVRKKVKSGENTYYYYVCSGHKRHEGCSDPHSISAKKLENAVTGVLKQQIERILDMSDIMEYIENLPNYDRRIFNFETQAAKLEEEIENLKKLKFKIYEHYAEGEINKDDYTDYRNRIVEELETKKNALGRVQHDMKETDEVGGSGRKWVLIFKEYKNFDRLSRRLLMALVDKIYVFNSNEIEIALKYAEEYRDVQECINKNSDLLPEVKEA

SEQ ID NO: 1513 - protein, 600 aa, unidentified
  source 1..600: note = uncultivated organism
MNKIRCAIYTRKSSEEGLEQEFNSLHAQREACVSYIASQKHEGWVLLPDHYDDGGISGGTLERAGLQRLLRDVDEGLVDQIVVYKIDRLTRSLADFAKLVERLDAANASFVSVTQSFNTATSMGRLTLNVLLSFAQFEREVTAERIRDKIAASKKKGLWMGGNVPLGYEPDGRTLKIVEDEARTVRTLFDLYLELGSIKAVKQQADRMGLRTRARGGKEVKPSMPIESARTESVSIDAATPSSDCENVAIADFSEEQLANQSAKGIRNAAGDLPFCRSHIHHILANPIYAGRIRHRSQIYDGQHAAIIDPAIFDDVQQRLMATAGRGRGQSALGSMGSLLAGKLYDETGDRLTPTHANKKGRRYRYYVSNRMIVGDGDAENSEAKSGWRLPAKSLEQQLSSAILTHLRNRLPVDLLIDPSADDIGRIRDLIDGAASGKSTSKPEAVLSCIQRVTIVPGNIEIAHDREAVGTWLCVLSETINSDALSFSIPFQFRKRGVETKLIIGNGQSRAVDEILIRNIAKAHQYYRALKQGQTFEQIAASENLSKRRILQVIDLAFLAPDIVKSIMQGDQPIGLTAKWLGQNPMPSDWQHQRRIVASR

SEQ ID NO: 1514 - protein, 529 aa, unidentified
  source 1..529: note = uncultivated organism
MSKITKILRCAIYTRKSSDEGLEQSFNSLDAQREASEAYVKSQASEGWTLLPARYDDGGYSGGTMERPGLRQLLADIAAGHVDIVVVYKIDRLTRSLTDFSRIVEIFEKADCSFVSVTQSFNTTNSMGRLMLNVLLSFAQFEREVTGERIRDKIAASKAKGMWMGGTLPLGYDLPAAGTRKLVVNDAEAVTVRHIFTRYLALGSVHALQRELADAGICSKQRVTAKGRTLGGAAFSRGALFHLLRNRIYLGQIVHKEQVHAGEHDAIVDPDIFARVQIMLDGNARRYHAAADHRIVRAPLVGKLFDAAGKAMSPTFSRGKSGKAYRYYVSASFQQGMPTHQNDCVRRLPAPVIERVLTEAIRRWLTGADKPLDQIRKAQLADGGFELEMSCKHARQLAGRLQDGERILHAAAKTCIVFLPLAMPLRGGRRLVIAGSRSSPRPDATLVEALRKAHRMLERDRTGMPIISKAPVSPYDRKILRLAFLAPDIQRSIIEGRQPPGFNLQTLIGMVLPLDWAAQRIALAWPALQ

SEQ ID NO: 1515 - protein, 589 aa, unidentified
  source 1..589: note = uncultivated organism
MFNNDLQKLKDDKRKYLIYSRKSKFTGKGESVENQIEICKKYIKDHFDVNVKEEDIIIKQDEGFSGKDVKRPQYKEMMKLIEDKQIKMVICYRLDRISRNTLDFGEFYETISNYGIKFVSCTEQFDDTTPTGRLMLQMSIVFAQFERETIAERIRDNMMELAKTGRWLGGNTPMGFVSEKIEKLNINDKKVSLYKLSPINDEIEIIKLIYDKYLELKSLTTLETFLLNNNLKTRKNVDFARWGLKKILTNPVYATADVDTLNYFKSLNMEIYNDDEEWNGTHGVMSYNKTMKTKTGSVKEKDKELWINAIGKHKGIIKGKDWVEIQELLNNNANKSYRKPVKNNSILAGILRCEHCGNLMRPKLKDTTLPNGDRKFNYICDLKMRSRGKQCSCPNINGNEADKLVMDGIKQLAQPTSQFYQELLKVIKDENYGKNAQSNEIEVLEKKHNQLQTSIKNYISRIEYVDEELLDDVQSKIKECKTKDKEVLGKLQELKAQQPNSYDDQDTAKTLIYILDNYMNNFENLDLLSQRNFLKLFIGNCSTDGKDIHIDLIGSRNHTTTYQPCFEDSENSQTGTHGGQIVLSSESCE

SEQ ID NO: 1516 - protein, 544 aa, unidentified
  source 1..544: note = uncultivated organism
METVAIKPTVIVIPANPDALKQCADPYHQKRVAAYCRVSTDEDDQLNSYEAQCRFFNDRINSNKEWKLAGIFADEGITGTSTKKRANFQRMIRQCEKGKIDMILTKSISRFARNTVDSLQYVRKLKAMGVAVVFEKEGIDTSTMTDEMILTVMSMFAQAESESISKNVADGQRYGYREGKVRYCYPIYGYHKGKDNKPVIFEEQAVHVREIYDMFLGGNSVLQIRDYLNEMGVPTARGGTTWSTAIIQGILRNEKYVGDALLQKTYISDVISRKVMPNNGVLPKYLVRDCHPAIVDRATYTAVQEELARRSSKKKISFDEADRRGKHSGKYALTDLMACEECGSSYRRRTWCRKTGKQIVWRCVSRCEHGNKYCKESPTIPEPALHETILNVINRTLGDASGLLPLLKKNLTIALNGNSGASELYAIEAKIKDLKDTMMDLVNLSVRSGEDESKYDKEFERIGAEIARLNEVLEEEKRIQAAKAESCERVDAVYDQISAGGFALTEFDNVTIRKLIECVKVTSAKTLKIYFIGGYMVEEPVVTD

SEQ ID NO: 1517 - protein, 532 aa, unidentified
  source 1..532: note = uncultivated organism
MNPTLRCAIYTRKSTEEGLEQGFNSLHAQREACEAYILSQVGEGWQPVKTIYDDGGFSGGSMDRPALQQLLADIACGKIDVVVVYKVDRLTRALADFAKIVEIFDARGVSFVSVTQAFNTTTSMGRLTLNVLLSFAQFEREVTGERIRDKIAASKAKGLRMGGHPPLGYDIMELRPVINPTEAERVRSIFRRFLELGSVTALATDLNESGVRSKRWVNRKGVEVGGYVFTRGALQHLLTNPVYRGANRHKKLLYENAHPAIVDEGLWDAVQAKLADNATPMPLTPKVGNGSFLAGLVFDDRGHPMSVVHTGRGARRYRYYLSRPRRARSGDPVGSLPRLAAGVLDAFILEAVQQRLAMGWRPEAEPEERVREALTRVTLGLEEVVINLRSAAAKAVAGASDLNAADVKVRLPISLKRRAGAVLIAPPGAAPTNEGRVDKTLVRAVVLARSWAASLAAGEFESMKELARSQGLCPAHTMRLAPLGYLAPDVVGMILDGRHPPMLSLKSLTTNCLPLDWQNQRRMVEDICAGRQ

SEQ ID NO: 1518 - protein, 679 aa, unidentified
  source 1..679: note = uncultivated organism
MSNKGNEIVRAVLYLRLSNEDEGKLTKEEKSESIKNQEMMLKDYAKEQGYEIVGIYNDEDWSGADSTRPEFNKMIKECESGNVDVVIAKTQARFARDMELIERYIHDKFIEWNVQFKTVVDRIDNTKRETKKTSQILGLTDEWYLEDTSYNIRQTFKTKRENGEFTGSFAPYGYAKDPENKNHLVIDPVAAEVVKRIFNDFIGGMGIKTVANSLNEDFVLSPLEYKYMNGYKLQVPFINDYMFFESIKKAGMYKVNVVYKNEERKVLHNLISYNVLSEDRKTFDNKCKIYLRQYSEDRIKIYYTKEKEIDYNNFKIELWNELKLNEQLPNDTTCIATLTETLDRTHSINYQFEILLEENVDHKEYFFDVLHVSNDEKSAIDYNVIIRKKYKWCQQMIKKILTDEVYIGNLVQSKTTSVSYKNKKKIKKDPSDWIRVENMHDAIITEDLWIKAQERLKERSRCDKNGTYNPFLHKLYCKECGRVFTRSGDCKHIYYRCKDLVEKYHTCDNRSSINNNDLHSLVIDGINELLDNFYKDQELNNFKENDIDNDLFKEKLDSLNKELISIDKELQTKKAYFQRLYEDRANGLLDTEEYMMLKTKYKEDSERLENRAKKIHEEIELCNTKKKVLKGKQNIFNRYKHVEKLDVDIVSDFVDKILIGKLDKVNKTRDIKIVWNFSV

SEQ ID NO: 1519 - protein, 529 aa, unidentified
  source 1..529: note = uncultivated organism
MKFAIYSRKSVITLKGESVENQIEMCKEYCIRTNNKVPLEFVIYEDEGYSGKNSNRPNFKRLLNDIKREKFTALICYRLDRISRSVADFSSTLDLLQKYNVDFISVKEQFDTSTALGRAMVYISSVFAQLERETIAERVKDNMLELSKTGRWLGGQKPLGFNSEKICYINDEYKEKVMQKLTPIEEELSIVKLIYSKYLLYKSIPQVQKELLTKDICGKNGGEFSKMSIYDILRNPVYVKSDKKVKVFFEDKSVLFCGVPNGNGILTYNKKRSGKYKRPTNEWIAAVSMHKGIIHSKSWLQIQEELNTNNISNKKRSTYSKTALLSGIIKCSNCKSNMRISYGRKRNNGTQNHYYICSLKAKSSKVKCNNPNANGRLLEINVLNELFFIYRDKFIDFFKNTTNVICNDNKSLENFKKSLHKKTNILLSQLCNSKNENTKSIILKKIDDLNSTIENSNNKNNLDNSFYCGLYPLLNNSSNFNPIYEYLESSPYFQDDSLKASFKKFIILLVDNVFYDGVSNKIDIIKKNL

SEQ ID NO: 1520 - protein, 551 aa, unidentified
  source 1..551: note = uncultivated organism
MVIYSRGGGKMLRINNYKVAKYLRLSRDDGDDRESESIENQRDIVDSYIKEHEELDDCGEYVDDGYTGTNFNRPGFKKMLEDIENGKIDCIITKDLSRFGRDHIDTGYYLERYLPTNNIRYIAIGDNVDTAKPDGLQFLTFKLSFNDYYAQDISNKIKSVKNRKIEKGEFQGGIAPYGYKKDSEIKNHLIIDEYASEIVKEIFDMYVNKGMSTIKIAEKLNERKIEAPAVYLKIPVFMKRKSKNPKGYIWQSPQIAKMLKNEVYIGNIVGRKFQKISHKVEKVRATQKDEYVIVKNMHEPIIDELTWRKAQDKLNKRGTTIIRTNNEPLKEFVYCAECGGKATYRIRKSVRKSGYIWEQRTFICSNKNIHKNNCTCKPIEENIIVNKVKEAIKEEIEQVGYTEDEIINIFKLAEEKVESKKNILKKQEIQLQEKVEQNEKAMEEVYADKIKKIISADDFGIFYNKLQKEKKELLAKIHQIETELIELQKDNNEEKYLNSIKLAKKLLTLENPTKEIYSNLIKKIEFDSQKNVRVTLTFGKVQLQEQLKEVI

SEQ ID NO: 1521 - protein, 535 aa, unidentified
  source 1..535: note = uncultivated organism
MTDCALLSRFGCAERYVSIRKRYPPLGFSMDFLQLALLLFRKEKCYAFGKKCTEDQQKMKTAAVYARYSSDNQTEQSIEGQLRVCEEYAQRNGIVIVDTYIDRAMTGTNDNRPDFRRMIKDSAKKSWDFILVYKLDRFSRNKYETAIHKKTLKDNGVKVVSAMENIPDTPEGIILESLLEGMNQYFSAELSQKIRRGMRETRLKGHFQGGYAPYGYKLDGPKIIIDEEAAENVRFIFAEYSKGVRVCDILEELTRQGRLCSGKPFSEHTIYNVLRREKYTGVYSYGGDEMTDMYPKIIEPELYKKVHSIIEKNRYGKRSVNVVYLLRGKIFCGHCGQTVIADCSGGSSGKKKYYYKCRGRKDRLNACKKKTVRKEELERLVLDAIMVRLNDKGFMDKFVQDILSEQEKRNRERSSQQVLVREQKQIETALNNIMTAIEKGVVNSTTQRRMKELEARQEELERLILIERSKQSVTYTESQIREYYEKTLKEEPQALINLLVKRIVLYDDKIEIYFTAPIAAGPDDDRGFLFCKFSF

SEQ ID NO: 1522 - protein, 527 aa, unidentified
  source 1..527: note = uncultivated organism
MKPLRTNGSANVVPSVVVCAVYCRKSTDENLDSPFNALDAQRESSLAYIASQKHAGWVPHTETFEDAAVSGGTLERPALKRLLAEIEAGRVQCVIVYRADRLSRRILDFLQLVELFDKHGVSFVSVTEQFNTATPGGRLYQHMLLSFAQYERELIAERTRHKMQAARRRGRFTGGMLVLGYDCTPEGGRITVNPDEAERVRGIFRLFLECTSRLDAVRELNRRGWMLKRWTTKEGQQAGGTGFDNVSLKRLLSNHIYVGKVKFDGQVYDGEHEAIVDQQTWDRVQALLTEDERGPRRPSSRCTSLLAGLLRCAPCDAAMTPTWSQKRARRYRYYLCTQAHRRGWETCPSKSVPATEIERFVVDKIGAIGRDPELVARTVEEARNQMAARKADLAAEARQIRQDLENAHAALRCSLEAVSGNGRPRRKVVVADQQGEIRTLEARLATITDEHEALKARSIDATDLRLALDAFDPVWDRLTTPEQARVVQLLIERVDYDGAKGSLAITFRPAGVRTLAEERAVTAGTHR

SEQ ID NO: 1523 - protein, 512 aa, unidentified
  source 1..512: note = uncultivated organism
MKPETKNCAIYTRKSTDEGLDTDFNTLDAQREACEAYITSQKAEGWKAVQTQYNDGGYSGGNLQRPGLQNLLADIKEGKVQTVVVYKIDRLTRSLMDFSKLVEIFDEHDVTFVSVTQSFNTTTSMGRLTLNVLLSFAQFEREVSAERIRDKIAASKKKGMWMGGNPPIGYEAVDKKLIVNKQDAKVTRYIFESYLALGCVAKLKRELDNQGITSKTRISKRERKTGGKAYSRGALYSMLQNPIYIGKIRHKEQTYDGQHEAIISQNIWNAVQENLKNQAAAKRGHTKADEANLLKSLLFDCEGTPYSPDHTKKSGKIYRYYISQNLLQYRDHPKGTMSRIPAHEIEKVTVNTIGNHLIGILMLDQITDHQVIQHIKKQTLPIEMFIRTCVNKIVVHQNELQIDINAESLKESIQDNLDLNIPTKTKNHNHVISVPFTIRRAHKGTIILKPENDEYDPFDLPPKQLKNLIRGIIWRDEHFAGMSMKAIADREGLSKAGVQKIVMGSFDTLMSL

SEQ ID NO: 1524 - protein, 538 aa, unidentified
  source 1..538: note = uncultivated organism
MPEAKRKTRCGIYTRKSTEDGLEQDFNSLDAQREACAAYILSQTHEGWEGTSELYDDGGFSGGSMERPGLKQLLQDVTAGKVDVIVVYKVDRLTRSLADFAKIVDILDEHDASFVSVTQSFNTTTSMGRLTLNVLLSFAQFEREVTGERIRDKIAASKKKGMWMGGPVPLGYELGDRKLVVNAREAETVHHLFRRYIELRSVPQLVEELAAQGYRTKVRPYKDGRQIGGVAFRTGALSQLLKNPIYTGKVRHKDAIYDGEHEAIVDQSLFDEVQSIFAANRSDNALGKKSSNPSLLVGIITDPDGRPMTPTHASTGSKRFRYYVTRLEPGDDKNGAWRLPSGEIERLVIDALARAIADTSPASGEANIMQDQMAAHCEIANRLQNTAIHEKRKILLDHRVRVQILQEQVILSFKPQVEAERTEVCVDAKLAKQGSELKFTIPPTNVNIKPAPNPILQKLVAQAFAAQDLVLTGKPNPALSDYSRRYLGQLIRISWLAPDIIASIMDGTQPVDLTGRKLTRANAIPLDWPSQRKMFGFA

SEQ ID NO: 1525 - protein, 597 aa, unidentified
  source 1..597: note = uncultivated organism
MAPKPPQIYQPPNPTDILYDFTTPLRVFAYCRVSTDDKDQINSAEMQQKYFDSLCETHKNWISFELFSDKGISGTSLKNRTDFLKMINLAKSGQVDLIITKDVSRFSRNIIDALSIVKELKKYNVAVYFLAQGLNSLNENDYEKLSAFVVQAENESRSTSKRVKFGHQMKMQMGVTFGRREMLGYRIEKNEKDEQYYKIIEDEAEIVRKIYEWFANGDGTHVIARRLEANGIKTARYRKGWSNTVILRILRNEKYAGHLLQGKTYTPDAMSHEKKYNRGQSFQCLIEDHHEPIVDKDLWNKVQNILKDKEPPEEQKIKHSNRYWLSGKVFCGVCGGRFISCTKKKKTTTYKAWVCFEANARGRYKETEINGEVIAHGCNSGGMINDRLLKMAVHDILEKIIEPHKEQLITLIMKAYRQKHKTPKPQKAFDVAQTKKRIDETQEAIDRLLNLYTKGKIEEDDYSRQYAILKNEKKELLETINEEKVIKEIKINEKAVEDTLRERIKYLCDLKDSDFNDEEFGRITEKIIVYPEHIIEIHLVDINWVFFLHFKAKGKLDKYEVEFTAYNRDEAMAIIGDKITNRPGAKKVFRSKTTKED

SEQ ID NO: 1526 - protein, 561 aa, unidentified
  source 1..561: note = uncultivated organism
MKKINLNKSYKAAVYLRLSKEDEDLLSNMDKLESNSIANQKALILKELESMPDVTLYDIYIDDGFTGLNFERPEFRRMRNDIYEGKVNMIIVKDLSRLGRDYIESGRYIRRIFPALNVRFVSVLDRFDSLTATQSDLNLLIPVKNFVNDSYSRDISDKVRSHQEVMREKGLYVGAYVAYGYKKVEGNKNFIEPDEYSADIVKRIFAWKLEGKNAEGIADKLNQLGVIAPSEYKRLMGVNYKSGFQKKSKAQWSAVTITRILKNRIYIGVLEQGKRKKVNYKLDKTVDKPKSEWSVIENNHEAIISKTDFENVARLLCIDTRKAPKEENLYLFSGLLFCGECGRSMVRRALNRKKGVTVYYICSTYNKGTGCSRHSVLEADIEKIVLNAIRHHIEHIQEMDQILELIRSREVQGKDIIANDKEILEKYDELNQCRKMEVALHRDLLEGVISEEEYIQFTQRYADKAKVIEVAITALKKECERVFLNGLATNDRMKYFLEHKNIEKLDRNIVLSLIEKVIIHEEARIEIVFKYEDEYKAAVRIAKSFSETFHKEVLDCGKISK

SEQ ID NO: 1527 - protein, 533 aa, unidentified
  source 1..533: note = uncultivated organism
MMKTVRCAIYTRKSDADGLEQDFNSLDAQREACAAYILSQKHEGWIQVPDFYDDGGFSGGNMARPGLKQLLDDVRTGKVNVIVVYKVDRLTRSLADFAKIVEVLDGAGASFVSVTQSFNTTTSMGRLTLNVLLSFAQFEREVTGERIRDKIAASKRKGMWMGGNPPLGYDVNNRQLVINEAEAEPVRHIMQRYVKLGSVRSLQEELLAKGIVTKCAKGRGGIAFTRGSLGHLLKNTLYLGEVHFEGQVHAGQYKAIVDRELWDAVQATFAKSVVDHRQGRGANQPSLLSGLLFDTHGGRMTPSHAVKSGQRYRYYVTLADHRQEGRSAARIAAQILEDAVAERLASWILQHGHDQQLDAEDLAEAMFRAQREADELRTGAASDKREIILRYVQRVHLGDQSFTIELSTGTPDEPTTLIGSFTQVRVGNDLKLLMRGTEASQLVTRDEQLVLTMADARAAQQLALRYPDKSVTELAAIAGRSTGRFKRLLRLSYLAPTIYQDVLAGREPATLKGAGVHEVTNIPVLWAEQGRQL

SEQ ID NO: 1528 - protein, 536 aa, unidentified
  source 1..536: note = uncultivated organism
MDSHSSDSKEKPQNKCAIYTRVSTSEGLEQEFTSLDNQRESAESYIQSQKSQGWIVLPDRYDDGGYTGANTDRPALQKLISDIKEKKINCVVVYKVDRLSRSLLDFSKLLEFFDQNKVTFVSVTQHFNTNSSMGRLTLNILLSFAQFEREIISERTRDKMGAAKKKGKWIGGCLPLGYNLNKENHRLIVNPAEAVIVKELFDLYLKERSLLSVTKIANEKGYRTKIRYMADNKVGGGVRFTTTSIEKILNNAHYIGKVRYQGTLYTGEQEPILDDQTFIQVQDALHSHPAKPQIRTPTGKKIGLLSHILKCSACNKSMYYSHSSKRGKIRYCHYVCSNAQKRGYQDCPTKLVNVGLMETKVLDSLRKITKDQRLTPKEWDTCNLEEKRTILQSLVKEIGYNGKDGILEILLNDKKKTFKFEVSKDELKHHPVPPRQQPMHAEPQLRQNLVLAHQIQGLISEGKAKGLKQIAGWLNVNHQRLNQIMNLLLLAPKIQEEIICSKNEIISKIHEYKLRDVAFELSWPKQLEMWQELLKK

SEQ ID NO: 1529 - protein, 518 aa, unidentified
  source 1..518: note = uncultivated organism
MTNTDNIKVKTKICAIYTRKSTDERLDMEFNTLDAQREACEAYILSQRSEGWLTSPSEYDDGGFSGGNLNRPALNRLMDDIKNRRVHIVVVYKIDRLTRSLMDFSKLVEVFDEYGVTFVSITQSFNTTTSMGRLTLNVLLSFAQFEREVTSERIRDKIAASKKRGMWVGGAAPMGYQIENRRLVINEVEAKTARMIFSLYLKLGTVRALKHELDKKEIVSPERISKKGKHSGGKAFSRGALHSILKNPAYNGKIQHKENIYDGLHAAIIETDMWDAVQTKLKKQATEIKLRTEKKYVLQGLLFDPDNVIYSPTYTKKPNGIENRYYISQNLLQYRDHPRRQVARIPAYEMEKLIDRSLRSALPKIYPVDSGGGLRDHLLQKHNGISMHDFIRDLVSKICVEVGQVTIELKPDGLEVLAKKHLSLIIQNSDLDLRDIRVPYQTRKMRHGTTVIEPTSNVQKDPLDMPQADLEKLVQGLIWRDEHFDGTTLKDIAKREKCSEAYVGTAIYKGFDVLISSS

SEQ ID NO: 1530 - protein, 511 aa, unidentified
  source 1..511: note = uncultivated organism
MPQVKVIQPIAEQAKKLRVAAYARVSSDSVDQLNSFATQVSYYTSYIQSKDEWEFAGLYADEAISGTTADKRDDFQRLLADCRAGKIDRILVKSISRFARNTIDCLQAVRELKQLGVAVEFEKEGLDTGNMGSEMLLSILGSAAQEESLSISKNLKWSYRRRMKSGDFITCSAPIGYSLENGTLVPDPQEVPIVEYIFNSYLAGKGTDEIAAEINKMEVTFKHKQSDRWHNSTIRYILTNEKYIGNSLVQKKFTPEELPLKRIRNVGQLAKYYIKNSHPGIIPPETFEAVQELLKQRSTVHAPKTGIRQFPLTKRIKCGLCGSTFFRRSNGQSVKWICAYHLKSKEFCPVKAIHQEEFFLAFIRLYNKLLDNQCILKTMLSQLQELHDKAIYTRPDVADLHEKISELVKQNHSLARLQAKGCMDSALFIERSNRNNKLIEELRRELNQLKEPDNISNAIESTKLLLDLMEGAQPMLEFEPSVFKSMVKQITVYPERFCFHLTNGLTLDEGR

SEQ ID NO: 1531 - protein, 546 aa, unidentified
  source 1..546: note = uncultivated organism
MKKIRCAIYTRKSSEEGLGQEFNSLDAQREACEAYIASQRHEGWVLLPEVYDDGGLSGGSLKRPALQEIMKHVEDGRVDQIVVYKIDRLTRSLADFAKIVDILDAAKASFVSVTQSFNTATSMGRLTLNMLLSFAQFEREVTAERIRDKITASKRKGLWMGGTVPMGYDPDGRTLKVNEVEAETIRTLYDLYEQYGSVRAVREEAEQLGLRTRLRKFTTGNVSGGGPFDRGHIYYILTNPIFAGKIRHRKLIHEGLHDPIIDPERWEQIQVQLQDGASRWRSKVAANQKSLLCGKLFDETGDRLTPSHSKTRKGIRLRYYISHRLVTRSREDHLDAWRLPAPELENKSSELVRSMFRGHAFAMRLAPGSRAEEIGRIRSRLSDLNDTEDIESLFRLIDRINIAPGNIQINLNSPLLAEELGVSADTINHDVLTQNFPFQLRKRGVETRLVLTDSPTGIDDTLACNIARAHGWFEQLKTGKTFAEVAQADETSPRRVQQLIELAFLAPDIVRQVLEGNQPLGFTSKWCLQRSLPSDWTEQRQVLATL

SEQ ID NO: 1532 - protein, 529 aa, unidentified
  source 1..529: note = uncultivated organism
MDGAMAPRGSTHVQQTRVAIYTRKSTDEGLDQDFNSLDAQREAGEAYVASQRGQGWICLEERYDDGGWSGGNLDRPALHRLLDDIKADRVDCVICYKVDRLSRSLLDFARLVELFDKHQVSLVSVTQPINTADSTGRLMLNILLSFAQFERELVADRTRDKVHAARRKGKWTGGVPILGYRVASGGGRLEIDPEGAEMVREIFALYLADQSVAEVVEEINCRGWTTKEHVTKTGRRVGGLPFNKSSVTYLLKNPTYNGKLMLKGEVFDGEHEAIIDDVTFQRVQDLLKKNGTGRGGPNGNKYGYLLKGLVRCAACGAAMTPSTSRRGSKVYRYYTCTSAQKRGYASCPCPTIPARKLEDVIVQQIRVIGQDRELQRATLAQVRSGREARRPALVGEQKRLRRRLEKVRGDIRSLLDALAVGERGASVGARIAELEAEAEKLERRFTEVAQELAALDADAVDEADLRKALSLFDPIWGALWPSEQARIIQLLIERIEHDARTGTLAIEFAPLGIRALAGEVDAATTTVTA

SEQ ID NO: 1533 - protein, 513 aa, unidentified
  source 1..513: note = uncultivated organism
MAGDAKALRCAIYTRKSTEHGLELEFNSLDAQRDACEAYIKSQASQGWKVLPQHYDDPAYSGGNLDRPALKKLLADIEAGRIDVVVVYKIDRLTRSLADFAKLVEAFDARSISFVAVTQQFNSTTSMGRLTLNVLLSFAQFERELSSERVRDKIAASRRKGKWTGGTVPLGYHARDKKLIINKPEAETVRTIFRLYLELKSFGKLVAELDRRNIVTKQRTTKVAKYQGGISFTYGPLAYFLKNRAYIGQVHHGGRWFEGEHEAIIDRATFDRVQQLLTTNSNGSKAKRSESSALLMGKLYDDKGNLMSPSFPTKNGVRYRFYVSSALLRGRKAAAGSVGRVPAAEIESAVLAALEANRKDRESDNGTDPIGMLDRVVVAGNQLQIRITADTADGDGTVQEIRISRSAKARGAATVAEGNGGSEGARNESLIQSVVRAHVWVRCLQNGTYECIEALAEANRLHPKVVRQALRLAFLSPDVTSAVLDGRLPAGFSLAQIPKLLPLPWAAHRRLLD

SEQ ID NO: 1534 - protein, 575 aa, unidentified
  source 1..575: note = uncultivated organism
MAEKIKKRCAIYTRKSSEEGLDQDFNSLDAQREAAEHHIRAQAHEGWVLLPSRYDDGGFSGGSMERPAVKRLIQDIEDGLIDVVVVYKIDRLSRSMADFMKIMELFDKQKVSFVSVTQHFNTDTSMGRLTLNILQSFAQFEREMTAERIRDKFAASKRKGMWMGGVPPLGYDVHNRKLEINPDEAEIVQFIFKRFLEIGSATQLVGELKEKGYQSKSWVAKSGRFHPGKPITKSSIYKILDNPVYIGKISHKGTIYEGEHVGFIDPADFEKAKEIRETRAPNSSPLRCTQAQYLLRGLVFDAEGYTFTCAAVKKAGKRYKYYVSTQAVKKSYDDCPIKTLSAPLLEGVIIEQMRRILTRPEWSKSVIGKVKELMNDNSPDDTKIVQTLQNFDLLWDELFPLEQQRLAKLIIQKVVIYPEKVIIALRPLGMAGLLHEMMPDAKMKKGQPTENTPLEITIPIKFKKHGGRKYITTPDGRDLSVARRPKYENNMIKAIGRGHQYLEMLEAEPDLTIMKLAEREMLDHGYIAKTIRMTQLAPDIIEAILNGRQPYSLSLTDFMKPFPNGWEEQRQHFGF

SEQ ID NO: 1535 - protein, 534 aa, unidentified
  source 1..534: note = uncultivated organism
MASLPQRPTGDHQLAGLYVRVSSKEQVEGYSLDAQRRACRDFCTLRGYTVVTEYADEGISAHTDNIAKRPGFARMLADAEAGQFNIIVVHKMDRFARKLRIALECLERLGKSQVGVVSISEPNLDFSTPQGFLFLSMLGALAEWYSRNLAVETAKGWAERKQKGLYAGRLPFGAAKGEDGVPVPDTQSIDANGRITSNHEGLILAFERAAEGATDSEVAETLNMAGYRPLAYARRARFTREAARTILQNRFYVGELPIGKRGSAGWLQGAHEPLISPDLFDAVRRQRSRRATAPNPDRVNKGAHVSAVSGLTHCAECGEPMHREGNGRLSCWGRRQAQGCRAPTAALRIVEDELGAYLRGLRFPDDARQRIFDAFRQAKPETTERERQRQAAEGQLRRLGDLFVLGDLPKAEYETRRQQLRAELSRLEETEAHARPEILEQLQRYLLDAGAAWDDAEPAQRNRLARALFEVILVRDRHIAAVRPRPEFQPYFVLAEETTEPSHQSDETALSQEGSGGGLEGIRTPDLQRDRLAC

SEQ ID NO: 1536 - protein, 529 aa, unidentified
  source 1..529: note = uncultivated organism
MRREERPANNPRPIRCAIYTRKSTEENLDSEFNSLDAQREAAEAYITSQRHEGWVALPARYDDGGFSGGTLERPGLQHLLEDVEAGLVDCVVVYKVDRLSRSLLDFARIVEAFDRREVSFVSVTQQFNTTTSMGRLTLNILLSFAQFEREIIGERIRDKVAATKRKGKYCGGMPVLGYDVDRDRKRLVVNEEEARLVRHVFARFIQTGSTTLLAQELNAQGHTTKSWVTKAGTLHAGRPWSKADIYRVLNNPLYIGEVTHKGERFPGEHDAIVPMHLWEEAHAILARNYRARAAQTRAETPALLRGILHCGHCHCAMGPTFTKRRGKLYRYYLCVHASKNGYGSCPTKTLAAAEVEQAVIDQLRGIFRSPEVVARTFRAAQQQMTEHLDHLSRRRADAELALQALKEEAGRLVVANDDEGASLPIARRLGELRGLIEEQEQTLERVTAQMRQAEQATFTEQEVVEALSSLDPVWEELFPDEQARILHLLVERVDIHPEGAEVRIRADGLRSLVAELRDGATARSREVTR

SEQ ID NO: 1537 - protein, 580 aa, unidentified
  source 1..580: note = uncultivated organism
MRHQPVQIAHKRCAIYTRKSSEEGLEQAFNSLHAQREACEAYALSQQHEGWQVVPTLYDDGGYSGGKMERPAIQQLLADVEAGQIDIILVYKVDRLSRSLADFVRLIERFDELNVSFVSVTQQFNTSSSMGRLTLNVLLSFAQFEREVTGERIRDKIAASKKKGLWMGGLVPLGFDARDKQLRVNVKEAPLVNHIYQRYLALGSVRQLKQELDRDGIVSKVRLKATGTTGGRPFSRGALYLILRNPLYVGKVSHKGTLYKGQHQAIVSPGLWEKVQKRLHENRQQKTIRANKVDPSLFTGLLYDDNHHPMSPSHTNKGQRRYRYYVSQAALQYKDSQLGSVVRVSAKQIETLVIGHFLEHLTDGLKVLELVDALELTADQQALAIKQSQLLAAQWKSLRASQQIEILQTIIYQIIISKETLTILIETHRLKSFLLQGNNVTTIKETKSQNAHQCIKTLTLPVQLQRCGIETRLIVPNSVSLPEAHQRSIKALQEALAKALKWNQALLEGHEHSVVALSKREQVNESYVRFILHLAYLAPDIMQAIAKGHIPTTFTLESLKKDFSLDWHIQRQQFFHPSRP

SEQ ID NO: 1538 - protein, 516 aa, unidentified
  source 1..516: note = uncultivated organism
MSRKSDRSVRRCAIYTRKSTEEGLQQAFNSLDAQREACAAYILSQTHEGWVALPDLYDDGGFSGGNMARPGLTQLIADVQGGKVDVIVVYKVDRLTRSLADFAKIVEILDGHGASFVSVTQAFNTTSSMGRLTLNVLLSFAQFEREVTGERIRDKIAASKARGMWMGGVVPLGYEVKDRKLIPLPEEAERVCHIFNRYLALGSVYALQAELAEQDIRTKTRIGRDGKITGNAQFSRGALYQMLRNRIYLGEITHRGASYPGDHDAIVERSIFEQVGALLDANRVDNADAVHAEHPSLLAGKVWDGEGRRMLPNHASKRGVRYRYYVSAKDKERLKLSVRRVPAGEIEGLVMRQLAKEAGPVTDAGLSRQDIRSMVDRVVVHQDRVEIQLVDAEPSTPIIVPASLISRSGERRLSIPSETDWHSRPDAALVKLIVRAFQARQLIETADANSIADAAAKLGVSGAYLGVLLRLSYLAPDIVAAILDGRQPATLNRQRLARVTTLPLDWQEQRALLGFN

SEQ ID NO: 1539 - protein, 574 aa, unidentified
  source 1..574: note = uncultivated organism
MCAARRRRRPSTQGPSTQGPSTHRDPSDAATAGDTASGPARWCPRRGGEPATNKLRVAIYLRISTDEVHQPFSLGAQDTKLRAYISSQDNWELACAPFVDEASGATTERPQLTRALTAARAGRFDVLLVYRVDRLSRSIRGLSEILGQLDDAHVAFRSATEPFDTATPAGRMMVQMLAVFAEFERATIIDRVINGMERKASRGEWCGGYHPHGYELDPATGYLARVADEVPIVEKIFRLYTADRLGSRAIARLLSSEGHRTKAGKPWSGNTVLNVLRNRVYLGEVFYRDRWHAPEHHHPAIIKPDMFADAEALLTVRGEQHQHRAASSSDYLLAGLLRCAHCGKRFIGTAAHGKRYRYRYYTCFSRQRYGTEECPAERLPAEELETGIIDSLLATLSRSDLVHTATTAAHSELATQQRQHTDELAATLTELAKTGAAIDRYLAAFEAGTMSEDTCGPRIAALADKQNQLRYRHDELEALLADNPEPQPPEPEQLAALTGQLHQLLAQANPAKVKPLLHALIHNIEVTGRDDIHPTYRIPQHQPTAPAKTSATARVRPMPATVPPVGLEPTLWPF

SEQ ID NO: 1540 - protein, 506 aa, unidentified
  source 1..506: note = uncultivated organism
MERYLMYLRKSRMDTDFDEISVEETLNRHRRILESFCKERRLNVVDVLEEVVSGESLSSRPKMLRLLELVNTGMYAGVICIDIERLSRGSSLESGYIMQVLQTNNCKIITPSKIYDLQNESDEQFTDMKFMFSRYELKTITKRLVRGRNQSASEGKFLGSVAPYGYRAYKLVGMKGNSLRIEPKEAKVVRMIFDMYGKQGIGYNTIAHELNQMNIPSLTGTWGQTSITNILNNEVYLGMIRWKHEPTKRVVKDGMLTKKRVTSKDYELYEGLHEPIIDQEQWDRVKAVQSSRNHASVHKDKKLMNPFATILFCEKCGAVMKRNVPAKTQNTSPWYRCPTRGCNCRTIKCDFLEAEVVKAMSQWWGEYTIKIKEDKVAQTDSTETALSIVREQLTELQLQQDKICEYLEKGIYTIEMFTKRNDTLTREIHKVQAAENELLKKQEAQKDIHDVEKEIIPTTQHILDSYPQLSAEEKNRLWKIVMERITAYRTPGGEVSIHIYPKLPMR

SEQ ID NO: 1541 - protein, 617 aa, unidentified
  source 1..617: note = uncultivated organism
MKRKVRQVEQWDAGYPRVSTDMQMERDALQNQIQALEGHARAHGLNMRLYREEGISAKDTDRPALQRLLADVRAGRVRSVTVTKLDRISRSLHDLLDLVKIFEQYEVKFVSLRDNIDTSGPIGRFMLHILGAIAELERGITAERVAEDMKLRARRGKWNGGLAPYGRAMVNGCLITVPEEAEMLRRMRLLLLQHRSWRGVTVALNRADLRTRGWEPVARDGRTIRKGHAPAEWTAVSVKRVLLQPINDGTLVYNRRRVIGRVAVDRPEDEHVVVEGFCEPIFAREELAELRRVAKEIEGTPPRRTGSPHLLSGLLRCTCGAKMYGVKSQVVTKRGRYAVRYYRCRRSALAGTCAVRQIPADVVEPAIVRELRNLGLDRDRVRGLAGEAQATFEATLGPVLERRATVAKELARTADRSAALLELAEDRLIGKAEFASRRAELDGERSALAVELARLDAEARERFSSAIDIEGTLQKLHDLGDIFDELRTVPERRQLLAACLDRAVLKPGEIELHVVTSPLVLAPPTGEWAAIVPGWCDSGTENRESRATNGLKFPNGVFRMPADAGENGAPIYGIGEWSDAPAASMAIRPKNVPAHRARSSATRSASPARCSTGSTSN

SEQ ID NO: 1542 - protein, 561 aa, unidentified
  source 1..561: note = uncultivated organism
MERAKLAVRRCAVYTRKSSEEGLEQDFNSLHAQREACEAFIKSQAGEGWRLIKTAYDDGGLSGGTMERPALQRLLADTRSGLIDAVVVYKVDRLTRSLADFAKMVEVFDAQGVSFVAVTQQFNTTTSMGRLTLNVLLSFAQFEREVTGERIRDKIAASKRKGMWVGGVASLGYDVRERRLVVNPTEAATVRQIFERYLEFGSVRLLKEDLDRRGIVSKIRMSKSGTRSGGRCFSRGALYKLLTNPIYIGEIRHRKERHPGQHEPIVDRGLWETTQRQLCDHAAHRREKPAHTLPSPLAGKLFDEDGAPLYVCGTTKGQRRYRYYVSRKLIRDSAAKAEDGWRLAAPEIERSVGIAARQILKDQVAISTVLQEGGISTAELASALKAVEDRCAQLESHPEITTTISEAIERVDLSKDGIQLTLNLAPLISHKIVPAGARLTTTRLVPLLIKRRGVELRLVLKGEATAVQRTDPALLKAISRGHRWFAELASGRAVSTIELAKREGLNDSYVRRLVRLAFLSPTIIEAICAGWQPADFTAQELTRGADVPLRWSDQPRVFGIE

SEQ ID NO: 1543 - protein, 639 aa, unidentified
  source 1..639: note = uncultivated organism
MNEIRCAIYTRKSVDDGTLLTQDFSSLDAQREACENYISSQKSKGWVCLPEHYDDAGYSGGNLNRPALTRLREDIEAGKIDIVVTYKIDRLSRSLVNFAELQTFFEANNTSFVSITQEINTSTSSGRMMLNILMTFAQFEREVITERVRDKISASKKRGKFCGGSVVLGYERDPVTKKLKVRPDEAETVRLIFEKYLLLGSINELVVELNTLGIKTKDWTSINTRRHHKPHGWTGNEVHRLLTNPLYIGKIKHYDELYKGEHEPIVDEKLWKEVQDKLTRRGLKGIRHHSSGNPFLGMIFCGTCGCAITPGYTKRHGRKYGYYLCSKTIKDPSHQCPLRRIPCSELEKLVLKQIAVIFKTPSILRATLAAVHEREVNLRHCYEQDIERLTGRLIELRKEALSENADFEEIKHVAEMLSTARKKVKALSSPIAEEEVIKALNDVNGLWEFMFPGTKSELLRMVLGKILVFPEQISFVLKVEGLKDLAEEMAMAGFFNMTHEENTEIFPEAEQEVLEDDSIKLTMNVDSKRIDGHRHLVILAPGAERLKQTSLLRAIQKSRQWTDMLINGEAGNVTDLAEKLGHKPSYVTRILSLNNLAPDIVESILAGTEPDGMSIAKLTAQPIPEDWNEQRRLYGFPVR

SEQ ID NO: 1544 - protein, 508 aa, unidentified
  source 1..508: note = uncultivated organism
MDAIYTRQSVDKKDSISIETQIELCKREVTGDSYKIYQDKGYSGSNINRPDFQAMIRDIKNGLVNRVIVYRLDRMSRSLLDFANLIDLLDRYHTSFVSTQEKFDTGTPMGRAMLSITMVFAQLERETIQIRIRDNYYARGEKGMYLGGPPPYGFQKAETRKDGKRFKYLEPIDTEAEVIQQMYEMYGNSLYTLGEVARALNDDGYLTHTGREWSSSKVSLSLRNPVYVRSDIRVYQYYKKKGCQITSEPDLFVGTNGCYLYGRRKGNERKYSTFSEHVVSLAPSEGFVDAELFLKCQRRLDENIQLDNSSWGQLTWLTGLIKCANCGYAAVPKSSNRGRYYYLYCSGKAMHYCDVATNLGQPKDVEAVVEQRIFEIVRKYGSIPVEQHKKISFEANRLKAQIQNCRNQIDKLIDMVLDSDGVTGKYLNERMEELDKRKTKLEARLAEAEAGDTAVTEKQMNSFLQDWPKLDIRHKNELAKMFIDHMDVSKEEITIFWKHNFEEGAPLL

SEQ ID NO: 1545 - protein, 580 aa, unidentified
  source 1..580: note = uncultivated organism
MTVPLRAALYLRVSTPRQAEHDVSIPDQRKQGEAYCVARGYQLVETYLEPGSSATNDRRPAFQKMIEAGTARPVAFDVVVVHSFSRFFRDHFELEFYVRKLAKNGVRLVSITQEMGDDPMHVMMRQIMALFDEYQSKENAKHVLRALKENARQGFWNGSLPPIGYRVVAAEQRGAKVKKKLEIDPLHADTVRLAFKLALAGDGASGCMGVKAIAKHLNERKLYTRAGGRWGVGAVHRMLTRPTYIGRHEFNKRTKAKAVNPADQVITVPVPPLIDQATFEAVQAHLKSRNPKVSPPQVVGGPTMLTGICFCADCGGAMTIRTGKSGRYRYYTCSTAARQGETGCKGRSIPMERLDDLVAQHLETRLLDPERLEALLAAVLDRRQERAERRAEHAIELRKKAAEAEARLKRLYDAIEAGVADLGDESLKERIAELRSLKAQAQADAERATIALEGIGAEITPAKLHSFADAARQRLRGPDGGYRRDHLRALAQRVEVAEGEVRIMGSPSNLLRTLAAAGGVASAGVVPSFVPTWRRERDSNPRYGFPYTHFPGVRLQPLGHPSAKRVDPEPRLRLRGCGTY

SEQ ID NO: 1546 - protein, 506 aa, unidentified
  source 1..506: note = uncultivated organism
MKSAVIYARYSCSSQTEQSIEGQLAVCNKFAESNDLQIVKVYADRAMTGTNDNRPEFQQMLKDSEKANWDVVLVYAIDRFGRNAIEVAVNKQKLKKNGKILISATQRTSENLDGTKNLDGIILENVYIGIAEYYSAELSQKVRRGQNESRKKGQYCGGSVPYGYKLVNKKLQIDEDKANIIRYIFDQYSIGMSVREIIEHLHSLGMTRNGEPFKPTTVCKMLANTRYSGKYILHGIEYDNIYPRIVKQSVIDQVHKRLALNKVGKGDGAVPFLLKHKVYCGYCGCNISGESGTSKKGHTNYYYKCNGKKKHNNGCQKQQIRKDVLEHLVISSVVNAIKNNNIFTAMVNHILELQNSQFTENEKLKNLMDGKTRIEVAIQNMLTAIENGIVSKSANKRLEELEQKVDDFERQIAEEKGKEIVPLSRDEIEHYYLDCMQKNPRLIIETIVDKVVLYDEYAEIYFKTPLTKSPDESQGFLIYSKSTKINELHKGKGPRTQITFYVNLRI

SEQ ID NO: 1547 - protein, 577 aa, unidentified
  source 1..577: note = uncultivated organism
MLKLNDKTYHAAIYLRLSQEDGDISVSDKNESNSISTQRDLIQAFLRKQADILYEAEFCDDGYTGTNFDRPGFTDMMKAVREKRVDCIIVKDLSRFGRDYIESGKYIQKIFPMLGVRFIAINDGYDSADTENQSNDFVLPFKNLINDSYCRDISIKSRSNLEVKRRNGEFVGNFTVFGYMRSPDDKHKLIVDEEAAVVVRNIFSWKQEGWNAQQIAKHLNKLRFPSPMEYKKKCGHNYRTSFKTKTVAQWSAVAVLRILKNPVYTGVLEQGKTTTPNYKVKTRIVKDESKWARIENAHEAIIPPAQFELVQTVLGLDTCRAEGQDEIYPFSGMIYCADCQSPMIHRTATSSGKKYQYYMCSGNKRDKDSCTTHNIKCELVEKAVLATVQAHISMAIDIDNAMKRVEALDWEKREIRKIDAQISAMELDVEKFNNIKMELYEDLKSDLITKEEYHSFKNDYDIRIQSIRQQIAGLVSQRNAVEGGLTSVQGWFAQFRKYENIEKLTRLTIVSLIERVEINENKDIHVKFRHADQFTAALEYLQMQRTPQGEIILMKEAGWNGKNIPQTAKPVAQSVVL

SEQ ID NO: 1548 - protein, 533 aa, unidentified
  source 1..533: note = uncultivated organism
MTRHRTSAPSQTTSRRAALYLRVSTAGQAEREIPIAGQERSCREFAAKHGWEVTAVYRDEGISGRTDQRPGFQAMVLAAKHREFDVLVVWEVSRLSRRAEHTLAYVAKLMNDYRVSVRAVTQDFLLDNALGQLVLTIMAGVAAFESDMIGERTRRGMRESARRGRRPGGTPPYGFGSEDARLVIREDESTVIRQVWRWRTEEHLTLGGIAARLNETGRRTRRGRPWTPGSLHQAICNPAVQGRTVTHFYDGDESEEIAVEDPPPPILAPDEWSRLGWRMAKADYNRIRRGAIHGAQPASRRSTHLLTGLLFYGDTAMPLVARGSTSATRRAYHYYGPQKGTGRRLRGDALDQQVLEAVMEATLTEDALREGLEWYRAQRRHRIATAADTLRELSTQRETLLTQIRRLTNELANGLASDAVRERLIELEAGLAGVNGEIACVQVDVAGEESEIEDDPTLWAEFCSQVRARLLADPDLQRAYLHLVVNRIDVPADGPLTIHHTILRPTESARAPSDILDWLPNHTLTRTLVLVAA

SEQ ID NO: 1549 - protein, 501 aa, unidentified
  source 1..501: note = uncultivated organism
MNRINAIYARQSVDRADSISIESQIEFCKYELKGGSFREYKDRGYSGKNTTRPQLQQLLADIRRGEVEKVIVYKLDRISRSILDFSNMMELFQQYQVEFVSSTEKFDTSTPMGRAMLNICIVFAQLERETIQKRVCDAYYSRSQKGFHMGGKAPYGYRLEEIVMDGIHTKKLVEKPEEGEIVREIFHMYCQPETSYGDITRYYTEKGVLFYGKALIRPMLAQLLRNPAYVRADMDVYRFFRSQGTNIASDPGMFDGIHGCYLYQGRDVDTDKLQNLRGHMLVVGPHEGLVSSEIWLGCRIKLLGNKTVVANRKAVNTWLAGKVKCGHCGYALMSVKTKSGKQYLRCTRRLNNKACPGCGKIYTEDVERYVYEEMVKKLREGQTPVGHRSLKEDPRVQKIYKEIEALEKEIGILVESLTGAGEILSSYIDQRVDQLDQLRRQKSEELVALSENQATPEQMERVVSNISLWDNIGFDEKRFTVDKMITVLKILPGTVQIQWKF

SEQ ID NO: 1550 - protein, 527 aa, unidentified
  source 1..527: note = uncultivated organism
MTKRSAKPVHCAIYTRVSTDQGLEQDFNSLDAQYDASQAYIRSQAHAGWSLLRATYEDGGFSGGNTDRPALRRLLDDVRASKVDVIVVYKVDRLTRSLADFAKLVELFDQHGVSFVSVTQQFNTTTSMGRLTLNVLLSFAQFEREVTSERIRDKIAASKRKGLWVGGMAPLGYDTKDRRITVNAAEADRVRTIFRSYLQLGSLSRVMADLRQQGIVTKVRTLKSGATVGGIPFTRGPIAHLLRNRFYIGEVTFKGEVLAGEQPAIVDRDLFEAVQAKLTEQVNSHNTARMRSQALLAGRIFDDRGNRMTPSHVRKRGIKYRYYLSAALLQGQPERAGAVNRIPAAEIEGLVIESVRDHLNQSAEIADAVLINTHVARIEVQSDQLVIELADAIGSKRSRSRNVLRVPWHKRPLKRRREILVPESASPQDARAMRSENRALLIASIARGRRWLNELIADPTANTTSIATRDGCSVRKVNMTISLAFLAPDLVKAAIEGRLPHGMGVVRLADLPAEWSRQYQMLGLPAQ

SEQ ID NO: 1551 - protein, 540 aa, unidentified
  source 1..540: note = uncultivated organism
MAVALYARVSTVRQAQADLSIPDQLKRMREWCQQNGHFVAREYVEPGASATDDKRSVFQQMITDATTKSHPFDAIIVHSRSRFFRDLYGSLHYSRKLNQAGVQIISITQPTPDDATGEMMANMISMMDEYSSKENAKHTSRAMLENASRGFFNGSRAPFGYQVVETDVVGHKGKFRKRLALDETEAFIVRKIYDWYCNGLNGRPLGMKAIAQELNRQGLLMRSRVWRMQKIHDVLSDLTYRGEYCYGMRDSKKGVMRPESEWVRCAVEPIIDEALFDTVRRKREAQDPAKTEPGKPAPHALTSPTLLTGLLKCSHCGISMTLATGKSGKYRYYKCGHKISISPDVCDTPNLPVARMDRLILEQLTEKVLTPERVTAMIKDWLKYREKTRASEDARLQELNRALMAADDGLNNLYGAIEKGIIALDSSLQTRVNQLKDRREKVLAEMALVKRDKPSFRKVSPKQVAYATERMRQMLLDPEQGYGKQLLHLLVDEIRVDTQSATLRGSTAALENAVSEMKMGAPVGVPRFVSDWRARRDSNS

SEQ ID NO: 1552 - protein, 578 aa, unidentified
  source 1..578: note = uncultivated organism
MLEQNNLRKVALYVRVSTTYQVEKDSLPMQREDLINYAKYVLNIDKYEIFEDAGYSAKSTERPAYQHMMSRLRDHEFSHLLVWKIDRISRNLIDFSEMYNELKRLGVTFVSKNEQFQTDTPMGEAMLKIILVFAELERKMTSERVASVMVSRANKGHWNGGKVPYGYDYNRSTKEFTINPVEAAVVERMFAMYETCPSLLAISRELNSEGIKTKNGSAWTPVTISRLMHNIFYTGVYRYNRLCESNGGNKTPTFERKQEEWVFCEDHHPAIIQKERQDLVLEKMARQRKGGWEVDRGKSYVRKNVHIFAGLISCGVCGSIYQCTSDKMRSNGYVPSLYLCSRRRRFSDCDNMSVTDAYIGPFVLNYIANIIKVQNSFGKSTSIDMLESKLLRGEALRGVTGIEHQGLRELYDLLCQKFTSVEFAPALLASEDTKKPSPDEKDLLLSDKRKAERALKRLQQLYLFEDDEKAISDREFVIQKEEIRSNIERIDKRLEQIEKSQSRPNISDDDFVKKATYFIMANKLNDRRYVNYSKFIQSMDRAVVKDFVQNVISKIVVFDGEIVSIRFLNGIEHKFLYG

SEQ ID NO: 1553 - protein, 666 aa, unidentified
  source 1..666: note = uncultivated organism
MSRAVGYVRVSTEEQTQHGYSLEAQTEAIKKYCEIQGWELLRIYRDDGYSGASMERPALEQLLSDLHLRHFGTVVVWKLDRLSRNLKDTLYLLDDVFEKNGIGFTSIQEKFDTTTAFGKAAMQIVAVFAQLEREMITERMKMGKYQKARLGQFPGGHVLYGYKKNPATGEFEINEEEARIIKLIYHWYVYGDESGQPLGMEAIADKLTQMGVLPPSAVRGVRVGVRGKRGQKGEVIKHWSNATVRQILTHQAYIGKNFFGRDGKNAEPEYTKDDWIPIPFPQIIDDHLFQMAQERRKRAKFWQRTHEMPLLVSIIHCGICGLQFRGAYDHGTKPVYSCYGRLKRYHRDGSPICDSPRVPADWLDEQVTQKVLEALREPAKMKEAIEAHLESWERRRREIELLVGPSTRQVKQLQDELGNLNYLFRKGRIPVGEYEKEASALEKQIADLRNQHKHQSEELRRLQKLEQDLDFIRQALEKGYWQVGYQAVQQEVQMTWDAAATIDATTGQVVTTKPRKETHIQVDFSQAVEGGETGDELFNLAMHGSGKVMMRQLFDRLRITVHVYHDRVEVRGLIPVGNINISSFPSFVHILLLQKALDRFFLNQPQTLSCLYPPRTLECSSPGAQYTSGILSEDKPQQWLHLFLSIHQHTIQEYLLPLDFLVHSIC

SEQ ID NO: 1554 - protein, 504 aa, unidentified
  source 1..504: note = uncultivated organism
MDQIVLGYSRVSSEEQAAHGISIDAQRQILEGYAAMTSSRIRIYEDAGYSGKNTNRPALQQLLADCRAGSVSAVVVWKLDRLSRSLRDTLTIIEDVFQPRNITLVSVTESIDTSTPSGRMMLNLLASFAQLEREQDSDRVVMAHKHLARDCKYLGGHVPLGYTIDQDKHYQLDPVAAPVVRRVFEMYLSRSGYGPILDYLNSFTFPGTRKTSFGKSDLNNLLKNEIYSGTYVRRLGADPRHRITSPETIRVPGGVPAILTQEEWQRVCALRDQSKTSAALYTARKIYPLSGVVFCASCGSLMHLNYGGKDRSGAVQRYYTCRSSCVRPARLEALQDAVFTVLEQMATAGTDEISWACFVANNYADAADEDHAAEARVLDQQVIEINKRIARIVSFISDHGSDAPSSLADDLRRLEKERDDLQNRSSALRRPVARYDAPATVAAITVCEGIKKQPPDQQKTLLQAAVHKVTVSADDYKIIFNWHTCGGDEPPHPVCQSITRQRPR

SEQ ID NO: 1555 - protein, 542 aa, unidentified
  source 1..542: note = uncultivated organism
MSAGAKQIDGGRVAIYIRWSTDDQGDGTTLEVQLDGCRHYLLSQGWQVSEELTFVDDGYSGGNLDRPALTRLRQAVKFGRVDCVVVFKVDRLSRSVIDTVNLVLEEWDGRTHLKSAREPIDTTTAMGKQFFYLLVSYAEWERSVIRERTVAGRRRRAQEGYKPSAIAPYGYRHSPIRRGALEVVETEAEIVREIFRLCNAGLGAKAIAGALNAAGTPHRNGGLWSDKAVLYMLRNPAYAGDMVYGKTARNPRYGKEDGAPALVGAEPVVVENSAFIPPLIEREVFQMAQQMRLRRRRGPGKPSGRANSSPYLLSGLARCRCGYGLYVKEQFGARRKTRAFNYCCIGKRLKGPEKCACAPIPMAELDAEIEQRVRDRFGREAAQEAFLEQIMAGRVGERRLREAELAEVDRRLGELGDQEKKVRRDYRTDRIAAEEYRELKSELEQEAAVLRERRQEVAAAIAQYHDQEREGELVQEQLSRVDQWERLTPAEKKSVLRFFIDTLVAYRRPGEPVAEIDVTWLSAGSRCSRPCRPAPAGLPGTR

SEQ ID NO: 1556 - protein, 639 aa, unidentified
  source 1..639: note = uncultivated organism
MINVDKINEERRGCAMMKVAAYCRVSTDKEDQANSFESQQRYFKEYIERQPDWELFDIYADEGISGTSTKKRAAFNRMINDANLGRFDMIITKEVSRFSRNILDTISYTRDLRRKEVGVIFLNDGINTFEPDSELRLSIMGSIAQEESRKTSSRVKWGQTRQMEKGVVFGRSMLGYDVKNGVMTINHEGAEIVKLIFHKYVNERKGTSVIARELREAGYKTLTGNVFWTNTTILKIIRNEKYCGDLCQKKTYTPDYLTHEKKYNHGKEDKVYICNHHEPIVDRELWDKAQKELERRDVDSSIKEGHGNRYPLSGKIKCADCGAVFVARYKKRNDGNKYKCWRCGTAAAYGRKRKDKAGNEVGCDIGRQIRDEMCMNILKQTVLSLSIDKKAIVENITNIVTEVIRGSESSEQLNVEKLQKQMQDLTEKKKSVLDAFFSQNITKEEMRMMNEKYDADISLTADRISATRKKQSLSYTCADIKADLRKSVDNIVNCSERQDNFYGSLLDKMVVYGDDRVKVSLNLLPTKWTYVIENLKDIQKRLGEGKSASCENRRGEKNVSFDYSEGEADYSRGAVHCDPSVPISFNMAFASFVGIENLWLKYLREAASSPSGPPYCVITYFAILGLHVLIFTGYSSFFS

SEQ ID NO: 1557 - protein, 521 aa, unidentified
  source 1..521: note = uncultivated organism
MNMKNCAIYTRVSTDNQAEKEFSSCEAQEQKIRSFIASQNDWQVFKVYNDAGFSGAILERPALQELLDDLKKEKIDVVLVYKIDRLTRSPKDFYQLIEFFEQAKIDFISITERFDTPTPAGRLLRNIMLTFSQFERELTSERTKDKMLERAKKGLANGGLTPYGYLRQDKKLIPHPKESEEIKSIFETYIETGSTAKTYQMLKERGVKNKLGKNFSKTNISHILRNVIYIGKVLHNGEIYQGIHQPIILEEIFALAQKIHKEKQKNFRVYKNFLFGGLIKCEECGSNMTSCFTNKYIGGKLNRYYYYRCTATMKQDWQACSVKQVSAERLENFCLENLERISVDKNYIENLIFRLNNDTQAGHRAGYELTDGCSKFSAENFSDTLKFFINGLKTTKGIERNLFAKSFLSNIFYSPESIKIRFISRQSDGEAAAKASPAPPQAGLGERTLSSSKNEFVSSLLAPRTGFEPVTYRLTAGCSTIELSRNICDYKSTNQLRILQIFEKELPITKYDFITYLTKSQ

SEQ ID NO: 1558 - protein, 500 aa, unidentified
  source 1..500: note = uncultivated organism
MYRTAFYVRQSKENVDNPAQSVQNQQKLLWDFVRNKEEFDVVGIYEDIWSGATFSRPDFLRLVSDINDGKIDCVMVKDLSRLGRNYIETGEHLEQIFPMHHVRFISVNDHFDTNDYNNGESMIISLKNILNDLQLRMLSQNIRKTTYIKMERGDYPSGGGPYGYMRSKTNPAQLIVDWNTAPIVKKIFQMKLDGKSTLGIAKELTNLGVPTPMQYWRSVGRLKSDNRGTSGSKWSHITVNDILRNPYYTGNCVNGRYKRDKINEKSRKTDVSYSNEWIITPNTHEAIIDEEMFKSVQKILEKSVQKRRASVAANPAMPNPFPNIVYCAICGKKLVRKKIRDHYLFRCDHVHITESDLSDLTVAALNNYLRRVHRRTYVTKDSLPVPSISDSEYKKNKIQLYENYKNGDISKMTYLQEKLKLDEKLEQIKEEEKKKTASMEASFSCKPSQNLPKKDVLANIIKKISIEDTDNAEFFFYPLPGTTTDFSSHWSMQRRPTILG

SEQ ID NO: 1559 - protein, 586 aa, unidentified
  source 1..586: note = uncultivated organism
MPKKNTASRRPAGTQARGELKKYDELKAAIYIRVSTQYQVDRASLPVQREELINYARYALGIEKYEVFEDAGYSGKNMDRPAYQQMMSRVRLGEFSHILVWKIDRISRNLLDFAGMYAELKKLGVTFVSKNEQFDTSSAMGEAMLKIILVFAELERNMTSERVTAVMISRAQDGQWNGGKIPFGYSYDKTTKTISVNESEALVVRLIYDAYEQEGSLVRASKSVNERGIRQRSGHPWTPSTLRHILVNPFYVGTMRYNYRHVSGRPGTLKPEGEWVIVENHHEAIIDPARQARIIASLGDKQRGSSGSKFYQRKNVHVFAGLLKCAYCGSLMSATLDRERADGWRPSVYVCTRHRCFDDCPNKYISDITLGPFVFNYIANMIRASNSFGKTTSIETLEKKLLRGSVFSNVSHIGRPGLEELYSHLRSGVGIVEYKPPAPPEDTSSQERELLLSEKRRLDRAINRLKSIYLYSEDTMSEADYLAERKSLTSSLEDVTARLDELEASLSGAGSMSDDEFIAEASYFVMAQNLLSSRYVNYENFIRHIDPSIPKNFIQSIVQNFCIRDGKVVSILFKNGIEHQFFYKDE

SEQ ID NO: 1560 - protein, 519 aa, unidentified
  source 1..519: note = uncultivated organism
MVIAIYPRKSVYRDNSDSVQVQVQMCKEYAGVIYKDKDLQFRVYDKDEGFSGKNMNRPSFRELMQDVKNNEIDVVMVYKLDRISRNVQEFSSMYEIFQQHNVSFVSVKESFDTTTPMGRTVMYILAAFAQLERENTSERVADNMQALGMSGKWTGGTLPTGFTSVRRRMGEKEHSFLMVDKNTIGIVKRLYGLILDGYSITKTERYCRDNGIRSRSGKFLNTSQIYGILTNPVYCQNAPDAYYYLQAKGCTLPEPDLFDGKKGLIGYGRTKTGASSQKIQDKSNWIISIGIHEPVIPATQWIAVQNRMGVNRFIHTSVKHERGILRGVIRCRCGARMDVRTYTKNGISFSYYYCSDMARQGKQKCNSGYIRIEEVEQSFLQQLRDIRLTPACIKMRELPSVVTDIKAVKSDLQTTEESIRNLTLALAQAMDTAASGYIIKEIAELDKKKNSLELSIRKAEVRMQAERDAAATRKDVYNSICYLLDNFDDISYTGKNELIKKIVKTCILDTETKSLRIVF

SEQ ID NO: 1561 - protein, 554 aa, unidentified
  source 1..554: note = uncultivated organism
MLKPDTIYEAADYLRLSKEDGDFSLSSDKLESDSISSQRSIIQRFVAQTPNIKLVAEYCDDGYTGTNFDRPDFQKMMEAVKAGKINCIIVKDLSRFGRDYIDAGKYIEKIFPQLGVRFIAVNDHIDTLNYSTGDSLIVPVKNFLNDSYSRDISIKVRSNFESRRRNGEFVSNYTAYGYLRDPNDKTKLIVDEVAGGIVREIFRWKIEGMSPGTIAEKLNARGVLAPSEYKRSIGIKFKTSFQSGARSKWVAASVKRILNNEVYTGVLIQGRRTTPSHKVKKVILKDESEWSRVEHNHEAIIPLREFQLVQDLMQEDGRRAPNADTVYPLSGRVFCGTCGALAKRTSVNYNGKRYAYYVCPTTQREGGCEKRNISEPALESAVLATLQSEIKLILDMEHALRQIETLAWENREVTRLEKAIAGQEAEIEKCKMLKVSTYEDLKEGLITQEEFLHMKDEYTQRICTLESAVSSLRAEQASIQEGLTNQTGWLAQFRKYRNIPSLSRAVVVNLIEKVYLYPGKQIKVVLRYQDQFSDIMEFLQAQKAAYTLPQKEVG

SEQ ID NO: 1562 - protein, 527 aa, unidentified
  source 1..527: note = uncultivated organism
MTSLKRCAIYTRKSSDEGLEQHFNSLDAQRESCEAYILSQAGEGWAPSATRYDDGGYSGGSMERPALQHLLADIGRGLVDVVVVYKIDRLTRSLADFARIVERFDAKEVSFVSVTQAFNTTSSMGRLTLNVLLSFAQFEREVTGERIRDKIAASKAKGLWMGGLAPLGYDLPTNGTRVLQVNESEAATVRQIFKRYLALGSAHRLLEELERDGIRSKPRVSAKGAATGDQPFSRGAMFHLLQNRVYVGEIVHKGQCYPGQHDGVVDPAMFERVQAKLARQLARRKTRSRLSSPLAGKLFDRHANRLTPTHSKNSKGETYRYYVPTQLLQGGRSGGDLKRFPARRVDALIGAALQRISAAVDNPLEQLVRADLSAHSLELVLPSRMQASVRVALAHGEWVSAEDGNPELMRWSIPAVLQPRGGRAKVLPVESHAPNRDPVLIQGLRAAHRLVERDRSGLPNVEQIPQSRYAVRLMKLAFLSPRIQRDILAGHQPSSLRLEDLVRSPLPLCWRAQERMISGSSMRAETA

SEQ ID NO: 1563 - protein, 540 aa, unidentified
  source 1..540: note = uncultivated organism
MEVKGKSIFHVAEYIRLSCDDGERVESNSISNQKKLISDYLKDKEEFVLFDVYVDDGFSGTNFNRPAFKRMIADIEAGIVNCVIVKDLSRFGRDYIDTGKYLERYFPDKNVRFISITDGIDSAKQAYDMLLPIKNIFNEQYARDISKKIHASVETKQKAGEFIGAFAPYGYKKSPTDKNKLVIDEYAATVVRRIFDLYISGCGKSRIASILNSDGIVCPSEYKKLNGENYKNSNRLSSTSYWTYSTVNRVLKNEMYIGNMVQGKKKQSMRKRPRMLDKEDWIIVQNTHEPIIDLDTWNKTQSLLKRRRRTPNLEQNMSIFAGFLKCGDCGRALVKKVGTPGHGDGIINYYCGTYVRSGRNYCTPHPMPHVVLEQIILEDLRTIIRSIENLREIVEQNRESAMTVRRTTEAEKIRLHAELEKVKKLKKSVYEDYREELISREEFVAYRQDYMKKEELLTKQLESLEEKSDMEKQPDVFSLPWIQRLLDLREIERLDRDIVMEMIHEIRVYENHKIKIIYNFSDELEDLFANVYEPNETQGA

SEQ ID NO: 1564 - protein, 518 aa, unidentified
  source 1..518: note = uncultivated organism
MEKITTIIPPKGSAPATLRVAAYCRVSTDAKEQELSYASQIRNYTDLISRHDGWELVDIYADEAVSGTKTDKREDFNRLLADARKGRIDRVLVKSISRFARNTKDCLAAIRELLKLGVTVCFEKENIDTGTLSSELMLSVYSSLAQQESVSISQNGRQSYRRRMERGEFITAKPPYGYRLVNGRELEIVPEEAKVIRRVFDAYLGGQSAKEIADSLIREGVRDRKGNVHWTTRQVYYWLSNEKYIGDTLCQKTYRLEFPFTQKINNGEVDQIYVEGSHPAIISREAYDKAQTLRQFKKKHKTRPDATFPLSLKMFCGVCGKALYRRVARSGSVSWCCGNHLKKAGSCPIGSFLESEIYAAFVRMYNKLRLHEGIILRPALVQMEDLETALHRENPAMLEINRDIAQATERNYNISKLRASGLLDANAYSAQMAANTAQLTSLRAKRRKLLQSSDIDEAAEALRQTVEAIRQGPERLEEFDEPLFAELVEKITVSDNNHLRFQLHCGMELMEQIGGMET

SEQ ID NO: 1565 - protein, 513 aa, unidentified
  source 1..513: note = uncultivated organism
MREVIVINPNTKPLHDKIRTAAYCRVSSDSDEQLASFSSQVSEYTNRISKNPDWVMVDIYADEGISGTSAAKRPEFQRLMADCRKKKIDRILTKSISRFARNVKECIAYIRELQSLGVSIEFEKEGIDTAFLSGEMMIAVFGSLAQEESASISANMRLSYKGRMERGEFITCCAPYGYRLNNGKMEIIPEQAEIVRWIFESYINGMSREKIANLLTKRGVKTSANGTIWYGAGIGYILSNEKYVGNSLSQKRFTQNGIWTKRIVNHGEQAQYFCKNSHPAIISEGVFEQAQRLVKRRTNDHGQPHVTYPLSKRIQCPYCGASFRRKSYANGVVRWSCYTHDRNSAKCSNPSIEESIIKDAFCQVFLQLKSQFILQSTAIQLRQLRNIMLAHEPSVTNRNREIASITAQLHMLSRLRSKDLIDDESFLSQTNEMNRKLLTLREQRQIAIQEYQKDDVLEKTLEIIDILQDAPESIASLEDGGVFASIVDKVIIDKSKNITFRLINGLELGGVHG

SEQ ID NO: 1566 - protein, 520 aa, unidentified
  source 1..520: note = uncultivated organism
MSKTFRCAVYTRKSSDEGLEQSFNSLDAQREAGEAYVLSQASEGWTLVPTRYDDGGFSGGTMERPGLQKLLADITAGKVDIVVVYKIDRLTRSLADFARIVEVFEQAGTSFVSVTQSFNTTTSMGRLMLNVLLSFAQFEREVTGERIRDKIAASKAKGMWMGGMLPLGYDLPATGSRTLQVNEAEAVTVRHIFTRYLELGSAHALQRELAEHGIRSKSWVTRTGKAMGGLEFSRGALFHLLRNQVYLGRITHKELSYPGEHPAIIDQALFDKVGQHLEGNARRHKSTTSARRATSILAGKLFDSAGEPMSPTTSRGKTGRSYRYYVSASLQQGRSKSDHASTRLPAPAIERLVNEALVRWLPEEREPQRLLVSVRLTPTGLALELTTARPKLITSRLRPDEELVTGDAGTVTIHVPLALPLQGGRKCVAAGHRTGYPDPTLIAALRRAHAMLDRDRGRPLMADAPVSPYDRRILRLAFLAPDLQRDILAGRQPPSLNLEHLMARDIPLAWSEQRKTLGWA

SEQ ID NO: 1567 - protein, 516 aa, unidentified
  source 1..516: note = uncultivated organism
MVNMKTIAKNCAIYTRKSTEEGLDQDFNTLDAQREACEAYILSQKAEGWNPVKTHYDDGGYSGGNMNRPALEDLLDDIRAGKVQIVVVYKIDRLTRSLMDFSKLVEIFDEYGVTFVSVTQSFNTTTSMGRLTLNVLLSFAQFEREVTGERIRDKIAASKKKGVWMGGAPPLGYQCIDKKLCPEPEEQKTVRFIFEQYLECGSVRRLKELLENKGCKTPVRTSQKGRTYGGTPYSRGHLYKILGNPVYIGKIRHKGKIHDGQHPGIIPEDLYEAVQKQMNDNTGSSPSKPVKSGSLLQGLLYDCDGTIYSPTYTSKKGKRYCYYISQNLLQYKDHPKGLMARLPAFEAEKAVTQALEGWLAKSNNLQNLFPDNEATISWLKGNPLPLDNPKIRNILTKVVISSGEITLHIDTLKLGQALAGHAEVTLNPPTEQEITIQIPYKTNTGNNGTILIESPNRSQKDPLDLPPDQLKRIVRGTIWRDEHFAGATLKSIAGQYGHGENYVNRCIQESFALAGC

SEQ ID NO: 1568 - protein, 556 aa, unidentified
  source 1..556: note = uncultivated organism
MSKKQFLAAMYLRLSRDDSDVGDVTDREGSLKSESNSIGNQRELIRAFIHKQQDMELYDIYVDDGFSGSNFDRPEFKRMISDIEAGKVNCVIVKDLSRFGRDYIESGRYIQKIFPALSVRFIALTDHYDSFQTDPSESGIVLPVKNFINDSYCRDISTKVKSQFEVKRRNGECIAAFVPYGYKKAPNNKNRLVPDEYAADIVRKIFAWKIEGMAVSAIAKKLNGLCILSPKEYKKSTGINYRGGFSGGARAQWSNSTVKRILTNEIYLGHMVQGKSEKINYKLKKSVAKPQEQWIKVENTHEAVISKDLFQVVQNLLKTDSRVSPVTEEVSLFTGILFCKDCGEQMIRRVNRYKDTQKVYYICSTKNRGEGCTRHSVEEERLRELVSEMIRNYANCFLEERRMFEKAVEMEINFESIIRYDTEIARLKGEQEKYTALCLGLHEDLRQGVITEEEFERLHGEFKRKAAESEAAQKRQEDMIKELFKNSVTSAARLKMMQESGEIKEIDRYTLCSMVKKIEVFEDRRLEIEFYYKNQYRMMCEVNKRIKQDRNKERSA

SEQ ID NO: 1569 - protein, 565 aa, unidentified
  source 1..565: note = uncultivated organism
MKPHKEQALRCAIYTRKSSEEGLEQEFNSLHAQREASEAYIRSQQGEGWRLRKTPYDDGGLSGATMERPALKQLLADIEEGLVDVVVVYKVDRLTRSLSDFARMVEIFDAHKVSFVAVTQQFNTTTSMGRLTLNVLLSFAQFEREVTGERIRDKIAASKRKGMWMGGLVPLGYTVRDRQLAVVEAEATTVRQIFQRYCALSSVRLLKAELDCDGLRSKLRIAGNASRSGDKSFARGALYALLRNPIYVGDVRHKGARYPGLHQPIVERSVWEKTQELLLAHTVRAGGKPSESMSSPLIGKLFDDNGERLTPSHAVKGNRRYRYYVSRSLMKGAARKPGQGWRIPAVEIERNLAAAVARILDERTAVLADIDTAVYGALAITAILASAAEWSARLRTEAEAVTALKMLVERADLQQEGIRLSIKLPIATSVKSTTSAPTHLLLTRQIPLKVSRRGIEMRLVIGSGSGSAPKIDSAILKATARARRWLNDLVSGRAASMAEIGQREGVGKRYVSRMIRLAFLAPAIVERIVEGRQPPELTTQFLSTSGDLPLSWRAQEQLLGFAASA

SEQ ID NO: 1570 - protein, 555 aa, unidentified
  source 1..555: note = uncultivated organism
MNQGKSPVRRCAIYTRKSSEEGLEQDFNSLHAQREACEAFIKSQQGEGWRLIKTAYDDGGFSGGTMERPALKQLLDDIGKRLVDVVVVYKVDRLTRSLADFAKMVEVFDAHGVSFVAVTQQFNTTTSMGRLTLNVLLSFAQFEREVTGERIRDKIAASKRKGFWMGGVPPLGYDIRDRRLVISQVEAEIVREIYQRYLELGSVRLLQSDLDRRGIVSKVRVSKKGVKSGGHSFLRGALYELLSNPIYIGEIRHRKERHPGQHEPILERELWEKAQEHLRNHAAQHRERPTKALPSPLAGKLFDENGEPLYAQGASKGGRRYRYYVSRALVRGSAKDAHGGWRVAAPEIERAVTIASRQLLENQAALNEAVGASADLKPALDAASEWNRRLRSEAEAPAALVELIERVELAEGGVRISLKLPMPSDRVTATAVGLSSFVPIKMKKRGVELRIVLGANDDAPRSVDPALLRAIARASRWFEELASGQVRSLAEIAKREKLGRRYVERVTRLAFVAPGIVNAIAEGRPAVGINLQMLMDGRLALPLQWTEQDRLLNLD

SEQ ID NO: 1571 - protein, 562 aa, unidentified
  source 1..562: note = uncultivated organism
MQKIMDNTYYAAIYLRLSKEDGDFSSSGEKKESNSIANQRKLIEDFLKQHPEVVLTQEFCDDGFTGANFDRPDFQRMIELVKQRKINCIVVKDLSRFGRDYIESGKYIEKIFPALGVRFIAINDNYDSAMSHQAGNEIILPFKNLINDSYSRDISIKVRSNLDIKRRNGEFVGTHVVYGYQRSEENKNQLVIDKTVAPIIESIFRMKIDGFSPAQIADKLNKDGVPSPYEYKRLCGSKFQSGFKKQIQTDWSPVAIYRILKNEMYTGTLVQGKTMTPNHKVKVRSKKDESEWARTENAHEAIIPPATFDAVQKLMLEDSRSPSGEDAVHLFSGKIFCADCQGSMTRKKTKSNGKEYVYFICTTNKQNKHECNPHRIKEQDVYDAALAVIQAQVSLALDLERALHEVNGISWERRELERIQNRIARQEDVIEYNKKMKAGIYEDFKTEMITLEEYKIFKADCDQKIKEAQDAIARLTGDRNTVNAGLTGQQSWLAQFQEYENIHELNRRVVVHFIERIEIDHDKQVNVVLNNANQFQAILDFLAECQAEADRKKVIPFIREVS

SEQ ID NO: 1572 - protein, 600 aa, unidentified
  source 1..600: note = uncultivated organism
MKKIRCAIYTRKSSEEGLEQEFNSLHAQREACVSYIASQKHEGWVLLPDHYDDGGISGGTLERAGLQRLLRDVDEGLVDQIVVYKIDRLTRSLADFAKLVERLDAAKASFVSVTQSFNTATSMGRLTLNVLLSFAQFEREVTAERIRDKIAASKKKGLWMGGNVPLGYEPDGRTLKIVEDEARTVRTLFDLYLEHGSIKAVKQQADRMGLRTKVRGGEKVRPSKAAESARDESISIDGATPASDSDEIVIADRSEEQLANQSAKGTRNAAGDLPFCRSHIHHILANPIYAGRIRHRGQIYDGQHAAIIDPVLFDDVQQRLMAISGRGRGQPASASMGSSLAGKLFDETGDRLTPTHANKKGRRYRYYVSNRMIVGDGGTGNSKATGGWRLPAKSLEQQLSSAILTHLRYRLPVDLLIDPSADDIRHIRDLLDDAAARNTTRSPDAVLSCVQRATITPGKIEFALDREAVGAWLETLSATINSDALLFSIPFQFRKRGVETKLIIGSDQARAVDEILIRNIAKAQQYYNAIKQGQTFEEIAASENLSKRRILQVIDLAFLAPDVVKSIMQGDQPIGLTAKWLGQNPLPSDWQAQRRIVAAL

SEQ ID NO: 1573 - protein, 588 aa, unidentified
  source 1..588: note = uncultivated organism
MSAITKLRCAVYTRKSTEDGLEQEFNSLDAQRDACSSFIASQAGLGWKLVSDRYDDGGISGGTMERPALRRLLDDIRDKKVDVVVVYKIDRLTRSLTDFARIVEVFDTNGVSFVSVTQQFNTTTSMGRLTLNILLSFAQFEREVTTERIRDKIAASKRKGIWMGGTVSLGYQVQSRKLLIKEPEASFVRGLFTRYLELKSVPKLAAEVTRQAIAEEQRDAGETGIAEEQHAAGEAGRPGVEAQAKPPDFTRRIGSGMMYKLLANPIYIGKLRHRDNVHDGEHEPIVDAKLFDQVQQLMASQAATPRGSIVHKDVHLLTGLLFDDTGDRMSPTHAKARGKRFRYYISSRINGKARTDTTAWRIPAIELETVVVRFGQQLLGKKTRLLDWLATYDRSADRQTALDAAAILSAQLGSQSGTERRSILAAMFSRISLGADAISFDVDVTALMRRLVKTDTTSAGGEPDNESTSLIETLTLPIQIKRRGNEVRMVIDGPDHHAEPDPSLVSLIAKAHVYLTKLIEEPTLNITDLADRLGVDRVDVGRVLPLAFLAPWLTDQILAGTQPTDLSARHLARLNLPLTWSDQLQAIR

SEQ ID NO: 1574 - protein, 557 aa, unidentified
  source 1..557: note = uncultivated organism
MAERRLRCAVYTRKSTEDGLDQEFNSLDAQYEACAAYALSQRHEGWVLVEERYDDGGFSGGNMQRPGLKRLLADVASGRIDIILVYKIDRLTRSLADFAKIVDVLDTAKASFVSITQSFNTTTSMGRLTLNMLLSFAQFEREVTGERIRDKIAASKRKGLWMGGPVPLGYEVDNRKLVPSAAEADLVVHIMQRYLDLGSVVELADELNAQGYRTKEQRRTSGPHRGGCIFRRGTLYHLLSNRIYIGQLGHKGSWFEAEHEAIVPTSLWDAVQAKLKDNASGSSRRIKAVQPSLLIGLVVDGDGRAMTSSHATKPGKRYRYYVTRPDLVEGSPAWRVNAHDLEQLVVERLAAHLADQQAIIQLAGHVSADEIDRAFKAAAIKAAMLRGGSSQDRIAILTAIVAGITLHEDRIALILNQQGLTALLALELQDIHASHEILLPVIKVRRGHQLRLVIPGPDVARPVPVQRDEKLVALLAEAHAARQLVLGQPERSIAAIATTHGRCRTRLGKMVALSCLAPDIVTAIIEGRQPTTLTARALASMDLPLAWSEQRQLLRIA

SEQ ID NO: 1575 - protein, 610 aa, unidentified
  source 1..610: note = uncultivated organism
MDKKNSSIRVVTYSRVSTQEQASEGTSLDFQAGQLTGYCQLQGWTVVNSYVDAGFTGKNGDRPGLQRLLIDAKLGLFDKMVVFKLDRLARSLSLLLEIEKTLNGHGITLISMKESVDTSTPTAKMIFQLFGMVAEWDRANIVERTRSGKLQRYKEGCWAGGKAPYGYSRNKETRKLVINESEARIVKRMYTEYVDGKSLFAISQGLNQDHIPPRAKRSQGWWQTAVRQVLLNPVYRGTEVVNRHAHISLINSMDLSNAIMMSVPALVSEKEWQIAQDRMQANKHVKPNKQGTHLLQGMLTCANCGYHFASKRHYYTCRGRMKYVHPDGLSRCKAPNIRADWLENELWQRIEEIMDDPNKLLVLIKDSIENLRRAEADLSERIRPIDERLAEIAAQKAKLADDWIMRNMNVERFTELRESLNGEEARMKSMRAAVDPTQLSELENTRKLLDYWEYQARGMVKWNLENEDGTMYKLVFQTHEEALKLVGLDDPNRSKAEGFPTSKRQMLDKLHVRLSVFDDRVEVKSLFPIEPIGIQQCTSARRDAGRIWRMDPDFHRDGKEDALSLTPYRRKSVSRKRWLTHGFPVRSGMTKRTSVNHRETLNPSAEGFRA

SEQ ID NO: 1576 - protein, 580 aa, unidentified
  source 1..580: note = uncultivated organism
MERHDKPVRVAIYTRKSVEDAEDKAFNSIDAQRQMCESFIAAKAAEGWIALPERFDDYGYSGGDLNRPAYRRLIDQCEQGLIDKIIVFRIDRMTRSTKDFCEFDEKMKKLGVGFTSVSEPFVDTSSPMGELVVNLIVSFGQWERKTIQERIQRHFRTALDQGYFVGGIPPYGYKVENQNLVPDPATAKNVPHIFKLFLQLKATKKVAAQLQREGIERFPGRPWTVQSVHNCLRNVRYVGDASNHGKIVKGRQKPLVTRELWDKVSSILKESSTAHSKRVPSPETALFQGLVFCGHCKRPMSYRWSKKDTLGVRKYSYFVCQQDMRKGISTCPVRHVSVTTVQDTVEQELETVMHASTALLIAAANATSFTPEQIVAGLRRHTFWQGLPLEDRRIIYRLFIRSITVFKSSIELRMNLPVPGAAEELKRTHYIPKDATPDGDIRLEKEDCLFVKVPVAFRTISGRKQIVKGGNAAAPARPTHLQLNTTMVQGTVLKAFAKAIAWMKLIDEGKAVSISQLAELVGVDRHFVLHTLRLATLSPRIVRAALSGELPDGFSLQKVRKIETDDWEEQERLLGFPSDK

SEQ ID NO: 1577 - protein, 504 aa, unidentified
  source 1..504: note = uncultivated organism
MYCRVSTEMQREKESILTQRTLLENYAQDNSLNYKIYSDDGFSASSTSRPALQKLVQDIKDNKIERVIVVKIDRITRRIKDLLDLLELFETHSVAFKSLTQPVDSSTSMGRAFLNLLGTFAELERGMTSERVSEAMTIMSKKGRWLGGVVSFGYSAKNKELIINSQEAEIVKKIYNKYLELESLRGVTNWLNSNGYRTRNKKYWAAASISRIIRNPNYIGKVTWGKRISSKTTGKMKIAPKENWLTSEGIHKAIIADEVFKKVQDIIQRQSREPRRKSSTYLLSGLCRCGLCGGKMNGYSQYKGDKKFSSYKCHNNQSKGKSVCKGTSINKDIIEKLVIDKISGLVDTKTFKIDIKKALDVFNEKVKSQINPLIAEKINLEKRVEGIDLKKRTLLEKLEDKIIDNQTYKNRITELEEELTKNKNRIFAIDVELNDKQIENISFNAVYETVKNFKGNWATFDELSKKDILYTLISKIVIKGTDINIDLFFLPSLYSNLESRMGKD

SEQ ID NO: 1578 - protein, 540 aa, unidentified
  source 1..540: note = uncultivated organism
MTSAVAYLRISKDRNGEGLGVERQLEACKHLAAAKGWEIDLVLDENDTSATSSKRRPQFERLLQMMESGEAEAVVAYKVDRLVRRLDDMSRLWDVAQRQNVLLATVAGDLDLTTPSGRSNALLWSVLAAIEVDSMSDRLQRKALQSVTAGRNANGGSRPFGWNSSRTEQVPAEAAEIRLMAERLIDGWTLHAVAADLNRRGVPTAGWSERMLKAEESHQKTLQTDPNAVLEVPPAVKWDTRRIRMVVSSPRHAGIVTHRGKVVTGSDGAPVKATWDPILTLDEHDQVVAALNARARVMPSEWSYKRRHLLAGRGIMTCGICGNGLKVSRAKGDWTYRCLGHVSRSEAKVDEFVLRRVREYIVANPIRVSEVRVAEEPDVANEITRLETQLADLEENFLDQGGDAIRLARLTQNLESRLDALRTKRLSQISRATGSTWWEHDQDDVMAVLGESAASLPNTTEAESDYKARMIDLQRSWILMYTRSIRLLPTTKRGKGAFDEDAVEIEFKDVSDFWVSTHLDSKTGEWTARGSTHSGKAPSA

SEQ ID NO: 1579 - protein, 546 aa, unidentified
  source 1..546: note = uncultivated organism
MSNEPEKKRHLVCAIYTRKSTSEGLEQEFTSLDNQRESAENYIKSQQHEGWSVCKELYDDGGFTGANIERPGLQRLLAHIKEGRVNCVVVYKVDRLSRSLLDFSQLLEFFDKNNVVFVSVTQQFNTNTSMGRLTLNILLSFAQFEREIISERTKDKMGAARRRGQWLGGRTPYGYIKDEKTNKLTIHPEESVIIQQIFALYLQGNSTREVANIINKSGTLTREYTAKSGKKFGKVAYTSNRISYILHNYTYLGKVEFNGKVYTGQQPAIIDEADFIKAQRRMAQYKTDRVQAENTEFTGLLTGILKCKACGSTMIHTYTMKKKKFKYRYYVCTSAQKQGISYCPNRSIPGQLLEDAVVQRLKSYLANKAPVMPVCQTEIEALLSPVWDTLFPAEKRRIIKQIVKEVDCNAESQRLGITFYDAEVRQEFDAGITRSRFKKQWKKEEQLQTEPSLRRSLLLAHQLRRLMADGTITGNKHAAELLGYNKTKIEHSMNLLMLAPAIQDEIINATPEALNIIAEYKVRDLSFEVDWNKQSDLWREAKRTAQ

SEQ ID NO: 1580 - protein, 568 aa, unidentified
  source 1..568: note = uncultivated organism
MIENRKTAIYSRKSKFTGKGESIESQIDMCREYISREFPDVEEKDIVIFEDEGYSGGNTNRPQFQKLLKACRERQIAHIVCYKLDRISRSIADFIKLTEELEKLNINFISINDKYETHTATGRAMLQMTMVFAQLERETIAERIRDNMLYLAKDGRWLGGNPPTGYRSIETNSKIRVDGTTRKVHMLEIVKEEAKTIKLIFSKFLEYKSLTKVETFMIQNDILTKKGKSFSRFAIKAILLNPVYMIADEQAWNYFQTADVEVYCDKTEFDGIHGMMVYNKTSQRTGKSNEYNSIDKWIIAVGKHDGLICGSDWVQSQMILNQNKSKSYRKPKSEVALLSGLLYCGNCGSFMRPKLSSRTNKNGERIYDYLCERKEKSHGEKCDMKRPNGNELDRLVCEEVKRLSEDSSDFMKNLKRGLKSIDYNDESYQDKIKDLRKSKTSYENEIKNLLTSLAKSEHSSAQDYIISTINELDAKIKQLDKQIQEYTNLANTTHISESEFEIMAEMFSNAANSLDNMTVAQKRTALRSIIRRIEFDGENVHIYFFGADDDEIDLSDKDDSEPLREGCK

SEQ ID NO: 1581 - protein, 561 aa, unidentified
  source 1..561: note = uncultivated organism
MATKPTAYSGAPAIPSLACAIYTRKSSEEGLEQDFNSLHAQREACEAFVLSQKGLGWSLIPTAYDDGGFSGGNVERPALRRLIQDIEAGKVNVIVVYKVDRLTRSLADFAKLVDLFDAKGVSFVSVTQQFNTTTSMGRLTLNVLLSFAQFEREVTGERIRDKIAASKRKGLWMGGIPPVGYRAKGRTLEADGDQAPRVREIYELYLTLGSVTELGEELQKRGWLTPEREHKRPGFGGNKPFSRGHLYRILSNPVYIGQMVHKGEAHEGQHPPIIETGLWDAVQAKLEAQRSGHKSQSPAAHPSLLSGKLFDETGRRLIPSHARKGNKRYRYYVTPADDPGTPVRLPANEIEQLVVQAVKNWAADTKRVVDAVGWSDAKAAEDAISAGQKLALALAKSDQEQNARETLGRCVESVEVGPTAVRISIDLVGAGMVKAGAGPETAQIEVDAERKRCGMAVRLVIGANANRPPEPDQTMIQLINKARDWLERLTRLGHGIGDIAKSENVSPGYVTRLLHLALLAPDITQAIAAGDHPVDVTATRLMQALPLPLDWAEQRKVLGMG

SEQ ID NO: 1582 - protein, 507 aa, unidentified
  source 1..507: note = uncultivated organism
MEFIYARQSVDKKDSISIETQIETCRRKTTSEDVKVFADKGFSGKSTDRPEFQSMMKEVRKGHTTKIIIYKLDRISRSLIDFLTMRQEFAKYNVELVSCMEDFDTSTSVGKLLLNILMMFAEMERETIQKRIKDNYYARGEKGLYLGGYAPFGYTKVETSVNGKKTYTFEEKPEESVILRQMYEKYVAGASLAEIARWLTAEKICTARGDRWSPNTVSRILKNPVYVKANAEVYNHILSKGAEMNNPVEEYAGENGCLVYGSLAERKGSKFVNYENYYVTIGLHKGIIEPSLWLAVQSVMDEKAHHGNLGTGTASWLQGLIKCKCGYTCYIKRYANKSNPNKVYRYLYCRGRRNNSCPYPHNMPEVSRVEAIVEDELLAYLRQLKKIPDIKIQKDRPEINALKIKVAQIDAKIDRLICQLTEGSEITSQYLNRSMEQLHNEKKAYADTISRIQLQENRAAESGIDIDSVINHWERLALDEKKAVAKTIIRQIILEGKDIEIQFYETD

SEQ ID NO: 1583 - protein, 547 aa, unidentified
  source 1..547: note = uncultivated organism
MKAVAATAKEPASRAALYLRVSTGRQAESDLSIPDQRRQGAAFCKARGWEVAAEFVDAGLSGTDDKRPELQRLLDMATSDGAPFNVIVVHSFSRFARDHFALEYHVRRLRKAGVRLVSMTQDLGDDPMSVMVRQVFALFDEYQSKENAKHVLRAMQENARQGFWNGSAAPFGYKVVAAEQRGAKTKKKLAVDPVEAETVRLIFRLVREGDGTNGPMGVKSAAVWLNTHGHRTRRGARWGIGPLHKLLTNPVYKGEAHFNRTDSKTRAAKPAAEHVVVPVDPIIDAAIFDAVQAQLKARNPKVAPPRVVTGPILLTGLAACATCGGGMTIRTGKSGRYRYYVCAATAQKGKDACPGRSLPMERLDEAVTERIGEQLLTPERVGELLRGLMNRQTKRDADLAGRLTALRAKLTDAEGRLSRLYQAIENGIADANDPTLKDRVAAIKTERDIAQAAFDRAVAEMRPEARITEDKIASFVATMRDNVLSGDTAFRRAWLRSVIDKVEVDDTEIRIHGRRTVLERLVMGGGAAPAGVPSFVREWRARKDSNL

SEQ ID NO: 1584 - protein, 537 aa, unidentified
  source 1..537: note = uncultivated organism
MRPEKRQKENGNGNGSAGLTSTRCAIYTRKSTEEGLEQSFNTLDAQRDAGESFINSQHSEGWVALPQKYDDGGYTGANMDRPALKRLLSDVQSGVVNCVVVYKVDRLTRSLLDFARIIEILDKSNATFASVTQQFNTTTSLGRLTLNILLSFAQFEREMISERTHDKMAAARRRGKWVGGNPVLGYDVVPQGGALIVNQEEAQRVREVFALYLEFGSLIPVVEELDRRDWRMKAWTTRDGRQVGGKPIAKNTLYNLLTNMIYTGKVTYGGQVYEGEHERIVDDEVWNKVQTTLGRNGRRGGRNIGNKHGALLKGLVRCATCDVGMIHTYVQKKNRAYRYYVCVKAHQRGWAQCETRCVSAPALESAVLEQIRGITGNPTVLGKVLDQIEGHRQQDAAAATKEKTAIEGELKKIAQEMGGVVSVAGKAEFTTNRLADLQDRVTHLDDRLMELRRQLAAIDAEHTDPRDVATALHEFDPLWGQLSTWEQERFIRTLVEQVRYDGKTGTVTLGFRSHGIKDLCTWAPTVREKYEHAEQRG

SEQ ID NO: 1585 - protein, 524 aa, unidentified
  source 1..524: note = uncultivated organism
MVNVAVYVRLSDEDRFKQCETDDSESIQNQKSMLTEYCKERNWDIYDVYSDEDYSGADINRPAFQRMLSDCENGRIDIVLCKTQSRFSRDMEVIERYLHNKFIEWSVRFISIVDHADTSDEMNKKSRQINALMNEWYLEDTSLSVRKTLEHKRRNGEFTGAFAPYGYMIDPSNKNHLVVDENTAPIVKDIFEWYTAGWGYRKIVMELNRLGYPNPTTYKQQTNSNYVNANEEKSPAKGLWTNTTIYSMIRNETYVGNLVQSKTHNISYKNKKRKRTKKEDWIRSVNTHEAIISQEVWEATQKRLASKVRTAKVTMELSHLSGKVKCAVCGRPMKRGVYYNKDRSRMYYNLTCATYKTGAMNCENTKSLSGQVLEKYLLEQIIRLISDYCDESKLVIHDDISSKTEMFNKQLEIVNSQLDSLDNKITKLYEDKLDELITKEQYLMFSTKIAKEKDKLFNQKCFITEKIDKLEKYSRDDKVFSEIAKKYTHIDKITKNIADEFIDSIFVGEVEQDKCRKITVNWAI

SEQ ID NO: 1586 - protein, 519 aa, unidentified
  source 1..519: note = uncultivated organism
MKPAIKYCAVYTRKSTEEGLEQDFNSLDAQREACLSYIASQKAEGWVPVMEAYDDGGYSGGTLERPALKRLMEDIKAGKVHIVVVYKIDRLTRALMDFSKLVEVFDQHGVTFVSITQSFNTTTSMGRLTLNILLSFAQFEREVIGERVRDKIAASKAKGMWMGGSPPLGYDIQLRQLVPNKNEGKTVQHIFERYLHHSNVIRLKQELDREKIFSKVLTYKDGRTVGGKPFSRGALYALLSNPIYIGQIRHRNKTYDGQHEGIIPQDLWVTVQEKLTEQASVYKGQRISREVNLLKGLLFDTQGTPYTPGYTVKGKKQYRYYISQNLIQMRDHPDGLLGRLPAHEIEATVESVLRHSLCSRSSVVELLGICLDRDIESVQKIVEGQALLQMPRFVQGIIQRITIKAESLEIEVNVQELCTALSQATETKISPPKETALIVGAFNTRRAKKGALVIEPEKPDRDIFDLPPDQLKKLVQGFIWRDDHFQGLTIRQIAEREGLSDSHVGKQIFATFELGQMAA

SEQ ID NO: 1587 - protein, 574 aa, unidentified
  source 1..574: note = uncultivated organism
MPRLSATVSGSRAPGRRCAIYTRKSSEEGLEQEFNSLHAQREACDAYIRSQRHEGWTALAARYDDGGISGGTLERPALQRLLSDVRAGRLDLVVVYKVDRLTRSLADFAKIVEAFDAAGASFVSVTQQFNTTTSMGRLTLNMLLSFAQFEREVTSERIRDKIAASRRKGMWMGGRVPLGYEVQGRKLVVSEGEAATVRHICAAYLALGSVRLLEEQLRAEGVVGKSGRPLARGALFHMLQNRVYRGEVVHKGAVYPGEHTAIIEPELWDGVQARLAAARAVAGGGNKRRGSSLLAGLLFDASRERLTPTHAVKAGKRYRYYISHALVTGTRADARKAVRCPAGEVEALATTRLLGLLGDRAALFRALRDAGALPRTAAEQEHVLAAAARLAQSWPGLTPAAQAATLRHLLRRVELHPERLDMQVNPRGLHHLQLQGKLAADALPLAGDTDQPSSISLSVSARLRRSGKEVALVIGEGEGARHAETPLARLVARAHLLRAALTSGAASDLDALAQREGMGRTYPIRVLRLAYLAPDVIEAIQAGREPDGLTVNKLMKAIQLPLAWDEQRRVLGLG

SEQ ID NO: 1588 - protein, 578 aa, unidentified
  source 1..578: note = uncultivated organism
MKKTAIIKKRCAIYTRKSTDEGLEQDFNSLDAQRESCEYHIKAKIHEGWELLPNRYDDGGFSGGDMHRPALAQLMTDIRAGMIDIVVVYKIDRLSRSMKDFMKLIELFDEYKVSFVSVTQSFDTETALGRLMLNILQSFAQFERENSTERIRDKFAASKRKGIWMGGPPPLGYDVRERKLEVNATEAETIQMIFTQFLKLGSTTLLMRDLNDKGYRTKSWTSIRKQRFHQGQPFTKNGLYRILSNVAYIGMVRQDNELFKGEHEAIISRELWDKVRDLIDGRAKVNTPRVPSTLAPSLLKGLLSDPDGYAMTPAASKKKDKNKTYRYYVSTQAVKKGYDVCPIKTVAAHMLEDIVVDQVKQLLTRPEWAMRILKRTNETDETRVLKALQNFETLWDELFPAEQARILQLIIKRIIVHPDKIQISYLPMGMRALVLQIAPKATFKEGKMDEDSVITVEIPVKFSSKGGRKRIVTPDGRDIVKGKASNHDASMIKALVRGFEMLDILDKNADLTARDLAEKANLDHAYVTKYVRMTQLAPDIVQSILDGRQPQTLTLSQLLRTFPDMWPEQRQHFGFGAN

SEQ ID NO: 1589 - protein, 539 aa, unidentified
  source 1..539: note = uncultivated organism
MPMTHIPDPTETAMRAIIYSRVSTDAQERDGTSLETQERACDELAADRGWLVVRRIRDAASGGVLEREGLDELRAALRQGEAEVVVAFAVDRLSRSQNHIGILFDEFERAGVRLEFVTERFEDTAVGRFILAARAFIAEVEREKIAERTMRGKEERARSGRIPQAFGRGCYGYTYNPDTGRREVEPFQAAVVRRIFERYAASRSFSAVANELNDSGIPAFSGGRWYPITVRRVLLNDAYIGRTVYRRTKRVPVRAPGARRHTRVIERPEEERIEIPGATPPIVDDDLWSRVQAILNDPERTKRRSTPKRTYLLRGRLRCGLCRSAMVGHTLTSKGRSYAYYRCRHAYARNTGHHCTARYVPAEALEQETWAEVRKVLTAPEVVLRELRPSADREATREQVERLESELAALRKREERLVQLFGYEEVDSAVVRQEFRDVQRRRDMLAGERAALAGTRSAVSEAIDEDALRRACARIADRLEGAGREDQQLLLEAVQLRVEATREEVTVEGILPLEPPESAQSCEEFKTIEQTSASLFACH

SEQ ID NO: 1590 - protein, 528 aa, unidentified
  source 1..528: note = uncultivated organism
MSIFSCIVHYFIVKEVIMQAKLRCAIYTRVSTDMQAEREFNSCESQLDKIESFIKSQENMQIFRVYSDPGFTGANTNRPALQELLQDLKENQINLVIAYKIDRLTRSPKDFYQLIELFEKYGINFISVTERFDTSTPSGRLLRNIMLTFAQFERELASERTRDKLLQRAERGLWNGGIVPYGYRREDKRLVICESESKTVKAIFETYLLSRSLVSVYEKLKEMSVTYRNDKPFLKTAISYILQNPVYIGKVKYAGKTTQGIHQPIISEETFEQAQKVHKDKKRTMKLYKNFTLAGLIRCKECGSHMTPCYTNKRNGRKLKRYYYYRCTDTFKREWKSCSTKQVSADRLEDYIFDNLKRISLDKQYLDNLCFSFNHRPEGGRIGVPQTGSEQVPHSSKNPAKNPLARYRSGLEQSKEPLKISPEIFAQTLAALTKSFFEKKGMEKNLLAKKFIQSIQYSKNSIKLNLFSPAPDSSSIFSQKEKIRSKGAENSKNLVRNGMDGCPFVLKANHIIPIILPNTIHQCKKKNL

SEQ ID NO: 1591 - protein, 502 aa, unidentified
  source 1..502: note = uncultivated organism
MKSAVIYARYSCDQQTEQSIEGQLHVCEEYAKQHEIVILDTYIDRAMSGTNDNRPDFQRMIKDSARREWDFILVYKFDRFSRNKCETAIHKRTLKENGVKVISATEHIPDTPEGIIFESMLEGYAEFYSAELSQKVKRGMNETRRKGNYTGSRLLYGYKKDGKKVAVDEEQAEIVRYIFEQYAMSAYVKDILSELDRRGATYHGKKFGRSTVYNILKNEKYAGIYRFQGEEYDMFPQIVPTEIFDKVRAKAEKNRHGKRSVQVIYLLRHKLVCGYCGQPVNAECGTSQNGERKYYYKCRGKKNGSCQKKPIRKEVLEDLVLDKVIEELSRPHIVESIVSELMQVQERQMREASALNIILKEKKKVDTALDNLVSAIEQGILSNTTNKRLHELEARQEELERQALIEKSKLAVKLSEETVRKFYIEALRLEPKMLIDCLIKEIVLYDDKIEIFFNSPLRPCPTEDGPDDRQGFLFYSEHIRLAFKDPHRSGLICIDVQFEMLL

SEQ ID NO: 1592 - protein, 590 aa, unidentified
  source 1..590: note = uncultivated organism
MMSTNKKRTMLKSSKLNQTGKKQVRCAILTRVSTDDQTRGEYSSLKSQRDICEHYISVHQLEGWVVAHYFEDPGYSGKDMNRPGIQSLLAEVRAGNIDIVIAYKIDRITRCLPDFYEFWRILEDHGAHFVSATQNFDTSTPMGMLMLNMLLSFAQFERETTAERTFHKLAERAKRGKWNGGWVPIGYEYDKATQQLHPDPHEGDLVRDMYQLAVKFRNATEVARILNETGRRTRQRVLVRTDGSQRVVGEKRFIGDRVKAILGNQIYKGVIKHGDKEYSSEHPALVSPKLWDEANEAIKTKKTESSRLQRRDKHVHLLKGILKCGHCGTSLTPYPSGKKDTNGQPYLYYTCTHVTKDGGAAECPVRSIPARAFEDLILGYLGEIGRHPEIIEAAVRASNEAKTKAVRPLKAKLADLERRHRELSEGVQNCVEVGKRKGAQNITDSFMAEAERLSSEQREIELEKTKLNIEINYRESVVADKQVIADALLRFEAVMKNLPGEDQKELVRLVVREISVKHVEPGADQAHQENGVFKTKIRTKWYLVNISLFASDLIPEGYKSGEISSDFNRIGSRGRARTCNITVNSRALYH

SEQ ID NO: 1593 - protein, 509 aa, unidentified
  source 1..509: note = uncultivated organism
MNPVVRNCAVYTRKSTEEGLEQDFNSLDAQREACLAYITSQKAEGWIAAKSTYDDGGYSGGNTQRPGLQKLLEDIKAGKVDIIVVYKIDRLTRSLMDFAKLVELFDQHQVTFVSVTQSFNTTTSMGRLTLNVLLSFAQFEREVTGERIRDKIAASKKKGIWMGGQVPLGYDLKERQLHVNTEQAALVKKIFSTYLKVRSVIKLIEILNRDGDKTKAGNNFTRGMLYLLLANPVYIGKVKHKTNVYDGHHQPILHLKEWTAVQEMLAENAVEPRGCRKMQHKHLLRGVLFDAQGVIYSPVFTNKNGQRYRYYVNWDKIQKKKELESAMLRIPAQEIETFLEKKVRAWFADTHNLANLTGKDYTMDHDILVHLSSSIGKLSAEHIFETLSRIVVGQDMLEVQISVSRLKTVLHDAHGLNLKTTPRLEDMASFEVPFVVGKSWHGSTIIRPPSTGTPEDIFDLPPNDLRDLVRGVIWRNEHFKGMTIREIAKRDKRSDAFVGTMIRKSLEIA

SEQ ID NO: 1594 - protein, 525 aa, unidentified
  source 1..525: note = uncultivated organism
MSAAKEEYRAARYARLSREDGDKPESDSIVNQLRLMEDYCARHPEIELAGDYTDDGFTGTNFDRPGFLRMVRDIEAGRINCVIVKDLSRFGRDYIDMGFYLERWFPARGVRFIAVSDSVDSRDGPYDMLLPLKNIFNAQYAKDISAKVRGSFKTKQRRGEFVGAFACYGYLKDPADHSRLVIDPVAAKTVARIFEMAAKGIGQVRIAKQLNAEGIPCPSEYKRQMGERYNNGRRLESTCYWTYATIHRMLRNEMYLGNMVSARSVRPGMHSKAKAADRSDWIVVAGTHEPIVSRQLWDTVQAQIGKNARPIDFAGNVSRFAGLLFCGDCGRAMCKTTWNGRVTYSCGSYHRYGATACSPHYIREDTLSSIVLEDLNRIVASVPDLRALAKRHRTSPSAAGREHERQRLQTALERVRRLKKSAYEDYRDKLLSRDEFIRYKTDYDRQEADIAERLESAGHDAGPAPAPSWADELVRRGKLTELDRATLVQTVRKIRIFKDRQIEITYLFSEELRPLLESPDSRGVP

SEQ ID NO: 1595 - protein, 515 aa, unidentified
  source 1..515: note = uncultivated organism
MMAAAPARRRCAIYTRKSTSAGLEKDFNSLDAQRGACEAFIRSQPGWELNPETYDDGGFTGANIDRPAFTRLLADVDAGKVDIVVVYKVDRLSRSLLDFAKLMDRFTKAKAAFVSVTQNFSTADAIGRLTLNVLMSFAEFEREMIAERTRDKIAASRKRGKWTGGPVPLGFVVREGKLAIDEHEALTVREIFATYLEHRSIVRIIATLKERGRMTKAYESRDGKMRPRRAWKKDSVLRVLRNPLYAGLTQSGGMLFPGEHNAVVSGEDFRRVQDLLGRPRCGLPPRALVPGYVLRGLLFCGACGGLMTPASTRRGSREYRYYRCLKRDKEGSAGCAGGPMPAKGIEDFVVERLRHTLADGDLVGEIVGAMRERVTKTVAEHTTEKRLLVEKIAQASSRVRNLTVQAEEGGVVGHARTALHERLEERGAELVALQERLERIERELAQLDDARVEADWLAQTLAEFDAVWDVLTPENQTRLVRAVVERVVVDEATGSVKMYVADLACTDVQGLAESA

SEQ ID NO: 1596 - protein, 551 aa, unidentified
  source 1..551: note = uncultivated organism
MKSKQIQSNRTGIYLRLSKDDERAGESISIENQRLMLTKYVEEKGWKIAGEYVDDGYTGTNFDRPEVQRMIDDVHMGRLDIVIVKDLSRFGRNYIEVGRYIDYEFPLYNIRFIALSDNIDTADKNSTAMDMMPIMNVFNEWHCANTSKKIRAVKESNARTGKYAASIAAYGYVIGDGENRLPVVDPEAAEVVKRIFEMRARGMGYRKIAADLTVDGIPVPSDYRAKRFNKEQYGIQNGFHRWHGSIVKQMLNNPIYLGHLTQMRKTTVSYKNKKQILRDEDEWVIVKNTHEPIISQELWDKCKEIEKSHTCAKGIKCGIILPLAGLLYCPDCGGKIKYGFTDNKKKDGSIRRVSFYNCGTYTRVGKYACSSHWIGHNELQEIVLNDIRAKANLVIDDEKREREEFMRRKQQSASVKVGAEKKRLLADKKRLTELEKLIQSVYEDKVSGKIPEEICIGLMEKYLEEKKSLSARVSESEAILTENEKNTADVDEFIRRLKKYASAEELTREMCIELIERITIGKVVKDKTAEREIHIYYKFMDNGYSEKLHTN

SEQ ID NO: 1597 - protein, 535 aa, unidentified
  source 1..535: note = uncultivated organism
MDKKKVRCAIYTRKSSEEGLEQNFNSLDAQREACEAYIKSQMHEGWVLLDKQYNDGGYSGGTMERPAFKELLKDIENDEVDIVVVYKVDRLTRSLMDFSKIIDVFDRHETSFVSITQQFNTTTSMGRLTLNILLSFAQFEREVTGERIRDKIAASKKKGMWMGGKVPLGYSKEDKKLVIYNEDAQKVQMLFEKYLELKSVPKLMQYLKENEIKTKTDKYFSKGQLYHLLANKIYIGKITHKDKIYDGEHEAIICDEIFEKVQKLLYENKIDKTCGVKCSSNSLLVGLIYDDLGNKMTPSHSNSHGRRYRYYISRALKNNEETGSVSKIPAGEVEKFVIETTKEFLKDKKQIQNIVSEYKISKQNKLIYTAQNIQDYSELKLIRAIINKIVVSKNLIEITYNEVSIKKVLNTLANNQEIVIPDKNEDLTPIIISKNIKITQLSRNDNILILNAKEYDTPEPNPYLVNAIVKCHYYHKQLQEGKTIEDLQAEEGLKDSKYIRNIMNLKYIFPQLTEQILTGTQPKYLSLQKLITMPK

SEQ ID NO: 1598 - protein, 535 aa, unidentified
  source 1..535: note = uncultivated organism
MSVLGKPVVRAAVYTRKSSDEGLEQEFNSLDAQYEACSAYIASQRHEGWKLIKKRYDDGGISGGTLERPALLSLLADVESGLIDMIVVYKIDRLTRSLSDFAKLIDCLEAKGCSFVSVTQSFNTSSSMGRLTLNVLLSFAQFEREVTAERIRDKIAASKKKGMWMGGMVPWGYKVHSDPKIQSLEICEERSSDIQHVYDLYEELQCLSKVKRSVDTLWPERNWSRGRIHNILINPIYLGKIKHKTAVYEGLHQGIIDQEQFDRVQAQLQKRSVIKRGKHPSRGPSAYLVGKVFDETGDRLTPSKSKKSSGRVMRYYYSNRLISGGADPTGWRLRADMLERLLSEIVGTRLSEALSQFRLAPELKPHELNKATDRLAALDTKETLDLIAQVDLCETKASIQVDAEKVAALVKLDTNKLDLECLRVEEPVVLRKRTNGTKLTWVGYKGEPNHALIRAIVTAQAWVDEIKAGKTINALTKSHGISSTMIWKRISLAFLSPKLIAEIIDGTTIQELTIEMLISKDVPFDWAEQEAMFLG

SEQ ID NO: 1599 - protein, 511 aa, unidentified
  source 1..511: note = uncultivated organism
MVVRVATLTRRSTDDAHQPFSIEAQDAKLAAYIQSQDNWQHLLRFTDDMSGATITRPGLQQALTAANADRYDLLLVYKVDRLARSIAGLARILDELDGAGVRFCSATEPFDTSTAAGRMLVQMLGVFAEFERRTIIDRVVAGMERKAARGAWVGGSRPYGYTTDPTTSFLTPRADQAPLVPVIFDLYANKRLGANAIAAWLNQRGYRTRAGRPWGYTAVLTVLRNRAYLGEICFRGTYHPAPHPPLVDPGLFQAVQQLLAERGADHGKRRSNSSNYLLSGLLVCARCGKRFVGASATGNRYRYRYYTCFSRQRYGSRSCPTDRLPADELDAALLEALLATYQRTDLFDLAIQAAAARLDSVRDQHQRELNVVEAELRRTEEATQRYLLAFEAGTLSDTDLAPRVQALTAKTAELQHRQAELAAAIDGITALPPSQAALAQLRERIHDAITEGPMPARKALVQALVHEIRVEGRDAIIPTFRVPTPADPDQKVRTLPGLVGVTGFEPVASAV

SEQ ID NO: 1600 - protein, 570 aa, unidentified
  source 1..570: note = uncultivated organism
MLESMEKLNLLDGEINISYMRLSKEDGDTETGGLEESQSISSQRKCIQQFIKSQLPDLGPFEEIVDDGYTGTNMNRPGMQRLLKLVEAGVVKTIIVRDLSRFSRDYLEAGHYLEFILPLYDVRFISINDRFDSMDYGESTGGLELAIRNLVNQMYSRDISRKIKSAVDLRKLSGAYVYGTAPYGYKKGEERCTIVVDDEAADVVRQIFSWAAEGVTITQIAKKLNDRGVTTPSVYLAKVRGKYPTRPIWSFESVRNILKNRIYTGDTVPFRSRVVRVGSDKVKQIPQELQQVIPETHEAIISREMFYKAQTTIKSTKKSKPKAEPNPLTSLLVCGCCGNRLSKGKSQNKNWLCASARYQTDSECSKVRIDDKKMKDILLRAILTQCRIADEQIHEISRLNQSAALEESALSKEQKRLKNRIEDCHVSTMGLYEEYVSGNLSKEEFIRKREEIGPKEEALKAQLGEMEKRIEMLKEKKRLGESQMEISSTLTQYQNISALTPELAKELVKQIIINPDGSIKIEWMFRLELPDRIDMDRINQARQHGTEMETEIMMPLVQENFSLKKVVVPY

SEQ ID NO: 1601 - protein, 538 aa, unidentified
  source 1..538: note = uncultivated organism
MKAPSIRPVRCAIYTRVSTDHGLDQEFNSLDAQYDAASSYIKSQAHAGWTLIRSRYDDGGFSGGSTDRPDLQRLLDDIRSRKLDVIVVYKVDRLTRSLADFAKLVELFDAHGVSFVSVTQQFNTTTSMGRLTLNVLLSFAQFEREVTSERIRDKIAASKRKGLWVGGPLPLGYHMNDDKIAVIEDEAERVRLIYRRYLELGSVNALVRDLRERNVRTKARLLATGATRGGVLFGRGSLFYLLRNRFYIGEVKYKDEILPGEQPAIMDRALFDAVRSRLTDQWTNRTTIRNASDHLLTGLLFDDAGHRMVPTHATKAGVRYRYYVSLPHLYGESKTASVGSVSRIPATDIEDIIVESLNEHLIAQKEKPTSSTAGAADRGVVLEQIARIDVCKGRLAIRFKSKDADEASDSSDGHTISIPWQKPPSRKSRQILVPHGIHNEVRPTRIERRARLVSAIARGRRWLDEIVSGSITDVQQIAALQKCSVRQVNMTISLAFLTPDLVRAAVEGRLPRGIGVERLRDAPAEWGRQFEALGLNPQ

SEQ ID NO: 1602 - protein, 513 aa, unidentified
  source 1..513: note = uncultivated organism
MRAVIYARYSSDNQTEASIEGQLRECMEYATYNDIQVIGNYIDRAYSAKTDNRPEFQRMIKDSYKHAFDCIIVWKLDRFSRNRYDSAHYKALLRKNGVKVVSAKETIAEGSEGILLESVLEGMAEFYSAELAEKVTRGMKENALKGLWNGGNTPFGYVVNTERKLDIDSKAAPIVAEIFKMSNDGKTVKEIFNIMSERKVTRSNGKPLRYNAIRYMLSNRVYIGEYSHMGVVIKNSVPPIVSEELFNAVQLELAKNSKAPARHTADDDYLLTTKLFCGRCGAMMVAQAGTSGTKGVVYRYYACVRQKKHECGKKPVSKTKLEDFIVHKTMEFLRDDGVIERLSAKLYELQYTKSTLLPKLQEQLKQKEKEIENIVNAVQKGYATEILLKRLAELEKEQNELNDAIAKEQLKAPIFTQDHFRMALNNFQKIDISTQDGKRKIIDAFINSIYLYDDHMKIVYNANGKEETVSLEELESSILFSSGAPNKNKTNPRENLEFVLFFTREYFGLIVKR

SEQ ID NO: 1603 - protein, 543 aa, unidentified
  source 1..543: note = uncultivated organism
MSEKVYRTAIYARLSKDDGDNKTESNSIVSQRALCEEYISQHKDLELVETFVDDGFSGVSFERPDFRRLEEALHEGRIDAIVCKDLSRLTRNYIEGGRYIEKIFPQMGIRFIAVNDGYDSLESNPQSDSFIIPFKNLINDTYCKDISVKIRTNLDVKRRKGEYVGAYAPYGYLKDPKNRNRLVIDEYAGDMVRQIFSMYKDGLSIGKIVDRLNSLGVLSPMGYKRSVGIKYGTAFAKSGDTSWSYKAVKRILTNEIYIGLLVQGKRGTPNYKVHAVQDKDESEWIRVEDAIEPLISYEDFMSVCCMLDRDVRSASEGEENLFSGFIFCGDCRQPMIRKVVSSGTKKYFYYVCSSNKRHEGCSSHSISVRAVEDTVFNAIRTQITNVLDMAETMEYIESLPNNDLKVFNYEAQTVKIEEEIEKYKIFKRRLYEDLSDGVIDKKEYMDFRNQYTSMIEDKEAALERVKRESREASLNGDVEKAWVTLFRQYENIETLSRRVLMALVDRILVYENHSVEVVFKYGDEYRRMAEAVKHCKDELPAAI

SEQ ID NO: 1604 - protein, 667 aa, unidentified
  source 1..667: note = uncultivated organism
MSRSRRASKTPLPLDAALRACTYLRVSTGRQAESDLSIPDQRKQTGQFCATKGWALLGEFVEPGASATDDARPEFQRMIERCLDDDHPFDVIVVHSYSRFFRDSFSLEMYVRKLAKAGVRLVSITQELGDDPAQVMMRQVIALFDEYQSRENSKHVLRAMKENARQGYYNGARIPLGYTTEICETRGERVKKRLVEDTVEAEIVRLIFRLYRVGDGTSGPLGVKAATSWLNAKGYRTRLGARFGVATVHGILTNPVYVGEWSFNRMEARTRAVKPASEHIRIEVPALVTREEFDAVATTLKAHNPRVTPAREVTGPILLTGLATCTHCGAAMTLRTGTSKSGKVHRYYSCSTHGRQGKAGCQGRSIPMHKLDQLVTDHLADELLQPARLETTLASLWNSRAAKQTEVDGRVAALRAEVTTAEDKLRRLYQLVEDGVTDLDDMLKERLATLKADHDRAKVALDRIHASEAPPAVITPELIAEFGTLMRRNITEGTIPFRKAWLRSIVDRVEVDANAIRIIGDKANLEQVIAAANTGTLKEPGVRSSVRKWRDLRESNHYLVIFNVFIRLYITEKPILTTIHTIIHTNQCALPNDLTQTLPRERSTPLAPRSAGCRSQTRCRQVSFTQASRRSGAVIGSTRRGVCHADRLEFGFDLSVDAAEDEDRQER

SEQ ID NO: 1605 - protein, 500 aa, unidentified
  source 1..500: note = uncultivated organism
MRAAIYVRVSTVEQAQEGYSIPAQIAILRDLAKTYNYKIIKIYQDAGISGKNIKDRPDMCRLIEDAEQKKFDVVLVWKLSRLSRSLLDLLSIVDIFTQNSVAFQSYSEKFDTSTPMGKMLLQMLGSIAEFERNTIAENVKMGLNERFKQGYSKGAIPFGYKSIDKRAIIAPEQAEVVKRVFETYLNGDDDGCLTHLAEQLNADDFRTRTGGLWGRIALRDMLKNSFYMGYVKTGIHSRGYEIKENAEVKKGAHEPIIPEDIFNKVNQKLEALKRNNIVRYPDNDSVLTGLVVCPRCGSKMFALNSTNKHVKKSGEVSIYPVNVYRCNSSGYGKGICKGFYVTANKIQPQAILALADYINNRKYNIKVSDKPRSAPTDNELKLVESELKQTISIRDKYFRLFESDKVDMELFSDKINGILAKINSLERKKEEILSKTVPNKDIDYSKMFSRINNFNDIYDNLSNRDKKEFLRQFIKSVHITVDKLVDKVELINGHTINLLS

SEQ ID NO: 1606 - protein, 665 aa, unidentified
  source 1..665: note = uncultivated organism
MKIALYARVSTNRQMQSQSIEQQIERLQEAVAQHSDWELAPEHVYRDDGYSGAKLNRPGLDRLRDAASMAAFELVLVTAPDRLARKYVHQVLLIEEMNKLGCEIQFLERPMQEDDPHDQLLLQIRGAVAEYERNLIAERMRRGRQAKLRAGSLLPWTRAPYGYILDPERPRDPSRVRIDPVKATIVRQIFAWYTDPETSVSMHWVVKQLNEQQIPTPRGGKRWNPSTVRGILHSSTYIGMAYSGRTRPIPARRRKSALSPVGRGQSIQPTPTEEWIQVSVPVIIDQEIFDAAQSRLEKNQNMARRNNKSHNYLLRGLVSCGQCHLSSTGRSQGKYHYYKCRGKTDVHRAAKGERCTARYVPSQELDEFVWQDLCRIVAEPDLITHELERAQTGEWLPQALQAKRNTVRQALASLERQQDRLLEVYLAEIIMRDEFERKRQELTRTQNGLQQQLRQLEFQAQKQIETLTLAKNIQEFCQRIQPTLDNLNFEQRRQLVELLIDRVIVDDAEVKIRYVIPTSPSGENTRFCHLRTDYLDLKAQTVEVDDLFIGEFQIAGEQVDASKSAGLEVGLCDDDHVKRLGEVSMQHLGLIDAGFNIIIDAFLNQIFLRNVAIVDFLSVLLARTFALLLALVDEIQGGITPQLGDQMQIRLENHLKGIVVAKVPI

SEQ ID NO: 1607 - protein, 540 aa, unidentified
  source 1..540: note = uncultivated organism
MSNTTPTIICIPAKPEAVRASKRQLRVAAYCRVSTDDEEQLTSYEAQKNYYTDKIMTNKEWTMAGIFADEGITGTSARKRPEFLRMIRQCKQGKIDIVLTKSISRFARNTVDCLNYVRALKELGIAVIFEKENMNTLEIDSEILITMLGAFAQSESESISANVRWGIRQAMKEGKATIQYKYLYGYRKGDDGKPEIIPDQAEVVRKIYDLFLSGTPVRGIQEYLNTSALPNINGEPKWARSAIDSILTNEKYCGDVLLQKTYIDDCINKKVKKNTGQLPMYLVQNHHEGIISRETFDAAQAELARRSAGKSPSKKNAPTGRSRYSSKYALSDRLYCGECGTRYQRCTWRNRDGSKRIVWRCVSRVDYGSKYCHDSPTLDEEPLHRAILDAINSAVNDKDNIVYNLTAAMEKELAPVVGQQLSLSEIDRQLEQLNAEFSKVLAEASESGNQAAYSDRFRDIMQHQTELKAQRNEIQRMLAESGKAAAHIEQCRQAAETTPSAITEWDEALIRQVVESVTVETGSEIIVALKSGASIHQELL

SEQ ID NO: 1608 - protein, 536 aa, unidentified
  source 1..536: note = uncultivated organism
MIKTVRCAIYTRKSDADGLEQGFNSLDAQREACAAYILSQKHEGWAAVPDFYDDGGFPGGNMARPGLKQLLDDVRTGKVNVIVVYKVDRLTRSLADFAKIVEVLDGAGASFVSVTQSFNTTTSMGRLTLNVLLSFAQFEREVTGERIRDKIAASKRKGMWMGGNPPLGYDVKDRQLVVNEAEAETVRHMMRRYIALGSVRALQEELGSQGICTKLHKGRGGIPFTRGSLGHLLKNTLYLGEVHFKGQVHAGQHNAIVDRKLWDAVQATLARSAVDHRHGQRAKEPSLLSGLLYDMHGGRMTPSHAVKNGQRYRYYITLADHRQDGRSAARVAAQALEDAVAERLAGWLLAHGHDQLLDAEDLAEAMFRAQREADELRTGAASNKREIILRYVQRVDLGEQCFSILLSGGRAVEPRVLTAAFKQVRVGNDLKLLMRGTEVSQLVTRDEQLVLILADARAAQQLAIQYPDKSASELAATIGRSIGRFKRLLRLSYLAPAIYDGILAGREPPALRSPAVHKVTNIPLLWSDQARLLKAS

SEQ ID NO: 1609 - protein, 537 aa, unidentified
  source 1..537: note = uncultivated organism
MKIAIYSRKSKFTGKGESIENQVEMCEKYISTHFLDGAHSISVFEDEGFSGKNLNRPQFQAMMEEEYKNPFDLIIVYRLDRISRNVGDFSSLIDKLNSYNTSFVSIKEQFDTSTPMGRAMMNIAAVFAQLERETIAERVKDNMYMLARTGRWLGGTTPLGYSSEKVENKDSNDSKRFYFKLVQNEEVEIVKLIYSKYIELRSLNKLMTYLLNHNIKSRKGCDFAITTLRKILTNPIYCISDKDGYEYFKSQDCNMCCTQEDCIGEYGFVGYAKTITANNERITNDSGKWIIAVGKHQGLIDGNTFVSIQNILNCNADKNIKFKQSHNPVALLSGLLVCKCGSYMRPKYYKENRQGIKPYAYMCELKEHSKSKKCQCHNLNGLYADKAICDILLNYNVDGNVFNKYLKDIKNKTQDQSYKQRISEYETEKLKKEKEIESLVDILKTGVDKRTIEYINKSIVSIDEEISRINKEIDTLKIADTYNDNAKNKLDDIESVFAFFKENFDSLSVENKRNFLRNCISRIMWDGENLHIFTKSL

SEQ ID NO: 1610 - protein, 542 aa, unidentified
  source 1..542: note = uncultivated organism
MRRIRCAIYTRKSSEQGLEQEFNSLDAQREACEAYVASQKHEGWELLPDLYDDGGISGGHLDRPALQRLMQAVDDKRVDQIVVYKIDRMTRSLADFAKLVERLDAADASFVSVTQSFNTATSMGRLTLNVLLSFAQFEREVTAERIRDKIAASKRKGLWMGGNVPLGYQADGRTLKIDVDEAATIRTLYDLYLEHPAIRQVKGQAEDLGLRSRRRERSGGSTSGGNTFDRGHIHHILSNPIYAGRIRHKRQVFEGQHPSIIDPVIWDRVQQMLQDGAARTRGTKKSATRSVLAGKLFDETGDRLTPSHSKKNGKRLRYYISRRLVTDRRVAHPDAWRLPAEEVETLLVRLIRQHFGRPDAASTILQGASAVEILTAIKRLESLNGTKACLALVERADLRPGSLTLQIDNLALAQVLVCEPDQINGTALTIGAPFRMRRRGVELKLHLGNPAPEVDLILVRNIVKARRWLGMIIEGRTFAEIAAEEGVSKRRVQDVVDLALLAPDVLDAIASGEQSDGLTTDYLIKTGFDPVWSKQRKQFADL

SEQ ID NO: 1611 - protein, 507 aa, unidentified
  source 1..507: note = uncultivated organism
MKNEAKRTFRCAIYTRKSIAEGLEKDFNTLDAQREAAENYIASQKHEGWVAIPKHYDDGGFTGGNMERPALRELFEDIKKGEIDIVIVYKVDRLSRSITDFAKIVELFEAHNVSFVSVTQHFNTKDSMGRLTLNILLSFAQFERELISERTKDKMSAARKKGKWLGGRPILGYDIVKGGGAIEINRAEAETVNFIFDTYFETRSALKTLEILNARGIRNKEWRTRSGSISGGSQFTKTTLYGLLKNYAYIGKLKYDGKIYDAEFDGIVSEEKFLAVRSMMKNNFTDRMTARVRTKSEGLLSGKLYCSHCGRLMGHTYSRKTKNKIYRYYVCMNAQKSGWKNCPHPSLPADVVEKFVVGEISAVSSDATLAKQVMDCFVSETEKELSEMLKRREKVSNALDNKRALIGDAAQDSAEYADLIKAEMSHSEALQSCDTSIKTLRERLKFSREELARIFGNFDEIWVKLNFKEKYELVDLLVERVTFYGESGELGITYRECGIKTKDNNGN

SEQ ID NO: 1612 - protein, 547 aa, unidentified
  source 1..547: note = uncultivated organism
MQASTRRAAICARVSTLDQTRGTSLDTQVAEGREYARTHRLQVVGEYVDGGVSGKYANRPGLDRLMDDCRAGLIDVVIVSKFDRFGRSFRHTVQLVGELEELGIEFVSIAERIDNSPSGRFQRHVLLSVAEFERERILERTTKGMEATALAGRWPAGPAPYGWKVVKDSNGHSTLALNEPEVAVWERIVSCFVDKGMSSLETAKELNAAGLRRRRGQLWNSSELWVLVRDTTCLAGTWTYRRQTANSRRRRTPSGPPITLSIPPILSQERYEALRAVVAARSWTKKQQKHEWLLAGRIRSPHGRRMHGMYDPNGKRRYRCGGKFSPDGSLGKFCDCRMVHADDVEELVWGVVTKALSDPAKLLSLARAQAQISAEETKTTSVDLAALDRKIARLERAAGEQLAKALAAGADPKVAAAAAAELQAELNATRQQRAVVAAWVASASERRTRAQRLSDIAQEATEALKASGNVPAKQKVLSALDINVTVTGWEACGTCNGKGRLSGRGRHNACHDCHGMRYKALVEVEGSIPSAAEEKDSTPWPIKLAAS

SEQ ID NO: 1613 - protein, 554 aa, unidentified
  source 1..554: note = uncultivated organism
MKQRCAIYTRKSSEEGLEQDFNSLHAQREACAAYVMSQASEGWSLIDDIYDDGGISGGTLDRPGLKRLLADIAAGRIDIVVVYKVDRLTRSLLDFSKLVEAFDKAGTSFVSVTQSFNTTTSMGRLTLNMLLSFAQFEREVTAERIRDKIAASKARGMWMGGTPPLGYEPDGRTLAIVDEHAALVRDIYRRYLDTGNVRLVADALDREGILSPVRARKSGETFGGCRFTRGQIYAILSNPIYIGEIRHRGKIHVGQHPPLIERDQWDHVQAKLADNVRGVRTVWQASPSILAGRIVDEAGDQLVATHARKKGISYRYYVSRALQHGAGANSNHGLRIPAREIEALVIGELKALFADPLGLVARLRVDMSPHRVGALQEACAQATQTLTGRQRGELTDTLTQVRVLPNRVEIELEPATVAQRLGIESAQGTPAIILTTSVRLTRTGRVVQLVQDNGRAASAAPANEKLLRLIAQARTWWGILLAGDMTIEKLAAREGVTPSWVTRVVKLAFLSPAVIEGILAGTTKAGLDAAILTATDGVPAEWQVQAQRYLADRA

SEQ ID NO: 1614 - protein, 508 aa, unidentified
  source 1..508: note = uncultivated organism
MLTETQTNGALALEQKDRVIIIPAQDEITARKLRVAAYARVSSSSEDQLNSYRAQNQYYSELISNNPDWEMVDIYADSGITGTSVDKREDFKRMMADCRKGKIDRILVKSISRFARNTKDCLAAVRELKELGVSVLFEEQGIDTARVSSEMVTAIMASLAQKQSESISGNVKWGVQKRMQDGTFIPSYLPYGYRLVNKQIQINDAEAAIVQKIFSEFLAGNSTEKIAEALCAYKIPCKNGKVQWDSSSIRYILRNEKYTGNSKWQKFYTPNEFPFRCKSNHGEASSYWAENTHPVIVSENEYRLAQELMERKSQKIAKRHDKPYPLRQKIYCGSCNSVFRRKEIGTTVYWVCLGHDRSSGCTIRQIPEETINAAFCRLYYKLKHHGGPIFSQMLSNLQKIRFSRMLWSEDVISLNKKISDILSQVQFLTQLQQAGGVDPDSERQFHIEADYFIDATGDGTVSAKAGVPFSVGNGNHETLGNSILYITPTICHILRRSSAAAGASSTNG

SEQ ID NO: 1615 - protein, 530 aa, unidentified
  source 1..530: note = uncultivated organism
MEWAKVLWTSLAMNARAVVTAQTLRCAIYTRKSSDEGLERSFNSLDAQREACAAYIKSQAHQGWVCLSETYDDGGFSGGSMDRPALRRLLADIQAGKIDTVAIYKIDRLTRSLTDFAKIVEIFDAAGASFVSITQSFNTTTSMGRLTLNVLLSFAQFEREVTGERIRDKIAASKAKGMWMGGVLPLGYDSRDQALVVNEAEAAIVRQIFERYLKLGSVHALCAELERRGVRSKAWLTKAGRPMGGKVFDRGALYHLLQNRHYVGEIRHKERTHPGRHPAIVETKLFEAAQRKLANNRVKRRERPTRASAAPLGGKIADHKGRPYSPTFSIGRAGRRYAYYVLSDLQQGLKTSAAPDAPARLPAAALEAAVLAHLRRLADRPEASWAEIGPMLRRLEVRPKEARLLLEGGRLFGADHPELALEDLRSRLNPGERAVMSGGGHPTVTVAIPGKLQFRGGGAWQSEPAGRSRIDPVLVRALKAAHRILGEAGLSPAAVPANGRFKHGGRTKELRSARALCRALATTAVITETQ

SEQ ID NO: 1616 - protein, 550 aa, unidentified
  source 1..550: note = uncultivated organism
MARRIRCAIYTRKSSEEGLDQDFNSLDAQHEACAAYVASQKAEGWVFVQTRYDDGGLSGGTLERPALRRLLADINAGAVDQIVVYKIDRLTRSLSDFAKIVDQLDAAGASFVSVTQSFNTATSMGRLTLNMLLSFAQFEREVTAERIRDKIAASKKKGLWMGGTVPFGYQPAGRSLKIDETEAPIIRHIHALHLDLGSVRAVAERAEEFGYRTRLRPSTSGTTTGGTPFSRGHIYQILTNPLYAGRIRHRDKVYEGQHPAIIDPATWDALQERLSAEAARARGRSNAVERSPLVGKLFDETGDRLTPSHSQKNGKRLRYYISRRLVTARRQKHADAWRLPARELENGIARVIRDHLRNPTVITDLIRNLTASEIPNLQEKLLRVSNVFAPDGSADAWAPLLRRADIQQGSIQIRLDRKVLTERLSITPGRIEDAARHITASFQMQRRGVEARIVIGTATPQVDPVLAKNTLTAQRWYAAVKAGSSFGDLATREKTTTSRIQQMIGLAFLAPRLLDQVAAGNQPVSFTSEWFKRRQLPPDWGEQQKIVGGL

SEQ ID NO: 1617 - protein, 516 aa, unidentified
  source 1..516: note = uncultivated organism
MKSPAPTLRCAIYTRVSTDHGLDQEFNSLDNQREAAEAYVKSQAHEGWRCLPDRYDDGGFSGGSMERPALRALLEEIRAKRIDVVVVYKVDRLTRSLADFAKLVEAFDAHGVSFVSVTQAFNTTTSMGRLTLNVLLSFAQFEREVTGERIRDKIAASKRKGLWMGGVVPLGYKVKDRKLVVDVTEAQTVRLVFERYLALGSLPALQRELREQGIVTRSRTLSSGRVVGGVALTNGPLAHLLRNRVYLGKINHRGQSHPGEHDAIVTTDLFDAVQRRLTENLGARRRAYTHSDALLIGRVFDDRGNPMTPSYAVKQGKRYRYYTSSALIQGRREAAGSIPRVGANEIEAAVIEALRARDADPETSDRDLVHRSVARITIGKDRLEIHLAEEEQSMVLVPWSPQPFRRKRELIVPDRSETDQPIRPMKAQGRARLLKAIAQGRAWLADLTSGTIVGTDALALRERCAERSIRRTLSLAFLSPTIVQAIIAGQLPRNIGVQHLADLPPSWRDQQATLGF

SEQ ID NO: 1618 - protein, 540 aa, unidentified
  source 1..540: note = uncultivated organism
MDKKELFHVGIYLRLSRDDITFGRAESDSIRSQRELTKRFVCRHSEMQIYDIYVDDGYSGVSFDRPAFVRMMEDVAEGRINCIVVKDLSRFGRDYIEAGRLIQKIFPAFGVRFIAVTDHYDSFTADDNETSLVLPVKNFVNDSYCRDISSKVRSHQRIKRENGEFIGAFAVYGYRKAKKDKNRLEPDEYAAQMVRNIFAWKLSGMSACAIAETLNEMGVLSPLEYKKSKGENFCSGYATRIRAEWSSVTVQRILSNEIYTGTMVQGKSEKINYKLKQCREKPREEWVRVEHTHTPIVTREEFDRVQKLLASDCRAVAGQKRADAFSGFLFCGDCGQPMIRRRNTYKGTEQISYICSTRNKGLGCTRHSISEKTLKDAVRDGIRLFMSLAAQDDGHAGERLREETLVELERELDRICAQEERCASVQNGLQEDLKNGVLTQEDFRVFQNIYRERHAKMKETVRRQREVICAFREKAAHSKKKIEYPPEFADTGRDELLAFVGRIEVYEDKRICIELKCKDLFVGEEPDGDLCSRNLRQTVR

SEQ ID NO: 1619 - protein, 558 aa, unidentified
  source 1..558: note = uncultivated organism
MKKRIRILLRVSSNQQLEADGDLTVQRALVTEYIQRHPEWEFDGKEYFEGSNSGYKNSVEDRDILQEALQDAREKKYDILVVYKDDRIGRRMWEVGAYIMNLKSYGVDVYTVKDGCISANFDDVMGQVMLALRYGVAQKSSADTGLRVKDTAQKLVQAGRFMGGAAPYGYRLVLSGELSKHGRALHKLVIIPNKAEVVRHIYDLSLRKEFGSAKIARTLNESEYYKSLAPNDVWKGGTITSILTNPIYAGHVAYKRRERVNGKYHRLSNENWIKSNEADENIKIIDGDMWDRTQDKRKQRKEKFTKKLENQNVTVIGRNDGMLPLVDVLYCGYCGCKMVNGSKYSYWTIKSTGERRTKKIPIYKCQDAWNGVPHDKKSQFKAEEIDPIIFDCLSEYIEKLQENENIFEQVQEKQSIEKKAKEANIKKEEDELNKILKDIETMESNIPSAMREEYFLSLEKLSSLLKKSEEQAELQKQVILNKKLELQNMNVTASEWESLCTNLPTWREVFLSADVATKRALVNKLIERIDITNEQMVVRFKISLSEFLQHRIGSDSVV

SEQ ID NO: 1620 - protein, 527 aa, unidentified
  source 1..527: note = uncultivated organism
MSTQRQPTATPASLAEIKRCAVYTRKSTTLGLEQDFNSLDAQREACEQYIRSQAALGWQLIPEQYDDGGFSGANVQRPAFQRLMLDVEAGKVDIVVVQRVDRLSRSLLDFAKLMDRFNRASVAFVSVTQNFSTADAMGRLTLNVLMSFAEFEREMIAERTRDKMAAARRKGKWTGGPPPLGYDVVDCKLVVNEAEAALVRRLYHLYLDRRSVVAVARALNAECQTTKHRVSTNGKRHGARKWDKQAVLHVLRNPIPAGLMRCHGELHEGQHQEIIDEITYRRVQNLLDEQCGRRTRWGRNPGYLLTGIIHCALCGQLYTPASTRRGSHEYRYYRCSKRDKRGAEDCAAGPLPAQAIEDFVVERVRDALAAGTLAADVTQAVKERLASQRAALITERQELPCKIAALASEGKRLVEAVSNVNGAGQRLLDAKLQEVGEQLGRLEGRLREIERCLSLLDGCEVEAQWVSRCLADFNQIWDSLSSQNRGRLLRAVIERIEVDEPNADVRTFISDLGWATETISGAAEARL

SEQ ID NO: 1621 - protein, 541 aa, unidentified
  source 1..541: note = uncultivated organism
MSKVALRCAIYTRKSSEEGLEQGFNSLDAQREACEAFILSQQHEGWKALPTLYDDGGYSGGNIERPALKQLLADIDQKKVNVVVVYKVDRLTRSLADFAKIVELFDAKGISFVSVTQQFNTTSSMGRLTLNVLLSFAQFEREVTGERIRDKIAASKQKSLWMGGTPPIGYIGHERTLVIHEEHAKLIRHIYQRYLETKGIKTLKLELDRAGIVAPERVRLSGRIYGGIPISRGNLYQILTNPVYIGKIPHFDQVYEGQHPSIIDMDLWNTVQAKIHNHKEVYEKRIRSPSDSLLMGILFDSEGLGLCPSHSQKQSKRFRYYISQKLNSELKEVAPNGIRIPAQELETLVTNQLCDWLTNTDALLHEFNPEPEQIQNLIAKGNQLADELKNKSKQYQLFRNIVERVEVGHDYLIISINADAILAPNNANGNMLVQLKAQLQLKRCGHNMRLVVTDENKRQTMKDQGLIDHLSKAYRWLSLITSGKVQSIREIAEAEKVDPTHVTRTINKAFLDPEIMRAILNGTQPSHLNLRYLKTVSRTTQ

SEQ ID NO: 1622 - protein, 516 aa, unidentified
  source 1..516: note = uncultivated organism
MIALKTKDTAAMVRCAIYTRKSTEEGLEQEFNSLDAQREAGEAYIKSQMHEGWVCLPDQYDDGGFTGANMARPALSRLLRDIESGKVDCVVVYKVDRLSRSLLDFSRIMETFDRHKVAFVSVTQAFNTASSMGRLILNVLLSFAQFEREMISERTRDKIAAARRKGKWSGGMPVLGYSVCQTKLVVDEKEAMIVRQIFDLYLEHQSLLDVVKELNRRAWRTKEWTTRKKTRRGGRQFDKSLLHQLLTNVVYIGKIKYKDEVHEGEHEAIVDAETFTQVQALLSRNGRSGGRAVRNKHGALLRGLLRCAPCKCAMSHSYSVKGNRHYRYYVCTRAQKSGWQECPSPSIPAGEIERFVIDQIKCISQDPALIKDTVASAHQQAKSQLERLAAERSNLLGRLRDDHAELAELSITSPGDPRLADAHDRIRDAERQVSEINDELATLQAGLLDEAEVTAALADFESLWTGLSPREQARVIELLVERVSYDGNGGNVSITFRTSGIKTLADELATRQELAT

SEQ ID NO: 1623 - protein, 506 aa, unidentified
  source 1..506: note = uncultivated organism
MRSAVHHEENQTKPVGIWIRVSTEDQARGESPEHHEKRARDYAALKNWRVREVYHLEAVSGKSVMGNPETVRMLADIASGHITGLVFSKLARLARNTRELLEFADIFLAQGADLISLHESIDTTTPAGRLFYTMIAAMAQWEREEIAERVAASVPVRAKLGKPLGGQAPFGYEWKDRQLVPHPKEAPIRKLIYELFVQHQRKKTVARLLNDAGHRTRSGARFSDTTVERLLRDPTAKGERRANYTKSLGDGKRWVVKPESEWVITAVEPIISEELWEQCNHSLQDRSNGRKPARKPVHLFAGLAYCFCGQKMYVPSNSPKYICYECRNKIPVADLEGVFHEQLKSFFFSSADITAYLGQADQTIKEKQELLGTLEAEAQKTKREMDKLYNLYLADEISREGFGGRYHPLEERMKQITDRMPHLQGEIDFLKVQYLSSDEIFTEAKDIYSRWLELEQTEKRKIIENILEKIVIGKEDVTISLCYLPSSAEIMAERQRNVRGSWRRRA

SEQ ID NO: 1624 - protein, 511 aa, unidentified
  source 1..511: note = uncultivated organism
MLIHVAAYCRVSTDQLDQANSFEAQKRYFKEYIERQRDWSLYEIYADEGITGTSTKKRTQFNRMIQDARSGKFQLILTKEVSRFSRNILDTIAYTRELKALGVGVLFVNDGISTLDPDAELRLSIMGSIAQEESRKTSSRVKWGQTRQMEQGVVFGHSLLGYDVQAGRMTVNPAGAEVVRLIFRKYVQERKGAWTIARELQEAGIPNPSGRTAWRGTVVLKILRNEKYCGDLKQKKTFTPDYLTHQKKYNHGEEAFVFLRDHHVPIVDRETWEEAQQELSRRSQHGKRCSGHGTRFPLSGKIQCGLCGRSFVSRGRTRKDGTKYRTWRCGTVGCDVGYQLRDDTALELLRQAVSALPMDWDALTQEVTGAVLEALERSGAHRQADGVRLQKELAKLREKKTGVLDAYFSKQISTGDMKLMNEEYDRRIAELTAQIDTAENESEARDTAELEAELRAMVEDIVSGHGGSDRVYGRLLERITVYPGKQLAVKLKHLPQTWVFSLERTFGPAVH

SEQ ID NO: 1625 - protein, 521 aa, unidentified
  source 1..521: note = uncultivated organism
MRIAIYTRKSIYSDKSDSTQAQYNIALDYCSTHYTDYEVLRYEDEGYTGANTDRPSFNLLVNDLCDKKIDVLVCYKIDRLSRDVKDFSNFFSMLQKHNVEFVSIKEQIDTSTPLGRAMMYICSVFAQMERETIAERVKDGMIELSKSGKWTGGRAPLGYKRKRITMSGKNHTILVEEIEGSKILNYISDIFLEKNYSLNGLEKYFRSIGFTTATGAYFSSSQIWKILSNPVYCTADSAAYDYFENLGCIMAAERDKFDGTHAVISYGRTAGGRKKPHISNSPDKWIISVGLHKPLWTSNKFISLQKRFNNNTINKTRKYKVGILKGILKCSCGWTMRVQHKVDKIYNKVYDNYFCQQRNRRGIKFCDCKFVRVENIDSAFINILKEIAVDKSIIDSYCSKQQDISLYYRSRYDIQRDISSLEKKISNLVESLAINSNAAKYIALEIEKLDKQLSGLKYELLELQSIENKKKKSVQDKTKKYEMICDIVNHLDTVDYDSLNSALKELVKECVWDGTTLHVKL

SEQ ID NO: 1626 - protein, 507 aa, unidentified
  source 1..507: note = uncultivated organism
MPTVTVIQPTIAAEQNQKIRCAAYCRVSSNSEDQINSFIAQTRYYEKAFENSETEQLVDIYADEGITGTREDKRDEFQRMISDCRKGKIDRIYTKSISRFARNTRDCLKNVRELKSLGITIFFEKENIDTANMTDEMMITIMGGLAQEESVSISKNLKWSYQKRMKAGEYITSCAPFGYVLSDRQLYVNEDEAKIVRDIFNYVLCGHGIQSTVDYANKKYPIKKWTHAGIAYMLTNEKYIGDSMLQKYYTPDIVGSHCRENKGGADKYYYEHTHQAIISTESFQAVQSLLQSRRVNRRPITEYPLSKKMKCSNCKCHFKRRVNRGVVYWICVNHNINSDRCSIRQIPEKNVYSAFIRLCNKLFYNHKQILSPLLTALQDLKLKKFSGKTQVMDIHKEVAKLREQSHVLARLKTKGFLDEAKYIEQTTELTAKINKLQAELKKFTRSDDEDETLDQIEMLIDFFERRDKPITEFEELAFESIVEKIIVINQHELEFHLIGGLKFKEKI

SEQ ID NO: 1627 - protein, 557 aa, unidentified
  source 1..557: note = uncultivated organism
MDTKKKTIRCAIYTRKSCEEGLEQEFNSLNAQREACESYIKSQQHEGWVLVEKQYNDGGFSGGTLERPALKELFNDIEAGKIDTVVVYKIDRLTRSLMDFSKIVELFDKKAVTFVSITQQFNTTTSMGRLTLNILLSFAQFEREVTGERIRDKIAASKKKGMWAGGSVGIGYKLENKKLVPDIDFTQTVRIIFEKYIELQSVKLLREYLVKNNIRTRTEKNFSKGNLYHILQNKVYIGLITHNDKVYEGEHQAIINKKTFEIVQSLLAGNKVKNKYKENSKNPSLLAGKIFDDNGNYMSPSHSNKNQRNYRYYISQAILQFRKNEAGSISKIPAGEIENFVINETSRFVFNIKNIQQYFENFEIHKQKDILDTLKNLETNLEGKLSPYFIRVVINKIIIHSEKIEIILCQDQLIKALNSLTYGISLPEERKKEAENSITLSIPIQIMQTPRKGSVVIISESNQKEPNINSQLVKAITRSHYWNNLLYSGKAKNIPDIQKLENFNDGSYISEILKLKFLAPDITESILNGNQPIDLNIKKLRRIKTLDWEEQRKFINA

SEQ ID NO: 1628 - protein, 601 aa, unidentified
  source 1..601: note = uncultivated organism
MTKKQSKVTSKSPKYKYKLGMYVRLSPSDEIRAEGSLISHPQRIRSHVDYKNSQEPFWGEVVETYTDADYSGKDTNRPGFRKMLQDLRYGHINAVIVTELSRISRDVKDFCNFWELLKQHDATFISLKENFDTTTPIGEMMVIQAISFAQFERKTIVNRIKDGARARAERGLSNGGVKVLGLDPHKHKKGHLIINEKEAAIVRHITQKFLELGSLAKLRDYLNDNGYRTKSYVTKSGKKSGGSVWSRQTLLNLLTNVKLIGKIPVNSINKEYDQTELTPEHQYRLVDAVWPAIIDQANFDQIQERLKINKRFQKRHKHTYRLSGLIECSLCGRDLAGASANGAKGKYYYYQHSRNFSTKGKHKERCPLERIPAVRLEEAIVDRIVELAKDRKLLEQLLEDAKKSSVEITKDLGSMIASKTQELGRLERMIDNLVTSLAELPRGVKPGTILSKVEKLEKEKTNVEKSLDGLKKEKNRKGGGVIDMEQAFNLFKIFNRDFPSRPAHEQRDILRDVIKKVIVSQENIKILYFGAGKEETFPRGGADTPETAGSDRSESPKADSGRSENCTMNRSGVRSVSRMVGTAEFESATSSMSTTRSNQLS

SEQ ID NO: 1629 - protein, 501 aa, unidentified
  source 1..501: note = uncultivated organism
MAANPVRSLRCAVYTRKSTEHGLDQEFNSLDAQREACEAYIKSQASLGWKLVPQHFDDAAYSGGNLARPALKRLLREIQLGRIEVVVVYKIDRLTRSLADFAKLVETFDAHSVSFVAVTQQFNTTTSMGRLTLNILLSFAQFERELASERVKDKVAASRKKGKWTGGTPPLGYDAKDKKLAVNKTEAQTVLTIFQLYLELRSFGKLVGELDRRRIVTKRRDTKVAKYRGGIPFTYGPLAYLLKNRIYLGEIHYGGKWFKGEHEAILDRETFDQVQQLLQENNVRRGTKFSESGALLMGKLFDDKGNRMGPTFSGKNGVRYRFYVSTALRGRKDKAGSITRISAPEIENLVEAEVRNKLEADEITNEELFGHINRVTISVNKIQIALGAKKRPIEISWKPKQSVQAPIQLATSETKADPKLLRAMVRAHVWLNELSDDRHTSIESLASAAGYNPKVIRQGLRLAYLAPKITEAALHGDMPIRLKQVPKLLPLPWREQRQLTG

SEQ ID NO: 1630 - protein, 653 aa, unidentified
  source 1..653: note = uncultivated organism
MKKKEKCYLYIRVSTAMQVDGYSLDAQKDRLVKFAEFQGMEIVREYCDAGKSGKSITGRPEFQRMLQDVADDRDGVSYILVFKLSRFGRNAADVLNSLQYIQDYGVNLICVEDGIDSSKDSGKLTITVLSAVAEIERENILVQTMEGRRQKAREGKWNGGQAPFGYLLDSKNSTLIVNPEEAEIVRLIFEKFVHTDMGADSISKYLNQHGYSKKKLREQEVSHFTRSTVLKILDNPVYAGKIAYGKNATEKVKGTRDQYRRVKKEEYLLAEGLHEAIIDQETWEAARAKRKATGVKWNKTHSLDHEHILSGILKCPVCGSGMAGTVRRRKNKKTGEYKDDFYYRCQHRKKIDEEHFCDFKPSLNQDELNGEVVQIIRDMVAMEKFRDFIQDKLHEKVDVSALEAEREQMKGKLMQVVGAKKKLVLMLDKLDVNDRHYGRKYQDMQERLDNLYDRISELEEMLSDVETKISASCGEQITGKQVYQFLLEFDKIYGKMTDLEKKEFMRTFIKTIELYPERDDSGRIIKQISFKFPVYYNGCEGDTIRLLNENTVETVVLLSKLNTKQHIEVELNLDELDLTAAESKATYDEIKAYVLEKYGLKVSSLYISQVKRKCGLDVGQNYNLSKKEDAKVPQCPPEKEAAIMDALKHFHMV

SEQ ID NO: 1631 - protein, 573 aa, unidentified
  source 1..573: note = uncultivated organism
MKVAIYSRKSKYTGKGDSIGNQIQMCKDYIENLYKNKKIEYSIYEDEGFSGKNTNRPEFQKLLNDIKKEKFNVLICYRLDRISRNVADFSSTLDELQVYGVDFVSIREQFDTTSPMGRAMIYIASVFAQLERETIAERVRDNMIELAKNGQWLDGSPPLGYSRKRETCYDENGNEKAISFLVQEPDEVKLVKLLYDTYLRLGSIHQTERYLMNNGICAPSGKLFATSTMHKILKNPLYAKSSDEILKYLEDDGINVFGSPDGIHGILEYNKTSVIARDGKKTTPFKDKSEWIAAVSKRCEGFIDPDTWLKTQKQLKTNSALSPNLGKTNNALLTSKLKCKCCGSSMGITLGRRLNETGLCKVYYRCNLKRRSSGHLCNSKNLIGDKVDECVLDSLVEMAKNKQAFLDRILKSKKENKKLKEDKLKKSTLEKQLANKTKQLNGLLDKLSVADDLLDIFMNKIRSLKTEISQLEENLKSIGENIENNSSELYDIEFINAVLDKCVNIKNESIESKRRIINFLIEEIIYDAETELLEIYPIGSGGSKKKRYNTFIKEITNDPLLLHFYSRTSWAAN

SEQ ID NO: 1632 - protein, 526 aa, unidentified
  source 1..526: note = uncultivated organism
MARNSASRSAANASIVPAENRLVRCAIYTRKSTEEGLQQEFNSLDAQREAAEAYIASQRGEGWQVGTDHFDDGGYTGGNMDRPALQRLLAAVESRSVDCVVVYKVDRLSRSLMDFARIIEVFDQHSVSFVSVTQQFNTTTSIGRLTLNILLSFAQFEREIISERTRDKMSAARRKGKWIGGHPVLGYDIDPKGGRILVNPQEAEQVRTLFGLYLELGSLLPVLQEAERRGLLTKQWTTEDGKVRGGQRISKGTLHGLLTNAIYTGMVDHKGTLYPGEHERIIEQNTWDRVHETLRRNNADNGASLKNKYGALLRGLLFCVPCGTPMVHTYTTRKSKRYRYYVCYHAQQQGWKNCETKSVPAQAIETAVLDSIRRLGTDPKLAEAVAAEALEQMAQHRRAIDQKSEIQRKRLRQLNQDLAKEAADTSVDSGARFERMATLQREIETAERRLVELTAERSDLDRDHLNADDLRRTLAEFDAIWTTMATKEQEQMIHMLVAKVGYDGRTGKVTVNFSNKGAKELCQGKC

SEQ ID NO: 1633 - protein, 547 aa, unidentified
  source 1..547: note = uncultivated organism
MFSNEPTIKRAAIYCRVSTIMQGEAEYSSLNAQEDQLKAYCKGKGWEVVKVYKDIKSGKDLERNEIQQLLKDAEEKLFDIVVATKIDRFSRSIVDFYEFSERLEKLDVYLASATQPIDTSSSAGLLMLDIFLAFAQFERNIISERTREAMTARAIKGFYTGGHLILGYDNLKGELKINENEAELVNRIFLYYLKEPSTTKVANRLNEGGFRTKSYTTKKGVRRGGKQYAKQDILRILRNKTYLGKIPWKGEVYEGIHEAIVDQQLFDNVQKKLDKSKKDLQVIRRTKSPLSLLGITKCGLCGSNLTSQAAKSGRHHYYKCSKKIHGGAAQCSSKDLPAEVLENCIYDLMSFIISEDEFFDAIYNQVKFNTQEEVAEYDKELSKLKSNKTSRESERKNIFNAIKAGDRLGAMKEVENELEKIETEIVFINSQLEDLEKKRYLAANQKIEKEKLRNILLYYVKIYPTLTLEDKSRFNQLLFQEIISNFNQNEEDGTIIIKMRGDGKLEKSWNKIKNANQLTPVRTSDGLGSASKTRTCNPSVNSRMLHH

SEQ ID NO: 1634 - protein, 560 aa, unidentified
  source 1..560: note = uncultivated organism
MAANQDAVAIYSRKSRFTGKGESIGNQVELCRAYIRTAFGDACADGASVFEDEGFSGGNLNRPGFRRMMQAAREHRFRAVVVYRLDRISRNISDFSALIQELGRLGIDFVSIRESFDTSSPMGRAMMYIASVFSQLERETIAERIRDNMHELAKTGRWLGGTTPTGYASQAVRTVTVDGKSRRTCKLRLLPAEADLVCEIYDLYRQTDSLAGTEAELLRRHRKTKNGRNFTRFSIKGILQNPVYLIADRDAYRYFMEKQADLFSAPEEFDGVRGMLAYNRTDQEKGRATVYRPISEWIVSVGQHPGLIPAGTWIPIQESLQRNKAKGYRKPRRNEALLTGLLWCACGSRMYPKLSGRVTAEGKSVYTYVCKMKERSRRSLCNRHNADGNRLDAAVVAQVAHLKEAEDHLLSCLEKGKGVYAGRRRESDRRLEELRRQQTALRRKLEALVDSLADLTGSTAALPVKERIETLQAREEALQCRIREGEDGGQTLDEAEFDRLRRELAFFRKSIDGMTVPRKRAALGALVYRVVWDGHGARVVLQGTTDGEEAAETPWGEDSK

SEQ ID NO: 1635 - protein, 564 aa, unidentified
  source 1..564: note = uncultivated organism
MTKSSTRCAIYTRKSSDEGLDQEFNSLDAQYEACANYIASQRHEGWKMVKERYDDGGISGGTLDRPSLDRLLADIDAGRIQMIVVYKIDRLTRSLADFAKLVERLEASNCSFVSVTQAFNTSSSMGRLTLNVLLSFAQFEREVTAERIRDKIAASKKKGLWMGGVCPLGYDKDPDPMSRTLVVNHEEADRVRTLFALYDEHGCLRSVERETIRLNLRSKLQVFKTGRVAGGKPFSRGQIYHILRNPIYLGRIRHKDKTWPGQHRAIIDEELWDRVQEKLIAASRRKRGGTQSNDGSGQTKGPPLLTGKLFDETGDRLTPTSTTRRGRKLRYYVSNRLIAGGTDPSGWRLSAPNLEKQIATALADHIAAQASNYALTKSPDLHQAKPSQKCATAIITSLRSNGLGQYIDLIDSLRLHPKILRIKLDTKGLAKALGIKAEELSEELIEFELPWQRKRRGVENKLIIGDPEPEPDLTLIRMLVKAHQWVQEMKDGIPLKQIANNLGVTPAYIRTRSKLAFLSPQIQKAIVKGTLSPEFTTNQILSIKIPRDWQLQNTLFGVSIFPVS

SEQ ID NO: 1636 - protein, 525 aa, unidentified
  source 1..525: note = uncultivated organism
MKASRRGIPTASPSVTRCAIYCRQSVEERGGNGFGSLEAQREKGETYISLYPEKHWELVTTEYADPGFSGATLDRPALTRLRSDIAEGKIDCVVVYRSDRLSRSIRDFLELMEEFDRHEVTFVSVSEQFDTSTPGGRMHRNMLLMFAQYERELIAERTRDKVHAARRKGKFTGGGLILGFDRHPDGGRLVVNETEARRVRKIFRLFEEHPSLVDTVQELNRRGWTLKQWTTKEGREYGGGPFDVHSLRRLVTNHAYVGKVFFGGTVYDGEHEAIVDQETWDRVQELLKNGRRGPRRPGSRCTSLLAGILRCAPCDAAMTPTYSQKGRVRYRYYLCLKAHLRGWDSCPSKSVSAKKIEAFVVDRIRGVGRDSELVARTVEEARKQLAARKAELESEAKRIRGDLEKAHTELRNTLRAVPSSGRPGHQDAPVREEAIRALEDRLRAVEEEATALEGQRIDPADLQAALAAFDPVWSHLEPAEQARVMQLLIERIDYDGGTGNLAITFRPGGVRTLAAEAQATEKVGP

SEQ ID NO: 1637 - protein, 502 aa, unidentified
  source 1..502: note = uncultivated organism
MNNRIDAIYARQSVDKKDSISIESQIEFCKYELKGGNGREYIDKGYSGKNIDRPRFQELIREIEKGNIKRVIVYKLDRISRSIIDFANMMVLFQKYNVEFVSSTEKFDTSTPMGRAMLNICIVFAQLERETIQKRVTDSYYSRCQRGFHMSGAAPYGFKLEPHVMDGIRTERLVPDPEKAEHIKLMYEMYAEPKTSFGDIIRYFSEAGIDTGGKELFRSTVSWFLKNPAYAQSDLNLYEFFKGQGANVVNEAADFAGTNGCYLYQGRDVATYKKVSLKDQILVIAPHEGVVSSDVWLRCRKKLLSNPAFPSGRKAKNTWLAGKIKCGRCGTSLSFNATAGDIHYFRCRRRADNGKCEGCGTLQTHKVEDSVYSQMVERLREFQTVTGGNYTKTNPKLTALNVELAKVDAEIGNIIDNLTSANTVTMSYVNDKMVELDAKRQSLLKAIADMTAEAVSPEKLERISGYLQDWDNTSFEERQYVADGLIYSVKATSEKLSVEWKF

SEQ ID NO: 1638 - protein, 579 aa, unidentified
  source 1..579: note = uncultivated organism
MSSEPKPIIRCATYTRKSSEEGLEQSFNSLDAQREACHAFITSQRQEGWRALPARYDDGGYSGGTLERPALQQLLKDIEDSKVDTIVVYKVDRLTRSLADFAKIVEALDARGVSFVSVTQQFNTTSSMGRLTLNVLLSFAQFEREVTGERIRDKIAASKRKGMWMGGRVAVGYDVKGRKLTVNPEEAKLVRRLYELYLQLGCVSKLKTQLDREAIKSKRRTSAAGNCSGGTLYSRGALYRILQNRIYIAEIHHRGQHYVGEHEAIIPRELWERVQAQLKSDNQGRRNGLKGNSPSLLVGLLQDAEGNRFTPSHTLKNGRRYRYYVCQGKIDAHGARGKSSRIPAHDIETQVSLRLQSFLQSTGQLIDRISEPDDDPALTHKLMVAASKQLERLRLGSPSAVVDFARKVLSRVVVQPDEIEVEVGKRELRAALTGHSPVAPVSAVPDNMISLKFKARIQRCGSEMRIIIRPDLPGHLPTALIPSLLKAVARGRQWYEWVLAGEVWGRRSIAQRVDFDERHVAQILESAFLAPDIVTAILDGRQPSRLTARKITRHLPLSWVEQRRQLGFPPVPLATHRVC

SEQ ID NO: 1639 - protein, 555 aa, unidentified
  source 1..555: note = uncultivated organism
MRGMAMIHKCALIARVSDPKQARVKEGSIPTQLDKMKSHIDYKNQTEENTNRWELTRTYILEGISGSKSIQSEEFQKLYIDIQSGAVNTVMCTRLDRVSRSIRDFFVFFDILEAHKVDFVSVTQQIDTTSFYGRFITVVLMALAELEREQISDRMKTSKKARARKGRWTGGTHPFGFDLGANPGELVPNPEEAAVVELMFQKYLEWGAIRKVVAFLNEQGYRTKTRASKHGTTRGGRLFTFETVRRILRSREYIGLLSINKEKMFNPMDDSGEDEQYEEVEATWDPIIDRELFYEVQALMDKGKTSGHSVVTPQRHTYILSDVVYCGSCLEKMNAESTKKASDKRYFRYTCRNKDCKVSSIPAKKLEDTVVKCLSELAFKPDVLARIIEETNARLTEEVPRLEKEIKTLKNTLKRVLSRIDSLVYTHSGVDKEAQRVIAEKLEEKSRQKASLKENISVLEARAMEYGSYRVATEAVIASLDRFSGSIKTLNPSEQKKLIGSLVAKIYWDGKFGLRIGIIGNQGHTASTTFTKTQKFAERPGWYARRESNPKPSGP

SEQ ID NO: 1640 - protein, 569 aa, unidentified
  source 1..569: note = uncultivated organism
MAKAVTRIRCAIYTRKSSEEGLEQSFNSLHAQREACEAYVLSQRHEGWSVIAAHYDDGGFSGGTIDRPALQALLVDISAGKVDVVVVYKIDRLTRSLFDFAKIVEILDSNQVSFVSVTQAFNTTTSMGRLTLNVLLSFAQFEREVTGERIRDKIAASKKRGMWMGGNIPLGYDLEDHKLFVNKKEAETVKTIFRLYAELGAVRKVKSEIDRMKFRTKTRTLETDVTRGGLPFRVGHLYTILRNRLYRGEIQHKGSIYAADHAPIVDQALWDRVQAQLASNAAVRRSGKSSKEPSLLAGLLFDSKDNRMTPSHAVKSGKRYRYYVSNNLIAGDNRGRGGDRGEGLRIPAQEIEGHVIAAIAIFLADAQKVVAELCPGDTLPSVVGAAMRKAVSFSEVLKVGCSRVHYESIRAVAARVQVGNNTICVTLNRRSLAERLSIPVDATSSRVEVPLQLEIPAELRRLGKEKHLIVPTLLPKTHRDPSLIKAVVRAYAWFEMLKSRSVKSITDIAQAEHLPRTYVSSIIPFALLAPDITEAILEGTQPIDLSLDRLMNAPLPIDWVEQRSVLGFK

SEQ ID NO: 1641 - protein, 573 aa, unidentified
  source 1..573: note = uncultivated organism
MNSKDNSRQRVANYARVSSQEQAVEGVSIDAQVAALKANAKIQGWEIVNEYIDGGYSGGIDDRPALKRLLADAKKKRFDIIAVCKLDRFFRNLRLLLNHLHGLEQLGIKFISTQEGLDTSTPYGKFAVQMMGVIAEFERGRIGERVRDSRRYLVGNGKWPGGKTLYGYRWLAVDKKWEVVSEEAEIVQKIYHLYLDQKKGMDTIARILNDDDSHTRNGNPWTTGTIRSVLIHSAYKGQHPMGIPVPVIIDENTWQLAQQKRENARTLTTDPKGWLLQGMCYCGQCGHVLKCLRKRRQDPSYYACRGRIQPRIVQDGDKRCDLPFIRADWLEWGVWRKVKEVLNDSDKLIECVNKALLELEERKAHIGAEIVDVDGKLETLKAKMERLGMVFADGAIEESAYKSKLKQLKKQEVVLVKCRHNIDPLELTELAELEGRIAMVQRVLSKGELSVTEFGIFGEKDNEYIPVGFNAWRGCDSELTIGEVTEKDYFRLEGTDMYMRGIDAPPGFWECGDYGEQSKIIKKNMRAILQLFNIRVIVFPDRVEIKGTIPQQVLYQGEVPEPETALFISSPSP

SEQ ID NO: 1642 - protein, 561 aa, unidentified
  source 1..561: note = uncultivated organism
MADKVRCAIYTRKSTDEGLDQGFNSLDAQREACAAYIASQRHEGWRPIKTRFDDGGLSGGTLERPALRSLLAEIEAGRVDMVVVYKIDRLTRSLSDFAKLVDRLDAARCSFVSVTQAFNTSSSMGRLTLNVLLSFAQFEREVTAERIRDKIAASKKKGLWMGGNPPLGYDPHPDPTRRELVANAREAETVQSLFKLYLVKGNLRETAQTAKELGLRSKLRPSRKGAARGGHFMSRGHIHCILRNPVYQGLIRHKTTTYPGKHEAIIDEALWEKVQSMLQSAAMTRRGMSLNSGPFKETQAPLIGRLRDETGDRLTPSHTNKAGRRYYYYVSNRLIMGTRDPTAWRLPARDFERSLGRGIADYLQQHAKAQTLLANPDLRKTEHISQCLKPMCDALATGDAEVLRQLVASGQVQVSNLKIDLNLEFLAASLKQAPKSLADNIAHLMLPFECQRRGVGMKIVTGTPCLSPNPVLLKALRNAHRWADRLRSGISLAALAKETGHSVRRLSRVASLATLSPAIQTAILDGAQPADLTLDKLLKTDWPLKWPAQNTLLGLPTERGA

SEQ ID NO: 1643 - protein, 563 aa, unidentified
  source 1..563: note = uncultivated organism
MTRSRTEQPNGKIFVIYSRKSRFTGKGESIENQKELCRHHIASNYGVDNAEKALVYEDEGFSGGTLERPQFKKMMQDSKKIRFTAIVVYRLDRISRNIGDFAKLIEELKKNGIDFISIREQFDTSSPMGRAMMYIASVFSQLERETIAERIRDNMHELAKTGRWLGGVTPTGYESESLSDITVDGKVKRSCKLRAIPSEMQTVRTIFEKFSETSSLLKVGEFLSENGFKTKQGKQFSRFAIKAILSNPVYMTADSDAYKYFTQCGFELFSDKSEFNGSHGVMVYNRTHQTHGKAHQMNAPKEWIVSVGKHIGAVSGDEWVAVQRKLEQNRSPTCHKPRTETALLSGILICGSCLSRMRPKRSQRTTADGDPIYTYICTSKEKSRGTLCSQKNANGNSLDSKIIEKINCMLNYGSDYARQVLQIKKSVVSKHELHDSQIAKAKEQIKENGETIRSLVMSLAKASGSSAEDYIIKQIDELNEKQRTLKKQANIEEFSESQDGFDDSDFLQLCQNLSSFDCIIKKMSLVQRRDTILSVVEKIVWNGEDADIYFIGSDKMPLCEYSE

SEQ ID NO: 1644 - protein, 558 aa, unidentified
  source 1..558: note = uncultivated organism
MKDKLFYAAMYLRLSRDDISGDGGKPASVKNESESIANQRELIKAYIREQPDIELYDIYADDGFSGSNFDRPEFKRMMCDIEAGRVNCVIVKDLSRFGRDYIESGRYIQKTFPALGVRFIALTDHFDSFTADTGESAIVLPVKNFINDSYCRDISTKVKSGLDVKRKNGEYISPFAVYGYRKDVENRNRLVVDEYAAGIVRKIFAWKIGGMAVAAIAEQLNGLGILSPKEYKKSLGLKYSSGFSGAGRSLWGGTSVKRILTDEIYLGHLMQGKTQKVNYKVKKSVEKPKEEWVRVENTHEPLVSEDDFQIVQNLLKSDSRMGPGMEKAGMFAGLLFCGDCREQMVRRVNRYKGKEKVYYICSTKNRGEGCSRHSIEEEVLKGLVEKTVKKYANTFLEEKALFDKAKEREEGFEAISAYDKEICRLKEEQDRYYSLCSGLYEDLRAGVVTKEEFERLHSSFKGKAAQLEEAQKKQETLIKEMFKKGVLSAGRLKAFQDCVELKEIDRHTLGSLVKRIYVYEGRRIEIEYYFMDQYRVMLGADTDRADGLQAVHDVGRGA

SEQ ID NO: 1645 - protein, 515 aa, unidentified
  source 1..515: note = uncultivated organism
MMEKNVTFIPPTKTMGSPDTEDQAKKLRVAAYCRVSTDSDEQASSYEAQVEHYTDYIKSNPGWELAGIYADDGISGTDTKKREEFLRMISDCMDGKIDRVITKSISRFARNTIDCLQYIRQLKDMGIPVIFEKENINTMDSRGEILITIMASMAQQESESLSKNVKLGIQYRYQQGKVMVNTNWFLGYMKGEDGELVVDPEQAKIVKRIYREYLEGRSCQKIAEGLQADGIKNGAGSTKWWASNIQQILKNEKYVGDALLQKTYTVNLLTKKRAVNDGAMPQYYVENSQEAIVTKEDYQAVRKEMERRSRLRDADGHRKGYCGTYALTGVLACGNCGSPMRRVVWTNRGRKQAVWRCRDRMEKKECMLPALYETKLHDAVVKAVRQAAGPDDGIISEIEKNALEAVGADAGDIEKELQELQKELVERVDTGKPYNDLSGRILELKEEKERISGIRMAEKERLKRARQLKEFLEGLKDGGLEYRDSLVRNYVEKIAVFPGRIEVTFKTGAEAVVEL

SEQ ID NO: 1646 - protein, 519 aa, unidentified
  source 1..519: note = uncultivated organism
MTRTAKRSTRLREPVSGVKPVRAAIYTRKSVADGLDQEFNSLDAQRQSAESYVLSMQGERWAALPDRYDDGGFSGANTDRPAFRRLMADVEAGKIDVVVVYRLDRLSRSLLDFAQLMLVFEQHGVAFVSVTERFDTSTPMGRMVLNLLATFAQFERETIALRTRDKIQATRKRGTWTGGRPVLGFDIVDKKLVVNEREAEQVRRIFGLYLDLGGVVAVTQELVLLGIPNKRWTTAKGTEQGGGAFDKNSVNALLKNPLYVGDLRAGDAVVNGEHKAIVDRGAWDAVQARLAAQAPSLGAASPKRGQGAKRSPALLSGIARCKCGAAMTPTHSTRGTKRYAYYTCARSVKQGKAACPGSRVAAGILEQFVVDRVREVGRDPAVIDAALAVDRDERGAERERLNVEERAIGEGRSRHVADRRRLLAAVGGRDAPAGLLERVRELDGLVAEADARLPRLAADAAALDAEADAEGLRAALAEFDSLWGTLDAAEQARLLALVLDEVTVHSSEGEAELRFRGGR

SEQ ID NO: 1647 - protein, 550 aa, unidentified
  source 1..550: note = uncultivated organism
MKKLKEEKEITRAAIYCRVSTIGQSEADYSSLNAQKDQLEAYCKGRGWTVVKAYTETKSAKDLERVQLQQLLKDAEDDVFDVVVATKIDRFSRSIVDFYEFSKKLSALDIDVVSATQQIDTTNSGGKFMLAIFLAFAEFERNIISERTKESKEQRAKKGFYSGGHLILGYDNVKGELKVNEKEKELVNRIFSYYLIEPSTSAVAKRLNKEGFITKEKTTKKGNKQGGKGYTRDDILRTLKNRTYLGLVTYNNEFYEGVHEPIIDEKLFNDVQERLAISQTNKQVVRKIKSPLTLLGITKCGLCGSSLTSSSTKKGKHYYYKCSKKTHSSSEHCPAKDLPSNLLEDAAKTLMYSMVTNESFFEAIYHQIRFNNQEEIKKYDEELHKLRSNKGRLEADRQNILNKMKAEAALQDSKLIVDELKKLENNIVMNLTSISFLEKERGRAAEQKITREQLKKIIKDYLLIYEEVNQEDKVRFNHLIFDEIISYFDKDSDDGDIEFRLRGDGKIVKKWTEIKNANLLTGQIRTFEGVSSASKTRTCNPSVNSRMLHH

SEQ ID NO: 1648 - protein, 537 aa, unidentified
  source 1..537: note = uncultivated organism
MARHSTNGNGRPQKPRKPRKPVGIWIRVSTEDQAQGDSPQHHEHRARCYAESKDWEVVTVYHLEGVSGKNVGEHAETKRMLADVAAGRIEGLIFSKLARLARSTKQLLEFADRFKDADADLVSLQESIDTSTPAGRLFYTMIAAMAQWEREEIAERVAASVPVRAKLGKPLGGQAPFGYQWVDKKLIPHPEEAPVRVRIHELFREHRRKKTVARLMTEAGYRTRRGKPFTDTTIDRLLRDPTAKGLRRSNYTAHDGGTRWGYKPEEEWVWTEVEPIMPAELWDECQAILDAQYRPHKKPSKKTVHLFAGLLYCQCGKRMYVPSRSDKYTCYSCRNKVAIDDLEHIFVEQLKGFLLSPDEVDAYVEEANQTLREREQSADALTAELQKVESQIDRLFALHNEGQLPTEGFNDRYQPLYDRQQALQQQLAEAQATLDILRVDTLTSEHILAEGQSLADRWPKLNRDEKRRLVEDLVEEITAGEEEVSFRLIYFPSTTTLQNVANGQRIHHASCSDTACPRLKAWAFRARSTASPRRWRG

SEQ ID NO: 1649 - protein, 538 aa, unidentified
  source 1..538: note = uncultivated organism
MKKATIYARVSTRKQENEHSILSQVAEVKELIEQDGGKLIKEYRDDGWSGAILERPALDELMLDAKNGLFEKVYVYDTSRFARKVVHQMIILDKLKRLGIEVKFKDNSKNNTPQDRFALQVKAAADEYRREEILYNTHRGRLYKAKNGMLVGANAPYGFKYIHKTKERNGYYEIVSQEAEVVKRVFDLYIKYQSLGAVMRHLNERKIPIHFQDTWKSRGKKKIWHQSLVSRILRRTDYMGVAYYGKSVCCEPEKKTKKYTKQVKTARRLRDKSEWLPIKVPQIVDREKFDYVQQLLDKNSRPYGLRKYFSLLGGLGILECGDCGGHIYSEVMKKCRRRIRTYYYYRCRNCDHCIPIDTINKPVWDLVKKALENPKVLKERLNHLREKDSVKTSETLKQKKKELLNEKEKIKNSQDNLLGLFAEEQMSKERLLKKVGEYKEQEKGIDKLLNDIERETKQLAKKNVIIKNLKEFCKLNKAQLQGLTKEKKRELLRFLLEKVIYSAKNNTLNVSGYVPLEINEKTEKLIPMSIWDYSLQPK

SEQ ID NO: 1650 - protein, 513 aa, unidentified
  source 1..513: note = uncultivated organism
MRVPQVKIIQPLEEQVKRLRVAAYVRVSSDSEDQLNSFSVQMEHYTGLIKDNAEWNFAGIYADEGITGMAADKRESFQRLLKDCRAGKIDRILVKSISRFARNSADTISVTRELKQLGVSIYFEKEGIDTADMGSEMLLSMLGAVAQEESVSISRNLQWGIRKRMQKGEYVTASVPFGYSYIDRTLVPNEKEAAVVRDIFQYYISGMGMQEIVNELMRNGIQPPRKAKEWCISDIQYILTNEKYIGDSLLQKKLTVGEFPSRRVKNDGDLSQYYVENSHPAIIEKEVFAQAEKLIEQKRLTGSVHSVYPLSKKLVCGVCGTVFRRKTSGREFDTTTWVCRAHYLNTEKCPMKPVTETEIHRAFCFLYNKLLLHKTVILEGLLQDLQEIKRRDQCSHPDVIMMNRELLESLKQVHFLTQLHSKGVLSTDVYLERRTALDKKTAELQKKLLSSQQTNKLDEVIGQTEKLLSILYEGTPVTRFDADIFEDIVEKIEVSHEAFCFHLKNGLHLLEKR

SEQ ID NO: 1651 - protein, 555 aa, unidentified
  source 1..555: note = uncultivated organism
MKLAVVYARYSSEKQNDQSIEGQLDVCQKYADQNGLEIVDTYIDRAMSGTNDNRPAFQQMLADCAKPVPWDIILVYAIDRFGRNSIEIAVNKQKIKKSHKTLISATQRTSENIDGTKNLDGILLENMYIGLAEYYSAELSQKVRRGFHENRKKGLFCGGSIIFGYRVVNKRVEINEDEANIVRYIFDQYAHGRQAKNILNELTAQGIGRRNKPFPINTFYSILHNPKYIGVANLSDGAYTNIYPPIIPKELFEKVQMILEKNKRGSRSKDTDYLLTRKLICGDCKHKMGGTSGTSHTGDTHYYYICLSKNRKRCVCHCKPVKKQVLEDYVIQASVNMLRRNSVITKIAETIVKVHERMIRDDSGLRRLQAKRDEAKKSADNLVKAIKQGIITDFTKDRLAALQEEVNRCEIEINKAMQKTYAHLTVEDVEKYLLSKVFEDPDDIKVRKLLVNTFIREIIWYGDHMVITYNFQEDVVPEKLTKSHVEQVEKEIEEAEIASSSFPVSSYICGCSSPTHSGDFRSKIPCFSLKNAVICSFWLNVKVQPPNEPPNLFYR

SEQ ID NO: 1652 - protein, 513 aa, unidentified
  source 1..513: note = uncultivated organism
MKQLPPQKLIRCAIYTRKSTEEGLQQAFNTLDAQRESAEAYIASQRAEGWVCLPDRYDDGGFTGGNLERPAVQRLMKDIEAGLVDCVIVYKVDRLSRSLLDFAKLMEVFDRHKVAFVSVTQHFNTTHSMGRLTLNVLLSFAQFEREIISERTRDKIAAARRKGKFAGGRPVLGYDVLRSPQGPKLVVNETEAEQVRRIFSTYLENRALIPAVTAITALGWTTKAWVGRDGTPRGGQPFNKSTLHQLLTNPVYVGKVRYKDEVHPGEHAAIVDEETYQKVQAVLSRNGKTGGAAVRNRYGAILKGLLRCSPCDCSMGHTYTAKGTKRYRYYICLNAHKRGWDTCPSKSVPAAEIERFVVEQIRSIGSDPAVVAETVKAARAQVEGRLAELKAEDKRLEKAAKQDHATVRRLIGLPQRTGELAAAQERLREVEQRTSAVRSEFETLSKTLVEDHEVASALAQFGPTWSALAPREQARLVQLLIERVDYDAAKGSISLTFRPGGIKQLATPLQEVA

SEQ ID NO: 1653 - protein, 583 aa, unidentified
  source 1..583: note = uncultivated organism
MPKKVEIIEPTKTKKADGKKYNVCAYARVSTDSDEQKDSFLNQQRYYEDKIRNNPTYNFVGVFADEAISGTTDKRPNFQRMIRLAEQGHIDIILTKSISRFSRNVGDLQKYCEILRNHNVNLIFEENGIELLNSSGSLLLTILGAIAQMEVENTSDHINWTLTEKMKKGELVGQANPLGYDVVDNKLVVNEEEAEIVRYIFRRYLDGVGTHTIAKELTSMGAKTKKRNNTVWHDSTVVGILKNEKYTGELVQGKTYTVNPIGHIRRDNNGEAHKYIIKDNHEAIISTKDFEKVKALIASRSVKNKDGKTRGTTSNTSQSEFTSKLVCAYCGKHYVKRTTHPGTKYSKIKWSCATVGKRGKAMCPNSVIIDDDYLKQSIVGMIKNLIDDEDSMFYLTTDKLNDLLKQSDKDRDIIEQQIIQCRKNIDLKTKKKARILDMYLDEKILEEEFISQRADIDKQIAAIQETLNELESLYGMEDVKQNSSKQICKLISEGKAEGFNKELFDLIVKQIVIGGKRSDGVDDPKSLHYELINYNLNTDMKKVVRKGILYYTMDIDMEKAMEEENGKKKEINDVYSFYSDHTC

SEQ ID NO: 1654 - protein, 505 aa, unidentified
  source 1..505: note = uncultivated organism
MTAIYCRQSVEKKDSISIETQEQECRAKLRSGETDVAVYSDRGYSGKNTNRPDFQRLMSDVESGRVSKIIVYKIDRMSRSVLDFELTYRELKQHHVDFVSATEDFDTTSITGEAMLRVILIFAQLERETIQKRVTDNFYSRAEKGFFMAGVAPLGYKKVADYIDGKKTSRLEEDIETSHIVRFIYRRFLSGRTIGEIVSELNSPDCEIKHDIRFQSVRVSRILANPVYVRANADVYSYFKSRGAVLHNDVSEFTGLCGCTVYGRRQGKTKSKFRDLSGENIQLNRHEGLISADDWLRVQCRLNENHALKSSGRGSNSWLSGIVRCGYCGYALSVVNGQRSGKRYVYCGGRKHHICQGKRSGITFEMIEDSVAEKMLAQAKALHYRSSNRTTADESEINSLKVHRIKLEAEVNSIVESFALAENALLRLKLNEKMDFLERQIRDVDSRIKEHSVKSGENADAGSVMPLLESWDELEIRDRSSIARLMISQVRVWDDETPIEISFRF

SEQ ID NO: 1655 - protein, 641 aa, unidentified
  source 1..641: note = uncultivated organism
MTASRSRVRCAIYTRKSSEEGLEQSFNSLQAQREACEAYIASQRHEGWQVVAKKYDDGGFSGGNMNRPGLKQLLDDIAARLVDTVVVYKVDRLTRSLTDFAKIIEVFDKQGVSFVSVTQQFNTTSSMGRLTLNVLLSFAQFEREVTGERIRDKIAASKKKGMWMGGVAPLGYDVIDRQLIVNPQEAKVVREIFTQYVSLGSVAALKQHMDQKKLRTKVRTSAHGHVFGGKPYSRGGLYKLLNNEVYTGRIAHRGESYTGEHQAILESETWEKVKALLAANNQGHRQPGRRKAAPSTLAGLVFDAEGNRYTPTHAVKKGRRYRYYTSQAVIQRRNKSSYLGRIPARELEQLVSSRIQRLLASPQELAASCMESSELANELGRVIEAAQAMAEKWSELTSQQSAELVRGVARRIVLRGAELEIEVDVEALAAGLLHKQWNAGKEESHRRPEAGRHLLTLKCSFTLARRRGELRLVLPDSSTGSSQSASPLLKAIVMVHDWKERIIAGEIYSVQQLATEAKLNSRYAARIFQLAALSPGILDQVVRDGSMADHSLSHVISGLPLSWHDQGSLLSQKMTRQLADVVSTPGRLTLSASRMEPRSWRSSGMHLDRDRESSMAFLRRAVPPSYPRRRSVTPASHWDSV

SEQ ID NO: 1656 - protein, 556 aa, unidentified
  source 1..556: note = uncultivated organism
MGAYGRVSTLNQVREKDSSVDTQLARIGQRVAYEADQAQHTNGRPWTVTAEYREEGRSGKNTDRPELQRLLADVRAGRLDVVCVTKIDRITRSLIDFYDLWRTFEEHKVEFVSLGDSFETAGATGRAMLKLTLVFAELERERTSERTREKIDMRRKAGLWFGGIPPLGYKSNPADKTTLLVDDPAAEVTRRIFQTYLELGSARALTRELAQSGIRRPVHKTTRGKKWGGGHFTTQSLIQILANPVYVAQRDRGDGELIECKWPALIDRATFDRVQARMLANREKRPSGKPMVAHNFLLEGLLRCGGCGSAMIRTVGTGKSGRAYFYYRCAKKHKTAYQGCSVRDVPAPAVERFVLDQLSSYLIDPAALRASVAEVNAGRDVELTAAESQLQEIESAFLQKSKQIAKLLDAIETGEGEGDLSLIRRRLRDREAELEDLRARRGEVQAKRDGIRREVLESETVADAYRRVPHLLAEAQRVGAHDELRGLLQALVDVVEWRQSADDPKQGEALISLHPLPTLVGPAGEAPSQAVKRPAGCSSSRQDWLRRRVSNPRPGG

SEQ ID NO: 1657 - protein, 589 aa, unidentified
  source 1..589: note = uncultivated organism
MASNKKRISALVSDTKVAIYIRVSTKWQIDKDSLPLQREELPKYAELVLGTSNYEIFEDAGYSAKNTDRPDYQKMMIRLRAGEFSHVLVWKIDRISRNLLDFASMYQEFKDYGVTFVSKNEQFDTSTAIGEAMLKIILIFAELERNMTSERVTAVMLSRAEQGHWNGGRTPFGYHWDKESKEFSIIESEAAVVRMIYEMYRSERSSLRVAKTLNERGLTPRSGKPWNPVTIGIILKNPFYCGKMRYNYRDETKGLKSWSIKDESEWIVFDDHHPAIVSEEDWREACKQLEANRRNQAGVNRAYTRKNTHIFAGLLTCGSCGSNMPSTIDRARADGWRPSIYLCSRHRRFNDCDNKYISDVVLGPFVLNYISNLIKARKSFGKTTSIETFQKKLLRGEMFSSVERIERPGLEEMYQLIKSGRSEVSFTTPESSVSQDGSVEERALLFSERRRRERALSRLTTAYLYDDNGIPEKDYIIERKRLADSLDEIDARIAELDKNISNSFDLSDDEFISKASYFILSQRLTDQRFVNYESFIKASDPKIVRDFVISVIQNFCILEGKILAITFKNGIEHKFVYRQDEEQKAQEPL

SEQ ID NO: 1658 - protein, 513 aa, unidentified
  source 1..513: note = uncultivated organism
MAANSIKPVRCAIYTRKSTEHGLELEFNSLDAQRDACEAYIKSQASQGWKALPQHYDDPAFSGGNLDRPALQQLLKDIDAGRVDVIVVYKIDRLTRSLADFAKLVEAFDAKSISFVAVTQQFNTTTSMGRLTLNVLLSFAQFERELSSERVRDKVAASRRKGKWTGGTVPLGYDAKNKKLVINKTEAETVRYIFKRYLELRSFGKLVEDLDTKGIVTKRRDTKVKKFNGGIPFTYGPLAYFLKNRVYIGETGHKDKWFPGEHAGIIDPKTFDQVQQLLKSKSDGRDATRAASEALLLGKLYDDKGNRMSPSYSTKNGVRYRFYVSSALLRGRKTEAGSVGRVSAAEIESAVLTALQPHQGRADTNEGQDAFGAVERVVISRDQLVLTMAGATNVDGIPAELKVAWSTKAKDSAAAFEGDGAPDGSHNEALIQSIARAHVWMHSLRDGTHESIEALADANRMHPKVVRQALRLAFLSPDVTSAVLEGRQPAGLAQAQIPKLLPLQWREHQRLLG

SEQ ID NO: 1659 - protein, 520 aa, unidentified
  source 1..520: note = uncultivated organism
MAATELAVPAATRRKTMRCAIYTRKSTEEGLEQTFNTLDAQRDAAEAYVRSQREEGWTALADKYDDGGYTGANMDRPALKKMLQDVRDGLVDCVLVYKVDRLTRSLLDFSRIIEVLDQHGVSFVSVTQQFNTTSSLGRLTLNILLSFAQFEREMIAERTKDKMSAARRKGRWVGGNPVLGYDLSDKDAALLVNEEEASRVRAIFDLYLEYEAMMPVVQELNRRDWRMKQWTTRKGTPAGGRPFVKNRLYNLLTNMVYIGKLRYEGQVYDGVHKAIVDAKVWQAVQDRLHQNWRSGGREIRNKYGAVLKGLIRCATCNVSMIHSYTQKEHNKLYRYYVCVNAHQRGYNQCQTRSVSAPVIEQAVIDQIRGIASNPEVIAEVVQQLDERRLAAIEALEHEKRLIEKDLRRLAEETTRVLRASGKQAPARLAELHERAAVVEAQLRTVSGQLAGVVAQAVDAAGVCKNLREFDGLWADMSPRQQVKFVKTLVERVTYDGTTCTVTVGFRTEGIRRLCAGGERP

SEQ ID NO: 1660 - protein, 523 aa, unidentified
  source 1..523: note = uncultivated organism
MTTVATQRSTARRRGRVQLPAPASTVRCAIYTRKSTSENLDNDFNTLHAQREACESYISIQQEQGWVVLPQSYDDGGFSGGNAERPALQRLFGDIERGEVDCVVVYKVDRLSRSLLDFAKMMSVFEEHGVSFVSVTQHFDTSNSMGRLILNVLLSFAQFEREMIGERTSDKMCAARRKGKWMGGPPILGYDKDPDAHRILVNETEAQMVREMFELYIQHQSALKVAVELNRRGWTTKSWLRKNGKRVEGSRWDKAKVLRHLTNATYIGKVLHRGELYDGEHEAIIDEDVFNRVQEIVTLNGYGCGPAVRNKHRALLKGMLRCGRCGATMTHTYTNKKGTLYRYYRCVSNIKGGRHACDTPSLTASDVEDVIVGQIKQIGNDPKLVKQVCAEAKRLQQSDVPKFEAEYDKLYDERLRKTAEINSMVQVLADTDKPMPTVTAQLRTTEDLVSRMDVRLHELKMQIADLKTRTIDAEHLRETLQQFDPLWDVLHQAERVALIRDVVESAEYDPTTDAIRITLRSAS

SEQ ID NO: 1661 - protein, 561 aa, unidentified
  source 1..561: note = uncultivated organism
MFPGKDRILQEYVAGYIRVSTEMQREKDSIVNQEIHIKNFAAKLKMPCRIYKDVAISAKDTDRPAFQELCSDIEKGLIHTVVVTKLDRITRSLKDLIELKDFFEEYNVEFVSITQSIDTSSPMGRFSFYVLGLVAQLEREMIAERVAEDMRMRAQRKKWNGGPPPFGFRQIPGEKNIEICKPEAGIVETIYQLYLERKSIRGVANTLNSMKLTTKKGNAWTTTSVRRILQNPVYYGALTYNKRESRGKTYKLRPKEEHIIVEGVYDPIISKETFQRVQRVLDEQRTVPSKTKSSPFLLSGLVKCSICGGNMHGGSSTSGSKTKPKKHRYYQCNNNRRKGKSICPGMSINAAMLDNVIEQELKKLSLTPSILDKATKDYRRQYTEQIEPLQNSISKVKEEECKIEQQKERLFELYETEVITKSEFVQRKKTLDERLSMLSQEEERVRQRLESTDLTAIDLEGTIKSIQNLADIYEELEFRDRQELLRNIISSIVVERHNVKLNLFIYPQIFVDRKRAVMHAVIIITPIVDSGPFYLYVVVYAVSYSLDQPVLGQCGNLANCA

SEQ ID NO: 1662 - protein, 523 aa, unidentified
  source 1..523: note = uncultivated organism
MASARDNLARKQIYIPATQPEEEIALRVAAYCRVSSNSAEQINSFAAQDLHYNTLITAHEKWQLVDIYADEGITGTSAKKRPDFQRMLNDCRMGKIDKILVKSISRFARNTTDCLETLRELNTMGISVFFEEHSIDTKMVTSEMLTTVIAACAQAESESISKNIRWSIQKKMQEGTFVTSNVPFGYRRSEEGLVIDEEEAIYVRCLFSRYLDGWNSGEIAQDFQERSFHDPILARRKWTYKTVMKILKNEKYVGDVLYQKTYTTETLPRQYLCNKGERDQYYVENAHPAIIDRETYQSAQMLLRQRAEGRSPSPTGSVFTGLAVCGNCGGSFRSKTSNGRCFCVCRKHTQDAAACDMPPVSEDAMKQAFLRLYYNLKHSDILRYFYKNLSVIHSRKTLWSTDIVELNKRISDISSQSHKLSVLNQQGVVDPDVFISKSNQLAEQLRTVKQQKEDLLRQEDDTALKSTAYLMETIDAGPEILEELDEELLFELINKVIIESNVRIQFRLKNGLTLSESMERTVR

SEQ ID NO: 1663 - protein, 558 aa, unidentified
  source 1..558: note = uncultivated organism
MNIIEKIRAKKNIVRAVIYARYSSDNQRDESIDAQIRAIREYAKKNDIIVVGEYIDRAKSAMTDNRPEFLRMINEAKDDLFDVVLVHKLDRFARNRQDSIGYRMQLKRHNVSLISVLEYIDDSPESIILESVLEAMAEYYSKNLAREVNKGMKENALKGLHTGGLPPLGYDVDHNTKKLVINEKEAVAVRLIYDLFIKGYGYDKIINELNLRGHKTKTGASFGHNSLHNIVRNQKYIGTYIFNRSASKDVDGKRNHHMDKEDDEIIKIEGAVPQIISKEIFEQVQRKIDERKHTRPCNKAKEVYLLSGKIFCGECGFTMGGNKKLSGRSKSVHVTYRCLGRKNKHVCTNKEIRREYIETYVLDVLSEYLFDEKLIRKIAKEYQAYQLEMNADVIMKKDTIKKRLTEVTKEIGNLISLVARTGSEMMADRISELETEKIHMGANYEQVCFETSSQDISIEILTERFNQAKGLLKSGELKTTKKLIEQFVDKVLIFSDHVEVVFNFHPDLILPQAHSTRGRNNLDSMHNNSNTYISKTTDKSEVSTCKQVDTVVEARGTI

SEQ ID NO: 1664 - protein, 550 aa, unidentified
  source 1..550: note = uncultivated organism
MLYSIYLIDNLSAAKGLYTMNQKLCGLYARVSTERQSEVKDGSLDTQLDRLSNYIKFRSHSEKESWKVIDTYREEGKSGKNMDRPELQRLLNDLKCGHINTVIVTKLDRITRSLLDFYKLTSTFKEFNAEFISLEDNFDTSSPMGRAMLNITLIFAELEREQTSKRTKDKMAWRAEQGMWNGGQVLGYDLIEGELKINKEESKLVKLMFEKYLELKSLKSTADYLNEKGHRTKQYISNRRKTSRGGQKFYVTNLKQKLTSPLYIGEISYKDKTFKGKHEPVISMPLWTQVQQQLGLTSPRRRKKERVHNFILQGLTKCGNCGSFMTSKYSTGRTRLHPYYQCTKNSRYGNKECDMRYVPAEEFEKFVIEELKKMSQDKNTIDQIVKKANKDTDKLLKQLNLEKKTLENKLLPINNQINNVFEAIGNGIQKTSSINKKMLELETQKENLEREIENVGFEINKLKSKVLNAKIMQQSLKEFAQVCNAATPDELKNLIPRFVEQIIFTPSEIKIALYDYPTDKGLFKDNHPGFGAPDGSKWLPRVDSNHGQVD

SEQ ID NO: 1665 - protein, 521 aa, unidentified
  source 1..521: note = uncultivated organism
MKQRAAKPQVQPGAKRCAIYTRKSTTMGLEQEFNSLDAQREACLGYIKRQPGWVVVEERYDDGGFTGANTERPAFQRLLADIEAGKIDVVVVYKVDRLSRSLLDFAKVMERFNASGASFVSVTQNFSTADAMGRLTLNMLMSFAEFEREMIAERTRDKIAASRRKGKWTGGRVPFGYEVHDKKLVINELAAQVVREAFELFIKHRRMFVVACALNELGHLRSLEHVRDRELLFWTKDSIARLLRSPIYTGLMPYGSELHQGEHPAIIDKDTYQRVQRILAGAERETTFHGVNQEYLLRGLLKCGLCDGAMSPGSTRKGDREYRYYRCCTRDKHGKDKCAAALLPAGAIEAHVVERIAEAAADPTLAKLAKQCLDARIKARRELFEKKRARLPSAIAAASANAAKLTDQLLQVEGSTRTIVEQRLQAESAKLAAAELQLAEAERALDALPDAEREAAWVNDALAHFGELWATLNVPNRGRLLRALVDHVVVNERTNAVEVHLVDFSAAIEVPADPTNPQEAA

SEQ ID NO: 1666 - protein, 536 aa, unidentified
  source 1..536: note = uncultivated organism
MSSENRKPRRAAVYVRISKDDEGKEGAGLGTQRQEKECRSLAAQLGWGVGKVYVDNDISAFGGKTRPRYQELLGDIRAGHVDGVLAWHTDRLHRDLPELEGYIDACEPRRVATQTVKAGELDLTTSAGRMVARILGAVARQEVEHMIERIKAAHQQRRERGEWHGGPVPYGYRKEPTGEIRKQRVVHRLVIDETEAAVIREAAGKVLDGGSLRAICRDLNDRGVPSPRAARGYKAPPARYSKGGWQIANMRAMLLRPLTAGLISFDEDWKQDGRRRARPSWQSPVVGKGNWEPILSTETSERLKAVLTSPARRTSKPGPYYRWLLSGIARCGVCGSRNLRVGTQHRSGRRHYVCEDGAHVARVADDVDALVEIAVIKRLSHPGFAASLNPPVDVAALDARRDVLSAELDAFARQPGITPSQLAIVSEPKLAELKQISEKITAAYGGSAFDGIAGAADPAAAFKNAGIARQRQLVDALFTVTILPVSHDGPLSAAERQRRYRARRKAGGPPVKRGPAFRPDSVRIEPRDDIAQRSVT

SEQ ID NO: 1667 - protein, 625 aa, unidentified
  source 1..625: note = uncultivated organism
MALEVEVIKASRKISDRNAEKLSDVLRVAPYARVSTDTEEQLNSYKSQVAYYTDLVSKRSDWVLVDIYADEAITGTQVTKREDFQRMINDCMDGKIDMIITKSISRFARNTLDTLKYVRMLKEKNIAVFFEDENINTLTMDGELLLVILSSVAQQEVENISANVKKGLKMKMKRGELVGFQSCLGYDYDVNTKKITVNQEEAEIVRYIFERYTSGIGAYVIAKELTEAGHKTKYGRVEWQDTTILGIIKNEKYKGDLLQGKTFTVDPISKRRLDNYGEEDQFYVKNHHEPIVSEEVFEKAQDILHRRGENRRRGAKGKRDKYSRKFAFSSKLECAFCGSNLSRRNWHSGTPHEKVIWQCVTATKKGKKYCSHSKALEEKLIEGAFVESYKLVCRNNSDVLDELMKRMESLFSDQNNQKRLNKIISDIQATEQKRCKLIDLCLDEKIDRATYEQKYAELDTSLTKLLEEKEQLEQSAQDEIDLGKRLEHFRKVLQTNEVLTAFDRNVFESIVDKVIIGENPDQGSPEPYKLTFVYKTGFQNSIQSKMYKQKKSMRSERGKVPSYSEHNTCGVLFTVSAEGQLNRRCIGGKRDGGPFISIVAFYKPSTKPFPICRRYKEKSKAYLTP

SEQ ID NO: 1668 - protein, 539 aa, unidentified
  source 1..539: note = uncultivated organism
MKAPSVKPVRCAIYTRVSTDHGLDQEFNSLDAQYDAASAYIKSQAHAGWALIRSRYDDGGYSGGSTDRPDLQRLLDDIRARKIDVIVVYKVDRLTRSLADFAKLVELFDAHGVLFVSVTQQFNTTTSMGRLTLNVLLSFAQFEREVTSERIRDKIAASKRKGLWVGGPLPLGYEMKDGKVAFIEEEAESVRLIFRRYLELGGVNALVRDLKDKNIRTKTRLRSTGATHGGIPFGRGSLFYLLRNRFYIGEVKYKGDILPGEQPAIMDRDLFDAVQQKLTDQWSHRNHAKAKSDHLLTGLLFDDAGHRMIPTHATKAGIRYRYYISQPHLNGESKTASVGSVSRIPATDIEDIIVKFLGEHLVAQKEKQISSVPQVGDRKTVLEQVARIDVHGDHLAIRLKSVGAEEASDSVDEQLLSIPWQKPPSRNSRKILMPQGVSRNEVRPIRIERRARLVSAIAQGRRWLDEIVSGSVIGVEQIAVRQKCSMRQVNMTISLAFLAPDLVRAAVEGRLPRGIGVERLRDAPAEWTRQFEALGLNPQ

SEQ ID NO: 1669 - protein, 543 aa, unidentified
  source 1..543: note = uncultivated organism
MKRVRMLLRVSSHQQLEADGDLSVQRQIVMEYIRGHEDWTADEKEYFEGSTSGYQNALCKRETLKEALEDAKNQEYDILAAYKDDRVGRRMWEMGAYIMALKRFGVDVYTVKDGCISPEADDIMGQMLLALRYGNAQKSSSDTGMRVKDTAQKLVQKGKFMGGAAPYGYELVLSGELSKHGRALHRLKIIPRQAETIRHIYSLSLNQEYGSVKIAKLLNADAYYRGLAPRDIWKAGTITSILTNPVYAGYTAYKRRERVNGKYHRLDQEDWIRAETPNQELRIIDEEVWNRVQEKRKRRSDRYRRKPEDQAAPVIRRNAGGLPLLDTAYCGYCGRKLTNGSRYHYWTLKGTGEKRSSRTPMYQCRQELSESGHPKARFHAGKIEKAVFQCLGEYIARLLGEEDAAQAVLENRKKRKMAEEAELRKEREEWGKLLKGMEALEDSIPAAMAGDFALTMEELAEAIRKHRKKTAEKEQAIREKEARIKGMESEETGEAWEEIKKKIPSWQQIFQEADPDTHRVLVSKLTERIQVTQEQIVIRFRFR

SEQ ID NO: 1670 - protein, 526 aa, unidentified
  source 1..526: note = uncultivated organism
MKPTAEDKKVPTIRCAIYTRKSTEEGLEQDFNSLDAQRESAEAYIASQRHEGWTCLPTRYDDGGFTGGNLDRPALQRLLADIEAGKVDCIVVYKVDRLSRSLIDFARIMDVLERHSVSFVSVTQQFNTSTSMGRLMLNVLLSFAQFEREIISERTRDKIAAARRKGKWVGGRPILGYDLASTASGGRVTVNEDEAMQVRQIFELYLRHRSLIPTLREVDRRGWRTKSWTTRKGHVCGGGRFTKESLYRLLTNVAYIGKVRYRGELYEGEHPGIVSEPLWHRVQDALRHNGRCGGTNSGLMRNKYGALLKGLLRCGPCGCGMMHTYTNKGNRRYRYYVCVNAQKRGWENCPTKSVPAAEIERFVVERIKAIGQDHEVVARTLAQARKQNQEGLEALQAERRRLERELAKHGAEVRKLIDQAGTPGETPTAARLADLQERIRAAEQRATEVREQIIALSAKVVNEDELARALSLFDPIWDSLSPGEQARVLHLLVEHVTYDGADGTLAITFRPTGIKALAEEREAAAC

SEQ ID NO: 1671 - protein, 539 aa, unidentified
  source 1..539: note = uncultivated organism
MKFFIYSRKSVCTGKGESIENQIEMCRQYIVTKFPGATDADMTIYEDEGFSAKNTDRPQFQKMLRDIQQQKPEFIVCYRLDRISRSVSDFSTLIEDLNEREISFVCIKEEFDTSKPMGKAMMYIASVFAQLERETIAKRVRDNMRMLARTGRWLGGTTPTGYTSEKVSEIIIDGKVKTACKLKGNPEELSVIDSIFSTYLETRSISAVSKRLMRQGVRSRAGCFYSLPGIREILQNPVYCTADQAALDYFTEQHADVCFDAKDCAGKFGLLAYNKRDYKKKHAPRQSIDKWIIAVGRHRGRILGEKWVAVQRILADNIPTGTKPARQANCYSLLSGLITCGKCGGRMFSKIRSGSVNGLFDYVCNRKLRGGTTFCDCQNIAGLQADDLVCKRLMDYAESGPETDPLLQKLKREIQQEDRQQPIAVIEERIAKRDAEMNNLMATLANGSFAQAFVERVNARAAELDSELKELTREKARLIQAENGQDEAALQLDLLAGALSSLKGYFPQLSVYEKRTLIRILVSRIVWDGQDFHIFMHGG

SEQ ID NO: 1672 - protein, 569 aa, unidentified
  source 1..569: note = uncultivated organism
MASIIKQLSGSSLNTMQKSTTLYNPNVTKIMTATKRVAIYIRCSSDEAGKEGYSPQTQEEKIKDFIKLNNYSLDPKHTYIDIGYSGGVDKRPGFQKFMANAKNREFDVVIVYRMDRFFRNLRLLLNTVAELREMGIEFKSVTEPFDTSTPTGRAMFANVGVFAEWMREVGLESRNEGMIKAMRAGKWLGGTPPYGYKLNKETQKLEIEEKELSVIKMFFEWLVKNRLSEYKIQQKINTMKIPTKYDLLGRIKKTGSKCWWNRRAIGRILRNEIYTGTIYYRKYKYLGRVRGQNNLRPEEEWIKIEDKELQIIPRELFEKALQQLKKNKESSPRNTQQVYALQHKIICGFDNYKYQCATERYQKKNGLGEKKYYFCSAVRPSISYKKCPSSAVSESRILPPVWEKLKEVLANPETIMQELSDCFNHKNNGNKTQKKLNNVEEALNSFNTQKESYAELYAERSIKKDFYDKKTQECDKEIERLQKEKEKLSQLLITEEEKQKRIKSVEELYGQLKKRIENATYEVKREILQRLVGKIVKTDNKMDIEFNIPLEADLTLAVCGDSRRMDRNL

SEQ ID NO: 1673 - protein, 554 aa, unidentified
  source 1..554: note = uncultivated organism
MTPEVHKKPVLCAVYTRKSTDENMNSDFTSLDSQREYCEAFIKSRGGEGWQPCPERYDDAAYSGGNMDRPAIQRLMADARQKKFQVVVAYKYDRLTRNTKDFINILETFGKYGVAFVSVTQNIDTSSSMGRLMQSILIDFAQFEREIISERTRDKMSAMAKKGKRIGGGPVLGYDIDYDNKRMTVNEEEAIAVKRMFQTYLREKSLSAAAKALNNAGIRLKRWMTRKGNTKGGGSFYKGNLSVLLQNPFYTGKIHYRGVLYPGEHKAIIDDDLFQSVQLMLQRHGEKNKSPIQDKHDFLLKGLVSCAVCGSSMTPSFGYSRLKKPYCYYKCTSVNRLDKSACVVGSVPAKALEQFVVERLERICADSGMAEDIIEKADSLANYDLPLKRDEKSRVSAELGKIEAEGRNWTVILGQEGPDSPQRAFLMERIGELGRRRNELKAKLIQTDIDIAQLEAKQCDAQIVRSSLRNFLEFFRKMSPRDQKDYIKLLIKEVIYDGTRGELTIGFFVVDAFKWQMEACGVSFDEGTKTLPSLDSNQDYRLQRAMCYRYTTRE

SEQ ID NO: 1674 - protein, 644 aa, unidentified
  source 1..644: note = uncultivated organism
MYEDKKIAGIYIRVSTEDQAREGFSLPEQEKRLRAMCEYKGYSVYKVYEDAGISAKTGNKRPAFDELLQDIKDKKINTIVVLKLDRLTRSVLDWEKILKFLEENDAYLDCANDDINTTNANGKMISRILTSVSQQEIERTSERTKIGLAGAIKVGHIPHHAPLGYKHEDKRLVIDYSSKDVVIRIFTMYHDGLSYKKISNILNDEKVLGKTNWRDSTILNILENPIYKGDFLHGKKTKHPTYYENVVEPLVTKEYWEECQVQQKKNSRSYQRTLNYLFLQKLKCPKCSRILGGKATTKKNGNSYYYYYCNDCKINIKEKTIEKHVDEFMDSIVEYDSIVNQYFLPMLKQKIENPKEEIEKSLKTEKEKFNRIREAYINQVFTLDEYNNERKKLEDIIENLETKLKDTEVCEQLKFTPNDILVKRDIDFINSIKYPDKYKNNTKFWNEYTREEKADLIMKYVDEIELTDKYSKTPEVDFIKFRESIAKSSNELYFKGYYDRYIPSIFGNILGQIRFSEYLPEKEMTEQIMRLRQFYDVGYYEATYNVKNQVFHFAYTEDNEVIVRVFALEDYRKIDPNMKLEQYKMGVIYIKEDDGTLLENKDDVFKYIPAECDGNVVYSKEPIFVESKPVPYFIEDEELKDSSS

SEQ ID NO: 1675 - protein, 565 aa, unidentified
  source 1..565: note = uncultivated organism
MIQRIRCAIYTRKSSEEGLEQSFNSLDAQREACEAYIKSQQHEGWQAIATHYDDGGFSGGNMDRPALKELMTEIHSGKVNVVVVYKVDRLTRSLADFAKLVEQFDKCGVSFVSVTQQFNTTSSMGRLTLNVLLSFAQFEREVTGERIRDKIAASKKKGMWMGGTVPLGYSSNGDHKLLLNETEAVTVRTIFREFLHLGNVTTLRDWMRENNVVSRGGNYFYRGPLYALLRNPHYIGLIKHKKETYPGEHTAIIDQDTWDKTQALLDENRQGGKRKPRTTKESMFTGLLFDAGGTLYTPTHASKNGRRYRYYTSQAVIRKTEKIEVPARIPAPDLESAVTERILNLLRDPEGLLAALRDDTQESSNIPAGFFTRIITSAASFDAAWQSRPAADRELFLRRITDRVIIHPTRVEIRIKVPQLIQQLNGGAAFTTNWPDTKSQTTPHSLPPLATIDCAYRHIPQGRALRLIVGNSQITTDASRQAIPKAIARARRWYEQIIASEVTGLPDIARREKINYAYVKKIFPLALLSPTHVEQIIAGQGFASSLDAQLGDIPTLWPVAQAVLD

SEQ ID NO: 1676 - protein, 566 aa, unidentified
  source 1..566: note = uncultivated organism
MSRIAQSIANVISAKRVAIYCRVSTIEQAEEGYSIEEQERVQVEYCKFNGYEVYKVYSDRGISGKSIEKRPAMKELLRDAEDKKFDMVIAWKINRIARKMLDLLKIVDLLDHNGIAFKSYSESFETETPMGKFSLQMMGAVGELERGTIAQNVKFGMIARAREGRWNGNVIIGYDLVQREASTNKKRKDTELVINEKEAEIVRLIFDMYSKGNGYKSIANYVNKFGYRTKRGNTFSLTAIKDILSNPVYIGKIRYNVRQNWSEKRRNDINPNPVFVDGIHEAIIDEDIWEKVQNLLQNSKGKPSRIYDGQYPLTGILKCPVCGAGMAIMRSTWKRKDGTKIKNEYYCCGAWKSKGTIACNSNSIRVDKANEYVFGKLSELLSNDKLVRDIVKNINSTRKSMIDPSKDELNKIIKELDKIEAKKKKLFEAYEEEIIRKDDFKERMAELRVREETLQQEANELKMNVLDDNVQEVSYEFVKEVLSQFATMINSNISKEQQKKLLHMIISKITINRLREIDSIELSINDNLIMYLNNGGEPSPDGSGSSFSFISKRKLMINPVNIKISI

SEQ ID NO: 1677 - protein, 601 aa, unidentified
  source 1..601: note = uncultivated organism
MQYTAIYVRVSTEEQAKKGYSIESQKVKLESYCRERGWAYAVYEDSGFSAGSLNRPSIQLLINEIKAGKINKVVVWKLDRLSRRMRDLYNVLALFEKHDVELVSVTENIITNSSLGKFLTGILGSVAELEREQIRERIRAVKDTRKRVKRLPLGQPPLGYGAGFKVVPEQAEVVREIFGLAQFMGTTGIARNLNKKGLRTRDGNTWSRVAVHRILTNETYAGIIRLEEGGIIRGNYEAIISVDLFKKTNERLRKRAGRKSSVSKHLLSGIMVCGLCGKTMGATGDYKAGKRFYTCVTKISYDSRACPNRRFKADLVESSIKKMIAGYAGKERYKVFEKVEEKIRESGIETLRKRKAEVEQALLGIERRISKLYELFEEERVDRDILLERIDRLRKRKENLQEKIAELEEEIRENDPQKVIRLLKEAFNRFEELWDVSSPADRKALLATMINSITAYPDKIIVDLRWGEKRVIPYERQKKLIDLTDSEREAVKNNEGIHSRIVQLADEGLMGKEISSRIGIDYSKVIWVLRQFRKGRLAYLRRAKKLRGPQVIPEEARRVLEENRDTLRQLLTPRELMRFLETKGVTITYNLAKNIIYQSDN

SEQ ID NO: 1678 - protein, 517 aa, unidentified
  source 1..517: note = uncultivated organism
MCGACYDALYARQSIEKKDSISVESQLAYCRYETRGASYIEYTDRGFSGKDMNRPGFEAMMKDIRGGKIKRVIVYKLDRISRSILDFANMMESFQQYHVEFVSSTEKFDTSTPIGRAMLHICIVFAQLERETIQKRVTDAYYARCKRGFFMGGRIPYGYRLIQTVIHNVHTSMYEEVPEESAQLKLIFSLYADTDNSLGDIVRYLNDHQMKQLRGAEWNTARLSEMLRNPIYVKADIDVYRFFQDQGTQIVNPASDFTGQNACYLYQGTGSGGGKRSDLSGKELVLAPHSGFIPSKLWLACRVRCLNNRQSAKTCKPKNSWLSGKLKCGNCGYALTVRKAKTKWGRYFVCSRSGEHGSCNGAGCTVYADVLEDYMMKAVEKRLSEISAQEEREWAERPTLYGAAGNTGGRQIHKKIRLTQIEEEINGLLSKVSEADSILMKYINERVLVLDAERDTLQEEIVMADNADTEAAADRERLNGHVKEWETFSFSDRQKVADLLIKVIRIADGKMEITWKL

SEQ ID NO: 1679 - protein, 514 aa, unidentified
  source 1..514: note = uncultivated organism
MADITVINQALLKANARQRVCAYCRVSTNSADQLNSYARQIRVYTELIKRNPDWEMVDIFADEGISGTSANKRPEFQRMISMCEKRKIDRIITKSVSRFARNVKEALEFVRKLKILGVGVQFEKEGIYTLSMGDEMLLNTFAAIAEEESVETSIRLRNANKKRMADGDFIDGNAPYGFRLIDRTLVRYDPEAETVERIFSAYLSGKSTHEIARMLNEEGIPSRENNTWKSTAIKYILKNEKYKGDYLCQKTYHTDVLPYRQKRNYGEEDRFYIEGSHEGIVPREIFDRANEIMKARREKIVTGETAEPEERVFSGKIVCCECGCFFNRKKSIGAVYWACAKHLEGRELCPSHYIRQERIEDAFITMVNKLRFGKESIISKSIALLEEAKNAGRRGNGQAFDASRQIADLNSKLLMLEQLNSKGYLATEVYHMQSRELTQKISELKRDRNEMLTSALDDKLSGLKELDSVISSLAEPLGSFKKSLFDGIVERVTIDGNDNIEFTVKGGLRFTEPL

SEQ ID NO: 1680 - protein, 514 aa, unidentified
  source 1..514: note = uncultivated organism
MRVLKALRLSSASDASTSIERQSERVDWWAEGNDGTIVGTAEDVGVSGAVAPFDRPGLGPWLTDTPPAQWDVLVAWKLDRISRSAGDTYNLLHWCQKRNRRIVCVDDGIDTATTTGRVFIQIAAIMAEVERSAIQERILSSRDKLRRSGRWPAGTPPFGLVATPREDGGYTLVHDLSCAVADCDGHNCPPEHAAYVIARKIVGDFIDGVPTQRIVDKLNEQKILTNHGLRARQKGRTKDKPGTWRQSTLQSLLRSPALRGYLSHKGDLIYGDDGLPIPSGDRIITEAEWREIQARFGNHVRPRFRPESPLLAGIVYCRCGHRMYGSVERRGRRKDGTPKEYRYYKCADRQHHATVKRDHLDQWAEALFLDEVGDLEQTEEKILPGNHTSARLEEAQNAFEALVSQAGTMRSKAARKKLQEQLDSLDKLLAELEEQEDTPDRTVRVGTGTTFREAWEADTSVEGRRKMLLDAGVRITVESGRPFSADFYVDLNKLRDFIGADEFHRRYGSAEPNT

SEQ ID NO: 1681 - protein, 507 aa, unidentified
  source 1..507: note = uncultivated organism
MTTTATSCGLYTRVSSRNQAEADFSSLETQRERLEAYCKSQENYSVYHVYEDGGYSADSMDRPALKDMLRDLRDGKLNCVLAYKIDRLTRSVRDFHVLMDIFDRCGVKFVSVTQSLDTQNPMGRLLRNVLLDFAQFEREMTADRTRDKMHQRAQKGLWNGGNVPYGYAAENKRLLPHPEETPRVQFMFRRFAETPSLSRLRDELHRRGWYTRSNRPWSKMALDHILRNPVYCGLIRFNEQQFEGAHEALIEESLYRKVQLVRRDRSHGTTKLRREFLLKGLIRCATCGSVMTPHYTQKRHKDGSLNRIPYYRCTKTMHFSNAVCSVKHINADHLESLVVGKLSELSQNEAYLKMSVAELNGDLKRKVEPLEKEARQIRERLEEIEREIGRYVRALGQGKLSIRRLESEIGLLETDRESLQIQLDEIERKINESTIRDYNAELLQRTLRDFRTAFASLTPPEQSEALQCVLKGVTVHPQKLALEIFELEEFHPSSQNRKEWLPGLDSN

SEQ ID NO: 1682 - protein, 622 aa, unidentified
  source 1..622: note = uncultivated organism
MARAKVKSDMDNRQIAVYVRKSKVTESGKSIEIQKEKCIALACSKFDATEFDILIYEDEGKSGFYADRPQYKKMLRDIENNKIKAVVCYKIDRISRRTIDLLNLVQQMEQKDIAFVSVSDNDIDTSTRTGKIMISLLAAIAEFERDIIAERITDNMYELAKEGRWLGGECPLGYYSKKEKQTINGRKTTINHLEPVEDEQRAVKRLFELFFQTSSFTGTATALNNESFKTKKGKEFTLVAVKNILQNPVYAIADKDTQSYFKSFDVPIWADDKDFDGERGIMAYNKTEQIKEMDKDSRALDPKYVQKISRRDIKEWIIAVGKHKGIISGADWIRVQNIMTEISQNNSARPKEVSKSLLSGLVRCADCGSRMFVRAESGRYNPDGTLRFRYVCDIKYRKKGGCESSPNVKGYELDNFVIKQICNMSAGDNAFYSELLNTKNTLLLKSQETEKELNILEKRLSQIELDIQSQIANLRTAPESVKSAIYADIETLSKEQEEKQSRIDIIYEDRQSQDSQIADIEKAKQTIMDFPRLIKLVDYEGKLQLLHRILECVIVKGDTVHIFLKGTDSNDFFPKVREGSDLCHIEQHSIFNTSAGISRKAGALFIVKGGGGFDEANGSNGD

SEQ ID NO: 1683 - protein, 509 aa, unidentified
  source 1..509: note = uncultivated organism
MENWITAGYLRLSREDGDKAESDSIANQRKLLEQYITVHPELRLADFYQDDGYTGTNFDRPAFRRMEEDIKQGRVNCVLVKDLSRFGRDYIEVGRYLEREFPARGVRFIAINDHVDSARGRYDMLLPMKNIFNTQYARDISDKVRSAIHTKQERGEFVGAFASYGYRKDPENHNHLLIDPPAAQVVRRIFNLFEEGCGKVRIAKTLNQERIPSPSEYKRILGERYHNGRRMDKTTYWTYATIHRILQNQMYAGNMEQGRNLRATMHGRAKQKAREDWTVVPDTHEAIISPEQWERVQALLGRRTRELSFAQNQSPFAGFLRCGDCGRAMVKTRSAGGIYYSCGSYKRYGPTVCSKHSISQSLLEEVVLEDLNRVLAAVEDLEKLADETDAQTMLSPKHERGRLEEGVERLYRLKKAAYEDFREGLISRKDFLRYREDYERQERELNAQLEQLSGGGEDSGRHPWVEALLRQGRLTALDRVTVAESVKQILVFEDGRIDITYTFSDTPGL

SEQ ID NO: 1684 - protein, 581 aa, unidentified
  source 1..581: note = uncultivated organism
MFGKTTRSSAKGTAPQERKKKVAIYIRVSTLHQIDKDSLPMQRKDLTAYCDLILGIPDYEIFEDAGYSGKNTARPAFKDMMSRIRKREFTHLLVWKIDRISRNLLDFAKMYDELRKLKVTFVSKNEQFDTSTAIGEAMLKIILVFAELERKMTSERVTAAMLSRANSGKWNGGRIPYGYDYDTESGEFSINKEEARICQLMKDDYLESKSIVHTVKFLNSKGYHSRSGAEWSSNTIWKILSNPFYAGIYRYNYYTGTESREINPEEEWVVHHNHHPAIFTEQEHLAIKQILKNNLRLFEERGSRPHTSLNVHLFSDILYCGKCGSRMVSTPGKTNASGFRPSVYICPKSRNTKECKNPSINDFVVGEFIINYLLNMLNAKKEFSEIQNPEELQSRLLSGSNYAGIDHIGKDGLNEFFNLLCSYTSSHSDYIPLPKPSRKKAEISKETEKLRREKIQQERALNRLQDLYLYSDSALSEKDFMIRKHQITNSLDEINRKLGLLATDPDSSLSDKEFLEMAGHLIMSKQLSNKKYIYFKDLCGLVPKQVMRTYLTAILDSIIIEDGHITRITFKNGISHQFFYR

SEQ ID NO: 1685 - protein, 501 aa, unidentified
  source 1..501: note = uncultivated organism
MKATKKSTRDNRRDAVYARQSLDKKDSLSIESQIDKALERADQGAEIYQDKGYSGKNTDRPELQRLKSDIETNKIKRVIVYRLDRISRNIADFYQLYQLMELHRCEFISISEQFETSTPMGRAMMGILIVFAQMERESIQERVKDNYYYRIEEDGRWPGGPAPMGFKNARTKERKPTLEPTPDIEMVKLAYEWYGNDANTSLGQVGRKLYAEGFRSRRESGQFDNVTIARILQNPVYAIADGLLYKYYKTRRAHISSDQSTWDGSTSCHIVGKREGNVNTRKYTSLEEQTVYRTNFQGVIPSSLFIAVQERLASNEKLGRANAPSKMLELAGKVKCAKCGYAIRANNFPHLNCYGRSSLHACDASISLNFYELREKVGIEVQKQLDVIAQKFIDDGIKARKSTHEIEEINAEIERLVNLAAKGTMDIEQVSTAIEERKQRIDEIELSQERNLTFMERAKISISLPLVFDRLNDDEKKSVVNLLIEKIMLSENGDIEIIWKI

SEQ ID NO: 1686 - protein, 523 aa, unidentified
  source 1..523: note = uncultivated organism
MKASRRGTPKPVPAVTRCAIYCRQSVEERGGNGFGSLEAQREKGEAYVTLFSDKHWEMVPTDYSDSGFSGSTLDRPALTCLRGDVAAGKIDCVVVYRSDRLSRSIRDFLELMEEFERQGVTFVSVSEQFDTSTPAGRMQRNMLLTYAQYERELIAERTRDKVCAARTKGKFTGGGLILGYDRHPEGGRLVVNQTEARRVRKIFRLFEEHPSLVDTIQELNHRGWTLKKWTTKAGSEYGGGPFDVHSLRRMLSNHAYIGKVNFRGTVYDGEHDAIVDQETWDRVRELLQNGRKGPRRPSSRTTSLLAGILRCSACDAAMTPTYSQKGRVRYRYYVCTKAHLRGWDSCPTRSVSAKKIEAFVIDKIRGIGLDPELVSRTAVEATKQLAARKSELETEAKGIRCELEKAHIALRNTLKAVPPKGNRGHQDAAAQEDAIRSLEDRLRMLDEELTAIEDRRINPDDLRAALASFDPVWTHLEPTAQAKVMQLLIERIDYDGSTGNLAISFRPGGVRSLAAEGPGKAAP

SEQ ID NO: 1687 - protein, 502 aa, unidentified
  source 1..502: note = uncultivated organism
MIAIYARQSLDKQDSISIETQIETCRYEAHGGEIAVYQDKGFSGKNMNRPDFERLLDDIKNGQIETVIVYKLDRISRSVLDFSKLMELFGEHHVEFVSCSEKFDTSNAMGRAMLNIAIVFAQLERETIQARVTDAYYSRSHKGFYMGGRLPMGFKLEKTIMDGIHTSKYVPDPVEMNVVQMIFESYAKPGASLGGILRELVEMGYARTRAGAPWQTGRISEILRNPVYVKADLDIYNFFMAEGTKIINPPEDFIGMNGCFLYTGIDGDGKKKQYDLRNRELVIAPHEGVIDSDIWLTCRRKLMKNRQCATTRGGRRSWLTGKIKCAKCGYAYQVTISSSGRRRYFQCTGARMSIKCKGAGHTIYADELEDYIYSRMKEEMKNLEYLSDEKENQKSSNCSKYELRLTELDQEADALMDRLAAANDTLFDYINKRIETIEQEKRDIRRKINEETSKNKATELNRITDFIEKWSELDIHDKQSVVDVLIARIEIGEGTLEIFWNI

SEQ ID NO: 1688 - protein, 520 aa, unidentified
  source 1..520: note = uncultivated organism
MPSLALVYVRQSRHKESERTVSPEVQEATCRQLPAVLACDEVVVFRDLDVSGGGTAKRANYLAVLERIRAGGVAVVALYDQSRGFRNTADALAFYALMEEHPEIRVEFVHGHFDRSATGGFSYTVLAAAHEMERRMTAEKIAAAYRYRNAEGAATGMPPYGYRRQRDAGFVVEPDEADVVRSLYADYATGRYSSRDLAGGLNARGVSKLRSRSKGLGWVPDTVVDLLQNVAYVAKTYSVSRARREGDLIQAQWEPIVAIELFDRVQQMLGGHRHVGRATVRARYAFAGLLVCSECGRPMRATTNYGISYYGCRRDVALAARCPATKRGVREDRLLGWAEVLFRRIEGVQPSDFAEAVKAMAEPAPRYVNPDSVERVERSLGRLQQLYLWGDITDTEYERQRTWMQEQQASIQSSLHRPSETVQIEGIADAWRRGDALLRRELLGELFEALIVRDGAVVEYAAHRGRVAEVVAMVELANGRPDFAFGGKGGIRTLEGALAPYPLSRRALSTTQPPPRSEGT

SEQ ID NO: 1689 - protein, 540 aa, unidentified
  source 1..540: note = uncultivated organism
MAATAARRVVREIPRASLFVYSTDAVQKMIVAAYARVSTEKEEQEDSFERQVEHYTALIKSKDEWEFGGIYADPGITGTRAERRPDFMRMIADCRAGKINKVLVKSISRFARNTVDALNYIRELKDLGISVYFENENIDTLTPGGEVLITILAAMAEQESRTMSTNIKWTYQKKFKNGEIVLNTGLMLGYVRAGKDAEGRDIYEINEEEATIVRRIYGEYLAGVSIHRICRGLEADGIPTKLGKKRWAYSVVHSILRNEKYTGNAILGKTYKPDVLTKYRKKNNGQAPMYYVEGTHPAIIDKEMFDMVQNEMERRKETKEQAVGNGKYSSKYPFSGLLVCGECGHKLRRHVRRVGSGKTVPAWGCCNRITNGRDVCDSHHVNEETLQRTYLAAISDMIDDAEEITAAVRESAGLVMQPENAETLNRIEQEIIEVQEAVLALHKAKQSCSVSATDYATQIQAYSQRMQELEAQQEELKSVATRYAEVKAWLDAFEKHISDGSIMNADDSAILKQLVEQIIVGTSCIEIQFKCGVSVEKDYE

SEQ ID NO: 1690 - protein, 552 aa, unidentified
  source 1..552: note = uncultivated organism
MAPQKKTRCAIYTRKSSEEGLDQGFNSLDAQREACAAYIASQKQEGWVLVPGHYDDGGVSGGTLDRPALQHLLCEIEAGRIGMVVVYKIDRLTRSLTDFAKLVERLDAAGCSFVSVTQAFNTASSMGRLTLNVLLSFAQFEREVTAERIRDKIAASKKQGLWMGGLPPLGYDPHPDPNTRELVINPAEAETVRALFQLYDDHESLRTATEEAGRLGLRSKLRSFTSGRMQGGGPLSRGQIHHILMNPVYLGKIRHKDHLWPGRHPAIVDDALWARVQQKLQKTAMRRRGAAAGSTPVPLTGKLRDETDDRLTPTHSVKSGRRHHYYISNRLVSGGTDPTGWRLPGPRLEAAICALIADHLERAAHDHHVLAQPDLRAGRELLTVARPLVQALRRKDAAIICALIVRGTIAPQMIQLTLDREHLASQLGVATDEMAPDLHQLSAPVALRRRGVEARLVLGTPEPTPDPVLLRTLLDAHRWVADLRDGVSLATIARNAGHHDPYIRTRGQLTFLSPKIQAAIRDGTLPSNVTLKRILAAPVPLDWDQQEKVYGV

SEQ ID NO: 1691 - protein, 546 aa, unidentified
  source 1..546: note = uncultivated organism
MPRIKETKPEKAEGKVKRAGIYCRVSTREQGESGISLKSQERRCVDYCGAQNYQVIDTFVDAVSAKDLERPEMMRMIQAAKENKIDVIVALKLDRISRVPRDFYNLIEELELYKTGVVVVEDQWDTTTPVGRMLVGILIQFAAFEREIGIERTKAATKQRALDGKPGGGVPPLGYDRVKKEVHTNSTEAKIIKRIFREYLSGIGPKRIADALNKDGFRNKKHYNPDGTFRNGGRKFTEKHIHNFITNCLYCGRIHFKGEMLPGNHDAIVSEKDWNDAQEVVALNRDKRNLGNTKRDQFVLAGLLTCGICGDIVSATAGTGKQKKKYTYYQCLSARAPEGKRNDCNFQSIPTEQLENVVAGMIKEIANTEGFLKAIEEEFIATSTAKELEGLKNDLKNTNRQISNTEMKIKNLIDVIANGSLDDTSPIEEELGSLNTLKQGKAAYRDNLVQEISQKESPAPNADTLMTIYKEFDELWDTFTKSERRKVLNLLIDGIEINYPKGSDKGEVILYLYNEPPIKSLYEITEGSHVYLCMLRRRDLNSRPGD

SEQ ID NO: 1692 - protein, 528 aa, unidentified
  source 1..528: note = uncultivated organism
MASEPKSIRCAVYTRKSTEEGLQQEFNSLDAQREACIAYVASQKHEGWQLIPDYYDDGGFSGGSMARPALKALLGDIEAGKVDVIIVYKVDRLTRSLADFAKIVEILDAKGASFVSVTQSFNTTSSMGRLTLNVLLSFAQFEREVTGERIRDKVAASKARGMWMGGCVPTGYDVIDRKLVVEPQTAQLVKHMFARYLELGSVTLLADELNEQGQRTPIRTSRAGRTHGGAKFSRGMIYQLLRNRTYIGEVSHKGSVFPGEHAAIVERTQFEKVASLLTTNAVDRQMGTSFEHPSLLAGIIWSNRMHRLVPSHSTKRGRRYRYYTESIITLATGEKALRMPAGEIDGLVMAQLDRRMIFAAREAGIASIPAENALSGRKQILAFIDRIVVSAEDVTIDFKRIFDLPADSITIAAKLTRRGKEMKLAIAPEHDDNASQQDPALIQFVVRAHNARTALEQSSGMTIEQLASKQGYSRDYYVVLLRIAHLAPDILSAILDGRQPAALNRQRLARIAALPTDWQGQRAALGFG

SEQ ID NO: 1693 - protein, 540 aa, unidentified
  source 1..540: note = uncultivated organism
MARKSRKNLDAAIAEPIAASVFYNAAAYIRLSSDDKKKRGDSLETQRNIIENFIAAAPDIRLQNIYSDNNATGTNFERQGFQQMLLDAESGSINCIIVKDLTRFGRNAIDAGYYLEKYLPALGVRFIAVTDGFDSNDGDGGILLPLKNIISESYALDIGRKCRAVQRQNINDGRYVGRMAPFGYSKAPDDCRRLIMDEQAAGIVRQIFDWAHDGHSIGEIVRNLNNADTPTPSRYKQAIGISTNGDSVSGEYWQERKVRRILCDRVYVGDMVQGKTRKVNGKQIDVPPDEWICVPDTHEAIISREFFEETQINMRQAADRYNVNRGATSPYSQHIFKGKVFCAKCGRAMHRHRQGWNGVYWYRCRTLWKYAKDACVPVSVREEELKDSVITLLHKQSEAILGRHASIDRAYGKEAEAGYDAELREINGNLDKDGRMLRSLYESMVSGMITLDEFIQMKADYEAKIAAMSDRANEIRNLRSDMEARLEGYRDMADAVASLIENDSLSAEIIERLIDRILVHPDKSFEIILRYSDEFREVCA

SEQ ID NO: 1694 - protein, 504 aa, unidentified
  source 1..504: note = uncultivated organism
MIYDALYGRQSIDKKDSISVESQLEYCRYETHGEPYLEYTDRGFSGKDLKRPGFEKMMADITGGRIRRVIVYKLDRISRSILDFANMMEFFQKNQVEFVSSTEKFDTSTPIGRAMLNICIVFAQLERETIQKRVTDAYYARSKRGFYMGGRIPYGYRLKKTVLDGIHTSMYEEVPEESVQLKLIYSLYADGSHSLGDIVRYLNERRIENLRGSIWNTARISEMLRNPIYVQADTVIYHFFKRQGAVICNPVEDFTGSNGCYLYRTMTSSGTGKRYELADKELVLAPHQGFIPSALWLTCRMRCMNNRQSTKTCKAKNSWLTGKVKCGNCGYALTVRKSNTRHSRYFVCSAPVHTDGCKGTGCTVYADVLEDYMAKAICNKLSELENVPETNTRLSIKEKKKENLLQQTKEEIEELLSRVPEADKVLMAYINEKVEKLDTVRRRLEKELSGSGNAGLERQNQATHFTAYANQWRALSFEDKQTVTDLLLEKICIAKDTLWITWRI

SEQ ID NO: 1695 - protein, 505 aa, unidentified
  source 1..505: note = uncultivated organism
MALTRVCIYTRISTDEENQPTSLHSQRERLQAFCTAQEGWRIVAHKQDQATGTKLDRPGLQAALDLARSGAVDMLLVYRVDRLSRKVRQLAQLTEELDALGVVLKSATEPFDTGSAAGRMMLQMLAVFAEFEHATIVDRISAGIERRAKEGRWFGGRPPFGYVFSNEERVLVPDPVKAPVVRRVFDLYTRKRLGTRTIAQQLRDEDAPAPSAGWGHPAVHWIINNPTYVGKIRWRDRIFDGVHEPLVDEFTFAKAQAIMSERGEHARRRGNASDFLLSGLLRCGKCGKAYIGMSANGNGGRYHYYACTGRQKYGPKACTGERLPRDKVDEAVLGQLVSIYRDKDVVIEAVATATAEAEKRRPEFEQRLASIGAEINRAEHALERYYEAFEQGKLSPERCEDRLTRLQARLDDLHAQQAELSLQAPDEATQAPTAAHFAEVAELLETVIAEADPQKAKALLRLLIEELRVNSRAEILPTYRLVTPAVCAMSEKVGAPGIEPGTSRV

SEQ ID NO: 1696 - protein, 561 aa, unidentified
  source 1..561: note = uncultivated organism
MKRTVAIYARVSTEHEAQLSALDNQVQYYDNVLNAHPDWILYKRYIDEGITGTSVNKRKNFMNMIKDAKDGCFDLIVTREVSRFARNTVDTLQQTRELKRIGVEVYFTEDNIWTFNDDDGELKLTIMATLAQNESKKTSQRVKAGQKISFENGVFYGTGNILGYDKVGKDMIINPEQGDIVKFIFDSYLHGNGTTTIKYDLERKGFLTATGKKTWSAGTITRILQNPFYCGTIIYRKCYVADYLEQKARKNNGEVEQVIIEGRHEPLISKEDFEKVQSIISKHSKYITNKRKCGHGKATSVWSKKLVCKCGSTFNRRIYHRNEDSTTYCYQCYNQKNTGSANVRKRQGVDLEGACGIPSVQEWKLTLIANNLFSRLCNDKERIIKIANKLIETNIVEEQKEDNGEVEIIDKKIETHKFKLSKLLDLFLADTITKEEYTHKKKEVEDNIAILNKRKEDIIISNDKPENNINNKISELKKLINNILYDSNSNISDKMIDGLINKVEVDDDKFTIKLNCGSNNDEATLITKFVITKDDITRFVKENNTYKKLRIKKPIIVDICI

SEQ ID NO: 1697 - protein, 560 aa, unidentified
  source 1..560: note = uncultivated organism
MKRVRMLLRVSSNQQLEADGDLSVQRQLVKDYISNQFDWQPDEKEYFEGSNSGYKNAVADRDVLQEALQDAKAKEYDILVVYKDDRIGRRMWEIGAYVMSLKSFGVDIYTVKDGCISPESDDIMGQMMLALRYGNAQKSSSDTGMRVKDTAQKLVQKGKFMGGMAPYGYKLELSGEVSKHGRALHHLVVVPEQAEVVKYIYELSLHKEFGATKIAKLLNEHEIYKNRAPRDIWKSGTITSILTNPMYAGYTAYKRRERIDGKYHKLDRKDWIFAEKPDLEIAIIDENMWNRVQDTRRQRADNYIKSIENQDVTVIRRNSGMLALIDVLYCGYCGRKMTNGSKYNYWTIKDTGERRTSKIAIYKCQNAWIGVPHDKATQYRADQIEPVVFEAIAEYIGKLQENEDVFTQIEANQNQQKVIKQAELDKEQSELENIRSKIAVMESNIPNAMTGDYPLSLEELAGIIRKHRELEKKHRGRIEAKKAELDAMKVSMDDWESIRTRIPTWQDVFWNADTSTKRVLVNKLIERIDITKTNINIRFKINLNDFFTLPRITDYHDVPE

SEQ ID NO: 1698 - protein, 526 aa, unidentified
  source 1..526: note = uncultivated organism
MPSALNAVIYARYSSHSQTEQSIEGQLHDGYAFAEKCGYRVIGEYIDRAMTGKSDDRPDFQRMIKDAEKRQFQIVIVWKLDRFARNRYDSAIYKRMLKKHGVRVVSVMENITDSPEGIILEGLLEAMAEYYSANLSENIRRGQQESIKKGWYCGGHIPYGYVVEDHRLVPDPATAPLVQEIYQRYADGFSLALIADDFNDRGILTRMGRRWSVSSFDTIVPNPAYIGDYTYAGQIVPGCSTPIVEKETFFRAVARREKNKRCPAASRSAVTYLLQGKLFCGSCSSAMCGDSSTSKTGDKHYYYSCSARKHRKNDCSKCREKKDFLEWYVCEQTVEYILAPQRLREIASAVVQIYNSDTDDARIRDLENRVRSLESEMNQLVARFGTVPDKMVARITQRMEEVDADLSETNLQLSKLRMQQKIRLTEEEVAAWLRTFSRGDLFDMDFRQRIIDIFINSIYLWDNKIVIFYNISGGKQTCLIDPPAPDEIKKAGQSATLSGLGGVYHGKVAPKYVFIRGMLGLVLMRE

SEQ ID NO: 1699 - protein, 550 aa, unidentified
  source 1..550: note = uncultivated organism
MNKPNNSKIYKAAIYLRLSKEDDSLGDGSFKSESNSITNQRMLIRNFLDSVSDISPIMEFVDDGYSGSNFDRPDFKKMIEVVKAGKVNCVIVKDFSRFGRDFIGSGQFMSKMFPELGIRFISINDHYDSLTADMCETALTMPVKNLINDSYSRDISVKVRTNQRIKRINGEYIGSFAPFGYLKNPKNKNKLIIDASVAPVIKDIFSMKLIGFSAMAIADKLNERGILSPYEYKKSIGINCSAGFKKNAKAKWCAASIFRVLTDEVYIGNLLQSKTEKVNYKVKKTINKPSQEWVRCDDIHESIISKVDFEAVQLLLRRDTKSVNKENAPYIFSGMLFCGDCGKSMVRRLNRYKDKEIPYYVCSSYNRSKNCSRHSIKEELLEEIVLDMLEIHIKKMVDTQELAARIKDITVDYDQVLFQDLEIEKMKEEQKKLLVMKNALSTDLRDGIINEEQYQKYSKVYDDKLQKLDKSVHRQEQLTKDIYENGAQAEDRLKRFKKFLNIDKLDRMALVTFVDRILIFEDKTIQIVFKYQNEFDKAKVIADSLDFEVV

SEQ ID NO: 1700 - protein, 510 aa, unidentified
  source 1..510: note = uncultivated organism
MEKAVIYARFSSSRQREESIEGQVKECKAFAKYNGYEVIHIYADRAISGRTTDRPEFQRMIADSEQQKFAYVIVYTFDRFSRDSYASAMYKHKLKANGVRVLSAKERTDDSPAGVLMERVFEGFAEYYSLELAQKVKRGMRLNATKGIWPSGAAPFGYKKNENGLLVQNPKQIPALIRVFEMAAQDYQFKEIADYLNMQGFRSPNARGQGLFTYDRVQTILRNPIAIGRFVWNDVTLENYNSCQVIPEELFDSVQRRLKNKRRVGSRQLTKTSNYALARKIYCGNCGRPMHGSSGKSHTGATHYYYRCSSHVRGYHDCTMSNINRNQLEEAIADEIVKILSDEETIRTIAKQAIATIKTDPDENPELQAMQRHLYELKGQAEKICDAIATMGINELLSARLLALQEQIKKQEAQLATFSPRMKAPVITEEMIIFYLQHIPSEDRQRLLDELVQSVVVTKKDSDAFYSVTVVLNYTSTQTCNNAFSLDLQQVCKQDGLVGPVGFEPTTSRL

SEQ ID NO: 1701 - protein, 533 aa, unidentified
  source 1..533: note = uncultivated organism
MKIAAIYSRKSKFTGKGESIINQIELCKRECSHLNIEKFIIYEDEGFSGKNIKRPQFQRMLIDAKEKKFHVLICYRLDRISRNIADFTTLINVLDSLNISFISVNEQFDTSTPMGRAMMYIASVFAQLERETIGERVRDNMLELAKSGRWLGGQTPLGYESKKSTYLDSEFKEKYLYTLSPVKNELNVVKIIYDKYIQYKSISQVFIFIFKNNIKTKNGVDFNKKRIQLILRNPLYVRANESVMNYLKTSGMNVMGKANNKHGILTYNKSKGSRIKRDITEWIAAISNHEGIIDPSTWLNTQQILDANKNKAPRLGTSAAALLTGTLKCFKCGKSMIVKHGHISALTNKKIQYYVCSTKDYSKGIRCNNPNVRVDELEAAVINNLKNISIDKNILIEELTKIKIELSKNNLMLLEMDNLPEQIKIKQTQIDVLVNQLSLDNEVSKYIRPQISKLGTEINKLNIKYDNLKTISCKPNDKESTINKFLYSLDDFSSFINILNFNNMRLLINDLIASISWDGDKGVIKIKLISLKH

SEQ ID NO: 1702 - protein, 552 aa, unidentified
  source 1..552: note = uncultivated organism
MQLAALYIRVSTEDQAQEGYSLEVQREYLEAFARREGCQIYRVYRDEGVSAYSTNRPELQELLKDAKNKKFNVVFVYKIDRFSRRLKDLLNLVEELEFYGVGFKSATEPFDTTTSAGKLMFQQLGSFAEFERNRIKERIFPGMVRSVKEGKWQGARYAPYGYRYNKEKKMLEVVEKEALIVQKIYSMYLSGYSTSQITAYLYQRGYKSRTGRRFHSKLVCDILKNKVYIGKIVWNRRHYDINKKTKEGLGKGNRYLPNKNTEVIEVQGKHQAIISEEDFYKVQRKLSYHKRGTRVFNKYSHFLTGILKCGICGTNYMGYTNISSHRTGVRKKWYRCRLKQETRGIECNNSNVVAEPLEEFAFNILEKIVSNPAIKEQRFKQLVKVMVEPDDDIIAEINSLKEKLKLNLDKQNKLAEMYLNSMIGREVYEKRQDPLRDEEVRIRERIENLEMGLVEKERSKEYHVFLHSILANFSETKKCLTVAEKKSLLRLIFKKIVIKYGEIIEYELYEPFNSLLKNGDVRECDKKWQVIVNQTVTKKDPSVCIYARSVVK

SEQ ID NO: 1703 - protein, 601 aa, unidentified
  source 1..601: note = uncultivated organism
MSERISRCAVYTRKSSEEGLEQAFNSLDAQREAGIDYIKSQKHQGWVALPARYDDGGYSGGSTDRPGLQRLLADIQSRRVDVVVVYKVDRLSRSLADFARLMQTFDENQVSFVSVTQQFNTTTSMGRLTLNMLLSFAQFEREVTGERIRDKIAATKRKGIWIGGIPPIGYRLPREGDIGHTPGDRTLRVVDPEAAIIRSIFQGYVETGSLVALVKRLDKAGNTTRRWRSAVGTQHGGRTFGTTQIYKILTNPIYLGKITHTRGGSTAIYDAAHQPIVSRELWDAVHGRMARIERETRHRWTNTHLLRGKIRTFEGYALSPQVVQKVVERGDPAAGTKLTRYYTSQKAIKQGYANCPIKTINAGLVDDLVRAVVMDYLKAASGVNLRPQPAEQRDYWIRDVVQKVIVAPDRLTVEIERDRIRQIAAALKATNSESEEGPLGAKLRSRASPGAADKAPDVMPTCPYKPDVDDSGPRTILTLRVQIKRMDGRRVLLTPDGDDLLLTIDANGIPVPNERLVRAIGQAFAWRRELLKSGDWVSSLCERFGVTDSWIHQSMALTRLSPSILRGILTGQLKPSIRLDDLLAAAQHLEWNVQHQVLGLK

SEQ ID NO: 1704 - protein, 541 aa, unidentified
  source 1..541: note = uncultivated organism
MLRINNYRVAKYMRLSRDDGDDRESESIENQRDIITNYIAEREELIDTEEYIDDGYTGTNFNRPGFQKLLKDIKDGKINCIITKDLSRFGRDHIDTGYYLERYLPAHSIRYIAIGDGVDTLNPDGLQFLTFKLSFNDYYAQDISNKIRSVKQRKIEKGEFQGNTPPYGYKKDPNKKNHLIIDEYAANIVRTIFDQFVNLGMNKSQIAKKLNDKNIEAPGTYLKMGICLSKPSSNPNGYQWSIGTITKLLQNEVYLGYVVGRKYRKVSHKVDKVVKLDRKENIIVKNMHEPIIDELLWKKAQDKMKRACRVRNSHDKDILKEYVYCAECGGKALMRHKTVVRKNGNVWNNVTYTCSLRNAHRNNCKCKPINGEYLKKQVDETIRNEIRKINYSDKDIEQIYNQAKAESEKGIQNLKARKEELRIKIEEKRTMMSEIYSDKINKIISNDDFEMFYRQMENEKNKFQNEIKKIDDDIEKISKNSSDISSNIEIIKLARDILDMKKIDEKVYAMLVKKIEFDSNKTITITFSFGNTVVVKNKGRR

SEQ ID NO: 1705 - protein, 553 aa, unidentified
  source 1..553: note = uncultivated organism
MPKIRCAIYTRKSSEEGLDQQFNSLHAQREACAAYVASQKAEGWVLLPTEYDDGGLSGGTLERPAMQRLLADVDEGLVDQIVVYKIDRLTRSLSDFAKIVERLDGAGASFVSVTQSFNTATSMGRLTLNMLLSFAQFEREVTAERIRDKIAASKRKGLWMGGNVPLGYDADGRTLKISETEATTVRTLYDLYLKHGTVRAVKEEAARLGLRSKQRVSPAGRISGGTPFDRGQIYYLLTNPVVAGRIRHRKVIHDGQHPAIIDPQVWEAVQSKLKADTTKKRGKDTAGSSFRSLLTGKVFDETGNRLTPSHGRTDNGIRHRYYVSNRLIARSGEKDITGWRLNAQMLEDLVVRIAVTHLGTATFIAATITDTTADELLAARGRMAERLGEEALNDVRARTVADLIDRVDLSPGNLAIVFRRAAIGDLLNVAVDRIDQSQLAVTTPFTMRRRGVETKLILGNEAQPIDRKLIENVAAVLSWLDRIKAGKTYAEIADEDGIPKYRVQQAICYAFLAPDIVRQILQGRQPVGLTSKYIFRFPLPMDWAEQRARVTTL

SEQ ID NO: 1706 - protein, 538 aa, unidentified
  source 1..538: note = uncultivated organism
MSPASLACPSPAGSYCRLSALAAEYDPISPANQRRLNHQAAARNGECILPEFEFEDFASARKDAERPGFDRAVKALLDGRIKTLYVAKLDRLSRRGTGHVGLLLDRLEQVGGRIVFGGDDLDSSEPGARQIIAILSEQARAESDAIKWRMEQWHASNRREGLWRKKRPYGYRVVDGKLQPDPREAAVVERIVAEFLAGASLRSIAIRLNRDGTDCPNAVKHEEAKAAGRRVRPLATRRWSYITVRAILCAPSLAALISHEGQLVRDDNGDPTVAGTGIVTLTERVRILLEFERRGLIVRSARDPERAGNGRPPKYLLTGFVHCSLCTAAMARHVGRRGRDPVAVYRCARHGRGQQCRGVSIYAEDIEREVVRRFIAKLAALEPGDPLLERIVERWPALSVPRGHADRAILEEKLRNAETRLADLYEARYQRGEFDSPEDMVKYEASRGRLAEQRDAARDALAEFGPPPILDLALLLKTELSSEAWPHLPLQRQRELLGLAISRVYVLPSEGRGWHATPAEDRVHPVWLTESDSFAREM

SEQ ID NO: 1707 - protein, 547 aa, unidentified
  source 1..547: note = uncultivated organism
MNMRAVIRAETLRCAVYTRKSSEEGLEQSFNSLHAQRDACEAYVRSQAGEGWVLSPKAYDDGGISGGTMERPGLKLLLADIEAGKVDVVVVYKVDRLTRSLTDFARIVEAFDKAGVSFVSVTQAFNTTTSMGRLTLNVLLSFAQFEREVTGERIRDKIRLSKQKGMWMGGVLPLGYDAKDHALSPNPAEAETVNAIFRRYLELGSVHALCAELNHKGLRSKAWTTARGRAVGGAAFSRGALFHLLRNRHYLGEIVHKDQTHPGLHPAIIDRALFDAVQKRLDAQQAQPRRGSVKVASSLLTGRVFDGEGRRFSPTFSTGRSGRIHRYYVASEIQQGRPAAAGSVRRVGADALESLVLHELRRLSGRSAAEPAALLTLLVRLELRPEETHFVLDQTVLFGCDHPELATEDLRSRLGTGERLVVEPGEEPRLRIALPRRMQLRGGRTWAIFSAAMSDSPSVDQALVAALQRAHLLAASAAEQAPANPYERKLIDLAYLAPDLQRNILLGRQPPELTLAVLLREDWPLGWSGQRRLSAALDVRTSPQRSR

SEQ ID NO: 1708 - protein, 537 aa, unidentified
  source 1..537: note = uncultivated organism
MTNKVAIYIRVSTVHQIDRDSLLVQRRELSAYAEYVLGIKDYEVFEDAGFSAKNTDRPQFQAMMERIRKGEFSHLLVWKIDRISRNLLDFSSMYAELKKCGVAFVSKNEQFDTSTAVGEAMLKIILVFAELERKMTSERVSAVMLSRANNGQWNGGRVPYGYNWDGTSFSFNRDEAANVQRIYDLYERTRSTLATAKRMNDLGITSRNGTDWSATTIYKVLTNVFYVGRYRYNVHAEGDGFEKRDKSEWLTIENHHDPIINLPQFTRVQKMLADNNKTSRRFRTCKNVHIFAGLLVCGYCGSNMSATPGKTHRDGSNPSTYGCSKRRTGTCPNRFITDNALAPFVFSVIQILLTTKELPLKSIERRFRASLHVSVAGLESFQSDESDLFSMPKDDVPERDILLNKKHNIESALSRLRNLYLHNDQMQEADFVKEQKTLMESLRSIDERLANTISSEEELRTRATYFVLLDKLSKGQFDYITIAPYAEKYPLQTFLRSCISNITIKDGFVTSICFKNQKTLFFASNQKTPFSPPSGQS

SEQ ID NO: 1709 - protein, 521 aa, unidentified
  source 1..521: note = uncultivated organism
MKAKEKSKQKAKVAFYTRISTDEDHQKYSLDAQKDRLEAFCRSQYGEDWELTKLYRDMDSGTHMNRPGLEEMLYDSECKVFDTLLVFRVDRLSRKVRELAQMVEELDKCGVALKSITEPFDTANAAGKMMLQMLGVFAEFEHATIVERVKTGMEKKAQRGKWVGGPVPYGYTLDKEKGLVVNEEEAVILKKMFKMYAFCKEGTSTISNKLNEAGYRKRRGKKWDKRVIIRMLQNPVYLGKFKWREVIYEGEHEPLVSKELFERVQEVLEERHEELNGRRFNNGNERLLASIIKCSKCKSPMVGISTRKNGKKFPYYVCSKRWANHDCDQDYIRADLLEAAIIQDVKTMFQDEQFMARIWEEANKRLSAEKPDLDKEIRKIETQMTKARSAVDRYFKAFESGKMKPEMCNEKVADLNSTLQELEFEKRDLEARRKQLDLPTIDKEMLRELVEHFEKVMAEAPNPQKKDLMKKLIKKVVVHDRRTVEIWYTLPNRNGVFNRGQMVGRAGIEPATNGLKVRCST

SEQ ID NO: 1710 - protein, 559 aa, unidentified
  source 1..559: note = uncultivated organism
MKKTRCAIYTRKSSEDGLEQEFNSLDAQREACAAFIASQKIEGWVLVPDAYDDGGLSGGTLERPGLQRPMADIRSGKVDRIVVYKIDRLTRSLGDFAKIVEVLDEAGGSFVSVTQSFNTATSMGRLTLNMLLSFAQFEREVTAERIRDKIAASKKKGLWMGGNVPLGYEPDGRTLKVNEPDAQVIRTIYDLYKEHGTVRQVKVQADRLGLKTAIRTLSTGRLKGGTPFSFGHIYYILTNPVYAGRIRHKASVYPGQHPPLIEPDLWDALQDQLKNRTVANRLGKERGMSRGGRKQVSLLIGKLFDETGDRLTPSHTKSSKGHRLRYYVSNRLIRSKGAKDPSGWRLPGPELEKLVANLLRKHLSTPSVTANIVSDPTTEETVAVAEMLVEITGGGSDEQTEKSSHLMLLCHRIQIKPGQIKISMSPENLAELLDVAAERVSEDCLEIDAAFQHRKRGVETKLILADTANPRDETLFKNIAKAHHFFDLIRAGKTYAEIAASEGVSKHRVYKLVDLAFLVPDVVRDVFVGSQPMGLTTEWLLRHAIPALWDEQREMFRTL

SEQ ID NO: 1711 - protein, 522 aa, unidentified
  source 1..522: note = uncultivated organism
MIKVASYCRVSTDSEDQANSFESQQRYFRAYIERHPDWELYEIYADEGTTGTSTKKRTQFNRMINDAYRRKFNMIITKEVSRFSRNLLDTIAYTRELKALGVGVIFMNDGFTSLDPDAELRLSIMGSIAQEESRKTSSRVKWGQSRQMERGVVFGTSMLGYDVRDGKLTINPEGAEIVRMIFQKYAVEKKGTSAIARELREAGIKTFTGSVMWNSTSIVRILRNEKYVGDLIQKKSITPDYLTHEKKRNTGQEERIIIRDHHEPIIERALWNSAQEELTRRNRNRSGSSGHSTRYVFSGKMVCAECGARFVSRRKTRKSGSSYMRWGCYTASRFGQKQTDARGNEIGCDVGKQIRDDLAVELLTKVFKSIPADFEWIIQNLTGIVVSAIASEADLLDNPDRLRKQIDQQQKKKEAAIDAFASGLITKEELRQAKVQYDAKIAMMKKKLCACQRAQMPTSSQRQSEISRSIRSIVSCEEFSEPFYKAVLQTMVVHKDGTLEIKINHLPQTWVYCLIYHRANPE

SEQ ID NO: 1712 - protein, 513 aa, unidentified
  source 1..513: note = uncultivated organism
MANVTYIAPVKAESTIHKIRCAAYCRVSSSSEDQLHSYAAQVRFYSEKFNGSETEELVDIYADEGISGTGTAKRTEFQRLIRDCKRGKIDRIYAKSLSRFARNTKDCLNTVRLLRELGITIFFEKENIDTAKTSDELMITVMGGLAQEESTSISQNMRWSVRKRMEKGTFVQSVPPYGYSKENGKLVVDTETSEIVKQIFCWYLSGIGTNTIAQILNDRGILTGMYQKKWNHKIVKYILSNEKYTGNSLLQKTYKTDTLPMIQKRNKGERDQFYVKDTHDALISEADFQKVQAMLAESTVRFHRQSKGKHILGSMIKCGECGSTYKRKRSNGKYYWSCIEHDIDSQSCSAKPISEETIQQAFISMSNKLILHNKEILLPLRRNLQELNMRRFSGNTKVLDIHKSMADIKEQRHVLSRLRKKGFMDEKKYNEKLTELESQLARQERELKKISKAENEDDTLEQLDILIDCIESKSSILTEFDEEMFSMIVEGILVKDKTLEFRLISGIAFKEHI

SEQ ID NO: 1713 - protein, 529 aa, unidentified
  source 1..529: note = uncultivated organism
MEEKKIAGIYIRVSTEDQAREGFSLGEQKEKLQDLCKYRGYKVFRIYEDAGISAKDTNRPEFQEMLEDMRNGKINVIVAYKLDRITRSTKDLENLIIEIQKCNCGLECAVDDINTETANGKFFTRMLTVLSQLEIERCSERTRFGMVGAIKEGHIPGSIPLGYKRDNKKVVIDESTKDTVLKIFDLYIGGNSYQKIANILNKQNEMNHHWRDNTIQAIVNNRLYTGDYIQFKNTEKEIIYENVIPTIISKDTWEDCQNQKGKNSRNYTRNITYLFLQKIRCPNCNRVMAGKAPGGKKKFKYVYYQCLKCGDYVREDLVEKQLAPWLVELMNYDSLIVNQFAPLLTNKLNNPTDKLEKELETLNIKKERIKKAYVNGIIEMEDFDKELKDIDYKVNTINQKLKKEKVYDSVSFDFESLMVCRDYERFSFIEASDGLDFLIELKVDNKSYRLYTTKEKDRNEIERYIKMLSNIYDIFTIEKEIETLANGDVKIRIEESDVREGYRAVKLIPIKRELFESNTSRKVILICIK

SEQ ID NO: 1714 - protein, 508 aa, unidentified
  source 1..508: note = uncultivated organism
MLVLYGRKSVERENSISCETQIEYCKMMIKPEERGERVVTLIDNGFSGGNVNREGFQKMMRLVRQGKVRKVIVYKLDRISRSLSDFMKILQEFKEHQVEFVSSQESFDTSSPYGDLIVKILMVFAEFERTSTINRVTQAYAHRSEMGFYMGGRQPYGFELVPTVLHNIKTKKLRPIPSQAEQVRYIFEVYAQETVSLRRLLDILVTEGKQPLNGSHWTTAKLSTLLKNPIYVKADSDVYDYFDRHGTQIVSDVSLFTGAWGAQLYGRTKHNFANPDWSDMKLVVLTHPGMVDSDIWLKCQQKLERNRQITNSYSNPTSWLAGKVICESCGHTMTTIKGRANQKGEVRRYFNCTGKTHKKICTGPKVSIYAEDLENMVYDCIGEKLADLRETGHRAQKEDHRAINDLKLKVKAIQQWEKHLLDTMLTGGFNEDLLSIANQKATQWKQDRLALEKRMEELKRSAQEPETAVNLAKSWERADYTQKKAVAMIMIHKILIREDGSALIIWNI

SEQ ID NO: 1715 - protein, 542 aa, unidentified
  source 1..542: note = uncultivated organism
MQQKHAALYCRLSVDDGNISGSVSIETQKILLEQYCQSHDITSYEFYCDDGYSGTNFNRPAFQRMLSDISTGKINLVIVKDLSRFGRNYVEVGLQVEHFKEQNVRFIAADDHYDSTINEDDLMFPMRNVMNEMYARDVSKKTKAAKKAKAKAGQFMGSKPPYGYKLDPNDRHHLIVDEYAAGIVKRIFRMTADGMGYNKITRVFREEKVLNPITYFNQNIPDFYKADYWRKEFDWHVTSVRAILNNEVYLGMLIYGKYRNKSMKSTSKVKNPPEDWIIAENTHEPIISKELWDTAHKVMSSKRRPVKTGELQIFAGLLYCADCGHCLTYGQKQRKDGSYYGAYACWMYRTHGKEYCASHYIRYDTIYDLVLINLRTVLWNYRNNTQKFYKILERKYETDCMKEYKELKNEYEKKQRRVEEVDKILCKLYEDNALGRITDERYDMLSTQYESEQNAIKKELPEMIKRMGELNAQNDSTEKFVKLIRKYTVIDQLDAAILNELIDKIVVHHKEVAEDGRVFQQVEIYYRFIGKLENAAESKNAA

SEQ ID NO: 1716 - protein, 523 aa, unidentified
  source 1..523: note = uncultivated organism
MKVAIYVRLSKEDDDVRKQISGKQESESIQNQKSLLIQYAVERGYDIYNIYTDEDYSGADRDRPAFSRLIQDASQHKFDIVLAKSQSRFTRDMELVERYLHGKFPEWGIRFIALVDHADTNDASNKKARQINGLINEWYLEDLSINVRTVLTHKCQSGQHIGSFAPYGYAKDPADHNHLVIDPVAAAVVRRIFSMVLSGYGASRIAKTLNEEGIPNPTRYKQQQGLNFAPCQKSRVPGLWSTASVRTILTNQTYTGDLVQGRHKKASYKSKKIVTLPKDKWIIVPNTHEPIITREAFEQVQQLRCERAVPCLHSGVIRPLAKKVFCGVCGGSMQLCGNGKQYRYLRCRIHTYKPSLCPNRSISLDALDAIVLQRIRQRLSELLDPDKLDLSAFTREAEDRADALQRELDRLHRERQKRQGAVTALYQDHAAGVVNDEVFAQLDDGFRKEMANFDRRIRTLEQERDGTLADPAARYDAMRQMAEELSQPQVLTRELVCALIDSVQVGPIDPETQKRNIEIRWRF

SEQ ID NO: 1717 - protein, 516 aa, unidentified
  source 1..516: note = uncultivated organism
MKIKKIEAQPQEVKKLRVAAYCRVSTDNDDQKESLEAQKAHYETWIKRHSNWDFAGIFYDFGITGTKADVRDGLQALMYECRIGRIDYVLTKSVSRFSRNTTDCLELVRELLSYNVPIYFEKEKLDTGSMETELVLAILSSLAQEESESISKNVKWGNQKRIKNGRYRAGTAPYGYTFDSDGNYAIIPEEADIVRFIFESVVSGMGVHKIGKELDSRCVPTRKGGKWSTTTIMGILNNEKYVGDVRYNKTYTDDSFRRHRNKGDVDSPEVKDHHEAIISRDLYATAHEVLEQRLRERGIRHDDEKYQRRFAFSSRIICGECGTTFKRQVISSGISWCCKKHIADKDSCSMKFIHEEAFQSAFTTMLNKLIFTRKILLRPYYNALRVAGSDENLQRIMSLKESIQKNSDRKCELKKLRVKGIIDAVMYNQELNRMEKQNEEARREIQSLGNIESGLMLRETEKLLHFIEATEMLDAYDEELFTSFVDSIIVYSRDSVGFKLNCGLTLKEALCTDTRS

SEQ ID NO: 1718 - protein, 533 aa, unidentified
  source 1..533: note = uncultivated organism
MAKGRNREEQPVALVQSTVRCAVYTRKSTDENLDSDFNSLDAQREAAESYISSQRQQGWVVLPEQYDDGAYSGGNLERPALQRLLADVHAGRVDAIVVYKIDRLSRSLLDFARLMEDLDQNQVILVSVTQQFSTSTSMGILLRNILLSFAQFEREVTAERIRDKIAAEKRRGKYLGGLPPLGYGVDRERKRLVVIDEEAALVRLIFHRYLELRSFVALGKELNASGHLTKSWTTKKGKVRPGHAWNKAHIYRLLTNPTYIGLTKHKDKRYPGLHEAVVEQPVWDQVQAALTGNSGNRGKARGAKKPALLKGIIRCGHCGTSMGVTFTRKDGRTYRYYLCLHANKNGYDACPVKTVSAGTVEEAVTAQLRAMLRCPEEVGEILQSMQKRRTEKRRKLGRETTRLNREIEEVKAKGTRLLQEELGSANGFVREELARLEARRNELEDQLRRVEWELDSSGRTWAAPGTVTAQLARLNDMWDSLFPAEQERVVRLLVEDVVVCQDHLEVAIRPDGLCSVADELMYERGQDAASSTG

SEQ ID NO: 1719 - protein, 545 aa, unidentified
  source 1..545: note = uncultivated organism
MKPAGRAIRCAIYTRKSSEEGLDQDYNSLHAQRDACAAYVMSQAGEGWMLLPDVYDDGGFSGGNMDRPGLKRLMADVDAGRIDVVVVYKVDRLTRALTDFSKIVDVLDKAGSSFVSVTQAFNTTTSMGRLTLNVLLSFAQFEREVTGERIRDKIAASKKLGMWMGGGVPLGYVAAGRTLTINEREAKTVRWIFERYLELGSAHKVVAELAAAGVVTKRTTSKAGVTRGGIPIQRGPLFHMLKNRTYVGEIPHKDTSYPGQHSAIVTRELFDAVQVRLSENDRKARVSGERRKAHKGAPLMGLIFDSAGNRMSPTTARQKNKPAYRYYASTAIQLGDPTKAGAVPRVSAPLIEDLIVERMRELKIPAAVGPAPDWDRVRDLIHRVEVVADGINIELDPPALERAMRDLPAAHRPALDRLDHHGERPTLMIKARMVLRGGSRIAIGPDGQPAVKRTMIDPALSSALIRAEAWKRKILGGEVESLTVIAKAEGVTPEYARRMIRPAYLAPDLKASILDGCQHCGLTLEAITRTEMPLDWNDQRQLYTA

SEQ ID NO: 1720 - protein, 556 aa, unidentified
  source 1..556: note = uncultivated organism
MTVKVIQPTEATSARLKPRPAKLRVAAYCRVSTDMQEQKSSYEAQCRHYTSYIREHSNWTLAGIYAEEGISGTQARRRPEFLRMIADCESGYIDLVITKSISRFARNTLDCLNYIRRLKELGIPVVFEKESINTMEAAGEVLITILASLAQQESASISQNVKMGIRYVMREGRGRVNYTQFLGYTQGPTKGSLVIVPAEAEIVRRIYRAFLDGYSPALIASRLEAEAIPTPTGRTRWHASTIASILRNEKYCGDLLLQKYFTQDYLTHKVVRNEGQLPQYLVENHHEPIIPKEVFQRVQGERLRRSSLRDTPSKLRFGNRKALAGRLFCARCGRMLKRCVRSGSGEVEWRCCDRAQVIPSGPDGWHADDCSLRGMAEAEVQALVLEAFNRLPVYRSSLKETRSQLLEHTLAPLDRLVSCGEALLVQLRQEMGESATHSVHQQILQVEHHAETLRVLRATYANREMQLLLLLQLADQLPVVSSLETPVTAPQPASETATDFYHRTRYLVPDALCNESGHLSVFDDALVTRYLDCVIVADETCEVIFKAGVRVRLHVH

SEQ ID NO: 1721 - protein, 511 aa, unidentified
  source 1..511: note = uncultivated organism
MAQVQVIQPYPPQSGELEKVAAYCRVSTDSKDQLNSYRTQIGYYTSYIAQHPGWELADIYADEGITGTSLEKRDGFKRMLADCRAGKINRVLVKSVSRFARNALELLETTRELKDLGVVVVFEEQDIDTSQMLSEMQLTLLAMAAQEESTSISKNMRWSLQKRMESGAYTGCTAPYGYRLENGKLVVVPEEGAIVQRIFKMHLEGMGQHSIVKELNRQGIPTREGGPWHISGIHYILSNEKYIGDSVVQKKFTSNPLTHERRRNYGEHPQYYIHGSHPGIVDREEFERIQNHFESHGPSRPKETHTFVHRIRCPQCGRHYRHILSSGKSYWSCPNQANGITNCNTIRLSEKAIVQAALSMIGKLYIHHDTILSPTLTLLEEIAARQERGNAKLYEVNSALAELNEKAHTLQRLHNKGFIEDGEFREQSDALAVQRKKLSDQRSQALHGSKALEALDRLRETQELLASLPEIPWEFDIELFDKIVEKIVPISNTELLFKLKCGLELREVLPK

SEQ ID NO: 1722 - protein, 546 aa, unidentified
  source 1..546: note = uncultivated organism
MALCYNEQLLDLEQYYDAIAYYRLSRYDGMKHESNSIANQRKLVRAYLQKHPNIHLVEEAQDDGYTGTNYDRPGFKRVLEAIQSKRVNCVIVKDLSRLGREYIETGKYLEMIFPSFGVRFIAINDDVDSENSRAGDDIIIPVKNIMNEAYCRELSQKLRKQFRIQRSNGEFLGAFANYGYCKSPDDKHKLVVDDYAAEVVRGIFSLKFQGYSQQAIADFLNKEQVLSPADYKKSLGLNYKTGFKTEAVSKWSAVTVTRILTNPIYIGTLVQGKRGTPNYKIKKLRMRDEKDWVVVENNHEPIIDLLTFNIVQQMLKRDTRTSPKKDIVYPLSGMVFCADCKASMLRKTVHRGKRTFSYYVCSANKKGNGCSSHSFEQGKLEQTVLRAITKHIEVILDTDALLKSMGQVSIENARIKRLDLAIVQKNSELDRCKDFRMKLYEALNDNLIDRDEYEKMRSKYTNMISEAEAAVRKLEEDREKTLSSAAPRDWMASIAKFKGITELTREVVVTLIDRIYIFEDKHIRIDFNFRNELAYYQEILQQQEVS

SEQ ID NO: 1723 - protein, 523 aa, unidentified
  source 1..523: note = uncultivated organism
MPKVAIYCRLSIEDRDKTSGDNSASIQNQKSMLRDYCHERDWEIYDIYIDDGYSGIDRSRPEFNRMLRDCERGNVDIVLCKDQSRFSRDTVVIEQFINDKFLEWGIRFIGVADNADTDSESYSTMRLFTSAYNEMYVKDISAKIRRTLAYKREQGQFIGSFAPYGYLIDPNDKHRLIVDEKTAPVVRLIFDMYISGEGYRKIVRKLNSEGIVSPSEYKRRNGSKYVNLNADSSSSKGLWTQSTIARMLANEVYTGTLVQGKSHHISYKNKKRKKVEQADWVRIPDAHEAIIDMETWRRSQERFNSHTRVGKRSYELSPLSGKVRCACCGRPMKRSVYYNKAKTIRYYGLQCAAYKSGAMNCSNTKTISGMVLEKHILNELNTIVEQYCRSDEISLADIHSEHMKELQRRFFALEEKCKTARDRLLRMYKDKLDGIVSDEDYSIFRQSLSDEENNVSEQLAEVAIQIEDCRKRCDNIEEQKALIEKYTRFDKLDRSVADEFIDFVEIGMTDENGEREIHIHWKL

SEQ ID NO: 1724 - protein, 538 aa, unidentified
  source 1..538: note = uncultivated organism
MTRRSNNSPSKIKIAVRCAIYTRVSTDNGLDQEFNSLDAQREASSAYIRSQAHAGWVEVRTRYDDGGFSGGSTDRPALQNLLEDVRARRIDIIVVYKVDRLTRSLADFAKLVELFDAHGVSFVSVTQQFNTTTSMGRLTLNVLLSFAQFEREVTSERIRDKIAASKKKGLWVGGPLPLGYAMNNGKVAVVTQEAEKVRLIFTRYLELGSVHALMRDLKERGIVSKRRMLKTGKVRGGVPFGRGALFYLLRNRFYIGEVNYKGRIYPGEQPVILDRELFDCVQQTLSDQWGHSTRTRMSFTHLLTGLIFDDAGHRMAPTQAQKNGRRYSYYVSRPLLFGNAASAEVGSVSRVPAQEVEERVRTVILQPRLPNQNAAAFDSVLASNIIERIEVHKKQLVVQLKQNPSEEKIDENDLTVVIPWTKPPSRTTRSVLRPTSASLPLRPMKLERRATLVAAIARGRRWLDELIADSATDAQAIARREHCSLRHVNMTLSLAFLSPMLVKAAVEGRLPRGVGVEQLRDLPVQWDLQLEALGLSPA

SEQ ID NO: 1725 - protein, 515 aa, unidentified
  source 1..515: note = uncultivated organism
MNNKYDIIYTRQSIYKENSISQLTQREFCEEHLKREYKDDLKLLVLDEDKNKSGGTLDRPKLDKLRKLVKSGQVRSVTVYKLDRISRSLIQFAELMDEFEKNDITFYATDMKVDIKTPLGKAFLEILMIFAQLERENIIMRVSDAYYNRSIKGFYMGGRRPYGLNLEEYNIEGKNTKRFIINEAEMRQVEELFSTYSIDGFSLRTVLKHMLEHDMQDLSGAGWSTAKISNILKSPLYVKADEKIYDYYKSKNIEFADGLTLEMFDGTHALQVYGRTKHDETKSDFSDMMLVMLPTEGKIDSETWLKCQKKLESNNQIGNAVSNRVTWLGGKVFCKECGHRMTTIKGKPTKDGTITTYFNCIGRSDKRKCKGPATVYISELETVIAKAITLKLKTLKTERRVLSQENETLIADINRQIGVIKSKEDKIFERILDGEFNDYVKAKAEENLSELGKKKAELKQQIDDIMAKDDILTQSIDLSEKWRKAGFQTRKTVLDALVESILIHKNGQPEIIWKI

SEQ ID NO: 1726 - protein, 502 aa, unidentified
  source 1..502: note = uncultivated organism
MRNDPKPARSLRCAIYTRVSTDSGLEQEFNSLDNQREASEAYIKSQAHEGWKLARERYDDGGFSGGTMERPGLQRLLDDVRARRIDVIVVYKVDRLTRSLADFDKLVELFDAHAVSFISVTQAFNTTTSMGRLTLNMLLSFAQFEREITGERIRDKVAASKKKGIWMGGAVPLGYRVENRALHVIDREAEFVPLLFRRYLELGSVVRLKEALDVEGVISPIRISGNGKRTGGAYMSRGHLYWILSNPIYVGRLRHKGHIHEGLHLAIVDQGTWDEVRQRLAAQTQARRAPTKDEHSFLAGKLYDDRGNRMGASHAEKGSRRWRYYVSRAALTGRGQEAGSIARVSAPEIETFVVQAVTAHQERIGFSQCGRAPSSQGHIDGGERLAGPCRLTAAEIESAIERVTLGEERIEIALPTVRMSRTTIVGFSSPGPGALSIGGATSSTRRTKAVVNRSARCAREPGKFSSRRSRKPIAGLTNFSPTQRRPSRRWPLANARANDRSG

SEQ ID NO: 1727 - protein, 550 aa, unidentified
  source 1..550: note = uncultivated organism
MANISKSYQAAVYLRLSREDGDVAEGGKQVSNSIANQKELVMDYLKSHPEITVVSTYTDDGFSGVNFERPEFQRMLSDIREDKINCVIVKDLSRFGRNYIESGRYIEKIFPMLGIRFIAITDGYDSINEDMGSDMIIPFKNLINDAYCRDISIKIRSHMDIKRRNGEYIGAFAAYGYLKDEENKNHLVVDEYAADVVRDIFAMKLCGMSQQSIADKLNADGILSPLQYKKSIGVSLESSFRKNVKPKWTYNAVLRILKNEVYIGTVVQGKCTTPNYKIKKRIHKDESEWVRVEDMHEPIIPKSDFVLVQDLLLRDTRVSPGQAELFPLSGLVYCADCGEPMIRKTVPAGDKRYVYYVCSGNKRDKTKCSMHSISEKKLEAGVMELVKASIAKVIGLSDALEIINESSGMKPDIVKYDRRIEKLREEAETCNDRKKNLYEDYKDEVLSKDEYSMLRDQYQRQIADIEKSISSLEAERDGILANGSGKQGWIEKLKSYEGFTELNRELVAFLIERIEVFDTDTIRVTYRFQKAIEEMERVVELYSEKMKEAV

SEQ ID NO: 1728 - protein, 520 aa, unidentified
  source 1..520: note = uncultivated organism
MNRVTKIEQTKVGTDKRKTRVAAYCRVSTSQDDQLISLAAQRSHYETYIRQNPDWEYVGVYCDEGLTGTRKENRPELLRLIQDAEHGLIDLIITKSISRFSRNTTDCLELIRRLKDVHVAIFFEKENINTGSMENEFVLSIMSSLAENESFSLAENEKWSKRNKFRDGSYKFSAPPYGYDCVDGELRVNPREASVVQRIFAEALAGKGSSTIAKELEEEHVPTQRQGKWSATVVRNILRNEKYTGDVLFQKTFTDAQFHQHPNRGELDQYYVEEHHEALVSHEDFEKVQALIALHAEEKSIERETQKYQKRYAFSGKIICGECGSTMRRVIRRPNAKDTYIAWTCKTHIKDRAHCSMKSVKDEAIQDAFVLMMNKLVFGRHQILEPLLPAIQRVRQTDLLQKLDTLDDEMQANAEQRRTLEMLFARSLLDLPVYTQSKCDLLSEEQRLEEKKERITFLMKDHVMELHALKDLLRFTGKGQMLTEFQPELFQAHVDHVTVLSRSEVEFYLHCGLRLKERME

SEQ ID NO: 1729 - protein, 575 aa, unidentified
  source 1..575: note = uncultivated organism
MKVALYTRVSTEDQAREGFSLEVQRNYLLQYAKNFGWDVVCSLSGRDVYMDDGFSGGNMDRPALKKLLFDARNKMFDLVLVYKQDRLSRRLKDLLGLLEEFENLGIGYKSATEPFDTTSSAGKMAIQMLGSCAEFERNRLVERVFPGMVMGVKRGHWQGARFAPYGYRHNKETKKLEIHPEEAKIVRDIYDQYLGGKSTAQIAGHYYNLGVSARQGGRFYGKFISDILHSKVYLGTITWNRRHYDKKRKTKNGEGKGYCYVNNDPSKVIEVPNAHEPIITQEMHDAAQKLLARNRTNAVVRFRNNVYHLSGVVKCNECGRNYRGLMITCNHRTKMRRPWYACSALGVSYVNCSNKAVRADVLTKQVWDIIDTISKNLHVIEELSDVIKLSATEPEHKIIEELEGKEKDLARNLEKQKGLYEVFSEDKINIDIYKDRAELLRNEEKKLRQDVKSIQIKILEKRNAVNLVKATQDFLLCLRSNPNSEKMDYLIKTFMRIIFRGIYIQNKEIVKVEINEPWKMCYEEGLKLDPRFRGDDSLGKGAKCQKKSETTTIQANPRASRVMESVYFCAPSDVR

SEQ ID NO: 1730 - protein, 565 aa, unidentified
  source 1..565: note = uncultivated organism
MTQSKVIRCAIYTRKSTEEGLEQAFNSLDAQREACAAYVTSQRHEGWVLSPELYDDGGFSGGNMNRPGLAQLMAEVQAGRIHVIVVYKVDRLTRSLADFAKIVEVLDKAGASFVSVTQSFNTTTSMGRLTLNVLLSFAQFEREVTGERIRDKIAASKRKGLWMGGPLPLGYDVQDRKLVVNQTEAETVRLIFDRYLQLGSVVATVESLERDGVKTKLFAGEGKKRRGGIAWTRGGLAHLLVNRIYIGQIRHKNEHFPGEHEAIITPEVWEGVQAQLAGNGVARKHEQILRHANLLGGLLFDGLGRRMKSSQAAKGAKRYHYYVTAVDAVVKAPGAAWRVPAHDTEMLVIGRVREFLCDRQALQNAAVKASFNVDARALEGLFATALSIADALATDPLRFRSIVHRVDLSDDRVNISINLLPIRSHTGYRSETATSPDAAQMPIHLLSVPTVKLRRGPEVRLVIAEPESNEDTLVDPALVRLLATARAANAAMHAAKDMSVAEVAKAHGFTNNYFTLLLRLATLAPCIVQAIIEGRQPASLTRQRLAKITNLPLDWNEQRRMLGFA

SEQ ID NO: 1731 - protein, 524 aa, unidentified
  source 1..524: note = uncultivated organism
MTAGTQVGHWNAPPSSAFLEDIASGKVDTVVVYKVDRLTRSLADFAKIVEAFDRQGISFVSVTQQFNTTTSMGRLTLNVLLSFAQFEREVTGERIRDKVAASKKKGMWMGGRVPLGYDLRDHQLFINLEEATLVRQIFTDYLRLGCVSELKRCLDKEGIRGKMRVSQEGRSSGGASFSRGALYSLLVNRLYLGEIAHRGQAHPGQHKAIIEASLWEKVAAQLAENRRSRRRRGSKHSPSLLTGMLFDAQGERYTPTHALKGGRRYRYYTSQSVIQGKENPPTMSRLPAHEVEQAVLARLVAFLESPRELLQLLEARTVSLAETNQVVAAAKQKCLELEQASPQDQATFLAAAVGRIIVGESALDIRVAVIPLTDSLLERPARALLLDATSPLCLNDVTSLSLTCDLHPKRRGRDLRRVFGQQSVSRPSLPLIKAVARANSWMERLVSGEISTLEDLASETGFTKRYISRTLRSAFLAPDITEMILDGLQAPDLTVRSLMNGFPIDWPSQRLALNGVHSGDDRFG

SEQ ID NO: 1732 - protein, 528 aa, unidentified
  source 1..528: note = uncultivated organism
MPRITVIEPTIDASTNLPILNSIKRRVAAYARVSTDSDEQYTSYEAQVEHYTKYIKERTDWEYVDTYADEGISGTYLKRREAFNKMIADALSGKIDLIITKSISRFARNILDTIQKVRELKAHHVEVFFEKENIWTFDSKSELIMTIMASIAQEESRSISENVKWGKKVAYQNGKVTIAYSSFLGYKKGEDGRIEIDETQAPLVREIYRLFLFEGYTAHSIAQHFNKLGIKTVMGSKKWSKNGVLSILTNEKYKGDALLQKGYVPNYLDHKVVKNNGELPKYYVENSHPAIIDRAEWDMVQAEIQRRNEIGAIYSSNDIFSSKLICEDCGSFYGRKVWHSNDAYRRVIYQCNHKFDSNNSHKCMTPHLTEEEIKNKFMLAYNEVMTDKEKIIDDLKEVAELLGCQEELDSKISEAKLELEVVENMVSSLIEKRTKTDTISEEEFEKQYKALEDKSKQITTKIGNLMNEKTIRRGKKAKILASVGLMEKEPNLILKWNKEAWMAMVESAIVHKDKTISFRFYCGRKVKV

SEQ ID NO: 1733 - protein, 546 aa, unidentified
  source 1..546: note = uncultivated organism
MKKVRCAIYTRKSSEEGLEQEFNSLHAQREACAAYVASQKHEGWILLPEQYDDGGLSGGSLERPALQRLLEDARSGTVDQIVVYKIDRLTRSLADFSKIVDILDAADASFVSVMQSFNTATSMGRLTLNMLLSFAQFEREVTAERIRDKIAASKRKGLWMGGQVPLGYDADGRTLSINSTEVRTIRTLYDLYKQLGTIRQVKHEADRLGLRSRQRTASDGTTSGGNLFDRGHIHHILTNPIYAGRIRHRDKVFDGQHDAIIEPKRWDAIQKKLQASAAKGRGRSIGRATQSPLTGKLFDETGDRLTPSHSRTRKGVRLRYYISHRLVARSGEPHPDAWRLPAQELEGRIAGLVRTKLAKPGFLTALFREASADQICRIATRLGELDKVGDADRLAIIERIDLAPGNLTIRMDAKVIAERLQVDPSQLSDSSLVTGHPFQLRKRGVETRIILADESTCRDVALLLNIARALHWFERIKTGETFAEIAKTEGTSKRRVQQMIGLAFLAPDIITDVINSKQPIGFTSDWCLRHDLPSDWAEQRALLATL

SEQ ID NO: 1734 - protein, 553 aa, unidentified
  source 1..553: note = uncultivated organism
MSKRISDTYRVAMYLRLSQDDEKYDKDFKAESNSISNQRLQIQDYIDKNEEMELAKEYVDDGYSGINFERPAFKKMMEDVITGSINCIVVKDLSRFGRDYIDSGRYLQRVFPSLDIRFIALNDNYDSFTASETEKNLVIPFKNFINDNYCRDTSAKVRSVCKVKRKQGQFISNYAPYGYEKDEENKHKIVIDKEVEYVVRKIFSMKLEGYSSYSIAKHLNDNGIPSPMEHKKAKGIRYKTGFCTKAVAKWDTPAINRILTNEVYIGTLQQGKREKINYKLDKVVSKDKSDWIEIEDNHEAIIDPHDFEIVQKLLKCDIKAKTVGEKADLFSGLLFCKDCNAQMTKKVDKRGKTPTVYYICSSYNKGQDCSRHSIKQEELQRTVLEMIRHYIQYLGEYESVSEKIKEMEVSYELFQKIDKRQEYTKKSKAKFELLKSSLYQDLKEGIIAEEEFYDMREFYTNRIVESELILEKQSKEIARLYKKSLGNQNFLADIKKYQNIGTLERGLLVRLVDKIYVLEDKKIEIQFNYDETIEILDKLSSYTFQTPEIREVV

SEQ ID NO: 1735 - protein, 599 aa, unidentified
  source 1..599: note = uncultivated organism
MAACSTNSSQLAEQADRETPSGAPANVPSCYHPLNILKREAFVLTQVRRRQPVSSKGPALDLTRACAYLRVSTGRQAESDLSIPDQRKQIAAFCAGKGWSLINEYVEPGASAMDDSRPEFQRMIERATDDDRPFDVIVVHSFSRFFRDSFGLEMYIRRLAKADVRLISITQELGDDPAQVMMRQVIALFDEYQSRENSKHTRRAMNENARQGFYNGSSAPLGYRTEEVEKRGARAKKKLVVDPVEAETVKLIFRLYRHGDGHSGPLGVKYLTAWLNERGYRTRKGARFGVATVHKILTNTLYVGECVFNRRDSRTMRDKPADQWITVQVPTIIDRAEFDAVQATLKANNPRVTAPRVVTGPILLTGLATCATCGGAMTLRTGTSKSGAVHKYYTCSTCARMGKSACKGRSIRMDTLDNMVVDSLSRSLFTTERLTEMLSAASSRRAERAAEIDERAMTLQREATDASDKLKRLYRLIEDGVTELDDLLRDRIANLKLERERTQAALDRIRTQIVPAAAIPPEVIEKFGRAMRENIATAEVPFRKAYLRSIIDRVEVDDHAIRIIGDRATLEQVVAGKSVPASGVRSLVRKWRPGRDSNP

SEQ ID NO: 1736 - protein, 584 aa, unidentified
  source 1..584: note = uncultivated organism
MAKTRDDTAARRQVGIWIRVSTEDQARGDSPEHHEQRARFYAASKGWEVVDVYNLAGVSGKSVRGHPETERMLVDVKKGRIGALIFSKLARLARNVRELLDFADLFRDHGADLVSLDESIDTTTPAGRLFYTMIGAMAQWEREEIGARTAASVKVRAQLGKFVGGKAPFGYQWLDKKLVPHPEEAAVVRRMYDLFATHRRKRTVARLLNESGHRTRGGAKFTDTTVRRLLSDPTFKGLHRVNYTKSVGGKAWAYKPAEEWTMVPVEPVVSEDLWTQVNAILDGQRKEGSRRPGKKTVHLFSGLVWCECGQKMYVPSNSPKYTCFKCRNKIPVEDLEAVFNHELQRFLLSPERTAHYLDDAKTSISDKETQLRTLENDRRKVAEEIDELFRLYHAKEIPTQGFGRRYQPLEERLKQLEERIPELQAEIDFMKVEYLSGDEILAEARDLSTRLPEMPPEEKRQIVENITERITVGRDGVEINLWYLPAASPRSSSSTSDNAANRQRSPACSSPRRRPRRASRCRSASPGRCRPRRGAGTTPCAPPPRAAPRGPSWRGARSRLPAASGGTAASARAATGRAVHARRS

SEQ ID NO: 1737 - protein, 506 aa, unidentified
  source 1..506: note = uncultivated organism
MTPKSQNGSETAAKAPSLPCTQRRCAIYTRVSTDEQAALDYNSLHAQEEICKNYVAIRAADPQLERKWTFAQAYSDAGFSGGTLERPALKRLLADVEAGRIDVIVAYKIDRISRSISQFYEVWNLLETHHVDFASATQELNTATSQGKLMLNLLLSFAQYERELIGERTRDKIAAARKNGRWCGGKPILGYDIDKEKNRLVVNEAEARIVRDLFRIYLEEGSLLRALTVVNEKGFRTKQWVTATGRKNGGHTFDKVTLNRVLLNPAYLGKVRHLDQLYPGQHDAIVAPELFESVRKVLGDHHKPHATTGLDHDYLLRGLVRCGACGRAMTPSSAMGRNQKKYFYYLCTRAIREGASSCPVRRVSAPAVEKLAFDRLRQLVSSETMVAAIVKVAAREAAERSPQLCEERDRLEGELRKRREEAKRLVDAIASGASSAGMLSERLREAEAAIKAVEARIARVSAEAARLQAKSEGPDRVRGALGRFTELWQSVPRKSRAGLMRLLVPP

SEQ ID NO: 1738 - protein, 524 aa, unidentified
  source 1..524: note = uncultivated organism
MKNAVIYARYSSDRQNETSIEGQIEECRRYAIEHDLLVVQEYIDRAQTATTDRRPNFLRMIDDSENGTFEIILVYQFDRFSRNKDDSGYYKKILAKHGVRVVSAKEMISDDSAGLITEGMIETLNAWFSKQLSEKVTRGMYQRARLCKYNGGSMTFGYTANEEGYYVPDEVTAPIVKEIFERIFEGQTAKSIIDDLNERGIKTTRGNTFGKSSLQKMLRNERYKGIYIYGDIRIPDGMPRLVSDQLFDDVQEVLGDKAHHGHRPAIEDYILTGKLYCGHCRDLMKGTSGTSKTGKTHRYYTCSNAPKICDKKNVRKEELEPIVLETCRDLLTDEVIDSVVAAVEEQNKVDQESPSIIRLKGDIKDTEKKIEKLLDQIEEGTGSARVSQRLKKREDELDILKKELKKEKARQLKLDPALVRSFLLSLRNYSRDDLTYQKMLIKAFVDRIYLYDDHFTILLNHSGKKGKATKNEVREVERYFDQSSSTTAEYGVPARICSFDIKLHILFICLKRCLYDSVIHNGSC

SEQ ID NO: 1739 - protein, 514 aa, unidentified
  source 1..514: note = uncultivated organism
MAAERFPQPAALKGADIIIAIYARQSVDRADSISIEQQIELCQYETRGEPFKEYTDKGYSGKDTNRPQFTQMMSDIRDGFIHAVVVYKLDRISRSILDFSNMMEVFSRYNVQFISATEKFDTSSPMGNAMLNICIVFAQLERETIQKRVADAYYSRSQKSFYMGGSIPYGFRKVPTVIDGIHTSMYEPVPDEAEVVKLIYSMYSQPNTSYGDIINRLNELGIKKRGANWARPRIREMLVNPIYVRADLDVYNFFADNGAEIANPPADFIGENGCYSYKSKNEKKKISTTVEGNQIVLAPHKGIVDSAVWLKCRMKCMSKKQMIPSQKAKNSWLCGKIKCGRCGYALLAKSFTGRPHRYLLCSNKLSSKACAGAGTLYTEEVEQLVYSEMQKKLAQFRTLSPSDREMPSAEHNELEIELAEIDKEIKALLEKVRNSDNALFRYINERISALDKRKADISERIRELDKKKDIPADEIDFHLKMWDELSFDDKRQVADTLIRVIYATDQKITIQWRF

SEQ ID NO: 1740 - protein, 568 aa, unidentified
  source 1..568: note = uncultivated organism
MARRANRYNAVASASDQIQATPEKSFKAGLYARLSVEINERPSNSIQTQLDIMHGYVNKHPEIIEAFEYADSGFSGTNFERPNFNRLMDDVRSGKINCILVKDLSRFGRDYLETTNYIEIILPFLGVRFISVNDHFDTDAACNENKTLEIALKNLVNDMYAKDVSKRVSTVRRQEVERGKFTGSNAPYGYVVDDKDPLRHFLIDEPAAAVVRDMYQMADDGMSVREISLELQRRNLSIPGQYLKTGHLYQEEGDEVHIWHIGTIANILRKEEYIGNLVHGRRRSRLYENEKRHFTDKDEWVITENAHEPIVSREQYDRVRAKFEKKVKDSTFSSDRGAGVAKKQDKYAGLLFCGECGKRLRFNSRMGRQESDTSRTYFYQCCNTYDLSNQGYCSVNIMEKMLDKVVMETLKMQMQLFSDKGITTDWCREEAEKKIKPAQNRAKKIQAEISTLEYEDFEMHGRFGVGEINREEMTAYQKSSEKKMAKLREQLSTAEDKESEIRKDWNDFTHGIEALYRVNGKRKLDRDILLTLIRKITIKHSGEFTIEWNFDRKFKPVDGSYVKGAKKI

SEQ ID NO: 1741 - protein, 529 aa, unidentified
  source 1..529: note = uncultivated organism
MPFNDPLRVAAYCRVSTDKEDQMNSLSAQRQFFQKYITEHPGWSLVRVFADEGLSGTSIKRRPQFAEMIDRALEGEIDLIITKEVSRFARNTVDTLQVTRKLKEKGVGVLFLNDNIDTRENDGEFRLTIMASVAQEESRKISERTRWGQLQAMKRGVVFGNQSLYGYTLANGQLTIEPEQAEMVRQVYHRFLVERKGTHTIARELTEAGVRPPLRSSGAWSSTTVLKILRNEKYCGDLLQKKYRTTDYLSHRKILNDGTEEQVLLRDHHEPIVTREQYEAVQAELVKRAGAAEDKSRFSARYWFSGKVRCGECGRSFTVKRTRRANGTEYRRFVCRGHFDATVKCQMRAVHGPIIQACAQRVLRELALDGEAIIDGLLQELEQLRQARQEDSGGTQRIQQAIQKQSDRRDRALEAFLDGSLSKTDMRRMVARCDKEIDQLRAQLEEVEKEKKSLSRNTDRLAEIRALLERELAGGDAVLDEVIQRITVYPDHFIVEVAELPIRFLVRAGGSGTGRGYKVSVTECRPVTE

SEQ ID NO: 1742 - protein, 542 aa, unidentified
  source 1..542: note = uncultivated organism
MISGEELKYLNGLTGILGLGIAYPSLSRPIRQRGAFALTEPFNSLDAQRAAGEAYITSQASEGWAIIPTLSDDGGYSGGTMERPGLKALLTDIEAGRVDVVVVYKIDRLTRSLTDFSRIIETFDMAGTSFVSVTQSFNTTDSMGRLMLNVLLSFAQFEREVTGERIRDKIAASKAKGMWMGGNLPLGYDLPAAGTRTLLVNEAEAVTVRHIFNRYLEIGSVHALQRELASQGINSKHRTFSTGRTSGGQAFSRGALFHLLRNQIYLGKIVHKDQAFEGAHDGIVEPNLFARVQARLNAQVRRHGSNAKQRIQKAPLTGKLFDAAGEPMSPAASRGKSGRTYRYYVSASLQQGSQAADPNIVQRLSASEIERIIADAIRRWSLRVDEPFSVVRSVHLSDRGLQLTLDTAHCANIITPLADNEPIVDRTPDQVIILLPIILLARGRRHLVVPAQVRPPQVDRILVSALRKAHAMLATDRGLPTMEAAPPSPYDRNILRLAFLAPDIQRAILEGRQPHHLNLETLKSIELPLCWSQQRELLRFRP

SEQ ID NO: 1743 - protein, 539 aa, unidentified
  source 1..539: note = uncultivated organism
MTLKCAIYTRKSTEHGLDMEFNSLQNQEESCKAYIASQSFNGWQYYKTYSDAAISGGTMDRPALKQMLDDMAHGLVNTVVVYKVDRLSRSILDFHNMMKYFEKYGANFVSITQSFDTSTSMGKLTLNMLLSFAQFEREVSSERVRDKIRASKAKGLWMGGAPRLGYDLVNKKLVVNPTEAEQVRHLFEKYLEVQSVNDLTEYAKQKGIFGKRWETAKRQIRGGNPIAKMSMHRILRDKIYIGQIENKKEGTFAKGEHKPIISAELFNRVQVTLANNSNNKSPNTRAPNILTGKLFNHNGTKFINQMTSGKGKRKIHYYATRGFYLTAACVDEIVIKTITNFLNSDMSNLPINLATVLKRIDVTNMNFAEKRNLIQSLVEKIVYSQEQLIYTLTIDAQKLQPFIKDHYVNQNVEPMEYIIGDNSITITEKVFLRKYVNTVYDRGKNGVLNVTDNNHLILKAFTTAWKYRELYEQDGNVDNIIHNARTSPRLFYKYLALAYLNPNIVNMLLKGKLEISVRDILDKASRNDDFNIQEKIFCS

SEQ ID NO: 1744 - protein, 530 aa, unidentified
  source 1..530: note = uncultivated organism
MTRIRCAIYTRKSTDEGLEQEFNSLHAQREACLAYIQSQAGEGWTANSVEYDDGGYSGGSTNRPALQRLLTDIRRGEVDIVVVYKVDRLTRSLADFAKIVELFDQHKVSFVSVTQAFNTTTSMGRLTLNMLLSFSQFEREITAERIRDKIAASKAKGLWMGGRPPLGYDAQGRKLVVNPGEAELVRHLYARYLELGSVLALTAEFKARDVRSKRWINKQGQEVGGALFSRGALYHLLSNPVYRGAICHRELRYENAHPAIIDEATWTAVRARLDANVPDLPGTPKIAAGNLLQGLVFDDQGHKMRVAHTTRGGQRYRYYVSSAELHKDGKVAGSLARLSAGVLDRFVVERASASLSANWRPGDPIEARVHAALLRVIVSQTHVVILLRADAVSASQDLEHAAVRRIDEGIELTIGIRLKHRQTAIVIDAPGAKNPAPRVDRALLRAICLARLWAGQLASGEANSVRDLALKFGFCNHYAAKLLPLAFLTPDLTTAILDGVQPKRLTLGALIRHEMPMDWAKQREMFATFG

SEQ ID NO: 1745 - protein, 578 aa, unidentified
  source 1..578: note = uncultivated organism
MSGKKVQVGRSRMLEELARPTWEAASAGPKEKTVERRAETRQKVEKINAPAPVIQRKLRVAAYARVSTDLDSQETSIENQCDHYKSLIEANPAWELAGIYAESGVSGTKADTRPELQRLMQDCEAGAVDVIVTKSISRFARNTSECLSMVRELTSLGIRLIFEKESIDTETMESEFLLTLLAAFAESESASISTNQKWAIRKRFQAGTYKGGKVPYGYRRTKKGYIIHPAEAATVRRIFYALAGGKGTLVIARELDEERIPTWTESYKGLEAQGKWRSNSIIAIARNEFYTGDSLYQKTFMENYKKCVNTGQLDQYLNEADHPAIIDHATFEQANAMIRSHGERLGREKAVKDTKRYVFSGRLICGFCGGHMRRGKDARAFYACGNHLHKRTVMVEGTEAPCPMLPVFEQDVKNAFATVLNRLAADPSILGVSDDGEAERERLEAQLQSVKRRQSVLHDRALADRYTAQLREKKAALDSEEKTILDALAKLEKKNPADDLKRAVVKRGVRESFTESDEKLFTSFVDHAVLWSKEKAQFHFTCGLVAEEDMRIEKVGRSYTEVPVRTEFDEQKGAFTWQ

SEQ ID NO: 1746 - protein, 509 aa, unidentified
  source 1..509: note = uncultivated organism
MNSPVRVALYTRISTDETTQPYSLGAQADRLEAFVSSQPDWRIVARYTDQASAKSLDRPALVAARRAAAGGAFDLLLVYRVDRLSRNVGQLVGLIEELAGHNVVFRSATEPFDTALPVGRMLVQLLGSFAEFERATMMDRISAGMERKAARGEWTGGKPPFGYRKPRGTSTLLPDPATAPIVAAIFRRYVETRHGARAIAAWLDAAGHRTGSGRAWSTTSVLAILRNRAYIGDVSFRGVWRSGGQEPLVDRPLFDAAQAILDDRAASPRLRRTNPTDFLLSSLSLLCDRCGHPMAGASARGRGGRRYAYYTCSSRARRGPTACDQPRLPQREFEDAVLAQMSEVYRDSELIGMAIDTATAQARSAAAGAEQTRSGLRAEASEVRHKIERYVTAFESGALAASAFGGRVGALQAQLDVLDGRLQETGRPTPEPVGSVDAAIVSWALSEALGAVLRGTSVATTKALLRVLVEEIRVFSPEDIRPTYRVLMSVRTPNEVVGEGGFEPPTWRV

SEQ ID NO: 1747 - protein, 685 aa, unidentified
  source 1..685: note = uncultivated organism
MPVALYLRVSTEEQRERQSIVTQREFGHRYCGLHGLPICEVFADDGVSGTVPIETRPAGKRALEAARQGKFDQLLVFKLDRLGRETRLILNSVAELEKHGVRIRSMTEEFDTATATGRLMLTMLSGFAAHEREVIRERSVAGTNRCAEAGAWLGGVVPYGYRKEGEKGQGRLVISDEKIPDFEISEADVVRTIYRMSSVEKKSCQNIADHLHRTGIPCTSARNTENATPGKRSRRIAAMWRSSHVRNMIANRTYMGEHRFGKRTKNPNRKVIVRAVPAIVTEETWNRAQQVLRSNQIMAKRNGRTPFLLRGLIKCGLCGLTFSGTRASARQPDHYYHCNGRQFARGLYGLTGKKCPAKSINGEYVERVVWADIESFLRDPGEILERLRERLSMKGDEQQRRQKELEQFRDRLEEKTAERERMLGLFRRGRIDDATLDQHLDLINVETAGLQAEVEMAERALSVGDQTAQLKSAESLLAALRKRLDSPVSPELKRRIVEALVESIRADTVECWGVSQSKITVTYRFAEPNEAAALVLPRSHNLTSRTRPPDKLDTLGDHLRRRRLTLKLIQRQVAEQIGVDATSIHNWETNVSTPSLQYMPAILEFLGYNPVPPGSGWAERLVQCRTALGLSQKESAKRMGVDQSTLARWERGEREPTGGFAAQAQRFLVSAEATNAPRSDLRRAG

SEQ ID NO: 1748 - protein, 559 aa, unidentified
  source 1..559: note = uncultivated organism
MNRKSVAALYCRVSTDMQREKENIETQKSRLLLYCKEHDITYPSTYEDNGFSAKDTQRPALNNLINDIKKGKVKSVIVTKVDRLTRSIKDLIDLLELFDDHNVSFKSITQPLDTSTALGRGFLRLIGEFAQMEREMVSERVAEDMRHRAINGKWNGGVVPFGYTSHSLIFNFLRKSGLNKEKAEVQASKQVPEKKKLFINKAEANLIKQIYEKYIETESLRATTHWLNRNGHRTRNGSTWAATTVSRILTNPIYIGNICYNKRVSSKTTKRLKRRPRKEWIENKGNHAPVIDKFIFDKVNEILLRQKQEPRRKTTKYLLSGLIRCGKCDGSMNGYTQTKKKNNLTYSYYKCHTYSSKGSSVCKGSSIRADLLEKAIGEFLITEFDKNSFKINLEKALERFNTMKDQDITPLQDERERLEKRNQDVERKKRILLENLEDSTVDKLTYKNRTEELNKEFEDNKTKIYSLDSKINDLGTDCFSFKAVYETINDFKMSWENADFQTRKDLLRLIVSKIVVVNKRKFKIDLYFLPSILSQNCLHTDARAGIIPTRIRSAAAPYR

SEQ ID NO: 1749 - protein, 567 aa, unidentified
  source 1..567: note = uncultivated organism
MARKSRKQSVSQYDGQTVAASKQYSVALYARISVENERKREADTIGNQIQLLKDFASEDPEMSVYDIYCDYDISGTDFIRPEISRMMNDIRDGRVNCVIVKDLSRLGRNYLESGEYIEMVFPFLNVRFIAITDRFDTNNRQADIAVQLKNLANERYARDISKKICSAMESMQRQGKFVGSKAPYGYIRDPADKHHLLIDPEAVPIVRELFEMIDSGCTMHYAAVTLNERGVPSPGRHNYDLGLVKSDKFKNSLWYQQTVRKILLDRTYLGWMQGGKFRSDFHSSGDKQSRPVPPEEWIITKGTHEPIVSEALFERVQEYFVQTKATAGAATKYDSKSKRASIFKGHLRCGECGKAMFLRAKNGHNKKTWWYYCALHENYNSSYCPKKAVKKDDLESAVLRLIQAQIKLFTDAQALIASMNSREVSKSRYKIYKDQINASRQKIEGSSQLKASLYQEYAEGKMPEDEFLARTQECAAKADEMRIFVSELEKEAQKYAPEYVGSEHWTEIIREYGERTELDEKMIDAFIDEIVLFNDGHYEVKFNFRDEMEAVLLYAALRQKEARRYVG

SEQ ID NO: 1750 - protein, 545 aa, unidentified
  source 1..545: note = uncultivated organism
MKPAGRPIRCAIYTRKSTEEGLEQDYNSLHAQRDACAAYVLSQAGEGWTLLPEVYDDGGFSGGNMERPALKRLMADVASGRIDVVVVYKVDRLTRALTDFSRIVDVLDKAGASFVSVTQAFNTTTSMGRLTLNVLLSFAQFEREVTGERIRDKIAASKKLGMWMGGGVPLGYEASGRTLVINPTEAETVRGIFRRYLETGSVHQVHQELTMAGVVAKRRTTKAGVETGGRPMDRGALFHMLRNRTYVGEIPHKTRSYPGQHPAIIDRETFDAVQACLDENDRKQRLPGEARRPHKGAPLMGLLFDSAGNPMSPVKATKPNKPSYHYYVSTALTTGRPDKAGAVSRISAPLLEDIVVRRLGELRIIDSALVTPDWTTARDVIDRVEVAADAVIIRFDEERLKISARDLIPESRVGIDRLERRGDVPMTEIKVRLVRRGGTMVAVGPEGSSAIASTRIDRVMAAALIRAESWKRRLFAGEIDSINQIAEAEGVSGAFVRRMIRPAFLAPDLKAAILDGRQPVGLTLEAVTRAELPLDWTEQRRLYDA

SEQ ID NO: 1751 - protein, 516 aa, unidentified
  source 1..516: note = uncultivated organism
MSDTTVIYLRVSKEDEFIKDESNSISNQRIMLMKYVNEHEELARTEIIEIKDDGYSGKNMQRPGMTRLLDMVRKGQVQNIVVKDFSRFSRDHIELGKYAEQIFPRLDVRFIAVNDGYDSNDYAGGIGGIDISVKAVLYDFFSQDLSEKVRSSLRSSRDSGKHICAFAPYGYRKKSDDKYCLEEDSYAAEYVRRIFREYAEGSSMYSIAKRLNDEEVLSPMRYIQRRDNNTYGRDADDSGWTVNTVHRILMNEAYIGSLVYDRSVNAEVAKRATKLKPAENWTRIENAHSPIVDRETFETVQNRLCGNVKRSQYNEPSIFKGKIVCGGCGYRMQVSRKGRTRFQCNHKFCLTEKTGAGNCASSILEEELMKITADLLKEKINHLTELQELADAGRAKQKERQRTAEERLSRMNQSLDRLYQDQLGSYEAYRDGRTDKETYLKQKELTEMIIEKLKENASRQEEAAAAIAAESAKAHWLDRSIELKAESLDKDLIDLLIDRIIINADKTVEVIWKFNS

SEQ ID NO: 1752 - protein, 511 aa, unidentified
  source 1..511: note = uncultivated organism
MAQVQVIQPYESQSEELEKVAAYCRVSTNSKDQLNSYRTQIGYYTNAISQHPGWELVDIYADEGITGTSLEKRDEFKRMLQDCRAGKITRILVKSVSRFARNTLELIETTRELKDLGVVVVFEEQGIDTAQMLGEMQLTLLAMAAQEESASISKNVRWSYQKRMENGEFVTNYAPFGYRLEQGVLYPEPSEARVVKVIFSLFLSGRGALSIAKELNQNQIPTRQGGKWSRSSVEYLLKNERYSGDAIVQKRYRTPTIPTNRRINHGELPMYHICDCHESIVSKGMFERVQQLLAQRAMKHDRHENGFSLKIQCPDCGNQFRRLKIRNTYYWGCRNRENNGSPCTKIRYKETHVKMTFLTMVGKLYVNQESILQIALSLLEEIAARQQQSNAKLFELNSALASLNEKAHTLQRLYNKGFIEDADYREQNDALTSQRKKLTSQRSQAIHGSTALETLDKLRGLQGLLASLPEIPWEFDIDLFNQLVEKIIPISNTELLFKLKCGLKLKGVIPQ

SEQ ID NO: 1753 - protein, 582 aa, unidentified
  source 1..582: note = uncultivated organism
MARKKGRYNAVEERQAVAGKAAGNGTFLCVGSDSGIPAHNTYRVALYARISAEHRDRDSDSLESQFLLLEDYVKNRPELSCYREFSDRNYSGTNFNRPGFQEMMAEIREGKINCVIVKDLSRLGRDYLESGNYIETIFPFLGVRFISINDHFDTEEAENANKALGVSLMNLVNDMYARDISRKMTCTTRANIRKGSFVGSSAPYGYRVTETENGYGFVVDEAAAGIVQKIFEWYLELGNLNALARKLTQERIRTPGEYLKIPEIYLDENEKQKVWDVSTVEGILRREAYLGHMVQGKTVQHRYEGIEKTKVEPENWIKVEHTHEPIISEEIFRRVKGLLAANERKCVSRKQEIPMEADLFENLIYCPVCGKKIRQVSSLKKNGTKRNYYYFCNHKFLPNARDYENCTIAKYELLDVVWKVIQDAVRCLPVEPSVLLEQLGEKIQKETAEYRRRDRAISAKLKSLETEGMEQYQNYVTGIISKEEFQSKNRKTEERKAVLKQEMAALKEEELEQKKSRKDMEKWLAGFLKCEGRELPDRELLLALIKRIYLYPGRKLLVEFTFGGNTEAHADKGGTGKGAGTE

SEQ ID NO: 1754 - protein, 554 aa, unidentified
  source 1..554: note = uncultivated organism
MPERVYRTAIYARLSKDDGDKEESNSITSQKAICEEYIDKHPDLELVETFVDDGCSGVDFERPAFRRMEEALRERRVEAIVCKDLSRFSRNYIEGGRYLEKIFPRLGVRFIAINDGYDTLTESRQSSSFLIPFKNLINDTYCKDISVKIRTNLDAKRRRGEYVGSYAPYGYMKDPKDKNRLMVDEYAGGIVQQIFSHYKDGMSICQIADHLNETGVQSPMEYKIACGIHYKSAFKKTEEAKWSYNAVRRILSNEVYTGILSQGKRGTPNYKVHVVQERDERDWIRVENAHEALVTYDDFMSVKAMMGRETRATGEESDSNPFSGFLFCADCGQPMVRKTVPSKGKKYYYYVCSSHRRHEGCSPHSMNAGEIARTVKNAIASHIASILDLSETLAYIARLPESNRLMLTYDAQIAKLEEEMEHLHRMKLRIYEDLTVGVIDKDEYADFRKQYTDMLEEKSDALERVRREQKNAMVYGDTEKVWVSMFRQYETIEEVNRRALMALVDKILVHEGHALEIVFRYRDEYSRMSEFVKSHAAILEKPSDIATDSNSGEV

SEQ ID NO: 1755 - protein, 524 aa, unidentified
  source 1..524: note = uncultivated organism
MIETLEISNAQSVRRCAIYTRKSHEDGLEQEFNSLDAQREAGEAFIKSQTARGWRLLDDRYDDGGFSGGNMQRPALKRLLADVDEGRIDTLVVYKIDRLSRSLPDFFQMIELFEVRGVSFVSVTEQFNTTDSSGRLMLGILMSFAQYEREISAERIRHKVAAAKRRGKWCGGVPPLGYQVDSENQRLVVDEQEAQLVQRIFRRFLQTNSSLQVVRELNEQGCRTKSWVTKKGDRREGKPWDVGYLYRLLHNRTYQGEVRHKEKVYPGEHEAIVDATTWERARALLEENCRTRQGMRKNTTDALLRGLIRCGHCNSAMGPTYTNLHGRRYLYYLCVTASKRGADVCPVSRVAAGEIEKAVFEQLGAVFRSSTLVARTFLAAQSQETEERGRLSFRQTELKRDLEKVRQEALAAVQGSGDGLDRLESLNVRAAQLGQQLDEVERALNALGPNPVTEHDVVEAFGTLEQFWDVLFPSERHRIIQLLVARVTVWPDGLDIKIQTQGLAALVVELTAYAEEARERSMSA

SEQ ID NO: 1756 - protein, 527 aa, unidentified
  source 1..527: note = uncultivated organism
MRVALYTRVSTGRQVEFNISIPDQTAAMTQWCERNGHEIVREYIEEGHSGTNDKRPAFQRMLADACSREKSPFDLIVVHSLSRFFRDEAEMTLLIRRLEKHKVALASVTQEGTNNKENEIYRRLLSLIDEQNSVENAKHTLRCMKRNAENGFYNGSHVPFGYRLHHTDIPARMGVKKRLVIDPLEAPLVKRIFGLYIERDLGVKGIASLLNSEGITRRGALWSTTSVYAILTGTVYMGQKLFNQRRWRTGEKKDDDEIVRIPVDSLVSVDTFELVREKLQSRSPKKSHPRRLTSPHLLTGVLRCGECGASMTMATGKSNQYFYYRCTTRTKKHLDLCPSKMVSMGKLDSAVLSALADKVFTPERVTVLLKELKSRMRGESGASIAELNKQADTIRFKLTNLYRSIEDGIAVDDLLRQRLDELKNQEQELSRRIENYGYSPQAVEESIVPEEVKAFAAQLREKLLSRDSKFTKEYLKLLVREVELKENQATVRGSYCSLVGAIKIAAQTKNLSTSQEVLRFNGDWRAR

SEQ ID NO: 1757 - protein, 545 aa, unidentified
  source 1..545: note = uncultivated organism
MKSIPKGQYFAGSYARLSQEDGDKSESDSIRNQKELIRNFLKNHPEIKLKKEYADDGYSGTSFDRPDFRRMMQDVEEGVINCIIVKDLSRFGRNYIETGQYMEQILPQKGIRFIAVNDNYDSTAEQNASDHIMLPFKNLINDAYCRDISLKIRSSLEAKRKKGDYVGPSFPYGYRKAKDNKNQLEVDPEAAKVVQRIFRMKIDGKSNGKIADQLNREGIPAPYDYKKSMDPEKHYAPGFLPNGSSSWSFHSIFRILTNEMYIGTMVQGKSRKVNYKTKKIVPVDESEWIRVEHCHEAIIERKDFEIVQRLLLADTRVSPGQEEVYLFSGILYCGNCGEVLGRRNVTSGCRHYIYYGCYSDRKKIRCPGVIIREEELYRTVKETLRCQIGLFLDMERLLRQAEKIPLQQAEVHQIDQQIGKCEAQMNRQKELQGSLYGDYRDGILEREEYIMLKKRYQNEEQRLANVKHDLIGKREAVLQGKNPREKYVELCKQYQNFEVLDRRTLVTLIDQIVVHSKKRIEIRFAFRDEFQQTRELMEQLREGMI

SEQ ID NO: 1758 - protein, 515 aa, unidentified
  source 1..515: note = uncultivated organism
MTDFDFKKKKRSGTTNEKKKTGVYLRVSTEEQAKEGFSIAAQREKLTHYAFANDWDIVDFYIDDGISGKNIKDRPDMVRLLQDVENGKVNNVLVYKIDRLTRSTKNLIELVEFFNDLGCDFNSIMESIDTSSATGRMFIKIVGIFAEFERENLAERVTFGYEQKTREGNYTNTHGVYGYDYVVGDGDLLINEQEAELVRRIYNLYLQGNSMNTITKMLIQEQVPTKRGGQWNSSTLRSILTNPLYIGSIRYGVDGRPTSFQVDNTRYPTILDEDTFLRAQAIMKRRRKYTPRSYPTENSYFLTFLVCDNCGSRLGAIQHMQKTKNGEVLRVNYYCNNHKTGQCNCMNMVQTKVEKAFIEYISQYDDFKADFGLVEQLKSTPEPVKSNEKIEIEISKLHKRLEALRALFATGEIKFEEYRGMSDIINNKIISLQKTITYQDEEEEYNISLEEAAAVIGNLKSNWVNLTNKEKIEFLTRFIDSIKIYNDKGSVKVSEIKFLTKQSEKKPPQYTKLLK

SEQ ID NO: 1759 - protein, 597 aa, unidentified
  source 1..597: note = uncultivated organism
MSRSCPADAIGSGRAPASTSARRQPTAGPGSGDNRQQPVRVSFYTRISTDEDHQKYSLGAQSDRLEAFCKAQWGADWRLHKIYRDTESGTHMNRPGLEEMLFDAEAQAFDTLLVFRVDRLSRKVRELALMVDELTKFGVVLKSITEPFDTANAAGKMMLQMLGVFAEFEHATIVERTKVGMEKKAKTGAWVAGGAPYGYQLDPERGLVINEDEALLVRKMFQMYTFGQEGAHTICQKLNEAGHRKRSGKKWDKRVILHMIKSPLYVGKIRWREVVYEGNHPGLVSESLFDQAQEVMKRRVEDLKGRQFHNCDERLLAGIIKCARCKSHMVGVSTRRKGKKYPYYLCAKRWSTKDCDQDYVRADLLEAAIVEDIKGIFSDEQFMARIWEEANRCLCAEKPALEQEIQKVEAEIAKAQATIDRYFAAFEAETMKPEVCSQKVDDLNARIATLESEKRELAERRKRLEIPPVDREMLTGLLDEFGNVMAQGTHPQQKDLLHRLVKKVLIHDRRTIEIWYALPNQASVRTPAHPAGPTRLELATSGLTGQRSNQTELRPRFAHRTMGFYGCLVGGVNTVSGAPGARRGTGGYHQRTKSIPR

SEQ ID NO: 1760 - protein, 505 aa, unidentified
  source 1..505: note = uncultivated organism
MKIAIYARKSKETDTGESINNQINMCKDYFNRQYNDCTFEIFEDEGFSGGNINRPAFKRMMQLARHKQFDIITCYKIDRISRNTLDFLTIFEELKEYDIKLVSITEGFDPSTPAGKMMMSMISSMAEMERMNIAQRVKDNMTGLAKLGRWSGGTTPTGYRSVTIENNNKKESYLELIPEMEDTIKSIFTGVAEGLTTFAVGKKLGLSAKTVYNIVRNPVYVQSTKESATYLKHMGYTVYGELNGNGFIPYNRRPRKNGKKLFNSQGMFVTVSKHKAIIEPNLWIKANNNISSRGQEAKPRISTHSFLAHMVKCKCGSGMFVWQGKKDKQGNVVYYFMCSAKKQGSECNSFNIRVNEIEEMVLNKLIQISLDKNLLKEYIENKNKKIDYTKIINNIKSDIKKKNKEINSLSEKLILIEGPAIKIITDKINSLSNDLSKLNDELFKAEREKIFQEQDTINIDTLYESIVELVHIFPTLSMEDKQFYIKKVIDHVDYNGIDSIKIKLN

SEQ ID NO: 1761 - protein, 532 aa, unidentified
  source 1..532: note = uncultivated organism
MNGERTRSRCAIYTRKSTEEGLDQVFNTLDAQREACEAYIKSQAGEGWRALPDRYDDGGFSGGNMDRPAIKRLLADIDAGKVDVIVVYKVDRLTRSLMDFARIVERLDARGVSFVSVTQAFNTTTSMGRLTLNVLLSFAQFEREVTGERIRDKIAASKAKGMWMGGNIPLGYDLEDRKLVINQREAEQVRHIFARYLALGSGVELMRELAADGIVSKRCTSRSGKERGGLPLSCGALYYLLENRLYRGEIVHRGARHGGEHSPIVSNELFEAVQARLAVNRRERGKRPARASGCPLAGIVFDAEGRQLTTSFSYGRGGKSYRYYVSPPHSATDHASRTESLLRVPAQGLETLVLQLVRRILGADSSWDELRSLVQRVEVLGRSIQLVILPGILLEPHEPLTSAVDRVRRQAGEGRVVIADDGSLRFIMDRGPRFRGGTSETQGGDPQPIVDAKLAARLRRGHQLLDRFRMSPSNPADHFFAKAPPDQRDRRLMQLGLIAPRLQKKILEGASLETGDVCGEFPLAWADQMPLA

SEQ ID NO: 1762 - protein, 528 aa, unidentified
  source 1..528: note = uncultivated organism
MKKNPATATLPVVRCAVYTRKSSEEGLEQDFNSLDAQRESAEAFIASQRHEGWACLPDRYDDGGFTGGNMERPALRRLLADIEAGRVDCVVVYKVDRLSRSLLDFAAMMQAFERHKVSFVSVTQQFNTATSMGRLVLNVLLSFAQFEREIISERTRDKIAATRRKGKWAGGHPILGYDVDRRGPRLVVNEAEAARVRAIFGLYLEHGSLLPVVEELERRGWANKRWQTRKGRPRGGQPFTKTSLYRLLTNVAYAGKVRYKDEVHDGEHVALVEADVFGRVQALLRRNGQTRGAPARNRCGALLKGLLRCGPCGCAMTPSHSTKNGTKRYRYYVCVNAQKRGAAVCPSRSVPAAQVEQVVVAQVRRACQDPALLPATIAQARRQDDARLAELEAERRALDKDLARWHAEVRKLAWPAGPPDPDDPAAARLADLHERIRLAEGRVLRVREEAAATRRRRLGDEEVAQALAAFDPVWEALTPAEQARLVALLVERVDYDGARGKVAITFRPTGPQALTAEGTGPGGKERSA

SEQ ID NO: 1763 - protein, 629 aa, unidentified
  source 1..629: note = uncultivated organism
MKKEQDNRVIAIYSRKSKFTGKGESIGNQVDLCREYIRLHYGDAEAEKAIVFEDEGFSGGNINRPAFQRMMDHIEKNEIKMMVVYRLDRASRNVGDFSIMMKKLERKGVVFVSIREQFDTGTSMGRAMMMIASVFSQLERETIAERIRDNMHELAKTGRWLGGNTPTGYKSESVKSITMDGKTKKACKLKLIPEEAEIVKTIFDLFTQTGSLTMTEAELLKRRLLTKNENQFTRFAIKAILQNPVYMIADEDAFEYFRLKESEVFSSREEFDGVRGILAYNRTDQEKGKATVFNPVNECIVSVGKHTGIIPGKVWVAVQDNLERNKSKSYRRPRKNEALLTSLVFCACGNRMYPRLSKRKTADGEPIYTYVCKMKERSKKELCKRRNANGNTLDTAIIEQLKRLGDEKSDFVRQIEKGKMFYSGNREEYERRLATMRKEKADLERKVNSLVDTLAETEEGAAKRYIINRMGEMNLEIDKLSMGIEELVSIASEHAFSDIEFDVMREMLTMFKNGIDEMSYEQKRVAIRTVVRRIIWDGENAHIVLFGAEGEDIEYPDISHLMKDSIAETEDDEELVPFIGEDMDENPLLDFGPETKTQWGEDSKRNTYVFSFPQKAFLRSEHRRTGGRG

SEQ ID NO: 1764 - protein, 560 aa, unidentified
  source 1..560: note = uncultivated organism
MANTPLRRCAIYTRKSSEEGLEQDFNSLHAQREACEAFIRSQAGEGWKLINTAYDDGGFSGGTIERPALQRLLADIRQRSIDVVVVYKVDRLTRSLADFARMVELFDAQAVSFVAVTQQFNTTTSMGRLTLNVLLSFAQFEREVIGERIRDKVAASKRKGIWMGGSLPIGFDVIERKLIVNLDEARTVRHIFQRYLELGSVRLLEKDLNQREIVSGIKVSKKGNRRGGKPFSRGALYHLLSNPVYVGEIRHKQERHPGLHEPIVSRELWEQVQQRLRSQTARHGQGRKTEAPRSPLAGKLFDEKGEPLYVQGAAKGQRRYRYYVTRTLVRSGSENGEQGWRVSAPELERSVSAAAQEILSDRAAIAQTAEEAGIDTNRFASVLKSVQSWIERLQPGTEAACALEELIERVELRSDGVRISLNLPLRVADERDGMTASHLALSRFVPMQMKRRGVEMKMVLQGDSTPARVDLPLLKAVARARRWVGDLASGRMRSVAELARREGMDGRSVRRLVPLGFLSPRIVEAIVEGRQPPDLTVIALTLRLDLPLLWSAQEQALGIR

SEQ ID NO: 1765 - protein, 524 aa, unidentified
  source 1..524: note = uncultivated organism
MAAAQDNLARKQIFIPAVQPEAVILRVAAYCRVSTDSQDQLNSFAAQQSYYNDYIRKHENWQLAEIYADEGITGTSAEKREDFQRMMSDCRRGRIDKILVKSISRFARNTKECLEYIRELKALGISVFFEEHNIDTRMVTSEMLTAVLASCAQAESESISKNMKWGIRTRMEKGIYTASSVPFGYRWKNGTLAIHQEEAVHVRWIFAEYLSGRNTDSIANELKNRSASDPVLAVRKWSYQSIVNILRNEKYIGDCLNQKTYMTEALPRRCLRNRGEHTQYYVEDAHPAIVDRETFAAVQALLRMRGRGHVQYTTQTSPMAAKIVCGKCGAWFRRKQTGGRYVYACRTRLDDINACDIPQIREDEIKEAFLRLYFNLRNNRQIFTNLLKNLHTIRTRQMLWGADIVELNKRISNIISQSHRLAALQTSGNVDPDIFITKSNQLAEQLRQAKEQKERLQHQEDNGIIEATEQLLDAINAGPTMLESFDEELFCELIERIIVQSNTRIRFRLKNGLELPETIERTVR

SEQ ID NO: 1766 - protein, 581 aa, unidentified
  source 1..581: note = uncultivated organism
MRKASPRRHTNGIVGIRCAIYTRKSSEEGLEQAFNSLDAQRETCESYILSQKHEGWVALPQMYDDGGISGGTLDRPGLKRLLADIAAGMVDTVVVYKVDRLTRSLSDFAKIVDAFEANGVTFVSVTQSFNTTTSMGRLTLNMLLSFAQFEREVAGERIRDKIAASKQKGMWMGGLPPLGYDVIDRKLVINQNEADTVRHIFRRYADLGSVRALQEELDAAGFVSKRRLDRFGREAGGKPLGRGALYLMLQNRIYRGEIIHKQASYPGEHQAIVEAELWETVQKILAENRVDRSTGARAAAPSLLAGLVYDDAGERMSPTHANKKGRRYRYYVSQSLIRRGRPNGSDIGRRVPAGDLENLIEDRIILFLSDPPAIYSAIEHLTEDANLRQAMVQKSADLARGWADLEPSARRSILQRFVERIDVQRECIDVAIRPGAIPVIIVSECGPRQPDSDSHDTPFVMLSIPARLRRTGKEMRLVIEGSTGGPQRAPDRSLLRLLGDAHRFQKMVMQQQGRSITDLAREAGIGRSYFTRILRLSFLAPEIVTAILDGRQPSQLSAKHLTRNSRLANDWPSQGAQCGIT

SEQ ID NO: 1767 - protein, 519 aa, unidentified
  source 1..519: note = uncultivated organism
MVIAIYPRKSVYRDNSDSVQVQVQMCKEYAGIIYKGKETQFRIYDKDEGFSGKNMNRPSFKDLMQDVKNNEIDVVMVYKLDRISRNVQEFSAMYEVFQQHNVSFVSVKESFDTTTPMGRTVMYILAAFAQLERENTSERVADNMQALGVSGKWTGGKLPTGFTSVRRQIGAKEHSFLMVDKNTIGLVKTLYGLILGGFSITKTERYCRDNGIRSQSGKFLNTSQIHGILTNPVYCQNSMEAYYYLQEKGCTLPDPALFDGTKGLIGYGRTKTGKTSQKIQSMDNWIIAVGIHDPVMPASDWIAVQKRLGTNKTVRTAKHECGILKGVLRCRCGARMEVRTYIKNGITFSYYFCADMARQGKQKCNTGYIRVEEVEKCFLRQLRSIRFNPDGFKLRVRQSDGLVDTKTLRKDIRTAEESIRNLTAALAQAMDTAASGYIISRIAELDKQKNALEISLRKAETRALAEKSIADTEREIYNGICYLLDNFDEISYTGKNELIRKIIKNCILDTESKSLRIIF

SEQ ID NO: 1768 - protein, 545 aa, unidentified
  source 1..545: note = uncultivated organism
MRAKDFYNVAVYLRLSRDDVSDSGSAESNSIRSQRDLIRSYIRQQGDMGIYDIYVDDGWSGANFDRPSFRRMMEDIEAGHIDCVIVKDLSRLGRDYIEAGRLIQKTFPAFSVRFIALNDNFDSLTADFNEKTLVLPVKNFVNDAYCSDISKKVRSHQQVKREKGDFIGAFAVYGYRKDPENINHLIVDEYAAGIVRKIFAWKIAGLSNLAIAEKLDGMGILSPMEYKKSQGEKFSTCFATRVRAKWSAVAVKRILTNELYTGMMVQGKQEKVSHKVRRSVEKPREEWVRVADTHEAVVSSEDFETVQKLLGLDIRASAGRAGCHMFTGFLYCGDCGEPMIRRVNRYKGTEKIYFICPTRNKGMGCTRHSIPEEELKRLVMAGLQQQLALFLDKSYVMSRMEEMEIPFDEMEAFDQEIRRLRNGQGKYMSLRTGLYEDLKQGIITEEEFRDFRQVYEAQYQASEDAIRRQEDAMKALFKAGVSAGANLEKMKSSLEITELDRDTLVAFVSRILVYEDKRVFLELRAKDMFAKVLMQVDDPGRRGVS

SEQ ID NO: 1769 - protein, 563 aa, unidentified
  source 1..563: note = uncultivated organism
MSKQHVRCAIYTRKSSEEGLEQSFNSLDAQREACQSYILSQKHEGWAVLGNRYDDGGVSGGTMERPGLKQLLNDILAGKVDTVVVYKVDRLTRSLTDFAKIIEIFDSHTTSFVSVTQHFNTTSSMGRLTLNVLLSFAQFEREITGERIRDKIAASKKKGMWMGGMVPLGYDCVDRRLIVNPAEADTVRQIFRQYLRLGCVSKLKHFLERKQIRSKIRTSNAGHTCGGAAYSRGALYHLLNNRIYIGETVHRKESYAGQHEPIVSRDLWSRVASLRKNNQAHRNGKSYSTPSLLSGKLFDINGVRFTPTHSVKNGKRYRYYTSQTVVRNAGTKPAITRFPAQELEQFVISQIRHLLRDTGKCTAGMKDRPSKDVAAERAKELAKEWPTLEMSKQQEFVGNILRRVTIGRTEVWIEIGKTKLVATLLGGKPETLSPSCREESEILKLAGNFQVMRRGGELRVILPHGDTGFERKRVPSLVKTVARAYGWYERIVAGEVTTIGQLARSSGLTRRYVRRILQCAHLSPQITEALLTGKHRLNLTVKEILRRLPLNWREQEQKILGQL

SEQ ID NO: 1770 - protein, 538 aa, unidentified
  source 1..538: note = uncultivated organism
MPETKRKTRCAIYTRKSTEDGLEQDFNSLDAQREACAAYILSQTHEGWEGTSELYDDGGFSGGSMERPGLKQLLQDVIAGKVDVIVVYKVDRLTRSLADFAKIVDILDEHDASFVSVTQSFNTTTSMGRLTLNVLLSFAQFEREVTGERIRDKIAASKKKGMWMGGPVPLGYELGDRKLVVNNQEAETVRHLFQRYTELQSVPQLVDELADQGYRTKVRPYKDGRQIGGVAFRTGALSQLLKNPIYTGKVRHKDKIYDGEHEAIIDQALFDEVQSFFAANRSDNALGKKSRNPSLLVGIITDPDGRPMTPTHASTGSKRFRYYVTRLEPGDDRNLTWRLPSGEIERLVADTLAKGIVETTPVSGDAAIIQDQMAVNSEIANHLQNAAGHEKRKILLDHKVTVQIREEQVSISFQILDAAERSEVCIDAKLAKQGSELKFTIPPTNANIKPAPNATLQKLVAQAFAAQDLLLTGKPNPALSDYSRRYLGQLVRISWLAPDIIAAIMDGTQPVDLTGRKLTRANAIPLDWPSQRKMFGFA

SEQ ID NO: 1771 - protein, 517 aa, unidentified
  source 1..517: note = uncultivated organism
MRPVNGEKKRCYVYARLSTEDQHRRAEYSSLESQEKVCKAYIASQEPNGWKYVTTIKDLSSGGSTDRPGLSELLEHIKQNKVDVVVTTKMDRLTRNIKDFWTLYEVMQEHDCQFACATQELNSTTAHGRFFINILMSFAEFELETIRERTRAKMLSQAEEGLWHGGRSPFGYERHKDRKGLLIPHKTEAAVVKKIFDLFVKLGSPAAVAKEINGMGYRTKSKKKTKFSKWTITYILSNPLYIGKTTFGGQSFEGKHKALIPINRFNHVQKMLEKNKQTRTGPTQNKYNFRLRGILKCGDCGSMMTPSPAKSGRYLYYRCTRVSKYSKEECKVRKIGARAIEDAVVNKLCEIGTDEAVIKEAVRKANKASVTNSKTKTKELNALKKELKPVQDSIDNMIRYVEKHGDLPKAMSGRLPELETRKEQLETQIQRLEFDIGQLKDYQIDTELLTKTLQDFRAIYNELTPEEQTRLLQLMVQEVVLGEETLKISVYPLGDSGKPLEYLLKNPEFAESDKKRG

SEQ ID NO: 1772 - protein, 534 aa, unidentified
  source 1..534: note = uncultivated organism
MKGGFIMIAAIYSRKSKFTGKGESIENQIQLCMDYGKNIGITEFLIYEDEGFSGGSTDRPKFKDMLSDARNKKFDCLICYRLDRISRNVSDFSALIEELNKLGISFISIKEQFDTSTPMGRAMMYISSVFAQLERETIAERVKDNMYELARTGRWLGGNTPTGFTSEKITYFDENMNQRSMWKLKVDKEEMKLVELIYSKYEELKSLSQVEKYFLSSNYKGKNNGNLDKSTLQSILRNPCYAKSSEKVIKYLSNNSMDVVGTPDGSHGFLTYAKQSATPIVSIAKHKGVIDSDRWLHIQKILDINKAKAPRVVSGSNVALLTGLLKCRCGSTMRVNYGSKRKDATRGHYYICAKKNTKGLVACDNKNINGEQLEEVVINQIKNINEYQIFNSFEESKKATLDKSKDIKSEKKIIYKIISDTNLAIENLVKQLSLNTDSSASKYIISEIEKLNQELESLNNKLNELDNLSKEIDSIDINLNIISDAFIRFRNEFDDADLNTKRFLLSSIIDEIIWDGDTGNINVCYLGTKKKALI

SEQ ID NO: 1773 - protein, 563 aa, unidentified
  source 1..563: note = uncultivated organism
MFQVEVLKANGKTISNRNQTLDRLKVCAYCRVSTDTKDQINSYNSQVTYYKNLIKDNPKWIFAGIYADPGITGTKTEKREEFNKMINDAKEGKIDMILTKSISRFARNTLDTLKYVRLLKGLNVSVKFEEENINTLTMEGEMLLTILSSVAQQEVENISANVKKGLKMKMQRGEMVGFKACLGYDYDKETRNLVINEREAEIVRYVFNRFLDGYGSTLIGRELEEKGYLNKEGKCFWPEGTVYTMVKNEKYKGDLMMGKTYTLDPITKRKMKNYGEQDMFYVKNHHEPIVSREIWDRVNEILAIRSAPRKKAVEGLHLIKTKMYPFSLVTKCGFCGGPAYRRTVHSSTPYAKPTWRCICAAKKGKKLCPESVSFDEEILEEAFLEAFNKILASNDDTIKEFLEDLKTSLKLVDNKEEIDSIMKEVDRLESLKEKLIQIRTEGVLSKEDFENKYLIYQADESKLRDKVKALKQEEENSRSTIDHVNNFLKTLKEKEELTEFNDNVFNSVIEKVIIGEKNDDGTSNPYMVSFIFTGGFITKVDLTKDRQIKRLIRLRNDRLLNKI

SEQ ID NO: 1774 - protein, 575 aa, unidentified
  source 1..575: note = uncultivated organism
MAKTAKTVDNRPVAIYARVSTQEQAEEGTSLDFQHEQLSGYCRSQGWEVFREYVDRGYRGKDGDRPELKRLMSDAKLGLFGKVVVLKLDRLARKLRLLLEMEETFKEHDISLVSMKDTIDTSTALGRTVFQMFGLVAEGERETIAERTKSGRQQRYKQGCWASGKAPYGYFYNKDTKKLEIDETKAPIIRRMFHEYAGGNSLVQVLNGLNRDGIPPRRSRTRGWDAGAVRNVLINPAYKGTLIVNRYQHIAMVYRVDMSKAMIINIPPIVSATLWEKAQRHRKENKHLRPVRRGVPGLLQGLVTCGVCGHSFRAIISDRCRRRVYSCRGRLAYSHLDGLPRCTCPNCPADWLEDQVWQRIEAILNDPDKLEVMLKDTVDRLRSREDEISAQIHPIDDQLSTIAEQKRRIADDWVRLNMDPGKYRKLQQNLDHEESRLKSIRAEIDPKQSDELERTRSLLKFWESQLRAMKWNLSDEEGRTVRTVDKPHKNVLKIVGFEDKDISKIVQFPAAKREVLDQLGVKVVVYPDRVEVKAAVFDVEPIDGQLCTSIASWRRIPRGLSRACGAALDRKTAGS

SEQ ID NO: 1775 - protein, 530 aa, unidentified
  source 1..530: note = uncultivated organism
MSRTRAQANTGAAKPAPRVRCAIYTRKSTEEGLAQEFNSLDAQRESAEAYIASQKSDGWVALPDRYDDGGFSGGNLDRPGMDRLMADIEAGKIDCVVVYKVDRLSRSLIDFARIMEVFERRQVSFVSVTQHFNTTHSMGRLTLNILLSFAQFEREIIGERIRDKIAAQRRKGKWAGGVPVLGYDVDRSGPSPHLVVNATEAPRVRQIFDLYLQRGSLLTTVQELARRGWHNKRRTTTAGLAVGGKPFDKTSLYALLTNPIYVGKIVHKTNTYDGEHPPIVAAETFKKVGDQLQRNRRAGSPEVRNRYGALLRGLLRCKCCERTMVHTFAGKIGKKGQQYRYYTCTNSIKRGRGECEAGSIPAAEIERFVVEQARGMVRDPALQADVLSEARSHAERQIALLEREHADLERAATRHHAEVRKLAISGASDPMTTARIAELHGSIQSGERRLREITAQVDQLRRDQLQPQDVTDALTDFDAVWDRLSPREQARLLAVLVQRVDYDARAGTVAVTFHSTGIDALTTRLAEEAA

SEQ ID NO: 1776 - protein, 523 aa, unidentified
  source 1..523: note = uncultivated organism
MGLQMKSDVQSTTTSQIRCAIYTRKSTDEGLDQDFNSLDAQREAAEAFIRSQRGEGLVALPERYDDGGFSGGSLDRPALERLLADIRGGAIECVVVYKVDRLSRSLIDFARIIEIFDKYKVSFVSVTQQFNTTNSLGRLTLNILLSFAQFEREIIAERTRDKISAARRKGKWIGGRPMLGYDIDPRSRRLIINSDEAFQVRMMFRLYIEYNSLLAGVREMDRRGWRTKEWVTRRGVMEGGKPFTKGRLFRLLTNPIYVGKIDFKNETYEGEHDAIVNASIWEETQRILQRNSLNGGVEVRSTYSALLQGLLRCASCQAAMTRTYATKNSHRSPHYTCAGAQQRGQGNCDGKPVAESSIKAFVTRQIRRIGSDPRIAAAVIAKANENRRGTVADLTLEHQVAQRELARMGTKLHELLPNVGCDEQTISEQMADLHKRIDQTERRSMEILRELRGLEGESVEEADVRVVLAEFDPLWKLLNSHEQVRIVCALIESVVYNGKTNRVTVGFRSPAVRRMCRGRGRST

SEQ ID NO: 1777 - protein, 540 aa, unidentified
  source 1..540: note = uncultivated organism
MRIAIYVRKSKWTGRGESIENQILMCREYIEKFIEDSREAQILVYSDEGFSGKDTNRPEFQKMLEDMKQRPFQYLVCYRLDRLGRNLADLAWLIEKLNKEHTEFVSIKERFDTSTPMGKAMVYFSGVLAQMEREQIGERVRDNMYLLARSGRWLGGSTPLGFHVREKLYGEEKIRKAFYLETEEKEAEILRLIFREFLNSHSLTKTARKLTEKKILTRRGRDYTPETIGEILENPVYCQSGTRSYDYFASLGCRMGFSREEAREEKGLIRYGKTVSNRYRGQEALPREWIIAQGEHKGLICQEDFLMVQSLLKKHRLGKRGEGRIQNEISLLSGLLYCSCGSKMRPKYYGKNQVNEEGWRKFSYRCICRDKTRGQACQSGSLPGNVADGLVWEFLLERTRQEISMKEIFWEIRRKTEKEKEQEKEKENIPKEEARLEREVRRLSQRLAETEDLDLAGFLEQEIRKRLGEREALRKREREKRNSFDRKERENLVRRYSDPEFFSSFLSVPNKRIYIEIWVKKLVWEEETGRLYLFVSPGPL

SEQ ID NO: 1778 - protein, 546 aa, unidentified
  source 1..546: note = uncultivated organism
MSKLKQLNRTGLYLRLSRDDEKAGESMSIENQRTILRKFVSENDGTIADEYIDDGWSGTDFDRPGVKRLLDDAKDGKIDTIVVKDLSRFGRNYIQVGQYIDYIFPAYGIRFIALSDNVDTAERGSAGMDMMPIMNVFNEWHAASTSKKIRAVLEANWRQGKYTNWAYPYGYKAGTDENRMAVIDEPAAKIVRRIYDMRLQGNSTRTIARTLTDEGIPNPTAYYTRLDGKKSNRRGSPWWSPKTVADILKDSTYTGTLTQHRTTRFSYKNHKVLNVPENEHIVKENAHAAIVDRQTWDKVQAINGSVSRGRPDKANRVHSLSGLLICPDCGKKLKYKSVGSGRKNSCNYYCCRTYVDLGKKYCTSHSITEKQIENIILQDIRDMLGKVEIDEERAKEHFFKERAKCGERNRLSDEKQLRSLNDRLAELDKLIQSAFEEKVLGNLPESVCANLCRKYQAEKESTQKRIAELEKRLAEADTIETDAEEYIARLKRYGRCEQLTREMCLQLIEFITVGEKTDGDEPRHIHIYYKLISNQTLAEYREQTTK

SEQ ID NO: 1779 - protein, 504 aa, unidentified
  source 1..504: note = uncultivated organism
MKKGYGYIRCSTIGQAEEGFTLENQKRAIQEYCKIHDIHLVHIFEDPGRSGRTIKRPEFQEMLAKMEAQHIESIIIYKIDRFARNVSDFSRILSELKEKNIELYSLQEGNLTSSSSLVPNIFASVAQWESEVNGERTKDALQQKFRNGWQPTPPPCGYVSIGGEGEQKTCEIDSHAGPVIKQMFQLYGSGQYSMMSLQEWLQDKNILSKNGTIISFSRINNTLNNPFYYGLIRWHGEAKMGKHTPLISKELFDRCQYVLGKHRHFLLRQHKYDFLLRGFLYCPCGMRNVGDVNTIRSNKQKVYYYHCQKRYSPDCKEKYAHAKEIERQVEEHIKKLEFDDDFLEAVKQRAKNFITTGKHEENGVRQTLINKKTALITRRNKLEDLLIDGALDSDTYKRKHSELSLQILNLETQEEVTDQETKLDMPLLEQTLFMTRDIYQTYKRASDPVKRHYIRFFYEKFIVSDRNIIEAKPTPVFEALLNANMVRFSDTVLPGVDSNRRPCS

SEQ ID NO: 1780 - protein, 589 aa, unidentified
  source 1..589: note = uncultivated organism
MNQSNNKRIRCGVYLRVSTEEQNKEGHFGLEVQEDKCRAFIESQEAEGYVLDEKHVYKDEISGGSPIEKREGLNKLFEAARQKEFDVLIVYKTDRLARSIRILVNAVHELESLGIKYRSVTEPFDTTTAFGRTAMNLFGTFAEFEKEMIRERTMSGKLKAARGGAWVTGFCPYGYFRNEETKRLEIVPEEAKVIKKIYLWLVNDRCSLGEIERRMNAMGIPSPKYTRITKRETHNYWYKRTIGRILTNEIVMGRLIYRKYKRPFKNLTSLIDPSLLRPDNEWVETKVPPIISKELFNAATQQLIKNREFSKRNQKREYLYAKLIHCGQCNFKMFSGYQPPKKNRPAISGVGKYYHGVYRKVDAIGTTKRCEKCLQYAETRLEPIWECLKAILKNPENMNAPLEKYIYKEENSVEIKERLKEIEVELSFIEKKKEKVQKMYVESDMDEKQYNLYISEYKTETRKLTDESTRLHQRLLSNAEKKERRTAISKVYEQVKNRLDNVSYSDKEKILHMFVERITLFPKENYAQVVFKFPSDSSVAQVDKVISLSPSSDKSFPLVLNIRTMTEKERRVEIIMANPLMYSHKEPVV

SEQ ID NO: 1781 - protein, 529 aa, unidentified
  source 1..529: note = uncultivated organism
MTRCVVYSRFSSNNQREESIDAQLRASEEFASKKGYELVGHYSDKARSGTNSSKRSEFLRMIKDAEKGLFDVVIVHKLDRFSRDKYDSALYKRKLKQCGVRLVSVTEQLDDSPESVILESVIEGMAEYYSKNLARETMKGLKENAYQCKHTGGMPPLGYDVNSEKKYIINEREAESVRLIFEMYTTGYSQSKMVNELNERGFKTKLGTVFRANSIHSILTNEKYTGVYVYNKSAKKDAFGKRNSHAYKDESEIIRIEGGMPQIISKETFEKAQEVLKARRRAPGTNKAKENYLLAGLIRCGCCGRHYQGNRRQGKNKPMYVSYRCSYRRLTSSKVCDNKEIRKEYIEEYVLSELERKIFNDKAIPHLVEGINKNIQKKNKVEEEKKEVIKKEIKEIEAQINKIVTAIASGFMQEEFKNKMDELKGRKSELEFKLSELKSDEITQLVNEKDVRNLLNNFSGYVISRNIPECKKFVQDFVKEVIVYKEHIEVIFNVSFSLFKNNHGVEVKSKINRYVLYERYSNSFYIKVS

SEQ ID NO: 1782 - protein, 514 aa, unidentified
  source 1..514: note = uncultivated organism
MPEVRVIQPVTIQAADKLRVAAYARVSSDSADQRNSFSAQVKYYTQFIQAHEDWQFVDIYADQGITGTRVDKREEFLRLMRDCRAGKIDRILVKSVSRFARNAQDCIKTVRELKDLGVTVAFEKERINTAVMSNEMFLSMMSAFAQEESISISKNMRKGAVMRMQNGTFRLSQIPYGYRCDQNGKLIICEEEASIVRRVYDSFLQGEGVSQIACQLMKEGVPKRNGNPVWSRYGILYILRNERYMGDERYRKSYRSDEIPFKKIDNRGEKPQFYAENTHEAIVSRETFQKVQWLLQGKSEKFGQEQTAVPYPFSGKLICGECGSILYRRVTARGIRWICSRHLYHSNQCKQKGSAETFVQDKFCLLLHKLSQNREAILAEYLKHLEELKDRDFLVHSDAMELNRQIAILSEQNHALHSLWAKECIDSAFFIAQNNELEQKIARLRKDLQRYRDANDYTGIIEQTKRLLSLVSSPLPDSFDPELFRKTVEQAAVSDKSIVFHLKNGLKLEDPAER

SEQ ID NO: 1783 - protein, 551 aa, unidentified
  source 1..551: note = uncultivated organism
MTSVTRLATNRQPRRAAVYPRVSSKQQEDNYSLDTQLAACIAHAERLGYVVEERHVFREVYTGVDYWDRPQMTRLREAIRNGEIDAVVFYSVDRFARDPVFHMLGLAEARQFGVKFHIVTDDLDLSDDDDVLMFFLRGYAAKREWRDLAERTQRGRRARAAKGKPIIGPKNPYGLIWNEAEGRYLVNETEAAVLRRIIDEILGGASLRQIKNGLNADGIPSPSGKTWQTSTIKYLVSQQRYTGVGVAYQYKTTRKGDRWLRTEVPDGWEVPLPDGGDPQIITPDGFAAIQPRLAANRAQATRNNREPEAFLLRAGFIRCGLCGHVMAASSAGGRRRYRCATRDKVDPPCPQTVIEQHVIDNAVWERVVTVLKNPEIIARELARLQADDPTAQDLDIVERALKDVERQRDNLTRHLALFSDPEAAAPLVRQIEALGAQIAQLKQQREHILERRRGWETAQDRLADLESWCRQVAGRVDTLTYEQRRLALEALGAEVRVFPKGHDPHFCITLALPLEPPGREPFAYSSTCRVGHNTLVLRWTDRDCITGHATA

SEQ ID NO: 1784 - protein, 576 aa, unidentified
  source 1..576: note = uncultivated organism
MEHDSPQPVKKKERGAEYLRVSTEEQNSEGHYGLQVQEERVKSWCESQGYVVAEGNIYKDEISGGLPVEKRPGLSALFEAAKRGEFDVVVVYKTDRLARNLRILVNIIHELDSLGVAFRSVTEPFDTTTSFGKASFNLVGTFAELEKEMIRERTTNGRIKAAKSGKWVGSTAPFGYVVNKTSRRLDINLQEAKIVKQIFKWAVDDKLAVHEIERRLNAMKVPAPWSTKIKTKETHNIWRPFTVRRVLANETHTGTFYYRKYKKPFNGLTSVTDPTRLRPKEDWIEQHCEPIITVEMYEAAKRQLTHNREFAKRNCKREYLFSKIIWCSQCKHKMFGGFQPARELGAHEGGRYYHGTYRKDDALGKTARCQWCPNYSEARLEPIWDFLRDILKNPKNMTRPLEKYIYKESDPLPVKQRLHDIAQELDTIRKRRDRVDDLYVSEQIDKQKYKSYQAEFKLDEQRLKDEDVRLRQTLLSKKEITDRQKAVAKAYEQIKDRLDKVSYEEKAKIVSYFVERVVLHAKDDHVEVAFKFPLDAETKEGKSFPLVHKIPTITEKERRATLMQSNPEMFTPKVLV

SEQ ID NO: 1785 - protein, 568 aa, unidentified
  source 1..568: note = uncultivated organism
MSGTKGGRRAIRCAIYTRKSTEEGLDQDFNSLDTQREACAAYILSQKHEGWTGLPDRYDDGGYSGGSMERPALTRLLAAIEAGGVDAVIVYKVDRLTRSLADFARIVAIFDAAGVSFVSITQAFNTTTSMGRLTLNVLLSFAQFEREVTAERIRDKIAASKAKGMWMGGIVPMGYRAEARSLVPEPEEARQVTRIFERYLALGSVIALKAELDAAGMRTPLRRHRNGRTTGGTAFSRGKLYAMLANPVCIGRIRHRDKVHPGQQDAIIGENLWEAVQQRLAANRRQRATGGSAGDPSPLAGRVRDPDGRKMRPSHAQKKGRRYRYYVTAALIEEGVAHGARGWRIPAAELEAAVARTIAAKLRDPAFQARMIASALSGAAASIAVKEMCSQVSGLLEDAASRTAREFLRMLVTRVQLTGDELTADVSLANLRDAGNGRIPDLAALELPDFSVSATLKLQRRGPELRVILGGVAAPPPTPDPHLVRTLIEARRRLAEYLDPASRPSIGDIARREGTDIGDVSRSLQLAFLAPDLVQRILDGTQPVGLTAERLRRIDLPALWEDQRALLG

SEQ ID NO: 1786 - protein, 547 aa, unidentified
  source 1..547: note = uncultivated organism
MRCAIYTRKSTEEGLEKAFNSLDAQREACEAFILSQQHEGWSVVPDLYDDGGFSGGSMERPALKQLLADVKAGRIDVVVVYKIDRLTRALADFAKIVDVLDAADASFVSVTQAFSTTTSMGRLTLNVLLSFAQFEREVSAERIRDKIAASKAKGMWMGGGVPLGYEAKDRKLIAVPEEATRVCQIMDRYLLTDSIRTLVNELDDEGIVSKTRIMRDGSIKGGIPFRRGALAWLLSNRVYVGEVVHRGNTYPGEHEAIVSREVFDAVQAKLAERTNHRSPASRKRVALLAGMTRDNIGRPMSPCHTRNHGRRYSYYASSMNDDASAPALRLPAGDLEGSVRSAIAGWLKDGDNVRSLKRGASASDVEQLFDGCANLAKRVAIGSVSEARSVMEQLEAQVRVGAQGATVSFNASAIETITGIAGVAKQAITIALPTSQSHYGHEPRLRLKPSSHKKPQRDERLVELLARAFTVRGELTAMNEQQSKRMPVSKLRHLQRTARISFLDPAIIRLILAGDQPSHLNARTLWRMASLPINWSAQREALNISIQ

SEQ ID NO: 1787 - protein, 568 aa, unidentified
  source 1..568: note = uncultivated organism
MSAKKKYHIIYGRKSKYTGKGESVENQVELCKQRIFAKYPGTTEDDILVFMDEGFTGANTNRPDFQKMLNVIRKDEALTVTCYRLDRISRNVGDFCNTITELQDYGVEFMSIREDFDTSTPMGKAMMLICSVFAQLERDTIAERIRDNMMELAKTGRWLGGTTPTGFKSQEVKSLTIDGKTKKLFKLVEIPSEKSLVILLKDKYKEIKSQTGLETYTIQNNLKTKQGKMFTRWALVNILSNPVYSMADKDSFEYFTKLGAQVVGDIKDYDGTHGLMVYNKTNQLTGKGKKDNPVTEWIVAIGKHKGFWSGKEYVEVQELLNMGANKRFRKPAVNNSLLSGLLKCSFCDSYMRPKVYPSTMPNGDVKFSYLCSLKDKSRKKLCNHKNLNGNEADRIVIETIKDLVKENSEFYQSIKSLADGTMNTLDEKTNELNTLIAEIRKNENDIETLVDRIKIVPPDVVPVLAEEISKLKKANEEINEQIKLLKVDKNTVIEDSENAKIVLETINTYFSKFDELDLLSKRTLVKLLITSAYSDGENLILNLLGTRDTVKNLKFPSGDNSKWNINVL

SEQ ID NO: 1788 - protein, 544 aa, unidentified
  source 1..544: note = uncultivated organism
MLNSISKLFFIYARKSVFTGKGESIENQIEMCIAYIRSKFPDVKDPDIVIYKDEGFSAKNTDRPEFQKMLIDLKARKPDYVVCYRLDRISRNVSDFSSLIEDLNEREVSFICIKEEFDTSKPMGKAMMYIASVFAQLERETLAERVRDNMLMLARTGRWLGGTPPTGFTSTKTQDVIMDGKIRTSFRLKEIPDEIAVVTLMFDKFFETHSLNAVSKFLIKQGIKSRNDKFYSLIAIKQILQNPVYCAADKDAMDFFVEKNSDVCFEEKDCNPKLGLLAYNKRDYTKKHAPRQPLEKWIIAIGKHGGLIPGERWVAVQNIIEESKPNGTKPSNMHNDYSLLSGLIYCQKCGCRMFAKTRHQSPKLFDYICQSKLRGGTALCDCQNIGGIQADDKVCEYLSSYTDVNSSIYKMLEKLKHDFKEEKVERPIDSIESQIKKYNEEMDNLVSFLAQQGSNPVLVQRVNQKMAELTQELSQLQKKRGQLLKNDNQFTDKEMQIDLLATALSGLKNHFNILSIHEKRTLIKLLVKKIVWDGKDLHIFIDNE

SEQ ID NO: 1789 - protein, 562 aa, unidentified
  source 1..562: note = uncultivated organism
MKRQKAALYVRVSTRYQIDKDSLPFQRKKLKEYCKLLEIDKFEIFEDDGYSGKNTDRPRFQEMMEHIRAGGFSHLIVWKVDRISRNLLDFSTMYKELKDHHVTFISMNEQFDTSTAIGEAMLKIILIFAELERNMTSERVTGIMLDRAESGLWNGGLPPLGYKKDPEKKNLIPEPEEKDVVKMIFDLYEKYHSCQKVARFLQQNGIKPKYHTEWLPEYIRRTLRNEAYIGTYIYNRCEFHGPEKPKSEWIVKENNHQAIIEKDQFVRCNEIMDKNASSRDVSEIRQTRHIHVFGGKVSCNMCGGNMNAAKDKQRENGLRPSVYRCGRRARQMDCDNKRMISDLSLGPFIFNYAANLARIQKDCKNIDSLEKLESALLAGPEFDNMRVSPESLEITFSMLRDKNIGKGAYMPDIGESGAQEGTSEDQLVILKRERDKQKNAISRLTELYIYDPDAITKEEYSEKKRDLTAKIRDIEKRISALNDSGGSGSADLSFIKKASAFLVAQHINSKNHIDYGQIAVDLDAGILKDFVDQIVNEIFIQDGRIVRIRFASGLEHKFLYDE

SEQ ID NO: 1790 - protein, 514 aa, unidentified
  source 1..514: note = uncultivated organism
MRAAIYIRVSTDEQAIRGYSAPEQEDAGRRRAREIAGSEPLEIEIFADLGVSGATLDRPELARLREWVRDGRIDIVVTRDPDRLSRRLAHQLLLTEEFEKAGVRLEFIDFTWQDTPEGRLFYSIRGAIAEYEREKIRERTVRGRLQKAKMGGFPVRVAPYGYDYDPETDEVKVNEAEAAVVRDIFNWFVSEDIGATGIANRLNDLGIPSKNGKKWHQNTVTRVLRSETYAGVWHYNKYDCGTGLKSGQPAAMRPREEWIPVPVPPIVDRRLWEKAQEKLAEARRLWAGRRCEKYLLSGLVSCAECGRPMHGEKINVWGRYVRMYTCRLRKNRQVRGCIPQKLVYADDLEAAVWEKAAAVLNDPEMLAGEILALQGNGDLEKETGRLEKSLQALEKGREAILDALAAGLVELDAKTRAKLADLKSRKERLLARKRELEAAARGAREAAARLEELRALAGEALGKLDELSHEEKRALVRELVGQVMVSGSGRDFFATVYLKAPAADLVIFPAGIRN

SEQ ID NO: 1791 - protein, 579 aa, unidentified
  source 1..579: note = uncultivated organism
MANQTSNDTNRGQMRLRCAIYTRKSSEEGLEQSFNSLDAQREACEAFIASQKHEGWNILPEMYDDGGFSGGTIERPAFQRLLVDVGEGKIDVVVVYKVDRLTRSLSDFAKIVEIFDKRSVSFVSVTQQFNTTTSMGRLTLNILLSFAQFEREVTGERIRDKIAASKKKGMWMGGPPSLGYDVKDRKLVINDTEAKTVQHIFRRYTELKSVRLLTADLDARCIVSKPRIASDGTRYGEKPLARGALYLMLQNRIYRGETVHKDKSYPGEHEAIVDEALWNEVQAILTENRVDRVLGTAKTQVSLLSGILFDAGGERMTPTHATKNNTRYRYYISRSLLAGLAKHSGQRIPASNLEALVIGRIYNWLSDRAAMLDIIQSHTSEAGSQKRLIVGLQQYVATWPELRANDIRKLMLSIVARIQIHSDRIAISLYPIRLLRWLDRTNGAAEPAVEAQSNTDDHFVTLTILVRLKRVGQEMKMLVENGSDSATPNTSLVRALVRAHVIQDRIRADKSLTLEEIAKLEDIVPSYATRLFRLALLAPDIISAILNGKHPPELTTRRLLDNTRLPLDWNEQRRNLGFV

SEQ ID NO: 1792 - protein, 563 aa, unidentified
  source 1..563: note = uncultivated organism
MQKKRVRILLRVSSNQQLEADGDLSVQRQLVTEYVESYSDWLLDSKEYFEGSNSGYKNAVADRDILQEIYKDAEAKEFDVLVAYKDDRLGRRMWEIGGYVMSLKSLGVDIYTVKDGCISPETDDIMGQMMLALRYGNAQKSSSDTGQRVKDTAQKLVQKGKFMGGSAPFGYTLEYSGEISKHGRALKHLVIVPEQAEVVKYIYHLSYDKEFGSAKIAKTLNEDEKYKDYAPNDVWKGGTITSILTNPIYAGHTAYKRREKKNGKTKRLDSDEWVLSTEPNENITIIDGATWNKVQEKRKMRGDKYIKKLENKDVTVIRRNEGVLALVDVLHCGYCGCKMVNGSKYNYWTIKATGEQRTKQIPIYKCQTAWQGVPHDKTKQHRADKIEPIVFEALAKYIERLQENENVFEQIQANQNIEKKALEKTVAKEKQELAKIQQKIDVMESNVPNAMLGEYPLSLEELVAIINKHKEQLKEQQEVIKQKEADLNSVAVNVADWQELRQQIPSWKDVFMNADTATKRVLVDKLIERIDITKDDIVIRFKINLNDFFQQPRISDGCGVHAY

SEQ ID NO: 1793 - protein, 537 aa, unidentified
  source 1..537: note = uncultivated organism
MRSANRKGRQESANANADTPARGRVIRCAVYTRKSTEEGLAQEFNSLDAQREAAEAYIASQKHEGWTLVPDAYNDGGFTGANMDRPALRRLLADIEADRIDCVLVYKVDRLSRSLLDFARIVEIFEKHRVSFVSVTQQLNSSSSMGRLTLNILLSFAQFEREMIAERTRDKMSAARRKGKWVGGIPVLGYDVDPRGGRLVVNPDEAGQVQAIFKVYAESRSLIPAVRELNRRGWTTKKWTTKDGREHTGQQFTKNGLYRLLTNVIYTGQVNHKGTIYPGEHAPIVDAATWERVQERLRGNGVDGGREVRNRYGALLRGLLHCDACQTAMVHTYTVKGTRRYRYYVCLTAQQKGWDACPTKSVAAQSIEDSVVARMRALGADPRIVLETARKVRERVEASSGELAVQLTVADKDLTRLQRELVKMAATPGNGLRTDRLADLQEQIRAGERRAGEVRAELDALAAETVDEDDLRTALQSFDPVWQSLNTAEQTRLIRAVIGRIGYDGRTGRIAVTFRAAGFKAICAAARQEAAGQEARA

SEQ ID NO: 1794 - protein, 505 aa, unidentified
  source 1..505: note = uncultivated organism
MRLCRTAVYGFLKLRYLTSPFERPAFRQMLADIKAGKTNCIIVKDLSRFGRNYIEVGRFIQKIFPYLGVRFIAVNDNYDSINADYAEDSIMLPFKNLMNDSYSRDLSVKVRSQFEIKRKKGEFIGSFAAYGYKKDSENKNHLEIDEYAASVVRDIFKWRILGMSNEKIADKLNEQGVLSPAEYKRSEGLKYRTGFQRETQSMWSPAAIGRILSNQTYLGRVVQGKRTTPNHKVKKIVEKSPENWIIVKDMHDPIITEDEYQTVQELMKMDTRISPGKSKVYLFAGLLECGGCKGSMVRKLVSSGKDPEGNVRKYPYYVCSNYKKDNHSCTSHMISERELEKAVLSALNNHICALINLKSVLTTMEGTSQIRQGEKKLDMRLLKLNEEIVKIRNLKVSLYEDLTEGVINKEEYFEFKEIYTGQIGELEKKKACLKEEQELYNIENIRKNEWMESFLQYKNLSSLSRGIVLKLVEKIRIFEKGRIKIRFRFQYDYEMALRAVDIPGL

SEQ ID NO: 1795 - protein, 508 aa, unidentified
  source 1..508: note = uncultivated organism
MTRQTAIYARQSVDKKESLSIEGQIELCQGVDKNAVIYRDKGYSGKNTERPELQRLLEDIVADKIEKVVVYKLDRISRNITDFYKLYEIMNEHKCEFVSVSEAFDTSNAMGRAMMGILAVFAQMERENIQKRVKDNYYYRTAQTGSWAGGPAPYGFKNGRNEQGKPTLIPIEKEIEAVMSAFALYYGVDTCTLGEVARWLNENGYKPHKRDVFDSVTVSKILQNPIYVIADKTLYAYFKTRKINFLNDEEQWDGTRSAHVIGKKVGNSNIRKYTTMKEQSIYLTNFEGFIQSVIYINVQKRLAMNEQFARANAGGILEELSGKLKCGCCGYAIKSYSKSTNGRPYLDCYGNRTLHICEAKYNKINFYDLQRIIGDEIQKQLDDMENLRHKKEVENAEIEKQISEIQADIDKLIELSLHSELTAEALASAIEKKQAELNQLELKYQMNKTAASMTTVYFSNNVNIADEFNHHIVYDDLRPDQKKEVVKLLIDKIILTSDINNFEIVWNI

SEQ ID NO: 1796 - protein, 512 aa, unidentified
  source 1..512: note = uncultivated organism
MQQISLISPATRQDVEKKRVAAYCRVSSNSADQLNSYANQINAYTKIIGSKPEWQMVEIFADEGISGMKANNRIEFQRMIRMCELHKIDLIITKSVSRFARNVPEALEYVRKLKLLGIGVQFDKEGINTLSLGDEMLLNTFSAIAQEESKSISQNQRLSIIKRMQDGEYFDSNAPYGFRYEDRNLIIYEPEAEIVKSIYTMYLRGCSTAEIARELNNRGIPSKMGGKWRSTKISFILRNEKYIGDSLYQKTYRDTTVPFKQFKNRGQEDRFYAKGTHAPLLDRETFEKVQTLLDSRTEAFAKSTVQNIYPLTSHIHCSECGSIFRRKIVGGTIKWVCAKHIEDTTACDSNYYSEERIYDGVVTVINKLRFGEEDILGQILTRLETVTTLYKRNNIAAQEISQSIAALNAKLLMLGQLRSKGYLAAEVYQSQAREINGQLNKLKTDRQDTFESEIMAMQESIKRLKMLLDEIEEPLEDFDEKLFGEVVSDIVINRNDEMTITMIGGLKFTEQI

SEQ ID NO: 1797 - protein, 584 aa, unidentified
  source 1..584: note = uncultivated organism
MTPETKQPDKKKLRACLYGRVSTDEQNREGHYGLQIQIERGIAFCESQEYTLEERHIYKDDISGGLPIEKRPELKRLFEAAQLKEFDVVVVYKTDRMARNLRILVNAIHELERLGIAFRSVTEPFDTSTSFGKTTFNLFGTFAELEKEMIKERTMGGKLRAAKAGKWATGIPPYGYRVDKKTRKLVLIPEETKVVQQIYKWLVDDKLSLHEIERRINKLKIPPPYSTKIKVRTTYNYWYARTIGRIATNQVYTGHFVYRKYRRPFGNLSSLIDESKHRPKEDWVEIETPPVISPEMFELAKKQLIKNRDLSKRNQKREYMYAKLIWCGKCSYKLFSGFQPPRKHWEGSGGRYYHGVYRKPDAVGTTQRCDWCPQYGETRLEPIWESLKDILKNPKNVYKPLERYIYKEQDPTTIHSRLEEIDKELMVIREKQKRVAELYIDNQIDKKQHESYSSEYKLEEQKLGDESTKLRQTLLTKKEKSDREVAIRNAYEQIKDRLDTVSYEEKTQIIRFFIERITLYAKDNYAEVVFRFPQTTETKSVKLVSQQPTDFFPLILNIKTMSENERRIQILKSNPLMYIPKTLV

SEQ ID NO: 1798 - protein, 503 aa, unidentified
  source 1..503: note = uncultivated organism
MRIAIYSRKSKETDTGDSIQNQIKMCKEYFNRQYDNCIFEVFEDEGFSGGNTNRPSFKRMMQLAKHKQFDIISCYKIDRISRNTLDFLTIFEELKEYDIQLVSVTEGFDPSTPSGKMMMSMISSMAEMERMNIAQRVKDNMLELGKMGRWSGGTCPTGYRSITINNGKKETYLELIQSETEKLQTIFKLVADGYSSRAVGKKFNVSNKTISNIIINPTYCPATEKAANYLKSIGYAVYGELNGLGFLSYNRRPKKNGKKTWKPEGLMFVATSKHETIITDDMWIKANEMMKSKGLEPRPRISKYSFLSQLVVCKCGSNMSLETKKRSNGSKILYFRCSGKKEGKVDCDAKWLRVEDVEKKTISALKKMSYDETVLLDYLNLNKKIDYDGEIKKIKKDINKKSNEINKLTERLILVEGPAINIITDKINKISNDMKKLNEELFNIERDKIMNSKEIDIKTIQKRLRAILINFNKLDITEQQLEIRQIIDYVKYDGVSGTRLKLK

SEQ ID NO: 1799 - protein, 512 aa, unidentified
  source 1..512: note = uncultivated organism
MREVIVINPNAKPLHDKIRTAAYCRVSSDSDEQLASFSSQVSEYTNRITKNPDWVMVDIYADEGISGTSAAKRPEFQRLMADCRKKKIDRILTKSISRFARNVKECIAYIRELQSLDVSIEFEKEGIDTAFLSGEMMVAVFGSLAQEESASISSNMRLSYKGRMERGEFITNFAPYGYRWNSKSLEIIEEEASIVRRIFDYYINGNSQSNIANLLNKECESGNKVWQERTVGYILHNEKYIGDALLQKQVTIDAYSHVSKNNHGEATQYYIRNSHPAIVSRNIYQKAQTLVNMRLNHVKGYNRINALRKNIICAECGAVFKQRKNKNGTYSWICYKHDGNRLKCPTPPVNETVIIEAFTKLAIMLGEYRDTILLPMHAQLKCLQSVMLTHEHSLSALSHEITFITDQLHMLSRLRSRDLIDDESYISQTNEMNRKLLALREQRQIAIQEQQEDDALEKTQKIIDILQDAPENLASLEDGGVFESIVDKVIIDKGKNITFRLINGLELGGFHG

SEQ ID NO: 1800 - protein, 511 aa, unidentified
  source 1..511: note = uncultivated organism
MASSSPKTLRCAIYTRKSTEHGLELEFNSLDAQREACEAYIKSQASLGWKAITQPYDDPAFSGGNLERPALQRLLKDIDAGKVDVVIVYKIDRLTRSLADFAKLVEAFDARSISFVAVTQQFNTTTSMGRLTLNVLLSFAQFERELSSERVRDKVAASRRKGKWTGGTVPLGYEARDKKLVINPTEAETVRTIFRRYTELQSFGRLVADLDKCGIVTKRRNTKVKKFNGGIPFTYGPLAHFLKNRIYIGETSHGGKWYPGEHKAILDRKTFDKVQKLLGANKTKRKVKRSESGALLMGKLFDDRGNAMSPSFSTKNGARYRFYVSSAILRGRKTEAGSVARVSAANIERALINALRQRLRIDEAVLDADIIGTYVERADLSNRAVKISTTPAAKIRSNQFTIPWQPRQAGSASFVAATSERQPDAKLVQAVVRAHAWLRVLQNNKFDTVEALAASVNLHPKLVRQELRYAFLAPTITAAIFNGDQPSNLSLARIPKTLPLAWFEQCQALGF

SEQ ID NO: 1801 - protein, 514 aa, unidentified
  source 1..514: note = uncultivated organism
MTVPRPLRCAIYTRKSSEEGLEQSFNSLQAQREACEAYIKSQAHEGWRPLKTAYDDGGFSGGTMERPGLKQLLADIEQRRIDVVVVYKVDRLTRSLMDFAKIVEVLDRHGVSFVSVTQHFNTTSSMGRLTLNVLLSFAQFEREVTGERIRDKFLASRRKGLWMGGQPPLGYDIKARRLVVNETEAGQVRLIFERYVQLGAVAALKADLEQQGIRSKRWQTQRGVWRGGAVFSRGALYTLLQNRVYLGDAVHKGVAYPGEHSPIVSADLWDTVNARLTANRHDRSATARTESRYPLVGLLYDDCGHPMTPTHSKKADGRRYGYYVSHALLQSRPEDAGSVPRVAAPAIEGLVNAQLALIASGSAAKRTAAASPSRERTLSALRRVEIHTTEVRLTLDDRTVSVPIRMRRHGRLTAANVGPGDQPEPNRPLLKAVARAWRWREALVQGRVKTLGELAATEGHTERYVRCTIQLAFLAPDLLAAIVAGRQPRWLELKSLRDGIIPLSWAAQRERVRL

SEQ ID NO: 1802 - protein, 589 aa, unidentified
  source 1..589: note = uncultivated organism
MAPAESGVPRTVRCAAYTRKSTEEGLSQEFNSLDAQRECAEAYIFSQRQEGWTVLPQHYDDGGCSGANLDRPALQRLLAGIQAGQIDCVVIYKVDRLSRSLFDFARLMQVFEKHGVSFVSVTQQLNSNTPMGRLTLNVLLSFAQFEREIISERTRDKQSAARRKGKWTGGYPVLGYDPEPSRGCLMVNAREAAQVREIFGLFLRYRSQDSTLAEIQQRGWRMKSWTTRKGQAHVGQPFDRAALVRLLTNVQYCGEVRHNGKVYAGQQAAILDRAVWQQAQDLLRQRQCQEPVPKRAGALLQDLLECGVCGGRMVPGYSTKRNRRYAYYVCRRAQQQGAAACPGQSIPAARIEGSLLAGLQAMAAAAEWQPLREALQGWSALDGAERRRRLARVVERIDYDGRRGGTASVRWRAPLGDGEPSLMPMRTHAATQVAPPPLPEESRAGSRLPRITRLLALAVRFEGLLREGLVRDYAELARLGGVSRARMTQIMSLRNLAPVIQERILELPAVSAAADSVNEHTLREVAQRWDWREQMRMWEQLEGALGKSAEGRRGGEWASESGRLMAAGRKGVPAGASRLGIHRRFSWPS

SEQ ID NO: 1803 - protein, 503 aa, unidentified
  source 1..503: note = uncultivated organism
MKYAVIYARYSCERQTEQSIEGQLRICNEFAEKNDLRIVDTYIDRAMTGTNDHRPEFQRMLSDSDKPQIWDIVLVYALDRFGRNSIEVAVNKQRLKKNNKILISATQRTSMNIDGSKNLDGIILENVMIGLAEYYSAELSQKIRRGLHENRTKGLYSGGFIPFGYTVKDRKVYVDEDKAEIVRFIFKQYAAGFTVKNIVYDLNEKGLTKNGKPFALTTVYGILRLEKYIGICRYSDGIYTNIYPQIVPSELFNEVQMILANNKKGSASTKTDYLLKGKLICGLCGSNMQGECGTARSGEIKYYYKCGKRKKFNTCKKAALPKEQLENLVIKIIHQVLDKPENIHYLASEIIKANKNHLSQQSVLNTLIHERDDSQKALSNIIKAIEQGLINDTMKKRMNELEEQIKILEDKITVEEYKKQKELSYENVVAYLQKAILLKPKPLIFTLIQKIVVYDDRLEIFFNYTKEKNPDDTSRQDYFCNSGSICYGMVEHGIANSIGRRKE

SEQ ID NO: 1804 - protein, 526 aa, unidentified
  source 1..526: note = uncultivated organism
MRAAIYTRISLDPDHDSWSPDRQEALCRQRAVGLGHEVVAVYTDRGASAWKPRVKRPGWEALKESVCRGEVEVVIAYSLTRLERRVRDLLDLSDFLTAHRCGLVVADMNLDTTTAGGKLIYTMIAAMAQMESEQISQRVKSAQKVKADRGRMHTGGNRQFGYGVEPTADTKEARQLARETINEEEAKELRDLADRVLSGISLRKCAAEWNAKGLRTTAGSEWTGRTIAQALKSPRIAGLRTHKGTMLPGNWEPILSEEVWLQIRGVIDARPGTGGGINTRRHLLSGIARCGRCESNMVAHFSNGRGRGTMDRYTCPKNPGRPGCGRLAASKSSVERFVINQFFDFMSNAELQPVDGDERSLAEVRADITKLESALTDLARARFVDNSLSDEQFGTVNREQSARLEALRRVERATADRLALQRTVLRPGVREDIVAWWEAASLRDQRVALQRAISHVVINPARVRGGNIFDTSRVNINWRWDVYVRASDAAWERMTDGEREQAEVEAQQEIEAVLELERAGSSSYSA

SEQ ID NO: 1805 - protein, 681 aa, unidentified
  source 1..681: note = uncultivated organism
MNSETSKDKHLRAVLYERLSREDGDKLTKEEKSESIKNQDLMLHNYAKDHGYEVVGVYNDEDWSGADSSRPQFNEMIKACEAGKVDIVIAKTQSRFARDMELIEKYLHNKFLEWNVQFKSVVDHIDNTRRETKKTSQILGLTDEWYLEDTSINIKETLRTKRASGEFTGSFAPYGYNRDPENKNHLIIDPIASEIVKKIFENYINGMGLRTIARDLNDNSVASPYEYKVSKGSNLKLAYLDNYLIYDHIEKAGFYKIDINYINESKEILHNLIFYNIFSKDKKTFDSKCKLYLKNYSENKMKIYYTTDNNIDYNNFDVKKWTLLKKNDIIPFDTTCIASVVEVLDRKHIINYQFDVLLENNIEHEKYYFDVVQITNDEKKIIDYEKNIRKKCKWCDQMIKKILTDEVYIGNLVQSKTTNVSYKNKKKIKKDKEDWIRVENTHESIISPENWLKVQERLKHRVRANKNGYYNPFVHKLYCKCCGKVYTRTGDCNHVYFRCKDQNEKYKSCDNRNSISKDELNNFALNKINELLNRFYNEEQLKEFKEKDTDNDLFKSRINSLNKELIDVNKELQNKKTYFQHLYEDKINGLLDTEEYMILKSKYKDDSEKLENRVIKIKEELNLINEKKNVLKNKKTVYSKYKHIDCIDIDIVSDFIDRVYIGKYDKKTKTRDMKIVWNFES

SEQ ID NO: 1806 - protein, 528 aa, unidentified
  source 1..528: note = uncultivated organism
MLRCAIYTRKSSEEGLEQGFNSLHAQRDACEAYVLSQVGEGWTALATQYDDGGFSGGSMERPGLQQLLADIKRRSIDIVVVYKVDRLTRSLADFARIVELFDAHGVSFVSVTQAFNTTTSMGRLTLNVLLSFAQFEREVTGERIRDKIAASKAKGLWMGGRPPLGYDGVGRKLVVNSAEAVTVVSIFRRYLELGSVRLLKAELDQRNVRTKSWTTKEGRPIGDEPFSRGTLYHTLSNPVYIGAIRHGCRLYDNAHPAILDAALWQAVQVKLAENGQLMPGTPRLKARALLEGLLIDDRGNRMWVSHTLKSGRRYRYYTSAALDPGKPGTPGSVPRIALGVIDQFVAAKVAPLLSRGWHADHIEDERVRSALVRVELGEDRVAIRMRTEALALDPNPSLGDLTRQGEHVELAVAVRLKHRKGSTVIQTPNEPGAAPQIDKALIRAVCLTRHWADLLARGEAMTVTEIAGRFGYWDHYVASMLPLAWLAPDLVEAIIGGRQPLGVTLSRLKHTLPMDWVEQRRLFADLRS

SEQ ID NO: 1807 - protein, 528 aa, unidentified
  source 1..528: note = uncultivated organism
MQTAPRTITAILPNREPSADSAPRVRYAPYCRVSSDSSDQELSFAAQVKYYTEMVGKMENAELVDVYADEAISGRGTKKREDFNRLIADCKKGRIDRVITKSVSRFARNTVDCLETVRLLARYGVSVLFEKEGIDTADMPSEVLLAMSGTQAQDESISHGNNMRWSYETRMKKGEFLGCCPAYGYALISSSEHVIHPEEAKVVNQIKDMYLQGSGKQKIADYLNQNGVTNRGRKWTAFAIDYILNNERYVGDALLQKHITTNEWPPRKILNDGSRPQYYVENALPAIWTREEREAILALEASRRNTDTTGGGHALSRMLVCGECGHTFRRIKRKSGIVWGCAYSTSGRSECSGVTLPEADVCAAFLRCVNTLYCHREEILLPLITRMETLQSKRNGTQVKIWEIDQQIASLSKQSLVIADLLASGILETADFAAQSNALGDKINALRSQRRTLLKQNENDDLLAELHELKDTLDDMDGEITVYDEDLIRSVIQYATVLSDTELRIHIKGGLEVTEQLPQYYTRRCRRK

SEQ ID NO: 1808 - protein, 568 aa, unidentified
  source 1..568: note = uncultivated organism
MPKAIKKAAIYCRVSTLHQIDKDSLPLQRNDMINYAKYALNIENYEVFEDAGYSGKNMDRPSFQEMMGRVHEGEFTHILVWKIDRISRNLLDFANMYEECKKIGVTFISKNEQFDTSTAMGEAMLKIILVFAELERNMTSERVSATMNARAADGKWNGGRVPYGYSYDKKTDTFSFCEAEKQIALLLKDIYLSEHSLVKTAAALNEAGHRTRRGYQWTPTTVAIILRSPFYRGTMRYNYRDESEKSFSFKKKDEWILIHKHHHHLFSSEDCQKIDFWLDKNHRSRGKSSHTQRKNVHVFAGLIHCGGCGGLMIATVSRTRPDGYRPSMYLCGERRLNHKCTNKYITDLTAGGFIFNYVSNMIQLRRSFHPAMQNRDMERILLQGDALKNIQSISPATLTDLRHTLTESAIDTVDYTPSLKRPEGKLGGVQAKRYTQLQSEITKRQRALERLEALYLYAEDSMPQKDYLIKRRTLAAELEKFTRESDRLQKDSIFMTSIADEKFLEKAAHLIFNESMNNGSVNFQDLATHSGNTVLKDFVNSIIKNIIVLNGNVTQIEFVNGAIHTFHY

SEQ ID NO: 1809 - protein, 597 aa, unidentified
  source 1..597: note = uncultivated organism
MSESSSSGSMVGQSTGRPGRVAAVYARVSSDRQRREQTIASQTAALRELAAGRGLLVSEDLVFEDEGVSGAVLRRPALERLRDLAVEGRFEVLLCHAPDRLARRYAYQVLLLEEFARAGIEVIFAKEPERSPTPEDELLRQFQGMIAEYERAQIAERCRRGKLHRARGGAVSVLARAPYGYRYIKKSEHADACYEIDESEAPVLREIFRRYAEDGESIGRITRWLSEQGVTTRTGKTGWNTATIWGMLRNPAYAGQAAYGKTHTTGAPVRETRHARQRGQRSTRVSRERVSATEWKQIVVPALVTEEQFALVQQQLKRNGRLSPRNTRRPSLLQGILVCRECGYAYYRCSTRSKNGILREYYRCSGTDGHRRPEGRVCENRPVRLAEIDELVWTRVLGLLNDPTLIKAEIDRRHATLRDAHPATTRRDAIERDLTRAQNALRRLIDGYQEQLLTLEELRARTPELRKRETTLQAQLDALNAELHDAETYLKLTETLEAFRARLSTNAENLTIQQRQQIIRLIVREVVIGEDDVTIRHSIPTPTRDQPPGYLLRLGSREDPDPSARPHPGDPPDQARQGRADDPRLQAQRHDQPLRGP

SEQ ID NO: 1810 - protein, 548 aa, unidentified
  source 1..548: note = uncultivated organism
MAEKKIWNVASYARLSREDGDKAESNSITSQREMILDYIQRHDDMVIFHEYVDDGYSGVNFDRPRFKEMMEDIKAKKVNCIICKDLSRFARNYIDSGRYLEKIFPFMGVRFIAINDNYDSCGEKAQSDSLIVPFKNLINDAYCRDISVKIRSQLDIKRKMGDFIGAFAAYGYKKAPDNKNRLVIDEEAARNVELIFRLRLQGMSNSRIADRLNEMGILSPMEYKQQNGEKYRTAFRTKERSLWNAVSVMRILTNDLYIGVLSQHKRGTPNHKIKKEVDYERDDWIIVEDSHEPIIDVIDYQTVQSLLQRDVRVAPGSDNVPLFSGFVFCGDCQHTMVRKTVPRGEKKYFYYVCSTNKSGLGCSSHSFSEDKLTKIVFRLIRDHIEQICEVDRILDYIASLPEQQRRIFNYDAQLERLDEEIKRFQDLKLNLYGDMADGVISREEYMEFRAGYDRKIAERQRSISNLKEEREQAVESDDRNLMWMQTFKQYRNITELQRSVIVNLIERIVVYDTKHIEVVFRYQDQFNSALQFIERYADELPEDENKGA

SEQ ID NO: 1811 - protein, 542 aa, unidentified
  source 1..542: note = uncultivated organism
MSRMVPPPRIVRCAIYTRKSSEEGLDQAFNSLHAQREACEAYVKSQVAEGWRALPTLYDDGGFSGGNLERPALRSLLDDVAAGRIDTVVVYKIDRLTRALADFAKIVEIFDAQTVSFVSVTQAFNTTTSMGRLTLNVLLSFAQFEREVTGERIRDKIAASKKKGMWMGGRPPLGYDPPVDPATRALVVNRSEAEQVRLIYETYLKLRSVRALEAFLDAEGIRSKVWTSKAGRSIGGCRINRGALFHLLKSRLYLGEIPHGDQSYPGAHPPIIDPVLFDQVQALLAEQRRARHERPTRVSTAPLRGLLFDADGAPMSPTFGYGRAGRVYRYYVSAPLQQGRSAADTPNAIRRVAAGAIETLVRDQLSSLVRAAGDAQLADLARAVRRIHIEAASVRITLQRSALNRSALDVLTPHPSDDTLGMLTLPIRCKLRGGRSWITPPPGAASATQTRRDPALIRALRLAHRLTAAMSWRSADGVLETLGTKAPTSPYHRRLCRLVFLAPDLQRAILDGRQPPALNVERLIHEPIPLAWPDQRRLYGEL

SEQ ID NO: 1812 - protein, 558 aa, unidentified
  source 1..558: note = uncultivated organism
MSRNQQGTMNQIRNMLSDDSTETYLTGMYVRLSVEDGGLSKESESLIHQEQFLMDFIEKRPELILTKIYRDNGETGTNFERPGFAAMMDDVRKGLIKCIVVKDLSRFGRDYIQTGEYIEKIFPFLGIRFISVLEDFDSVKPDAKDMLMVNLKNLMNEAYAKDKSMRICSAFDAKRANGEFNVKYAPYGYLLSGDKKQPYEIDPETAPIVREIYQLREQGVSMITIARKLDEKQYLTPIQYALKKGIRQKAKGDNHWTALTIDRILKNPAYLGHMHLRKTETRMYQGMKRRKVEESEQFIVENVNEPIITQEQFDAVQEKKRTYERSGKKKSDKDENIFRGTLFCAECGRPLYRSRSHSTKNKVFHYFSCPTYRDHLDKYCPHKSGMREDALRAVLLDFIKGQAKLAGEIELRANAIASVAKSPSKSRILADLKGAIAHQESLAREAFENYVLGEQSEKDYLNIKSQCDREIARLNERLANAEKNVGKDIAEKVKASSAVQRLKPLTRARAVTREMYEALIERIDIDKDHNLTITVKYRDEFDELVKKIKEMEAGRNAE

SEQ ID NO: 1813 - protein, 536 aa, unidentified
  source 1..536: note = uncultivated organism
MSAPTPRDRRKFKKQASDRPPVVPFTPDNDAALCYIRQSHFSDESISSEVQTQDTHRWANAYDVPIVATVEDLHVSGDLEPYKRDGLKVWLSDASPTPWKTLVVSKLDRLVRNVMDALALLEWLRARGKRLICIAEGIDSSNSMSEFMITLIAAFARMERERMKERFRASKAALKEAGRWAGEGHMYGTMPVELPGGGWILGLDPYAVKILHKLSKMAREGKSLTQMCGWLTENKIATPRDRQLQLGAERRGEDPATVALKGRPWRSSSLRRLLEDPDLVEFGIFEPAEQAEISARLEEKARRKTRGSNQPYPFSGVLVCAECLEPLWHQLSTNKRAHMDGTKIEYEHHYWYCPTRRHGPFMRAEEIEPLAEQAFYNIFAMVPVRERIVLPPTNHANEIAKLEREYGKLMSGVARAKSPEDRRQIMDDGAKILADIDTLRALPADPGGVQWVPTNRTWQQELAGMSPEDRRLRWLELGFAFAAQKRPDGTWSARWRLPDGWQEAMPEIAEWYDQIADTGETVEITDLIDRMRGAGG

SEQ ID NO: 1814 - protein, 531 aa, unidentified
  source 1..531: note = uncultivated organism
MTIRCAIYTRKSTEHGLEQEFNSLQNQEESCKAYIASQSFNGWQYYKTYIDAAISGGTMERPALKQMLDDMAHGLINTVVVYKVDRLSRSILDFHNMMKYFEKYGANFVSITQSFDTSTSMGKLTLNMLLSFAQFEREVSSERVRDKIRASKAKGLWMGGAPRLGYDLINKKLVVNPTEAEQVRHLFEKYLELQSVNDLTEYAKQKGIFGKRWETAKRQIRGGNPIAKMSMHRILRDKIYIGQIENKKEGTFAKGEHEPIISTELFNRVKIALANNANNKSPSTHAPNILTGKLFNHKGVKFINQRTSGKGKKTAYYYATKGFYLTAGRVDEIVIKTITDFLNSDMSNLPINLAAILKRIDITNMNFAEKRSLIQSLVEKVVYSQEQLIYTITTDSAKLQQFVSENYMNQRTDKMGYIIGDNNITITEKVFLRKYVNTVYDRGKNGVLSITDNNHLILKAFATAWKYRELYERDGGVDNIIRNLHTSPRQFYRYLNIAYMNPNTINQILSGKLKINVNDLFQIDRNNQLII

SEQ ID NO: 1815 - protein, 554 aa, unidentified
  source 1..554: note = uncultivated organism
MKYAIYVRVSTEEQAQHGFSIEAQKEKASAFVMSQDGEIYKIYVDDGYSGKNLKRPALQNLIKDAENKKFDIVLIYKLDRLSRRLSDLVSLGEKFEKLGIGIKSVTEPFDTTTPAGKLMFNMLGSFAQFERELISERTKLGIMRRIKNGYWSTTPPFGYNLKDGKLVINEEEAEIVRKCYSLFLEHNLGVELIARTLNKEDLVSRRKGKWSRNSVWTMLTNPVYAGYIRWDGEVIKGQHKAIISKTLFDTVQKRLKEKDRYTSWVGISPNLFIGLIFCKKCGAQFISSKPGNGTKKGAYRYYACKGRKRGKCIQDYIRADVLEEVIFNKLKEIANNKAVINDYLKKMAEENDIHLQRLRKEKLRISQRLTKLTQTKDKKIKWMFSHLPNKKVATEMSNEVDRLLEEIDALKERLAEIEIKIQHINLDDANTQIIANFLQNFVEVFSKLELGERKLLIQAIVKRIEVYNKNKITLKLTLPVFSEKDNPQNFTSETTLNSGGMKNERRALTSVAPSFASLSRLAARPGFEPGMLGPEPSVLPITPPGKSLREFYHH

SEQ ID NO: 1816 - protein, 524 aa, unidentified
  source 1..524: note = uncultivated organism
MARRNLSVIQPQAAPAVRCAIYTRKSTSEGLEMDFNTLDAQREACEAYIKSQVSERWTALPDQYDDGGFTGGNMERPAFQQMMTDIKEGKIDCVVVYKVDRLSRSLMDFARIMEVFEKHNVSFVSITQQFNTSTSMGRLVLNVLLSFAQFEREIISERTRDKIAAARKKGKWAGGFPLLGYDIDPTLRRLNTNEPEAIQVREIFEMYLSNRSVTSTVTRLNELGWTTKSWITKKGKPLGGKPFDKPRLYGLLTNVAYIGKVPHKDKVYDGEHDAIIDIDTWERTQMLMKTNGKTGGVHVKNKYGALLKGLVYCASCGCAMVHSFTLKGDRAYRYYICLNAQKRGWKACKTKSVSAGDIEQFVVDRIRNIGKNTSLLEETVKNVLSQRRSKKPMLIAERDRLMKDIERLKAEGKRLVDVLSLSNAATSPIITEQINRIEETINERNRLLIEVKERLIKLELEIVESSDIRKALTAFDPIWDVLYVREKIRIIQMLVQKVTYDGAEGNVSITFHPSGIKQLAKEVE

SEQ ID NO: 1817 - protein, 524 aa, unidentified
  source 1..524: note = uncultivated organism
MQTQKIHYIPSIVQENSQLRVAAYARVSSSSDDQLESYAAQIEHYEQLFRDDQLSVLIDLYADEGITGTRADKRPDFQRMMQDCRDGKIDKIITKSISRFARNTSDCLKYIRELKALGIEVFFEQQKLDTSIIGGEMMLAILGAGAQEESVSISSNMRWSYQHRMKRGEFITQSAPYGYSLAGTQIVVAPPTAAIVQYIFSQYLSGVGMDTIANDLNSMKLPTPHKSKMWYAATIHFILKNEKYIGDSELQKTYTTDSFPFVKKQNRGELPKYYVENSHEPIISKEAAEKVQLLLEFRHTGKETTWNRYPFSLMIYCPECGASFRRRVTRGKVYWGCRSHDKNREICSVGRTPEVMLEQAFVHMHRKLRAHIYELLIPMLEQLATLRERALYRQERIAEIDISITSTRRQTMLLTRLFGEGHMDAAYFHTQNQQLGQIINSLRRERRHLTETADDGGIRQTEALIDILRRSPKHLDSFDAELFASIVKRMTIDNCGKIHFQLINGLEVTEWPSEKDGCHSAIAS

SEQ ID NO: 1818 - protein, 513 aa, unidentified
  source 1..513: note = uncultivated organism
MAEITIIPAKNRSDEIVRTAAYARVSSDSEDQLNSFAAQIRYYTEMLQNSTDAVFVDMYADEGISGTGTEKRTEFQRLMSDCRKGKIDRILAKSISRFARNTRDSLEAVRELKTLGISVYFEKENIDTGEISSEMLLAVYSQFAQEESMSISRNCRLGIKKRMMDGTYKNSSVSYGYEYSNGKVTVNNKQAETIRRIFREYLNGRGVYEISAMLNAEGIEKPPTAKEWYPQFISSIIANERYIGDSLLQKKYMTNTLPFQKKINHGEKAQYYVSNTHQPIIDKETFEAAQELRKAKSRIYHRSPTNIHYPLSRMIKCCCGSSFRRKQSGHGISWTCLRHDRNTAEKCEMKPIREQKIYDAFIRLFNKLRINYKSILVPMLRQLEMLSEIEKSGNTQLAGLRKEISDIKQQTYLLTVLNSQGTLDAAYFKERTQELYRKLLIAQKQLHACLDDRYSERLDEMQKLIGILERAKPIADFDEIKFGQIVEKITVLSEKEIRFDLIGGIGFTEQIGG

SEQ ID NO: 1819 - protein, 516 aa, unidentified
  source 1..516: note = uncultivated organism
MDYRVALYIRLSKEDEKPGESESITNQRSILTRFAESQRLYIVDEYVDDGISGTTFNRPDFQRMLNDIETKKINMVITKDLSRLGRDYIQTGFYIEKYFPENRVRYISILDNVDTGIDSSSNDITPFKSILNDMYAKDISAKIKSVKHNKQDLGLFIGGKAPFGYKCSEETTNKIVIDEDARPVVERLFREAKAGKSCRAIAQDLILDGVPTPSQYAISKGHKVAKVSNLWSDPRVREILLNEVYIGNMVQGRTKKINYKSKKYIKLPKEQWKVVENTHEHIIDKETFYKVQDMILTRKQTRVKTHDYLLKGFVHCHECGKKVGCSPRELAQGKVYYFRCATYIAYARLGLCTSHNIRMDTVEKAVNNKVMSILAKFSDKDNLIKVTKQKIEEKKHSISFENEIENYKTKLNKISLEVDNIYNDKLNGILSEDDFIRIYERKKEEKENLQKKITEMTTHIDNSIVNETELAEKIAMKFVGLKQVNRELLSALVEKIEIDKKKNIYVYFKFKSLENV

SEQ ID NO: 1820 - protein, 602 aa, unidentified
  source 1..602: note = uncultivated organism
MNIETIAPLKRCAIYTRKSTNQRLEHDVNSLVTQREISSAYITSQQYKGWVELPNRYDDGGHSGSGMDRPALSQLMQDIEAGEIDVVVVYKIDRLTRSLADFVRMIEIFDRRNIALVSISQAFDTSDSMGRMILNVLLTFSQFERELIAERVRDSIRTRKRHGKMHGGLPPFGYIATPDGLKIDEPEAEIVRFIFDEFLRTRRYTKVMTAVRERGYCSSVKYSPRGKPRGGSPINPSTVYAIVQNPMYVGEIRGHDTTYPGEHEPLISREIWDEAQIICRQRKKRRPNNRDTDHFLAGLLWDDLGRHMRLDLKWHWGKFYKTYVSSNAIWSQKLFLRQYRASADRLDEVVLAAVAAFLRDRIKLRKALKGLGLFGENLETLAAKGAAASDRLMATPKPHLHELFKAIAHRVELGEDQVSIEFRMLEVRRYLEWKSEMSFRGRPSNWSCSDARYEHIVAVRAVTAERWPSLHINPRKAACKGKPNKKLVDLVRSARKAQQLVEENRELDLDSLAKMHGCRTAQFARLIRLNYLAPDIVTAVFDGTQPPGLNRKVLLNSNVPTDWAVQRKLYGFPAPERSIDPRNLYGRGMWPAAHQTNSDVDT

SEQ ID NO: 1821 - protein, 524 aa, unidentified
  source 1..524: note = uncultivated organism
MKKAQPRATLPVVRCAVYTRKSTDEGLEQEFNSLDAQREAGDAFVRSQAGEGWTLLPDRYDDGGFTGGNMERPALQRLLADIEAGRIDCVVVYKVDRLSRSLLDFARMMETFEKYHVSFVSVTQQFNTATSMGRLVLNVLLSFAQFEREIISERTRDKIAATRRKGKWAGGHPLLGYDVDPRGFRLVVNEAEAERVRAIFALYLEHESLLPVVQELERRGWRNKRWQTRKGRERGGKPFTRTNLHRLLTNVAYVGKIRYKHEVHNGEHPAIVDPAVFARVQALLHRNGRTRGAPVRNKFGALLKGLLRCVPCGCAMTPTHTTKDGNKRYRYYVCSSAQKRGWNTCPSKSIPAAQIEQLVVEQIRCIGKDPDLLQATITQARAQDEARLAELEAERRGLDRELARWHAELQKIPPNPVDDPTIARLADLQERIRLAEDRTGRVREEAAAIRRRRIDDDEVALALSVFDPVWESLTPAEQARVVQLLVERVDYDGARGKVSITFQPAGIKTLADELADQGGREKIA

SEQ ID NO: 1822 - protein, 601 aa, unidentified
  source 1..601: note = uncultivated organism
MVSGKLSSTNINSTSSKTAAIYCRVSTEEQASKDENSLEVQEATLKKYCADQGLLVIDDYIYVDRGISGKSLNRPEIQRLREDASQGKFHCVVATKLDRLSRSVKDFLDFDYELQKLNIDIKIQSQNFDTTTPSGRMLRMMLIAFAEFERDMISERTSESAKYLAQQGYPRSGVQLGYDKVNKLWVVNEEEAKLVNKIFALYLEYPSASKVATMLNEQGYRTKQHISKDGKTIGGNKFTTNNIKQIISNPEYLGKVKHNDVLYDGKHDAIVDETLFNNVQEQLKNSRGTDRFKTKQRAIPLTLNDVLYCGFCGTHMTPSYGMKNGEKYYYYRCTKKGHDTAQACPGKNLGAPQLENLVDSVFEALITDTKAIDKIFDSLKNSSGPKIKDLELEHTNLLATLAREKSKLKNLTDALAYRGVKDSPQAIIDDIGALETAIRALEEKSKSLENKKLRIKRANYDKDTFDRAIKNYVTVIKNQPPEMRRKLYQMFFHSITSYVDAKTKNGEIVIKVNADGEQIRTWAEIIKNFDPPVDGGSNVSITINAKNGVKTKKMNTHLAMCTGSNLQLDVYPRQESNLCAWLRRPLLYPLSYGGIFLSLKN

SEQ ID NO: 1823 - protein, 556 aa, unidentified
  source 1..556: note = uncultivated organism
MRKSSTVTSYNFDKETGWRIGLPFEIQSGTRALCLYRVSSTKQLYHDANNDADIPMQRLRCREFAEQQGWTIVCELQEEGISGHKVRAENRDKIQLIKEYATAQQFDILLVFMFDRIGRIADETPFVVEWLINHGIRVWASEEGEQRIETHTDRLMNYIRYWQADGESQKTSMRTANSLHILTEQGHFTGGVCPYGYMLVCSGRMNKRKHEVHDLAICDSEAEVIRIVFQLAYEKGYGAQRIANHLNSHGYKNRSGVNWHPATLQSILRNPLYTGILRSGDTLSPVQDQLRIIDDETFRGVQDILAIRSRKNQAIRSAPLNTRGHSLLAGNIFCGHCGARLCITTSGKGRKRADGTDVMRTRYCCQTKTRKHDNCGGQTGYTVSKVDQIIEAMILDIFRKVQSINREEILQAQTKTDMAIRQNHVNTLRRDHKKALGDLQKLQAEIVKSLTGESVFNPEMLKTAIDAQQAKCDSLADALRIAEADLTSSEESYRALSEKFNDILEWSDVYQNADMATKKMVVSHLIDRVDMFRDYEIKITLNISVEQFLNTIEVCA

SEQ ID NO: 1824 - protein, 506 aa, unidentified
  source 1..506: note = uncultivated organism
MASTNNGTPKPVRCAIYTRKSTEEGLNQDFNSLDAQRDAAEAYIRSQAGEGWICAPTQYDDGGYTGANMERPAMRRLLADSQAGKIDCVVVYKVDRLSRSIRDFAKIMEIFEKHGTTFVSVTQQFNTTTSLGRLTLNILLSFAQFEREIISERTRDKQSAAKKRGKWTGGHLILGYDLDSRSSRLVINGEEAEQVRSMFQWYLAGESVFSITAKASQSGWRNKQWTTQDGKLYGGQPIRRAHVYNLLANTLYTGRMLVDGEFYPGEHEAVIDQQTFDLVQARLKQNSTNGDHRHRTRMESLLRGLIYCAGCGSAMYQTYSSSKERRYRYYVCSRAQQQTENYCVTRSVSAPAVEDAVFESIRRVSVHPRVLEETARVIRHRLTEEIARLREEMNGVHLRVKNLKSQVVRLRTPDASREAELKEQIGAGEARVTELKREILVRERGRVDGEELRKTMEPFEALWKTMNVQEQGLLLRQLVEKVGYDGRTGKVTVSFKSASVKELCQE

SEQ ID NO: 1825 - protein, 516 aa, unidentified
  source 1..516: note = uncultivated organism
MKPPVRYCAAYTRKSTEEGLEQEFNTLDAQREACLAYIASQKIEGWVALPDQYDDGGFSGGNIDRPALQRLLADIKAGKVHTVVVYKIDRLTRSLMDFAKLVEIFDQYGVTFVSVTQAFSTTTSMGRLTLNVLLSFAQFEREVIGERVRDKIAASKQKGMWMGGNNPVGYQRVNKQLVPYEPERDTVRMIFESYLETGCLNLLHNQLLAAGVQSREWVSSKGVQHGSKPFSQGALHHILTNPVYIGKIRHKTKVYDGLHEPLISQELWDKVQAALQEQAPRRRGLKMAKDNNLLQGLLFDENGVIYSPSFSMKGPDKRRYRYYISRNERTKKPMLEGVPSRLPAQETEELVERTIREHLSDIHKCAELLDADIIENHQALAQITQKQGCLKTEAITICLKRIIVEPEKLVITVQSRELCKLIDENLAVKVTSSPTESAQLIAPIKTLKSRRGTRVVEPQASKTDIFDLAPAELKKLAQGFIWMSEHFSGKTIEEIALSANVSPSYAGKAIFGSLKE

SEQ ID NO: 1826 - protein, 524 aa, unidentified
  source 1..524: note = uncultivated organism
MDVANNVTVIPASKTVGTRTEGTGVHKTRVAAYCRVSTDYEEQESSYETQVKHYTDYIKANPAWELAGIFADDGISGTSTAKRTAFNNMIEDCKAGKIDMIITKSISRFSRNTVDCLKYTRELKNLNIAVYFEKENINTLDAKGEVLLTIMASLAQQESESLSANVRMGIQFRNQQGQVRVNYTRFLGYDKGPDGKLVINEEQARTVRRIFRDYLDGNSFGKIAEGLARDGIKNGAGSTKWWPTNVKQILKNEKYIGDALLQKTVTVSVLDKTRKINDGSAPQYYVKNSQPPIIDRDTYMRVQAEMERRANMSSNGRKRCFSSKYALSGIVFCGLCGDIYRRVKWYRHNGNISIVWRCVTRLSMKQTGRKCQARTISEEDLHAAIVTAVNDAWADRNSVIPQLQDNVRSALEEESGPGLEEIDTELKKQQEKLLAAGSDEEKIEKIGSKIRKLQSQRMSVLMDRSKDTETKERTDDLARFLGNRTEAVSEYSDLLVTRLVGRVIICQEKIIVEFKSGLKVEVEA

SEQ ID NO: 1827 - protein, 660 aa, unidentified
  source 1..660: note = uncultivated organism
MKKVAIYSRVSSEEQLKNFSLDDQEDRCEKFIHSQGWKLFKIYREEGISGFMKERPQIIKLLTDASNGFYDILVFYRIDRLSRNQRVFLEIIDELTKNNVLVKSVTESFDTTTSSGRLVLSLLSGFAEFERELIMERMSNGRIRSMKLGNWSGSTPYGYKLKNKKLTVYKKEAKTVKIIFDLFVNRSEGNNSTFYSVQSVINNLKIPTKYANQNITKKTSSTYWNKRTISSILENPVYTGKFTFKKYSLDTRANSIKKLRPCSEWVCTTVPKIIEENLFKKAQKIISKNRILFDRNKKSNYMLKGIIKCGFCGCTYSGCTNVVYENRYKRVYYRCNGKCKYFREKICKSSNITAYRIEDIVWKKIKEILKTSNIDNKWTSKSSCLTVSQNDLLEEYYRIKRVRERILKRCVNDQNIDRYNKFYTQIKERENSLFGRLNNLNNTDVVNVFNILTHKVPNSDMDKLSQAEKVKIVRLLVKKIVLSGDKFKIYCRIPLSKSLYYDERKSKFYPSESDGFINKEFDLRLKPVKITKRVGLNFFVNGNYKKYNLRKPHRTYILSELINKKSELSVYKNFYDIRRYIKGLDYVSEVVGKKRVTYKTIFVFAYIVFNLDKIWLYVRIEHKWIKYLIKNKKDIKILEKRIGYSYKKSFKPYMSIDMKE

SEQ ID NO: 1828 - protein, 567 aa, unidentified
  source 1..567: note = uncultivated organism
MERPKSPIRRCAIYTRKSSEEGLEQDFNSLHAQREACEAFIKSQAGEGWRLVKAPYDDGGLSGGTMERPALQRLLADISQGLVDVAVVYKVDRLTRSLTDFAKMVEVFDARGVSFVAVTQQFNTTTSMGRLTLNVLLSFAQFEREVTGERIRDKIAASKQKGMWMGGLVPLGYDVIDRRLVANQSEAETVRGIFRRYLEIGSVRLLMEDLNRRGIRSKVRVAKNGRKSGGNPFFRGALYVLLSNPIYIGEIRHKGVRHPGLHEPIVDRELWEKTQLLLRSQAVRGASRATKSAASPLMGRLFDERGVGLTPSHAVKGERRYRYYVSRNLIKGTSDPERSGWRLPAPEIERTVASAAYTILSDQAAIADAAHTIRAAENRLPSIFSVAAVWMKRLQSDVEVGAALNALVDRVDLIDAGIRVSLKLPICGTEEQQGANTTELTVTRVFPMQIRRRGFEMRLVIQGSRAPAPLADLALLKAIARGHQWADDLLARPQVGSPARSLRHFRGTPRRATCCETATRRTEEAFRSGLGSWGSQRSLRRHDRPGRMPTSSASSARFAASVLTMWS

SEQ ID NO: 1829 - protein, 565 aa, unidentified
  source 1..565: note = uncultivated organism
MTDRPPVRRCAIYTRKSSDEGLEQSFNSLDAQRDACAAYIASQRLEGWVLVEKQYDDGGLSGGSLKRPAIQTLLADMAKGEIDIVVVYKVDRLTRSLADFAKLTELFDKNQASFVAVTQQFNTSTSMGRLTLNVLLSFAQFEREVAGERIRDKIAASKRRGMWMGGHPPLGYDVKDRKLVVNEQEAERVRHICTRYLELQSVRALKKDLDASGIRSKRHIWKDGTAHGGVPISRGALYLILKSPLYRGLISHKGQIHQGEHEPIIDEDLFAAVQATLDSQGPGETARKKRASLALLKGLLFDGKGHRLQPTHSNKHGRKYSYYVSAPMLRDVKSYPDGLRVPAADLEKLILGTLAARLRDETWLTALVSQVDEASRINQVIDAASVLASEVEQQPIMKTGILNILIRRISVSTKTIKLQIDMVAVLKQLLPNRTDGTPPEIMEPVLEIAIAGQFIRCGKQVRLVIGNDDIDQAKPDDRLIREVVRAQRWFDDLLNGRASSITELAKRDKCSAPYISRKINLAFLAPDILQSIIAGTQPRSLTQERLKKVCPLPISWQEQHAVLLA

SEQ ID NO: 1830 - protein, 537 aa, unidentified
  source 1..537: note = uncultivated organism
MKKESGKTVRCGIYTRVSSDSGLEQDFNSLDAQHEASQAYIKSQAHAGWTLIRTRYDDGGYSGGSTERPALQRLLEDVKARRVDIIVVYKVDRLTRSLADFAKLVELFDAHGVSFVSVTQQFNTTTSMGRLTLNVLLSFAQFEREVTSERIRDKVAASKRKGLWVGGNVCLGYAAVDRKVVVLPDEAETVRQIFEAYARLGSLSEVQKELRQRGIVSKHRTLKDGRKVGGIDFSTASLANLLHNRFYIGEVDYKGEILKGPQEPILDRALFDQVQEKLAAQRIKRVKTNAKGNSLLTGRIFDDSGNGMTPTYAVKNGVHYRYYISTPLLHGKSDIAGTVARVPAADVEDTIVKALRERLQIKEAEDNRMLLQTCVERVEIQTKRVVITLKPEVIAPPSAIKNRKGNSDATIIHIPWTKPPTKRGRDIVLPAEVARDETKPIKAARRAKLIASIAKGRRWLDELVSGQTKSPEEIAQRERCSVRKVNMTISLAFLGPNLVKASVEGSLPRGITMTRMYGLNFGWADQHRHLGLDRTGS

SEQ ID NO: 1831 - protein, 548 aa, unidentified
  source 1..548: note = uncultivated organism
MYYIYSRKSKCTGKGESIENQIEICKEYIFSNIKEARESDILIYEDEGFSAKNLERPMFKKMISDSKKQKVKYIICYRLDRISRNVSDFSALITDLNNRGISFVSVREQFDTSRPVGRAMMYMASVFAQLERETIAERIRDNMLMLAHTGRWLGGVTPTGYKSEKVEQILIDGKKKQMFRLKVIPEEAETVKLIFDKFKENGSLTKVETYLLQNNIKTKNQKAYTRFSIKNILSNPVYMTADINAYKYFTNKGIEFFDDNLSKEKFDGKYGIIAYNKTLQKEGKHHQTRDIKDWIISIGDHPGLISATDWIRVQKQLFQNSSKAYRKPRSNVALLSGLIFCDNCGDYMRPKLSKRKNSKGEYIYTYLCQLKEKSRCYSCNVKNLGGNLLDKAVCEKIKKLAVNNSEFIKQLSKIKREIKIKNFSYEIEISRLSKLANILDQKINSLILALSNTENISTQKYITEKINEFDKEKIHKLLKIKKLKELLKSQTLSEIDLNAAGGDISRFENVFDSMNIEQKRTILRSLIEKIIWDGEIVNVYLFGSRFNK

SEQ ID NO: 1832 - protein, 561 aa, unidentified
  source 1..561: note = uncultivated organism
MEELYSNRKGKQCVIYIRVSSERQVQGYSLEGQKRYLKEWTEFEGMKVINIYVEPGKSGKSISGREVFQRLLDDIATGNISVDYVVVFKLSRFGRNAKDILNSLTFIQRFGVNLICKEDGLDSSTSMGKMMITILGAVAEMERENILAQTMLGREEKAKQGGWNGGFAPYGYELVNGRLEVKEDEAAIVRLVFHKFLVDNMGYSTIAGYLNQQGIPKQASKNSHGRKFTDWSIHMIKRMLSNPLYTGRVAFGRTRLERVEGTENEYRRKKSKEFIQSDELSHEPIISEEMYEQAQVKLQEKSTTGHPGLGRPAKHLLTGILKCPMCGSNMYSDIVMWTNSDGSCHRKLKYQCGHYARSKFGQCQKNGIEADWVESEVITYTKLLVQNEQFAEDIQKQIGEKVDVSEIDAEIANFRKRLKQLERSKSNLEKDIDDIVDEDKSAIRKRKDMNRRLNGIYDEINEIEDSIAACEQMKEAAEHDVLTSKAVYQMLLVFDKFFDRMDAVDQRKLIETLISEVHLYPKETWEKGKNPVKEIKYAFPVSDEVLGKIREKLQQSRRSYF

SEQ ID NO: 1833 - protein, 532 aa, unidentified
  source 1..532: note = uncultivated organism
MSRNARHNGNGNGKPRVPHVRCAVYTRKSTEEGLEQEFNTLDAQREAGEAYILSQKADGWVCLPDRYDDGGFTGANMERPAVRRLIADIEAGRVDCVVVYKVDRLSRSLLDFARMMETFERYKVSFVSVTQHFNTANSMGRLILNVLLSFAQFEREIISERTRDKIAAARRKGKWMGGKPILGYDLEGGPGASKLVVNTAEAEQVREIFALYLEKQSLIQLARELAARGWRTKCWTTRKGQPTGGNPYDKNNLFKLITNALYVGKVRHKDDLFPGEHRAIVDEDVWAKAQRMLRVNGRTGGSHTRNMYGALLKGLLYCRPCELAMGHTHTAGKGGRRYRYYTCYGASKRGWDSCPSKSVPAEQIEQFVVNQIREMGSDPAIRSLVLEQVRAAGVEQVTTLEGEAAIVEREIVQLHAGLRKAAKATTENGGADRLADLQEQLARAEAELADLREQIGVAGRQTVEKVEVDAALDEFDPLWESLSPREQCRILRLLVKRVDYDGAAGKLAITFRDNGLSSLGPREQVPAVETSR

SEQ ID NO: 1834 - protein, 520 aa, unidentified
  source 1..520: note = uncultivated organism
MRAVIYARYSSDNQREESIEGQLRECMQYAEYNDISVIDTYIDRALTAKTDNRPNFQKMIKDSYKGAFDMILVWKLDRFSRNRYDSAHYKHLLKKNGVRVVSATETISSGSEGILLESVLEGMAEYYSAELSEKVKRGLTENALKGLWNGGNIPFGYVINKERKLQIDPVSAPIVKEIFQMAYDGKTIKDIHKNLEGRKILRKNGKPLRYNAVRYILTNRVYIGEYNHSGIKIENSVPPLVEVDIFNAVQLEIAKNSKAPARHTADDDYLLTTKLFCAKCGAMMVAQAGTSHTGKVHRYYACVRQKKHKCDKKMLHKDKLEAFVVYKTMEFLQKDDVIEQLSEALYNLQFTESTMLPKLEEQLKDKNQEIENIVNAVQKGFATQTLLQRLGELEKERDEIGEAIAKEKIKTPIFSQDHFRMALHNFRKIDVSKQDGKRKIIDTFINAIYVSDDDFKMVYNVNGKEETIKLEELESSTLFSNGAPDENKTNPRENLEFVFSNRMSGKNNTNLAKTPKRGIQ

SEQ ID NO: 1835 - protein, 519 aa, unidentified
  source 1..519: note = uncultivated organism
MKNVMIIPAKKQVGNIARQQEEKPKLRVAAYCRVSTDTEEQATSYEAQIAHYTEYIQKNPEWEFAGVYADDGISGTNTKKRSEFNRMIEDCEAGNIDMIITKSISRFARNTLDCLKYIRQLKEKNIPVFFEKESINTMDAKGEVLITIMASLAQQESQSLSQNVKLGLQFRYQNGQVQVNHNHFLGYTKDENGNLIIDPDQAEVVKRIYREYLEGYSMDKIAKGLEADEILTGAGKTRWWSSTINKILRNEKYIGDALLQKTYTTDFLSKTRVKNNGIVPQYYIEGDHEPIIPKELFLMVQEEIARRATLQDWFGRKTGFSANHAFSQIVFCANCGEQFRRIHWNNRGKKSIVWRCITRLKEKDKCRARTVNEETLKAAFLNALNEMIGDSDVYLNRLKENLELALNAANPMTAEALSARMSELQQELINRTKQRENYDDVTEEILHLRELQEQKGMDDATQLEHTKRIQELQTFISSQPSEITEFDETLVKKLLEKITVHDDFLEFRFKSSVTISIEM

SEQ ID NO: 1836 - protein, 500 aa, unidentified
  source 1..500: note = uncultivated organism
MAVKMRAAGYARVSVAHEESTSIDQQIDAIAEKCKREGWLFDPKKDLYIDEGLSGSKKNVKRPQFEKMISSASKYDRIVVFRFDRLSRRMSELATTIEALNELHVAVVSINEGFGTDTDHGRTMANIMGSLAAGEAEAIRQRVKSTQARMFVDGKWKGGARPFGWTQEKKQGGGVRLILVKSEADILRKAVKMIIKGKTIGGTARELNAAGHRTYKGTPFSPQMLSNVLRSELLLGRHVVNKKLAYGSDGKPITPHEALIKLDEWVKLQAALGRLRVVRPKKGGALLAGVAYCSLCEGKMQGSSTESNEYANYRCRNKYALLNGKCVTGTSIRAVAIDELVSLAVLEVLKKKKNIQSAGKRIRQSHAEAVKLQKRLEDELEDSRRIHRGLREQYLSGGYNYPGGESDYRADLARASKNLTEASAAVDELDEVVEEPADLYPWTTLSAIDVKWAKATNEEKNKVIRALVDRIEVKPRSVAWKHRGLDPDRVEIIWRYAEPK

SEQ ID NO: 1837 - protein, 535 aa, unidentified
  source 1..535: note = uncultivated organism
MIAPLGNIIYQNVCGGVDVGQYVIYSRKSKFTGQGESVENQIGLCRRYIAANFGEAEAERALVYEDEGFSGGTLERPQFRQMMRDSHTGGFTAVVVYRLDRISRNIGDFAKLIDDLGGRGIGFISIKEQFDTSSPMGRAMMYIASVFSQLERETIAERIRDNMRELSRTGRWLGGTTPLGFESESFTIPGRDGRARRACRLRIVPEEMALVRFIFGCFLETGSLKDTCAELRRRGCRTRRGRDFSRFAVRGILSNPVYSAADEAAYGYFMSNGAQVCPPRERFDGGHGVMAYDRTLQRPGKTHELRGMDEWIIAVGEHPAVIPGARWAEVQHMLELNRTKSCRRPRTGTALLSGLIFCAECGAPMRAKLGSGRGEERPFAYICTAKERSRGSDCRMKNARGAELDGAVMSALFSIGEDAARFASAVCRSGLSAGEAETMRGRIAENEEAMRALAASIAVCRDSAAARYVIDEIERLDSATETMRLCLAGSGDTGAEPTLTQAAQLSTSEERRRLVRAAVSRVTWDGETAHIYLAE

SEQ ID NO: 1838 - protein, 561 aa, unidentified
  source 1..561: note = uncultivated organism
MLRCAIYTRKSTEEGLEQDFNSLHAQREACEAYIKSQRHEGWRLVRTAFDDGGYSGGNTNRPALQLLLEAVGRNQVDVIVVYKVDRLTRALNDFSKIVDQLDGHGVSFVSVTQQFNTTTSMGRLTLNMLLSFAQFEREVTAERISDKIAASKKKGLWMGGPPPLGYDNIDKKLVINKPEAATVGQLFDLYLELGTVRQLSETAIKLGIVTKRRKQRNEKQTGGSSFSRGNLYQLLSNPLYVAMVPHKGNLWPGQHEAIIEQKVWDDVQQMLSGNAVDRYSPKNHKAPFLLTGKVYDETGDLLYQSQADKNGRRYRYYVSRRLLHEARCNNGGWRVPAKTLESIVVSTMKELLSDTSRFMDMLQMDQRSVNEIQDLVARAKTIHFSMDAEEHEAILKFLQDVIRRIDLSQDSLNIHLNRKTMADALNAGENLTDRSGSDELNIVVPVKLRRRGVETRLVIAGTNHNQVQPDKQLCQLVANARYWYDQLASGTAKSIRELSKRDGVAESEVTRILPLAFLSPTIVESILEAKQPDGMSLEWLKRLSPFPCDWKVQADLIENLR

SEQ ID NO: 1839 - protein, 502 aa, unidentified
  source 1..502: note = uncultivated organism
MKKAVIYARYSSDSQTEQSIDGQLRVCNEYAKSHDILVLNTYIDRAMTGTNDKRPGFRQMIEESAKKEWDYVLVYKFDRFSRNRFETAIHKKTLKDNGVKVVSATEYVPDTPEAVIFEGMLEAMAQYYSEELSQKIRRGNNESRIKGNLTGGTLPYAYKNVNKKAVIVEEKAEVVRFIFAQYAKGVYVKDIIAALTEKGITYHGQKFAKNTIYGILKNERYAGLYTIGGKTFTNIYPPIIDKDTFEVVRAIVEKNKYGKRSFKMNYLLKDKIKCGYCGQSVIGENGTAKNGERKYYYKCRGRKSHVTDCNNPAIRKEVLEKLVIDNTILELSKPEIVDMVVQEVLKIQEKRIKNNTVLNLLEKESKTIEASINNIMAAIEQGVVTNTTTSRLKELEEKKTEIEKQISIEKCRTKEVIPESAIRKFYQDALRMEPQLMINYLIKQITLYKDKVEIHFNTPLKEESPDLDRGFSFGRKTFRCSYENTFKREIVYVRFEIEMYVS

SEQ ID NO: 1840 - protein, 613 aa, unidentified
  source 1..613: note = uncultivated organism
MKKHILIFIYSRKSKYTNKGDSIGNQIELAKEYIDLHYPNSEYDVETRIYEDEGFSGGNIDRPNFQRMMKDELKYHADILICYRLDRISRNISDFSSLMEQLKKYNTDFVSIKEQFDTKTPMGRAMMYIASVFAQLEREVIAERIRDNMHELAKTGRWLGGLTPTGFTAERYDLVQILEKNIDNQLERKVKKACKLIEDKTEKKIIIDMANIFLEKKSLAGTETELINRNILSRTGVFFSTSRIRAILTNPVYATYDEATEKYFEENNIELFVSEEKKGKYGKYGLIAYNKTDSGTLKDKSEWIVAVGEHRGFFSGLEWIKIQDIIDKNKDKRYRASNRTNNALLSGILRCDCCGSFMRPKATGNQPKNANYRRYYYTCELKDRSKGSKCNGKNINGIVLDNEIVKKLKEIFIPNSDIYNELKSMSISKKDNIKSRNEEIEILDNKYKKNSTEIHNLVEKLKYIDVSIINVVNDEIKRLQEENNSIQEQITVLKKDNKSNRIEENFEKSSSQLVLDIINNYFNIFDELDIKLKKDILRLLIKDVKGNGEKVTVNLLNTNIDAERKTFFFDSFNKIEDVVNSPLEHDSDCDRILTANSLSSPTEYDSSCDGNYE

SEQ ID NO: 1841 - protein, 558 aa, unidentified
  source 1..558: note = uncultivated organism
MSKFTCPESQLSISLQRVAVYLRVSSAGQEDNYSLSTQEASCRAYAAERGWNVIAVYRDVHTGAEVFERPGLTDLRTAMRAGAFDVLVVHALDRLSRDQNHQGLVLSEAEHAGVLWDSVTEDIDNSPTGKILRAVIGGMAELERLKIAERTQRGKRARVESGKYNVGCRAPYGYQWANPATKERLDLDPVTAPILRRIITGVAAGTSARQMALALMAEGVPTPSGRSAKWHVSSIRALLKNPVCVGDADAYRWMVAKVRGKRVQRLRPEGERIRISGVATPLVTPAVFRAAQERLAVNKWTATRNNRDPEAALLRGGYVRCGYCGFVMQVQNDARGAFYRCNTTSRDQNGCPYHVISARILDRAVWQRVEAVLTRPEIVEAEVARLRRDDPVKADLAAVERRLAEVERQHTNLVRRVATIDDDGIAASVLAEVAVLTTQQKALVAERDELKTQRAGWTASQQRLDDLESWCRLQARNLDALSYEGRRLALEALGVVARVWSTDHDPRYEITVRLDVLPPGLAINAPHSGAGAARGAAHVDGYTHRDCARRVERHADQL

SEQ ID NO: 1842 - protein, 546 aa, unidentified
  source 1..546: note = uncultivated organism
MKAGLYIRVSTDMQARDGESLAEQEVSTQGYCNYRNIPIVTVYREEGKSAKNTNRPQFQKMLRDCKNGKIDTVVVKKIDRLSRSLMDFEKTISFFEEHNTNLISIQENFDTSSAIGRAVIRIIVTFAQLEREQTSERTIDVLKYRAGQGLWNGGGVPLGYDNDEKLGLVINIEESKIINTIFNKYIELASYKKVAEYMNNMGYRSKQYTSRRGKNQGGNKFRDTTIAIILKNQIYLGKIKYGGEIYPGKHQPVISKDIYDKAQDIMKKNTATRSCIKNTATHNFILEGLVKCGACGAVMTPKWSLSRGKRYFYYECTTSGHGGANACSIRSISAPALESLILRRIRMLKRDDVLLKKILDSNANSFEKDISQLEAEKIILDIKLNGLSSRAKSIVDKLLTISELSHSTLLYDEVNRLEQEKANITKRIEEIDFKVNQLKNRSLNIDLAKRAFQYFTQIYGKLSNNDKKVLMGILIKDITYGKDYISINYYDRIDAPILVDNLGSKPKGNVWPRPHTGSSGWIRTNSLTVTVFSSCFHKARTISLPS

SEQ ID NO: 1843 - protein, 508 aa, unidentified
  source 1..508: note = uncultivated organism
MARKSRRMLSAELTAMSAAPKRKAAAYIRLSRETESSKERDTIGSQTALVKDYIAHQDDMELYDVYVDDSVSGTTFTRPGFDRMLSDMRSGKIQVIVAKDMSRIGRDYIEAGNLVEHVFPLYGIRLVSITDGFDTDKDPGGVMMAVTNLTNAMYAQDISNKINAAKETMLKKGILLGRVPYGYKMNRKDTEHPIMEIDEEAAIVVKRIFSDFLAGIGTTAIARTLNEENVPTALSHRLIRNGDLEGARKYQWTANTVQQILYNETYTGRYAMGKTSQKLYRGKERVYIPQDKWFIYENHHPAIISKEDFALVIEKKQKKSKWKKKAPNILKNKIYCGCCGAHMGIPDSAAKTPKYVCRTNLYYGKGCESVCVNKTVVYNAVFHTIKDMVRVFLDEDGVIKNLKNRKNDRLSVEAHYRRELAQKNNELRCIESGKTSLYEDFCNGLLDENEYLTLNRQFTEKMKGLSEAIFVVSAQLEQERRTVPLIQLVRSLYNSREKESCHRLWQTH

SEQ ID NO: 1844 - protein, 513 aa, unidentified
  source 1..513: note = uncultivated organism
MQNAKLIAPVTRQGVQTLRVAAYCRVSTNSADQRNSYARQIKTYTEMIRRNTKWELVEIFADEGITGMSAEKRPEFLRMIQMCEHHQIDLIITKSVARFARNVKEALECTRRLKLLGIGVQFEEEGINTLSLGDEMLLNLFTAIAQEESKSISQNLRNSIVKRMERGEYVDSNAPYGYRLVQKKLCVYEPEAKIIREIFRLYLNGRSVREISRALTEQGVPTKNGNQEWNPRVIAYILSNEKYIGDSLFQKTYNDTMIPFPKRINHGEVDMYYATDTHEPIIDKETFDRAKKLLEQRREQFKKTSVRTTYPLTSRIRCSECGSFYRRKVQSGVVKWVCSRHEEDASACRSYYYAEDRIYDGVITIINHLRFGEADIIQQVMSMLDTAQDAYKRKNQNAHQMSQEIAGLNAKQVMLDQLRSKDYLAPEVFQAQSRELQSQIRSLRAARKGELDSHLQSMRTEVSKLKELLNELDAPLEVFDEKLFSEVVTEMSINKDDMLAVTLLGGLCFTELI

SEQ ID NO: 1845 - protein, 578 aa, unidentified
  source 1..578: note = uncultivated organism
MNTDNKQQRVAIYARVSSQEQATEGVSIEAQIAALKAYAKSQSWEIADEYIDGGFSGGTDDRPALKRLLIDAGRCSFNIVAVCKLDRFFRNLRLLLNHLHNLEQMGIKFVSTQEGLDTSTPYGKFAVQIMGVIAEFERGRIGERVRDSRRYLISGGIWPGGRTLYGYNWLRKEKKWNVVPEEAEIVRHVYDLYVKNRMCINSIVAVLKRDSVHTRDGVEWRYSKVHEMLIHPGYKGRHRIGIPMPAIIDESTWQQAQQRRENARSVRADPKGWLLQGMCFCGECGHVLKCIRKKPSENRYYACRGRVSRNSRDEKRCELPYVRADWLEQGVWEKVKEVLNDSGKLVECINRSLVELEERRREIGAESMATESKLEAVRAKEERLGMAFADGAVSESAYKLKLKRLKKEESDLLKCHYNINLGELADMINLGIRIDMVKEVLNKGSLLVTDSGIFGDLGGTRGPTDTYGFEMTDMVVRSIEATMDYREGDDPREKQEAMKDHQRTILQRFNVKVIVYPERVEIKGTIPTQTLDKTNKEGNETALIITSPYPREGGQRGIGSPQKYGGGEGKIGLTARYL

SEQ ID NO: 1846 - protein, 556 aa, unidentified
  source 1..556: note = uncultivated organism
MKVALYTRVSTEDQAREGFSLEVQRNFLLQYAKSLGWEVFCSIPGQEVYEDDGYSGYITDRPAFQKLFFDARKKKFDVLMVYKQDRLSRKLKNLLEILEELESLGIGFKSATEPFDTTSSAGKFSLQMLGSCAEFERNRLIERVFPGMVMGVKKGHWQGARYAPYGYIYNKLSKKLEVNPKEAKIVTEIFTMYRNGKSTSQIAAHYYELGFPSRQGGKFYTKFISDMLKNKAYLGTIVWNKRHYDTQHKTHNGEGKGYKYVSNDPSKIIETPNCHEPIISQKEFDEVQALLKRNRTNSIVRFKNNVYHLSGILRCNECGLPFRGYTATVNHRKKQRRPWYRCASKEAYYIECKNKSVTADAVNKQVWDIIDMICQNIHVLEELGDTIKLSSSEPEQCYIEQLEEREKKLNRNLEKQKGLYEVYSEDKINIDIYKERAELLRNEEKKLKADIKAVQLKILDKRNSVDVTRDTQNFLLRLKNDPTQQQTDFAIKTFMRIIFKSIHIYNQEIVKVDINQPWKLCYEEGLKCLKEQKTEEKSPKKPRRSYVFYCVPSVVR

SEQ ID NO: 1847 - protein, 529 aa, unidentified
  source 1..529: note = uncultivated organism
MNARATKVVRCAIYTRVSTDQGLEQDFNSLDAQYDASQAYIRSQAHAGWSLLRAKYDDGGFSGGNTDRPALQRLLEDVRAGRVDVIVVYKVDRLTRSLADFAKLVELFDRHNVSFVSVTQLFNTTTSMGRLTLNVLLSFAQFEREVTSERIRDKIAASKRKGLWVGGMAPLGYDTKDRRITVNEPEAEAVRTIFRSYLKLGSLNLLMADLRKGGIVTKVRTLKTGETVGGIPFTRGPLAHLLRNRFYIGDVPFKGEILKGEQPAIVDRDLFEAVQVKLSEQVNGHKAARMKSEALLIGRIFDDRGNRMSPSHARKGGVKYRYYLSSALLQGMAGSAGSVRRAPAAEIEALVVRSVREHLKPVAPIDDRSLIDTHVARVEVQPEQLVIHFARAKTPDRQRANGDNILNVRWRKTPSMRRREILLPAGLPPQHARPIRSESRALLVASIARGRRWLDELLADANANAESIAKRERCSIRKVNMTMSLAFLAPDLVKAAIAGRLPHGMGVARLADMPAEWSRQHQMLGLPSA

SEQ ID NO: 1848 - protein, 530 aa, unidentified
  source 1..530: note = uncultivated organism
MTAKKAAIYCRVSTTYQVDKDSLPVQEESLIAYTKQVLGIDEYELFTDAGYSGKNTERPAYQDMMSRCRNHEFTHILVYKIDRISRNLLDFATMYDELKKLHIVFVSRNEQFDTSSAIGEAMLKIILIFAELERKMTSERVKGVMNARARKGLWNGARMPFGYDWDKEKEIPAINPTEAAVVRKMFDMLLAGDGVFRVSVYLNENKIPTKRGGRWTSTTVRHIATNPMFAGTLRYNYRSAGRGEIKPESEWIILEDALPAIISKEEFNQVQTRFKKPGPHEHRRKNYHPFSTLLYCSCGQHFISRKDRVRKRTGLCPSVYTCAGVRHHWGCHELQPSDVTLLPFVITYIQNMMRVQIAAPASATAMKGILLHNLPGVSDIKDIKAIYRAYTRSHPTAYEIPNSSPTIDLAAAERHKIKRALARLKDLYLYGDGALSPSDYVDEKKKLENKLRSTPVPINTTEDVVADAISHASLQALLSADSMSYPEIMSYVDDKTIHNFLLRIINRITVAGRRVQSITFANGVTHTFTY

SEQ ID NO: 1849 - protein, 645 aa, unidentified
  source 1..645: note = uncultivated organism
MIQAATEKKTIRCAIYTRKSHEEGLEQEFNSLDAQRQAAEAYIASQRHEGWVALPADYSDGGFSGGTIERPAVQRLLADIEHGRIDCVVVYKVDRLSRSLMDFAQMIALFERHEVSFVSVTQHFDTSTSMGRLILNVLLSFAQFEREIIGERIRDKKLATAKQGKYVGGQPFLGYDIDRERKRLLVNPTEAQLVRHIFERFIATRSCLVVARELNAAGHRTKAYTAIKSAKVAGGKRWNKVYVYRVVTNRKYLGEIVHKGMSYPGEHEPILDRRLWDEARRIMEENFHARARKTRQKTPALLKGILRCGHCGKVMGASHTRRRGKRYRYYVCNNAERNGYDVCPVKSVAAGQIEGAVKDRIRVILRSPDVVARTFREVQVQAEQEREELAGQKERLAARLAELKRAIGRLARCDGNDDGLAAELGKLNEEYRQTQTQVEETGHALEALGAGGPAEDDVRDALQKLDPLWDELFPAEKERIVKLLVQEVSVSRDGLLIRLRLNGLNSLVSELQGDGPVEVGPDSQTANIHVPMEFRICGGRKEIVLPASADTEPVATINRALVVALARAHRWQRMIDSGEVLGVEVIAARNGVSRAYVSQILSLAMLAPDLIAMLLQGHEPAGLSLRRLINGLPMTWDEQRRVLAG

SEQ ID NO: 1850 - protein, 522 aa, unidentified
  source 1..522: note = uncultivated organism
MRVATYTRISTDEERQPYSLEAQAQRLGNYIASQDGWQRVRAFTDQGSGATLERPQLQRALADARAGTFDLLLVYRVDRLARSVRGLAQILEELDGAGVAFRSATEPFDTTTPAGRMMVQMLGVFAEFERATIIDRVINGMERKAARGGWTSGSHPFGYAADADSGFLVPLEAEAPLVPVIFELYAKKRLGARSVANWLNSRGYRTRNGRPWSHMSVLTVLRNRAYLGEVFFRGTYHPAPHQPLVDPDLFAAAQAVLRERGEDHSRRASNPSDYLLSGVLVCGRCGKHFVGTAAQGRSARYRYYTCFTRHRYGAGRCDVDRLPAPELDAGVLEALYHTYQHHELLDEAAERSRLEAEATAPRYHEERAAVDDEIAKAEEAIERYLLAFEAKTLPEAQCSQRVRSLAEKLADLRCRRAELTALLDTGDAPARPRDVDLQQIREHIRDVIEDGDPRTSKALVRKLVHEVRVGSREDIVPTFRVPTDSVLIVDGVVEVAGVEPALGPPHRPCSGHYLCRSDPISA

SEQ ID NO: 1851 - protein, 571 aa, unidentified
  source 1..571: note = uncultivated organism
MSNTSSPADAKKVKRIAIYTRKSNDDNLATNVTSLDAQKSCCRSYISIQKANQWEECQEVFDDAAESGRSLKRPAMQRLLKRIEEGRIDGVIVYKLDRLTRNSKDFHSLLELFEKHDVAFISATESIDTKSPQGRLMTAIMVQFAQYDREMDQERSKDFHLARAKKGLWCGGVSPLGYDSKEKLLVVNETEADIVRRIFDLYLQYQSTIRVAEEINRLGFRRKTHKTKEGRVFGGKHFNINSVIRILQRKVYIGLVTNERTKQDFPGQQQPIVSPAVFERAQELLKSHTHRVEGQISHAANKYGFRLKGLVRCGECGSAVSSYVRPKKEKVYRYYKCLAKLNGLPVKCGFTSIGAQKIEEFVIEKLAALGWNRPFLERLVRKERELSRGRMEPLKLEREQTETRLATIRKGIGNLVTLARDSNSQEVREELSRLDVSKKTLEARLIDLQAEIGYCGKLVYDVNMVEATLRHFARHIYRIPIQLQIQTIQRMVKRVVLFKNKVQVELYELPVENIQQSMGAKIIEGEIKNSKVRIPPRSKGASIIPPSEGTAVVEVEQNWRGRRDSNPRSSP

SEQ ID NO: 1852 - protein, 533 aa, unidentified
  source 1..533: note = uncultivated organism
MATRTLSWAIYARQSLDRTGAGLAVERQIKDCRALGRKLKLPGEPVVYADNDVSASSGKRRPQYERLLDALRGGRHGTLVAWHPDRLHRRNAELEKFIDIIKASGTKIHTVNAGEFDLSNSSGQMQARIVGAVAQREVEQKAERRARAIQQNAEKGKRHGGGRSFGYGYTVIGAAGRSHAHDIEKVNKREAAALRSAFDAILRGESTTSVWRGWNKRGITTQHGGRWNGSNFRAVITRASLAGLVVYKGETLEGVESAWPAIVPLDKWRAVQAIISDPARRTSPGNTVRHLASGVTFCECGLPLRAGTNSIKSKRTGIGRAYTVYRCSADTAGHSTILKHVLDAALREAIIAALYDAKDRPAAARSEDDDAALIELHTELETVREREARLAQAIAEGIISLSSARSASDNIKADVQRLADAIGRITRRAATAGVEDATWEALWEGVDVNGDTITRGPDGTRYYHAGRAVLQSMMRRGMSEAEAKAKIEIGRRFDDLTLDQQRNLVKSLVAVTVMRGRGPSRVTVETLQSGRPS

SEQ ID NO: 1853 - protein, 519 aa, unidentified
  source 1..519: note = uncultivated organism
MAQENTARVITIAATEQPQDIRLRVAAYARVSSSSDEQLNSFAAQNRYYTELISSKDNWQLVDIYADEGFTGTSIEKRDDFKRMLRDCERGLIDRILVKSISRFARNTTECLETVRSLKARGVSVYFEKEGIDTGKVSGEMLTAVFASLAQAESESISKNMRWSYQKRMQMGTYIPSSMPYGYVLMDSEITINPEEAAVVREIYDMYLSGSGRVTIAQNLNQRGIFNRRSKPWNCSSILYILSNERYTGDSIWQKTYQTNALPREHKKNRGEVEQYYAKNTHPPIISHEEYIAVQRLRDKRASVQSPSQLPHIFSRKILCGDCGTIFRSRTNKNKKYWLCRTHEEDMSLCSIGQIPEVEIEEAFLRLCYKLKHAPEILQRVLGNLYEMTNRRMLWSPDVIELNKRISDILSQNQMLAVLKQQGLVDPDIFISKTNELAEQLRKLKLEKERLLEAKTDDTLSQTKQIMEVVRDIPDCLEEFDSELFGELIDKIIVENNTHLRFRLKNGLELRETIRKAVR

SEQ ID NO: 1854 - protein, 520 aa, unidentified
  source 1..520: note = uncultivated organism
MKKAALYARVSTPSQGEEDKVSIPEQVQRIEKYCQEKDYMIADRYVDVGYSGAKSKRPEFQRMLNDAKANKFDLIVCWKADRLSRGMYPAAALMEIIEPLGISIEAVEENLDMNYFAMLSIVGKMELDNIKARTQSGREGNIKRGNNHSKPPFGWDYDSAIKQWAENKFEAKWVAQIFEWYIGGVSVYEITRRLNNYGVPTKKHSRLGWTPQKVSELVNSECYTGVAYYNKRKGVTNKPKDKSLWIPMSVPAIINPETWQAAQAKRQSNKSFSPRNTQAVYLTQHILVCEECGKSFLIHSGNSQARLVCRGMTLHPHLYNCRNPKTLKYQPIADRLWEGVKAVLESDGGLQAAIQSRVEYVAGKREAIERKLKELSQKTASAENEKDIVITGFRKGFYNEEELQRQLSAIKEDEQRYIAETASLLADLRLQGDSQTIYQEAKQLIPIMRQRLNGNLSNKDRQQIIKLLVRRALLNGFGDLTIEFRTPAPDSFASATSPRAGLPGYRPHPGGAGAPANHST

SEQ ID NO: 1855 - protein, 503 aa, unidentified
  source 1..503: note = uncultivated organism
MGRAKKSSTRVAIYIRISTGKGMQLEGHSLDAQLNICRKLAEDRGWEIVVIYREEGASAKTTKRPQFRRMMRDAHAGLFDVIIVHKLDRFSRSVADVLTIMNELEELNVAFISFAEQFDFTTPIGRATLTMMAAFAQWYLDNLSQETAKGKRARAEKGLWNSAVPFGYAVDYKKDGGDGLAYPDEDEREGVLYAFEQYVTGMYSNNDIARLLNEADYRPKGRGERALRLFSKDTVTDILQNRFYLGEVQYKGEWYEGVHEPIIPEELFERCQRVRQQRRPRLGTTARSGSRVYPLTGIARCARCGGRMRGSYASGKRYYRDPARQKGCDCDQSMVRAGDTEEALGGFLERLALPADWKEQVMALIQTHFGEERDVLREQARIENELKRLTKLFQWDDISEDEYRTERNRLRARRAALTPPMMPDLERAAELLRDFGTLWDGATLQERRQIVHTLLQTVYLDSGEKGPVVAIEPKSEFAPLFEMLGSGVDGDIVLLKPGAEWSQ

SEQ ID NO: 1856 - protein, 686 aa, unidentified
  source 1..686: note = uncultivated organism
MKTHNCGLYIRVSTQRQANVEDGSLDAQEAKLRAYVNYESKNSTPSSPSWKVIEVYREEGKSAKNLNRPEFQRMMTDAESGKINTIIIWKIDRLSRSLKDFTSLWDTFQEKGIQLISLNDKFDTNCAIGRAMLHIVLVFAQLEREQTAERTINVMQYRAEKGMWNGGRVIGYDLDRDNKGVLIINPEQSKLVKKAFELCIEKGSAGQTQKILNELGYRMPTYKSRRGKRHGDKLFTKQSIVHLLTNPIYTGKISWSGKSHKGNHKPIVDKKTFNKVQEILNSNRKTRNNEKGPKKYIYLLSGILRCGKCGSMMTPKGGKNGSGQPYHYYQCTRNSHIGKSGCRAKYVPATPLEDFVKERLIELSTKEDEINDMISKANKNNDNKLEILQKERMRLETALSQVKAKLNTLISVIETGQKFKTFKERIQQLEDEREKIENQIDETGFAIEKVGQEILSGETIRKNFKQLTSILNKANPQQLKELLYNIIEVVEFFESEDDQADGHIKISYFEQPNLTFPPPSNSKNTKSEQRNETLFAPSMKWLPTTDSEHYRGRFSKYKEIHILVKMYRRRGKGTSISLYDPLPSLPQKPAPVYKNIVAMAVKVNEYLVQNPQKTYTSAGNHFGVTRARISQLMTIHEKLPDDFIEMMGQCADRNLIKRFSGKTLLKIAAKSEKERQNEINHLLKKL

SEQ ID NO: 1857 - protein, 511 aa, unidentified
  source 1..511: note = uncultivated organism
MRVATYTRISTDEEHQPYSLEAQDTRLRAYVASQEGRELTRRYSDRMTGSTLERPELQRALADGRLGRFDLMLVYRVDRLSRSVRGLAQILEELDHAHVVFRSATEPFDTGTPAGRMMVQMLGVFAEFERATLVDRVIAGMELKAAAGGWLGGPNPYGYRYNPAVAKLEPDEAEAATVRTIFDLYVTKKLGTRALANWLNSHGHQTRARRPWSAVTVFDILCNPVPVGRVEFRGASYPAPHVALVSQDAFEAAQKMLAARKEAAWKRRSNASDYLLSGVVRCGKCGNRFLGTVAHGRKGPYRYYTCFSRNRYGRHGCQADRLPADAFEHAVLASMQATYSNSDLIERAVTAAMKKANATLPSKRSELRSLEARIEKAEQALQRYFDAFESGSLAAGRLAGRMDELERRLAELRAQRETLQEELADKSIVTPTTSEIGAVLTALDDAMGNGTHSQRKALMQQLVAEIRVESRSAIFPIYRLPTPPVRVISGVVGRGGLEPPTSALSARRSAS

SEQ ID NO: 1858 - protein, 507 aa, unidentified
  source 1..507: note = uncultivated organism
MAYCMYLRKSRADLEAEARGDGETLSRHFQMLLRLAERMKIDISPDAVYREIVSGDTIAARPMMQRLLQEVQDGKWEGVLCTEVERLARGDTIDQGIVAQAFKYSNTRIITPQKVYDPNNEMDEEYFEFSLFMARREYKAITRRMQAGRAASVREGHYVGGRRVYGYKVIDCENGKGKTLEQIPEEAANVRAVFDWYLYEGVGCAVIADRLNARGARTIFGHHFDGGSVRRIMNQPVYAGYVQWFAREGKVKMQDGIRKTVRERSDRYILAKGIHQPIITIDEFDRCKKLLKSRRTLPTQQNKRIASPLAGLIKCGLCGYAMVRRPCEKSGVFYTCRNPLCKCSSAKQDVVVSMVLDALLGYVDQYSGSVPSIPARRDHSQDIAALESSIQSIRRQITTAQDMLEREVYSPDEYLARKRSLTDRIKSAEDEIANLRALDSADDQETIIIRRLPAIRSVLDAWPYATTPADQNRLLRSILSRVNYKKTEILNRSHDPANYIDISLIFY

SEQ ID NO: 1859 - protein, 546 aa, unidentified
  source 1..546: note = uncultivated organism
MKKIKCAVYTRKSSEDGLEQEFNSLHAQREACSAYIASQKHEGWVMLPDAYDDGGLSGGSLDRPALLRLLQDVGEGRVHQIVVYKIDRLTRSLADFAKIVDVLDDAGASFVSVTQSFNTATSMGRLTLNMLLSFAQFEREVTAERIRDKIAASKRKGLWMGGQVPMGYDPDGRTLEINKPEADTIRTLYDLYERSRTVRAVKYEADQIGLRSRRRTTTSGQATGGKPFDRGHIHHILTNPIYAGRIRHREKVFDGAHPAIIEPERWDKVQEQLQAGATRRRQTTRARRKSLLCGRLFDETGDRLTPSHSKTRKGVRLRYYISHRLVAQAGQAHPDAWRLPAEDLESKVAKLIQMMLAEHSFVAKLVQDASADAIGRHAAKLTAHTADADPAVLLGLVGRIDITPGQLDLRLDPSALAGWLDIDPDDLDQTCLNRSFPFQLRKRGVETKIILDDAASGIDDTLIRNIASAHSWFERIKGGETFSDIAASEDTSKRRIQQLVGLAFLAPDIVRDVLDGRQPIGFTSEWCLRHDLPSDWAEQRQLLATL

SEQ ID NO: 1860 - protein, 549 aa, unidentified
  source 1..549: note = uncultivated organism
MTKPLRCAIYTRKSSEEGLEQEFNSLHAQREACEAYIKSQRHEGWSLIKTAYDDGGISGGTMQRPALRQLLEDIEKGKVDVIVVYKVDRLTRALADFARMVELFDRHDVSFVSVTQQFNTTSSMGRLTLNVLLSFAQFEREVTGERIRDKVKASKAKGIWMGGSTPIGYQVIDKKLLPHPEDAETVRAIFQLYLELGNVRLLVRRLEELGLKTRERSGTAVKRPGRRGFTRGALYAILKNPVYLGKTRHGDKVYGGQHDAIVSQDLWDQVQTKLADNAAAPRWRERVTQRHLLLRKLVDSEGNKLVPSQTTKRGRRYRYYISEPKDGKADPHGWRLAGERMEDLVFVRSRAMLNNPSLISNAASQAGIEASLIPSLIQLARNTEPLSQHHILDQFVDRVTIHADLIAIVLNLGSLLSGQDQNADRQLLVSESQPIQIRRRFNEMRLVMNAPEFRPAEIDDGLVRTIACGHVWFDQWQRGEVDSLKAIAEREGVGQDYVTDVVRLAFLAPCIVEAIVQGKQPPELSVRSLLKLNSLPMNWDEQAIQLGCQ

SEQ ID NO: 1861 - protein, 697 aa, unidentified
  source 1..697: note = uncultivated organism
MARAKEGVLPSMRTYRRACERAKQAMSEALAAGANGNQNGANKAPVWIAIYTRKSNDENLVNNVTSLDSQKSVCRSYIGIQKEKGWQEYPEAFDDPAESGKDLKRPAMQRLLKAIHERRVQAIVVYKLDRLTRNSKDFHHLLEVFEKHNVAFVSATESLDTKSPQGRLMTAILVQFAAYDRELDVERSKDFHLTRARKGLWCAGLPPLGYDIKDKLLIINEKEAETVRKIFDLYLSAKSTVRVAEKLNRMGYRRKTYKMLNGKLYGGKLFDKDSIIRIIRRKIYIGFVTNERTGQDFPGQHKPIAPPADFEKANKLLDSHDRWEKGPVVYSSNRHGFRLKGLIRCGECRSTVVGYARPKKGKVYRYYKCLAHQNGQPVDCAFKSAGADKVEEFVIEKLATVGWDRPFLEKVVRKVEQQSKAGVGPLEKERRGIGERLQGACKEIQKLINLTKAGAESDQVVAEIRQLEAVKKELEARLFEIEASVSHRKRAVYDVDAIQGALQRFARFIYRIPLPMQIQVIRLLVKQVALWKNRVDVELHELPVNDLQKALDGNGSGGKGGAVKAGRSLRRRDQNTTAKPDHPQTSERTAVAELEQNWRGRREQKTTDLIDPPVPSDDKTHYMPPSDLSWPVKLAHITNGEKVIEEAAAPSEGDARAPGDVPTPSKFQSSRSIERRDQKTTDDLRPDGAASRDDGQA

SEQ ID NO: 1862 - protein, 555 aa, unidentified
  source 1..555: note = uncultivated organism
MGEHQLEAPRRVRCAIYTRKSTEEGLEQAFNSLDAQREAAVAYIQSQKHVGWTLVETRFDDGGFSGGNMERPALQQLLEQIEARQVDCVLVYKVDWLSRSLLDFARLMDRFDQRSVSFVSVTQQFNTTTSLGRLTLNILLSFAQFEREIISERTRDKMGAARRKGKWVGGTPLLGYDVAPAGGSLVVNPSEARRVCEIFELYRSHRSLAEVVAELSQRGWITKSWKSRSNVRHTGHPFTKASLRMLLSNATYCGKVNYRDVVYQGEHKAVIEPALWDDINKDFSNRPKAPESPNIPVPQNAALSGLLICKQCGHPMIATYSTRSQRRYRYYVCQTAREKGWKFCQTKSVSADLLEASIAIQLRSQLSAAQTRQVFKVSDSQWQALVRADADVIPGVIQSLIERIDYDGPTGAVAVTLRAPVNFPIEGHPVAFEYKIPRRRGRALPAFRLRPASETLTRPPRLARLLALAHKLDGVVRTGQVKDYAELARLAHISSARVGQIVVLGLLAPAIQEHILFLPAEQAGLLGERELRQIAREPRWDLQRARFDELLAARD

SEQ ID NO: 1863 - protein, 503 aa, unidentified
  source 1..503: note = uncultivated organism
MDNRINAVYARQSIDKKDSISIDSQIEFCEYELKGGSYREYKDKGYSGKNTDRPDFQRLLCDIESGQIAKVVVYKLDRISRSILDFARLMELFQRYNVEFVSSTEKFDTSTPMGRAMLNICIVFAQLERESIQQRVTDAWHSRCQKGFKMGGKTPYGFRTEPYIMQGIKTKRLVVQPKEAAFVKLMYEMYVDPQISLHDITRTLTKQGMRTFHNRALSRATLSIILRNPIYVMADLEIYEFFKSQGTEIVNGAEDFISVNGCYYYQGKGNNENKHTHLEGQTLVLAPHEGFIPSDVWLQVRKKLLANKAFQPARKARNSWMAGKIKCGRCGYALQSAHSNGILYFRCTIHAENNSCPGCGTVKMHELHAFVYGEMVKKLQEFKTLTSRKRAAKANPKLTAKQLELAKVEGEIEKLVESLTTAGATLVSYVNAKIEELDGRRQALTREIAALTLDALPVAQIEAISNYLDDWGNVSFEDKQKVTDYLITRIRATNENVEIEWKI

SEQ ID NO: 1864 - protein, 541 aa, unidentified
  source 1..541: note = uncultivated organism
MAKNAVIYARVSTLEQVSGTSLQTQVETCERYARGCGYRVIERFVDEGVSGAKASRPALDQLMKKAKSGKIDVVVVAKLDRFGRSMRHLSELLGQLDDLGITFVSVAESFDSSSPSGRLQRNILGSFAEFEREQIRDRMMSGHLAIARQGYWWGGRPPYGFQIVRTGKHSRLEINENEANNLREMIKLVVDDGCSFSETARILNARGIQTREGRDWVASRIWTLLRGMTPLCGVYDCLPAGGRRKTTTYAGAGTGGMFTIEVPRLISDRRKRALDRALLRIGTGEKQGTRDYLLSGMESPCGSHYRGKLAHGKYRYRCAAIGCGCPTVSASVEDAVWGEVATLLSDSDRLDAILSRFQKAGAGRKAVEAESVKSIDARIVKLERNLTAEVKKYLKAGVAADVVRQATSEVQSEIEQLRIYRDRLVAHAKKSKGNGDNSHRWLPEKLEHATTNERRAILSLLQITVRITEFSTCSRCHGSGTVGGISRSGKRTGVICPGCEGLRYIPIVELHGVIPESILDASQIIQLEQAEHGWPFQQKIG

SEQ ID NO: 1865 - protein, 715 aa, unidentified
  source 1..715: note = uncultivated organism
MHGSKKRKNHEAKTGKEAFCLKIDDGKKRNVAIYARVSTEHEAQLYALDNQIDWYNDILDRHPTWTLVEKYIDRGITGTSAKKRPAFMKMIEDAENGDFDLIITREVSRFARNTVDTLQYTRKLKKFDVEVYFVEDNIFTYDPDGELRLTIMATLAQDESRKISLRCKAGQRTSMEKGVFFQNGSVLGYDYDKNTKELTINPEQAETVKMIFDLYNSGLGVRKVQWELEKAGRKTAKGSTLWSASVIGRTLRNKLYAGYLVWYKQYVPDFLEQKKINNHGEKEQFEVLGSHEPIVTLEEWEMAQARLNARKTNNGNQKTVRQSADVWGKKLRCSCGSKFNRKQEHKDSANGKMYYRYMCYSQVKSGTIRSRKNKGLPIEGMCTTPSVTQWKLEAMAYYIFKMLRDYKDVIICKADKLFDQYVEGFDTDGTLEKIKRVKNSIDKYNKKIDNLIELRTDGEISKEKYIEKKEEYEKQLEYLQKELEELNSVDDRISDVESRLSVFKEIVKRMDFLDDQKKVPEYLIDGLVDYILVDGNTFKWKFRMLPDGYDLLPDEYALLFEGKKENNYSITPLNADFPQFANGNTGSDHKRRCEVIALPIAYLYGNEKGTASAVPFFRSVIGQNIKNRLPGSAWEPGYDCKRVSEGSGETFPCDAVYLLHDFADFVHHPLARLALGRELHETDLVLLLAKIDFPAVLPGLRKTDPSSVCAAFEVI

SEQ ID NO: 1866 - protein, 527 aa, unidentified
  source 1..527: note = uncultivated organism
MSKRNGRTGTEAPRQFRCAIYTRVSTPDQATGDFTSIDNQREACEAFVASQKHQGWTCLDGRFDDAGFSGSTLDRPQLSRLLAEIEAGRIDAVVVYKVDRLSRSLLDFARLIEVFDRRGISFVSITQPINTADSTGRLMLNILLSFAQFERETIADRTRDKMSAARRKGKWTGGQPVLGYGVHPDGGKLVVDEAEAAQVWEIFALYLEKRSLLAVAEELDRRGWETKSWTTREGRQHRGSGFDKDKVHRLLTNPVYIGKVRHRGQIYEGEQEGIVEPRIFQRVQKLLAGNRQNGGARARNRYGFLLKGLVHCAACGAAYAPSVTRKGPKVYRYYVCTAAQKKGWKTCPCPSINAQRLEEIVVDQIRRIGQDPALIRETVAQVRRAKQERLPALRAEQKRLQRALEGARGEIKGLLVAVGQGAAGVAAVNLDELQQKAGRLEARLQELEAEIAAAAEATVDQADVSRALSLFDPIWEVLYPLEQERIIRLLIERIDYEAAGRKLAVEFRETGLRSLAAEVAGAEEATA

SEQ ID NO: 1867 - protein, 522 aa, unidentified
  source 1..522: note = uncultivated organism
MTGRLRAAIHTRKSSEEGLDQPFNSLDAQREACKAFIASQKSEGWSPVRTAYDDGGWSGGTMERPALKALLADIAAGRIDIVVVYKVDRLSRSLADFARMVDLFDARSVSFVSVTQAFNTTSSMGRLTLNVLLSFAQFEREVTGERIRDKIAASKAKGMWMGGNVPLGYSNGDRMLRINPAEAATVQHIFRRYLELGSVHALRDDLAATGYRTRQVTLSSGATRGGGPFGAGPLHHLLRNRIYLGEIVHRGTSHKGLHDPIIEHALFEAVQQRLASRSTPHTPHRPAAAPLAGILVDALGRPMAATHARGRSGRRYCYYLSSIPPSHPDAPRVLRRVPAPALETIVIGRLRAWSRRPAVTWPELLAFLRRIELHPEALVLTLVPPAHERWTIAAPDRCSTGEDNTLVVTAPLAVHTRGGRTACIAAGPRTRPDRALIAGLRRAHAELRARGIDPAACDPVPGDARAPGDPYLRRLCALAFLAPDIQRAILEGRQPASLRLADLTGSPVPLCWDGQRRRYGFA

SEQ ID NO: 1868 - protein, 580 aa, unidentified
  source 1..580: note = uncultivated organism
MARADYGRAPAGPRTIRCAIYTRKSTEDGLEQEFNSLDAQREACAAYVLSQRHEGWVLVPGFYDDGGFSGGTMERPGLRAVLAEVAANRIDVIVVYKVDRLTRSLADFAKIVEILDAADASFVSVTQAFNTTTSMGRLTLNVLLSFAQFEREVTGERIRDKIAASKKKGMWMGGVVPLGYEVQNRKLVVNEKEAEQVRHIFDRYLALGTVVALQEELTARSVHSKLRTSRSGRQTGGTNFTPGALSHLIQNRTYIGEVHHRGQHYPGEHSPIIDRDLFERAQRQLDENRVARKDGRNIDDPSLLTGLLFDSTGRRMTPNHACKGSRRYRYYVSRPDPALSSEPLMRVPAGEVEKAVVDQLAAALAEPDLLHRLIDRCGIEGVPIRKIRGMLDDLVSTLVHGGKSERRSLLPFLLRRVELHRNSLEVEARVPALGHEPGGAALAEGGCESLDLTLTIPINTVRAGGEVRLLLPPSPRASNSRHDHALIALVAKAWMARQALTSTPAVSVDEAAAGMGLKVDYFRVLVRISFLAPDIVGAILEGRQPGSLTRQKLARMTDLPLDWEAQRAALGVPAELQKAA

SEQ ID NO: 1869 - protein, 528 aa, unidentified
  source 1..528: note = uncultivated organism
MPRPRRTRSSLATATVAAPVRAAIYTRKSTDEGLASAFNSLDNQRERGETYVTSQAGLGWTTLPDRYDDGGFSGGTTARPALKRLLDEARAGAFEAVVVYRLDRISRSLRDFLAIHEFLEANGIALVSVTESINTSTPQGRMMVNVLLSFAQYERELAGERTRHKIEGARRRGKWTGGHPPLGYDVVPEGGKLVVNKYEAAQVVAIYEMFAADPSLVRVLRELNRRGHTTKAWTTREGKVRTGSAWNKSTLRTLLRDPIYVGMQKLGDETFDGEHDGIVPKRLWNQVQALMDRNRRDRGASERNGQGFLLRGLLRCTACDAAMTPHWTRHHGRTYRYYTCRSAQDRGHDVCPTKSIQAAAVEEFVVGQIRRIGSDPALQEETFNQAIAQLKAERRGLRAEAKRLEADRTQVAADVERLVATLTRTEGPAAEAIASELNRAQERLATVERRLREIADRVAALRSQEVDRDAVARALADFDEIWSVLLVPERERVLRLVLDRVSYDGRDGTMAIDWRLPGLAELAAEVAP

SEQ ID NO: 1870 - protein, 546 aa, unidentified
  source 1..546: note = uncultivated organism
MLDTSKTFHAAVYLRLSREDGDVTDGSKQVSNSIANQNELVMDYLKSHPEITVISTYTDDGFSGVNFERPEFQRMLSDIREGKIDCVIVKDLSRFGRNYIESGRYIEKIFPMLGIRFIAITDGYDSINEDMGSDMIIPFKNLINDAYCRDISIKIRSHMDIKRRNGEYIGAFAAYGYLKDKENKNHLIIDEYAADVVRDIFSMKLCGMSQQAIADKLNADGILPPLQYKKSIGVDLNSSFAKSVKPRWSYNAVLRILKNEVYTGMVVQGKCTTPNYKIKKRIHKDKTEWIRVEDMHDAIISKSEFALVQEILLRDTRVSPEKSEVFLFSGMIFCADCGEPMVRKTVPAGGKRYVYYVCSGNKQDKNRCSTHEIAESTLKENILETIKAYIDQMMGLADALDISNKAPMKKPEVEKLDARIEALKADIETCNKRRKNLYEDFKDGILSKDEYYAIRDQYEGELNQIQTAISRVSDERDRLLSNGTGRQEWMDEVLKYKGVTKLSRRMLTFLIERIEVEGASSFKIIWRFDKKREAVVNALMNVKEAG

SEQ ID NO: 1871 - protein, 544 aa, unidentified
  source 1..544: note = uncultivated organism
MNNAVQKLARCAIYTRKSSEHNLDLAFTSLDAQREACQAYIRSQAGEGWRLLPDHYDDGGLSAASLDRPALQMLLAEVRAGKIDVVVVYKVDRLTRSLADFAKLIELFDAHAVSFVSVTQSFNTTSSMGRLTLNILLSFAQFEREVIGERVRDKIAASKRKGIWVGGPVPLGYAVVAKKVMVEPAAAEIVRMIFARYLELGSVQALAQDLDRSGIRTKQRKRANGRIIGGGAFRVGGLAYLLRNRFYIGEVVYHGETFRGDYEPILDPALFAAVQAKLSSQAVERRSRIRGSPALLSGLLFDEHGHPMTATHTDRKGVRYSYYVSRAVLRKHAAGSIGRVPAPELEAAAVVALRRHLQKGDTDPRSIPETDRELIEQHLLRVTLSANEVLLHLRQDVAGNGPAVGQDESFGRGKTTIAIPWAAPVVTPVKGIAHVPAHNTPMKPGSREVLLIAVAKARRWSKDVNRGESFAAIARREGKAERHIRHLVRLAFVSPRIITAVIDGTAPAGLSATALASRLPYSWAEQEQRMMMPQRPDYMAQNRT

SEQ ID NO: 1872 - protein, 526 aa, unidentified
  source 1..526: note = uncultivated organism
MKAAIYCRLSKEDEDAEERGKESESIQNQKSMLIQYAIENGYDIYNIYSDEDYSGADRNRPAFNEMIDAASRRKFDIILAKTQSRFTRDMELVEKYLHGKFIEWGVRFIAVVDHVDTADIAGKKSRQINGLVNEWYLEDLSNNVRSVLTHKRKEGKYIGTFALYGYQKDPNDNNHLIIDPEAAEVVKQIFAMYLAGYGTTYIARRLNEEGIPSPTQYKHEHGLHYKRPERCKDEDLWGKSTIYRMLKTRTYQGDLEQGRHKKISYKSKKTVWLPQSQWIVVPNTHEPIIDPETFARVQQLLADRVRSGGGGKVNPLARKVFCGVCGTSMEQTGSGSVSKRSGKTRKYFRCRMSQRDKTRCAGQDYMPMEALQALVLERIRNHVAGYLNPAAVDTASFTAAAQQQRKAKRCELERLQREIKRRRKAMQELYLDKSSGLVSTAQFAQINGAFLDEVETLEKRCARLEQEMDTGADAERARKQFSERLQSMTDLKTLNRELVSLLIEKIIVYPPEMTEKTRKIEILWKF

SEQ ID NO: 1873 - protein, 543 aa, unidentified
  source 1..543: note = uncultivated organism
MRLLPLQAHKNEGGIMQTKAVIYARYSSSNQNEQSIEGQLRDNYAWAKRKDILVIGEYIDRAISGTKDKRPEFQRLISDASTRKFQLVIVWKLDRFARNRYDSAIYKAKLKKYGVKVVSVMENITDSPEGIILEGLLESMAEYYSANLSENTKRGKRETALKGHWNGGHLPYGYKVEKGKLVPDEKTAPIVRYLFEQYASGRAKADLIREMESKGIKSPNGNLLTYGSFNSVLRNPVYIGKGTFKGDIVEGMAVPLVDEETFKKVQAQIKLRSRAPAARKAKVEYLLSGKLYCGTCGEAMVGVSGTSKSKMIYHYYRCSHRKHPYRCPKKNEKKEDLEQFVVNKTLEYILEPDQIEYISERVVREYKKNFSEVQIHELESRLKKIEGELDRLVDTLSDAPKSVHGRIYAHIENLEVQRADTQEDLSKMKVAAGIGLSKEEVSAWLYKFTTGDINDDKFCHNIIDTFINSVYVYDDHIVIFYNIRSGMNVEKKEMAVSDMISETAMKANKGSYLPLKTCATGFEPATFWSVARRSIQLSYAHIS

SEQ ID NO: 1874 - protein, 500 aa, unidentified
  source 1..500: note = uncultivated organism
MRIATYTRISTDEAHQPYSLEAQAVKLNAYAESQDGWQIVRRFSDQASGATLERPDLELALKEAEAKRFDLLLVYRVDRLSRSVRGLAQILDQLDKAAVRFRSATEPFDTSSSAGRMMVQMLGVFAEFERATIVERVIAGMERKAARGEWTGGALPFGYRIGPERRFLEPDLAEAAVVREIFARYAERLEGAQTIGRWLSEHGYRTKHGKPFNPKAVLTILRNRAYLGEIFFRGTHHPAPHQPLIDPALFERAQNILVERGEDNSLRRSNNSDYLLTGLVKCARCGKRYLGAATNGNGGRYRYYVCFSRQRYGRNTCDADSLPADELEHTILDQLTDLLGREDKIREEIQNAFAELDADKPKREAEVERLNTQLRKINDSLDRYFHAFEHGSMPEKACASRIANLNQRLAELEAHRAELVSADDDKLEPLNADDLHALQAHVAEVIRDGNPPTRKALLQTLIQEIRVVSRGEIYPFFNLPVVRPLGGSVPPTGFEPVSPA

SEQ ID NO: 1875 - protein, 516 aa, unidentified
  source 1..516: note = uncultivated organism
MANDNLARPQLYRPATTPESENTLRGAAYGRVSTASDDQRNSFAAQNTHYRELIMSHDRWEMVDIYADEGITGTCAKKRPDFQRLLSDCRKGKIDKILVKSISRFARNTTDCLETIRELKALGISIYFEEHNIDTKDVASEMLTAVMASCAQAESESISQNMRWSVQKRMENGTFNTCRAATGFRLSKDGLVVQPQEADVIKSSYADYLQGRNSREIASRLTEENALGRIWNRKLVDYILTNERYAGNAFLQKKYRTDTLPRMKKPNRGERPMYYVRNSNEAIVSQEEFEQAQALRESRSHAAARNTGRPFARKLVCGCCGSLLRSKKVNGIWYWVCRTHEQSLKDCPLMPIPEKAIETAFSRLKYNLRHHLEIIHYLAKMDVKIREKQMLWSPGVIELNKQISDISNQSHQLALLNRQGMIDPDIFISKSNRLAEQLRDAKQQKERLLKQENDHFPEETRNLLEAISENSDKTAEFDGELFCELIDKVIIQSNTNVRFRMKNGLELPEVVERTVR

SEQ ID NO: 1876 - protein, 554 aa, unidentified
  source 1..554: note = uncultivated organism
MNKELLNKIYKAAVYVRLSREDGSVAELKKDESNSIANQKSLILQFIEKQENIELVEVFEDDGYSGVFFDNRPDFLRMLEFIEAGKIDTVIVKDLSRLGRNYVEAGRTVQDFLDVYELRLISINDRIDTIDGDEKVREIIIPFLNIVNEQYARDISGKTRSALDSKCREGQFIGSYAPFGYKKSEENKNKLVIDELVAPIVQRIFKMYISGVSAKKIAMILEEEHIPTPMDFKREQGIRCGNGFKTYKKSVWEATTVFRILKNEQYIGNLVQGKVSKKNFKQKKRYTKSEEKWIRYENAHPAIINKLDFEVVQQLLIEDVRRAYKDQDLSLFAGKVYCGDCGEVMHKRTVKANGCDYMYFRCSTHKKDKEACTQHNLSEQLLVKIVKESIAVQSKVLRDIQSVMEYCKAEWDNEQIYEQLEVKRISLEDSLKKQVDRVRTLYEDVKDGLITKEEYLEYKLGYQQKAVELRNRIAEIDDKIHNRKTVITDDAWMQRFLQYADMDGLDRTMVAQLIKSIYIYEDKRVKIVFNYHDQFAEVLELLNEKNIIIEQEAV

SEQ ID NO: 1877 - protein, 574 aa, unidentified
  source 1..574: note = uncultivated organism
METIISTKKIRAAIYMRVSTDEQLKGHGMAVQEEKLRYFVKANDYILEEKHVYKDEGFSGSLPVEHRPDIQRLMENGKKSEFDVVLVWKLDRMFRSARLMLNMVEDLSKYKVGVKSATEPFDTTTIFGKGMVGFLAVMAEMERDTIRERTTGGRIRAAQSGKWVTGVPPYGYNLIKETGQLEINKEEAKWVKMYFKWIVADRLPLREIQRRANNMKIPIARRKVSNKKTHNYWHTRTIGRMLTNETYTGTAFFRKYKRPFKNLTSVTDESLLREKAGWISIKVPAIITRELYDTCIKQLLKNREFSKRNLKRTYLFSKLIYCGSCGFKLFGGYQPPRKDGRAGTKYYHGWCTKAEVGISRRCLTCEQVSEMRLLPIWERLKEILKKPELTLEKLARYNTEKIKQDDTEEKLDQIKKTFETLATKRQRLGMLFSEGEFDHDSYKKALIECKSQEEQLRQEQLRLERQLLTKKEIREIANVIDGQYKKLIARLDSLTYEEKQEAIRLVVNRVTVYPKRAEAEVEFNFNPNIQTPSPLIGAIREPVYAQLQDNNAKTGLTTITGVGVNSGLRGVSLG

SEQ ID NO: 1878 - protein, 593 aa, unidentified
  source 1..593: note = uncultivated organism
MTETLHCYCRVSSRIQSDEGTSIETQHEVGKLKATSLGMKVKFWNEGAASSDHEEIEKRPVLSSLVTAIADGTVKHLWVHEASRLARTDNVASMVRYQCSKHRVIYYVKDNVFDFNNPMDTLTRQIMDAFSQFENAIRKERSRLGKLQKVRQGYWHGGEPPYGYKLKKHSGGNKLEIEPTEAKWVKQIFNWYVKEQSTFFIQKQLLSNGVMARRGGTFSQGSIQQIFRNTHHIGHYIYTDGVSEESVEVKCPRIIDDDTWDKVQQGKKEVMKRKGQFNRAVQFNLLREFMWCGHCGTGIGAKIQPQQRKLFYYCAKKERNWESNYRNSVNGSNDSGGSTNKADALIRVDDERWKRGRHCDMVRSLNIPSTDEVVWNTVKEVVINSNVLKEKMKSEMLSDKDKHDDEIKQKLRNITTTTNRAVKDIEKIESALSKIQADRVLEKISSEEFDKIKLNLENEITKQRSILEDYRTTHTEILNRKNWIDWVSKFKETYEQVDQLKDEDRKQYLKGVVERIDVHYDSETNEHTLKIRFQFPIVDDEYKVIDNKGKRREYEIVEGGNVKEVTESLNHKSSGKKKAVKSASPATNSVTVE

SEQ ID NO: 1879 - protein, 549 aa, unidentified
  source 1..549: note = uncultivated organism
MLRVAAYCRVSTDKDDQANSFESQQRYFREYIERNPEWELVQIFADEGISGTNTKKRKEFNRMIRFAKAGEVDLIITKEVSRFARNTVDTLQYTRDLKKIGVYVLFMNDNINTKDPDAELRLTIMASIAQEESRKTSERVKWGQKRRMEQGVVFGRDMLGYDVRGGKLYINEDGARTVRLIYHKFLEEGKGTYTIARELREAGIETSTHMKEWSNTVILRVLRNEKYCGDLIQKKTYTPDYLSHEKKYNRGQEEYVVLRDHHEPIISREIFEKAQKELERRSPSKEQKAKHSNRYCLSGKIQCGCCGSRFVSRTKKRKDGSQYKAWRCFEAAQHGLPKTDQAGNQIGCAVNQQIRDEDFMLMLQMVIKHLQHNKKRLISDLVEIVKLVLSASEGEEMDIGKLEQKLETTAEKKERLLDLYLGQDISKDDYRRMSERYDTDMENLKQRIKEAKKQKEITANQEEMMADIAATIRALALGEKQDDTFYRNIVEKIVVHSREHIEIYLNLLPYKWSYMLAELPGNPSKKNGGSEEHFATSLPISVSSPATSR

SEQ ID NO: 1880 - protein, 614 aa, unidentified
  source 1..614: note = uncultivated organism
MPKQESEKKKLIRCAIYTRVSTEEQARKSEREANSLDSQKEICRHFISIRKGEGWTEAKVYEDPGHSGKDLNRPALKELLQDSELGLIDAIVFYKYDRLSRSPKDFYNLVEIFDKHNIVFASATQPLDTSTSAGKLMLNMLLSFAQFERELISERTQSTIERRAISGEWHGGWIPFGYDYDFENHILIVNKKEAKAVKLAYQRCQEGKRLSEIKEELNAKGFRNKIREVKTRKGVKKTLGGNKLDEDDVTRMLRNLIYIGTIIHKGKEYKGKHEPIISQKVFKEVQKIRGKDTEKREISPLLLKKDEHVHLLKGLLKCGDCGSTMTPYPSGKKQKDGTPYLYYSCVIVTKESRESKCRVRSLPAREFENTIKKAISEISKNKKLLDECIKSANRDASSGLAPLLKKEKQYKKQIAEITGQIKNIVEGMKKGIISRDVQEEHNRLVQERDKSQIEKDKTDAELEMKQSRLLSIDIIQKGLQNFDKAIETLPLADQKELMQLLIKEITVYPFDPAKDKLPENLPGVFKTKIRTKLLKVKIDLYAIPDVTMYCGNSAKSSDFKNIGCAIKNALRKFYTIIFYVGVTRLHKQKQHLILYPIDIQGSTKLVTRESFDES

SEQ ID NO: 1881 - protein, 608 aa, unidentified
  source 1..608: note = uncultivated organism
MRIATYTRISTDEEHQPHSLGAQADRLTSYCASQEDWQIVSRFEDQITGTLLERPGLSQALAAARSGRFDLLLVYRVDRLARSVRTLAEILSELDRAGVGFRSVTEPFDTTTAAGRMMVQMLGVFAEFERATIIDRVVAGMEKKARSGGWVPGIPPIGYRIGDDGFLEPSEPQASLVRRIFSLYIEKRLGTRALANLLNDQGERTQAGKLWSAASIQAVLQNPVYIGRIRWRKETFEAPHESLVDTETFEAAQALIAERSSDRSKRRSNSSDYLLSGKVRCGHCGSAMVGSSAHGRSGRYRYYTCFKRHRYGKARGCEAERIPADALEEQLLTLITRSLSDAGFLKRAVERASELADTERPRRLGELKALERTLKEREQVRERYLAAFERGTLSDKNCGARLRALGEEIARLEVRRSELEDQIAEAPPAALDAGALEELTSLLEDGLPTSPPSERKHILDQLIESIEIRGRDWIKPTLRLPVVRIVDGEVELNGARSNPQAGVELSRLSALHDELLRKALANPREPRPVPAKVSPVLETVIRVLEQAGDPMQVREIHAAAERLAGEPLLWKSVKAALAVNAEGEEAHFERVRRGYYRIATGRKLCLRS

SEQ ID NO: 1882 - protein, 543 aa, unidentified
  source 1..543: note = uncultivated organism
MQDKPIRCAIYTRKSSEEGLEQDFNSLQAQREACEAYIKSQKSEHWVLISTPYDDGGYSGGTLERPALQKLLQDVRLGQVDIIVVYKIDRLTRSLMDFSKIIEVLDASQASFVSITQHFNTTSSMGRLTLNMLLSFAQFEREVTAERIRDKYAASKKKGMWMGGYPPFGYERKDKKLYPHPQQAAVLISLFKQYYALKSVGKLLDWVRANNIQTSLGKPFTKINLHRILFNRVYIGEVGHKGIWYPGLHQALVDRELFNSVQQIITEHQVKRTYHNTHPSFLAGRLFDDKGNRMSPKASGSGNKKRRYYTSQAMIKQEREKLGAITQVPAGELENFVTQHLKEILNAPSFLTPLLSDYHISLQQDVIAKIPQLSISTEIRKLLLVRVDLTPNTLKLTISPAQLKEFLLSMAENRPCKTLTYDKNTLQTFEYPFQIRRACKGKKIILGTENPIPNYPKEPLVRIICQSYTLREKLFSGRASSILELAKQEGCTDSYMSRLLEISFLPAKTILDILSGTSKEVLSVKDLLKLKNDRRLSQRLSKL

SEQ ID NO: 1883 - protein, 558 aa, unidentified
  source 1..558: note = uncultivated organism
MDERRPAGGPDSPRRVRCAIYTRKSTEEGLEQEFNSLQAQREAAEAYIQSQKHLGWTLVETRFDDGGFSGGSLDRPALQQLLEHIQAGQVDCVMVYKVDRLSRSLLDFARLMDRFEQRSVSFVSVTQQFNTTTSLGRLTLNILLSFAQFEREIISERTRDKMSAARRKGKWVGGTPVLGYDVDPRGGRLVVNPSEARRVREIFELYRRHRSLAVVVAELAERGWTTKSWKSRRGMRHTGRPFTKASLRMLLTNATLGGKVNYRGVVYQGEHPAIVEPALWEDVNTDFSERRRPQQESRHLPQDAPLSGLLICNNCQQPMIATYSAKGARRYRYYVCQAAREKGWKSCPTKSVSADLLEVSIVIQLRSQLSVAETRRAFQVSDSDWQALLQADPGGIPQVIQTLVEQLRYDRPSGTVWVKLRTTQRSHSEEGALTFEYKIPRRRGRALPAFRLRPASETLTPPPRLARLVALAQKLEALVRSGRVKDYAELARLAHVSSARIGQIVILGQLAPAIQEHVLLLPSEHAALIAERELREIAREPRWDRQRARFEQLLAARE

SEQ ID NO: 1884 - protein, 522 aa, unidentified
  source 1..522: note = uncultivated organism
MNGNPPTIRCAVYARKSTDEGLEQDFNSLDAQREAAEAYIASQRHEGWTCLPDRYEDGGYTGANTARPALQRLIKDIETGKVDCVVVYKVDRMSRSLLDFARLMALFDEHGVSFVSVTQQFNTTTSMGRLTLNVLLSFAQFEREIISERTRDKMGAARRKGKWTGGPPVLGYDLERDRTGSRLAINREEARRVRAIFELYLEEGSMVPTLRTMRERGWKTKRYQNRKGTWRGGNRFDKSTLQKLLTNVLYLGKMPYKGAVFDGEHEAIVDEGLFGRVQGILRRNRNSGGKHVRNKHGALLKGLVRCKHCGCAMGHHFASRGVKRYRYYVCMKAQKEGWNACPAPSLPAKELEDFVLGEIRALGKDGRILEEALAATQTHLQAEIDALQRQRTAVEGRIRGLSHEIGEIGPRAGYDEAATRQLGRLQEQMAEEEQEVARLNERIEKTRRRMLEPDELAGAVEAFDPVWEALSPTEKARLVHLLVDHVEYDAGAETISITFHPTGVSTLADQPEEEEACQTASP

SEQ ID NO: 1885 - protein, 539 aa, unidentified
  source 1..539: note = uncultivated organism
MQNTETKWCAVYTRKSTDEGLDSAFNSLDAQYDACSAYVKSQVGMGWRLVEKKYDDGGYSGGTMNRPALTELLKDIETGQINVVVVYKIDRLSRSLCDFTDLSKLFERHGVSFVSVTQQIDTSNAAGRMMLNILMSFAQFEREMTADRIRDKIYASRKRGMWTGGPTPYGYKLVDKQLKVDPDAAEAVRMMFRRYVATGSSLQVARELNESSYKRPDGQPWHPRMVLAVLKCRVYTGKLEVKRTGEVFDGIHEAIIDDALFQTVQKALAANVRTDGKSKRHAMLAPLKGILRCGTCGGAMTPVFSNYSKGGGRRRYVYYRCTRDAKKASGDCPIKNISADTVERFVYEQLGKVLRRDDVVGLVTGGDAVKRADFMDATKDMDDFWARMNPGERERLLRLLVRDVRIWPDKVVILLALDGDDNRIEIPCRLQTNLGRQHFVVDEPEPTPDTPALAVPKALRQARRWLELLASGTYRDKKQLADALGFNGSYFGKMLRFPFLSPVIVEKIRNGELPEVSVTKLMNLTTPLWSEQHKELGID

SEQ ID NO: 1886 - protein, 566 aa, unidentified
  source 1..566: note = uncultivated organism
MARKSRKGAANAVQVQTKAEKVYSAALYVRISVETERKREADTIGNQIQLLKDFASEQEDICVFDIYSDDDISGTDFIRPEFSRMMNDVRDGKVNCVIVKDLSRLGRNHLESGEYIEMVFPFLGVRFISVTDRFDTKNQTADISVQIKNLANELYARDISRKICSAMETTQKQGKFAGSCAPYGYTLDSETKLLSIDENTAGIVKEMFEMVADGHTLHYVATTLNARGVPSPGRYQYDMGYRKADKFKNAKWYMQTVRKILQDQTYLGWMVGGKYRSDFHTTGEKGSKPVPKEEWIITKGTHEPIVTEELFNKVQEYFVETKKAQGMTAKYNSQSRQRSMFKGHLRCGECGQAMFLRHRRSHSGEKTWWYYCALHENYNSSYCVKKAVKQIDVEPMALKLIKMQIQLFTDARSLITNLNKNEASKTRYKIYMDQIGHTRRQIEKYVEMKASLYADYTDGLLTEEDFLTMSQEYARKADELRIFLVELEKEAKKFSPNFATDGEWAKLIEQYRDAETLTAEMVDAFIDELKLFNDGHVEVTFNFKDELDEVIHLSAIRAKEVRRYAG

SEQ ID NO: 1887 - protein, 581 aa, unidentified
  source 1..581: note = uncultivated organism
MGETKTVRVALYTRVSTEDQAREGFSLEVQRTYLLQYAKNFGWEVFCSMSGRDVYMDDGYSGGNMDRPALQRLLFDARNKQFDLVLVYKQDRLSRKLKDLLALLEEFDNLGIGYKSATEPFDTTSSAGKMAIQMLGSCAEFERNRLVERVFPGMVVGVNKGHWQGARYAPYGYRYNKEIKKLEVYPEEAKIVKEIYAMYLSGKSTSQIAGHYYALGIPSRRGGKFYNKFISNILQSKAYLGMLVWNKRHYDTKVKTKNGEGKGYRYINNDSSKVIEVPNIHEPIITQQEFDEVARLLKRNRTNSVVRFRNNVYHLSGILKCNECGGNYRGMTATVNHRTKDRRPWYRCSSKGVPYIKCDNKSVTADAINRQVWDIVDVVARNLYVLEALGDMIKLSASEPEQLYVEQLEEKGTLLHKNLEKQKGLYEVFASDNINLEIYKDRAETLRNEERKLRQDIKAVQLKILEKRNAVDLTKAAQDFLLRLRSNPSNVQMDYLVKTFMRILFKSIHIQNQEIVKFDLNQPWKMCYEEGTKWLKTDQIQAVPEEKRKRSHVCFCAPSDARWRQCYIPILQLLGDVHMKA

SEQ ID NO: 1888 - protein, 524 aa, unidentified
  source 1..524: note = uncultivated organism
MSRRGEAKESPPTPIRCAIYTRKSSDEGLDQEFNSLDAQRESAEAFVASQRAEGWEVNPERYDDGGFSGGTMERPALDRLLRDIEAGKVDCVVVYKVDRLSRSLMDFSRIMETFEKAGVSFVSVTQQFNTTHSMGRLTLNILLSFAQFEREIIGERIRDKVAAQKRKGKWTGGVPVLGYDVDRSGPSPRLVINDREARRTRAIFKLYLELGSLLPVVKELRHREGKSKKRTTTKGTAVGGRPFDKATLYALLRNPIVTGKITHKGEVYDGEHEAIVDQDLFDEVQALLSLNGRTGGPETRNKYGAILRGLLRCRGCDKSMTHTFCGGKKKHFYRYYRCIGAIKNGADTCSAGTLPAEEIEKLVIDEVRGLSTDSVLLDQVLAEAQATIETERVTLDSERSELRRAVGESHRALRRLIEKRQATSEVTARIAQLNEQIVDAERRLPILDARLAELDRESITRCEAEAVFSDFDAVWKNLSPKEQARLIALLVARVEYDGEAGTVSVTFRPNGISSLVKARLEVAA

SEQ ID NO: 1889 - protein, 565 aa, unidentified
  source 1..565: note = uncultivated organism
MPQKIRCAVYTRKSTDEGLDKEFNTLEAQREACENYIRSQKAEGWELISEYYDDGGFSGGNMKRPAFQRLLKDINNGKVDMIVVYKIDRLTRSLLDFAKIVEILDNNKCSFSSVTQHFNTADSMGRLLLNILLSFAQFEREVSSDRIRDKMAASKKKGMWMGGSVPLGYDAINKKLIINTAEAEIINFIFDSYIKVRSEREVCNLCERKGYRQKSRPRKNGIDAGNIPFSTAAISSILRNPIYIGKVKYKTEIYQGQHDAIISEEIFDKVQKIKKMNIKDRLLPSKSFKSALLKGFVYCECCGTAMVPTRCRKNNKYYEYYTSLKAVKQGYHKCEMGSIPSGELDAFVIDHIKNIFQSPQIIQELTNQVKKYHSNITINDIFQSLQSIDKVFEFFAPATLRMIIEKTINKVIVSKNHIHIQFKKSGIILIDERLKTLENGYNEELMEFTYPINLFKKRGRRIIICPEEIIEKGQLDMKLVQAVCNAFTWQKEVIEKNISLHELSRRLKLDRSYIGRIMKLTFLAPDIIEAILKGKQPRHLKIINFTRASIPYLWSEQRELYGFSK

SEQ ID NO: 1890 - protein, 540 aa, unidentified
  source 1..540: note = uncultivated organism
MQTAAIYSRKSKFTGKGESVENQISMCRDHAKGLNINTSDEFIFEDEGFSGGNIDRPMFQKMLKDARAKKFNIIICYRLDRISRNIGDFSNLINELQELGIGFISIREQFDTTTPIGRAMMFIASVFAQLERETIAERVRDNMLELAKSGRWLGGQTPMGFESTPVEYYDAEMKLRKMYKLSPVKEELDTIKLIFDKYTALNSISQVNKYLLTNNIKTKQGCDWGKRQIQQVLTNPVYVKADESIFKYLSDLGMNVVGNPDGKHGLLTYNKKLGQKTYKEITEWIAAVGKHEGIIDADEWLRVQDLLKENKAKAPRFGTSNTALLTSILRCKKCGGSMGVVYGKSKAKDSSQTYHYYSCRMKTYSGLTRCDNSNVRGDQLEEMVINELKEITADPGKLIRKVNMYKDEVAASANNDVILENININIKENESSIQNLVRELSKNKDSSAAKYIIAEIETLNKTTEELKSKLEMLQSEKAEKDSAVLNMDILLNSIKRFSELIDKCNVDEKRLLIGSLVDTIYWDGSTGDIEIRLFGTGKKK

SEQ ID NO: 1891 - protein, 564 aa, unidentified
  source 1..564: note = uncultivated organism
MKNKQFKRIYHAAIYVRLSKEDGDVAGASKAESNSISNQKELIRDFLKDKEDIVVVSERVDDGYSGSSFERPSFKLMLEDIKKGVVDCVVVKDLSRFGREYIDSGRYIERLFPALGVRFIAVNDGYDSLEGKDQSDEIIIPFKNLINDAYCRDISVKIRSHLEVKRKNGEFIGSFAPYGYQKDEGCRNRLVVDPVAAGVVRDIFRMKLHGMSQDAIAGRLNDMGVLSPMEYKSASGSNYQTSFKTGERALWSSVTVRRILENECYVGNLVQGRQTTPNHKVKKYVVKPEKDWVRIEKNHEAVVSDRDFAIVQRLLGMDTRMSPEQSEVYPLAGMVVCADCGAAMVRKNVCSGKRKYRYYVCSRNKETKECASHRIGVERLEEAVLEVLKVQVANVLDLKRAMEKVSEIPFQELDIRELERRIEQKEAEVLRCRELRNMLYEDMKDGIVSKEDYRELHEAYTQRRDLAEEAVRQMKGEIEDILASNTDKYRWLDYFAEHGNIDRLTRNVAVELIERVKVVDRETVEVVFSFGDCYREVLEGLKHAGCEAVCDSRGRIRFEWKEAV

SEQ ID NO: 1892 - protein, 505 aa, unidentified
  source 1..505: note = uncultivated organism
METTKIMQNFIPSRELKRVAAYCRVSTGSDEQLKSLKAQREHYQHYIGNHPGWELAGIYYDEGISGTKKNKRPELLHLLRDCAAHQIDLVITKSISRLARNAADCLDIVRQLKDLNIPIIFERENLNTSNMDDEFILTVLSSMAESESKSIAANNRWSIQTRMANGYFKVSTPPYGYDRNFEIIPDQAKVVRKIFVDFLNGQSSLTIAKNLTVPAPSVGKWSDSTIRTMLRNESYTGNLRLQKTYTDDAFNRHINYDEETMTWYQDHHEPIISLDEFERTQALLIQRAKQRNTKSRSKKYRQNYLLSGKLNCQCGGAFKRQKKAKRITWSCQIHIKDKKSCPVKPVDERQIEVAFVTMINKLIFSRTKLLQPYLQALRNQPANRKYKRIKELESAILSNTEKRDTLMTMLSQDLIEPKEMMTKTTKLIDQSNQYRQELSKLRSTIGKNDGLIIATRELLNYVDNHPVQTKFNPQLFKETVEKVTIEDDSHLVFHMFCGLNLPERI

SEQ ID NO: 1893 - protein, 524 aa, unidentified
  source 1..524: note = uncultivated organism
MSNIAIYGRKSKFTGRGESIENQIIKCKKFIEFKFDVDPNKAEIFIDEGFSGKNENRPEYQRMIKKIRNKEIDSVIIYQLNRLGRNAKDIHNTMQLCEDLGCVIYSATEGFDSSTSFGRAVIGILASLAQLEREQLAERIKDNMYTLAKMGRWLGGQSPLGFTGTKEYYIDENGNQRSITKLKENKEELKLVKTIYNKYLELRSLSQVSKWALESGLKGKNGGYMDKSIVNGILQNPVYVKSNEEVMKHLENKGYEVCGTPNGNGFLRYGNKNEQIVAVAKHKGIIEADDWIKIQEILKENTEKGPKTGKTHNALLSGILRCGKCGSTMGIVHGTSYKGLKSYYYKCNLKIKSPKLCDSKNLNSLELEEKLLNYLKNYNKTVLIQDLKMSLSESKKIENELNTKSIDEEISKKNKVIKQLLNRLKVVDDEEVAKIVIDEITSIKNALKELEDQKVRNLDKQSQLVITETEILKTINDLDDFNNSFDDLSHEQKQVRLKYLLESITYKENAFEIKFRVKKNLLMD

SEQ ID NO: 1894 - protein, 543 aa, unidentified
  source 1..543: note = uncultivated organism
MHKVRCAIYTRKSSEDGLEQEFNSLDAQREACEAYIASQKHEGWVLLPDHFDDGGISGGTLKRPALQDLMARIDDGDIDQIVVYKIDRLTRSLPDFAKLVDRLDAKDASFVSVTQSFNTATSMGRLTLNVLLSFAQFEREVTAERIRDKLAASKKKGLWMGGYVPMGYEANGRTLKIHAEDAKVIKTLYDLYLEHKLIRLVKKEAERLNLRSKHRVSSKGNARGGNLFSRGHIHHILTNPVYAGRIRHKDKVYDGQHPAIINPEVWDEVQTFLKLKAPYKRGKDARATQSSLLIGKAFDETGDRLSPSHSQKNGKRLRYYISHRLGKRGGETGITGWRLPAQPFEDQITAAVSTYLTINVVSKILINPQIAVIQSATKTIANMHSKLTDIAAIIERIDIAPGTVTIALNPIVLANALSVTESLLNMDGLTFSLPFQTRKRGVETKLIIGHVTPEKDQTLIRNLATAHKWLMMIKAGKSLDKICEDYDTSRRRIQQTLKFTFLSPEIVQMIVEGRQPIGLTSAWVARAALPQDWQDQRALVATL

SEQ ID NO: 1895 - protein, 525 aa, unidentified
  source 1..525: note = uncultivated organism
MSSAPITAPRRCAIYTRKSVSTGLEKDFNSLDAQREACEAYIQRQQGWVLVPSRYDDGGYTGANTERPAFQRLLADVEAKKVDIVVVYKVDRLSRSLLDFAKLVERFDKAGAAFVSVTQSFSTADPMGKLTLNILMSFAEFEREMIASRTRDKVRAARKKGKWTGGPVPLGYRIDKGRLVVEPHEAMQVHDIFQLYLEHRSFVRMLDLLAERGWTTKFHALREGRERIGRSWTKDALLRVLKNPLYIGQVRTEDDVVEGEHEGIVDPEVFAQVQDKLGSERSTVIRRASEFYLLRGLLHCGECGQAMSPATSHRGQRTYRYYRCGTLSKKGHACSTRPMPAGALEDVVVSHVRERVRSGELLREAAGELQRLLDREREGVAAERSRLPQEIAALSAEINRAMDVLVSAGPGVRKPLESRLRESMQVQQAKQQRLAEVEQRTQRLTELAAAASQFLERLARLDRIWELLTDRNKERIVGTILDSVVVDQQANRVRIEFAQGIPLAELAAPDATESSGASQPEQEVA

SEQ ID NO: 1896 - protein, 512 aa, unidentified
  source 1..512: note = uncultivated organism
MIVTDISMAPKSNEPIRIAAYCRVSTDSEDQKHSFLAQVMYYKDYEKEHPDCTLVEVYADEGISGTSMEKREDFKRMIQDCRSGKIDRIIVKSVSRFARNNEECLTVLRELKELGVSVFFEKENLSTDAMSSEFIVSLFGMNAQQESRNISDNVRWSYQHRMQSGEFNTCRPALGFELLNGTLVVMEEEAKIVRRIFEMFLSGIAKERIAKILTDEGVPTKTGKTRWHASMVYYILTNERYMGDALLQKRYTTESFPFKKKHNHGEKEQYYVTNSNVPIVSREIFQAVQDLMVVRKSAKASQAEDQNPFKGMLRCSACGKVMRRISNVKQPKWVCRTYSRQSTKCTNHRVMESDITQAFIILSNKLKDNRKEIIDNTISLMERAIDVVGTNRERIHDIDLEIADLSKKKYKIAQLYEKRILNDRDYILKTREFDARLIKIREERRRLFEEDKHAGGIDDLRDLRSAFEQYEKKDYFDNGLFDDIVEYIEVTEDGTLLFHILGGLTLKERGTL

SEQ ID NO: 1897 - protein, 563 aa, unidentified
  source 1..563: note = uncultivated organism
MNINSNTQTNRIWKCAAYVRLSKEDEFSSSGIRDVSNSITNQKALIRDYMDQHPELELIEEYADDGYTGVNFNRPAFKKMMEDVKARRIDCIIVKDLSRFGRNYIEAGKYLEQVFPFLGVRFIAITDDTDTGRQQSDAEQFVLPFKNLFNDSYCKDISTKVRSQLAIKRKNGQYVGNFACYGYLKDPADHNQLIIDPEASIIVQRIFYWKIQGLSADRIADKLNHQGILCPMEYKRSLGMKCSTNFRTKGQAQWAPKSVIRILKNEFYVGTMVQGRKTTPSYKVKKIVEKPEHEWDRVEDTHEAIIHKDVFDVVQSLLLRDTRIAPSENSLYLFSGFLCCADCGMNMIRSRRKYKDKVYAYYSCSGYKRKSGCESHMISEVQIYDAVLAAIKQQYHLILDMERLLKVAQDLPLDHNSTHQYDIQITKLEEQVERAQDMKIHLIENLNEGIITPEDYKELNAIYDKKIKDSRLAIQNVKEERDGLKGLPLESEWLSTFKKHSTIEKLDRIILAELIDFIEVHKNKGLTIHFKYADQIQRVRDYLAQVLPDSISPDDTTAIHEVV

SEQ ID NO: 1898 - protein, 810 aa, unidentified
  source 1..810: note = uncultivated organism
MKTSPNITDGTLAKKLQPEAPQVIVIEPTIQVKSGKLRTAAYARVSSDSDDQLNSFTAQVDYYTTLIRDNEDWEMVDIYADEGITGLRMDKRDDFQRLLRDCRRGKIDRILTKSISRFSRNTRECLQTIRELKSLGVTIYFEKENIDTGKISNEMLLTFFSGNAQQESVAISGSMRWSYQKRMKKGEFITCKAPFGYRLVEGTLQIKEQEAEIVRYVFRSYLNGKSKEELADELIAQGIPTRDGKARWWYSAIDYMLKNERYMGDALIQKRYTTNTVPFEKKRNNGERDKYYLKYSHPLIVAPHIFQKVQELNSYEAQVAYYTDRIMGNPEWTLAGIFADEGITGTSVKKRSDFLKMIRLCRKGKIDIILTKSISRFARNTVDCLNYIRELKELGIPVIFENENINTMKEDTEIIITMLAGFAQAQSESISQNVRWGKRQSFKKGKVSFQYKRMYGYERGEDDNPRVVPEQAAVVEWIFKSYLAGSSVKEIKGSLEKDGILAAGGKTQWSVGVLQYMLQNEKYCGDALLQKTYVDNCMTKKTRKNNGELPKYLVKNHHEKIIDRWLFDKVQVEMARRSGKRKVSDKTLTEQSKYSSKYALTELLICGKCCTPYKRVTWSKKGKKKIVWRCVSRLDHGTKYCKESPTIEEERLHTAVLKAINDMMSKRDQLVNIVKTNLMVTLSGQDGGDLNPLVIENRIRELESLTLELVDIIYKEKNAAAYEDKLRAITEEIKALKEKQEQYQAELNSRDDLNRQMDDISRALEDAPFEISEYKDNIVRQFIDTIKVLDENNLLIIFKNGIKVEQPLIA

SEQ ID NO: 1899 - protein, 910 aa, unidentified
  source 1..910: note = uncultivated organism
MESIVIHRFPTESEAGDHVDTDERRGLGAHAGGLSGLSAPARTQGGERPAFPGSDALLHGGECALAGATGALRSLEFRVEALRPAEQGRRVRGLLRHAGFDEHVGASDSDVRQHHRARPCLGGRCKRGQHGQALGRSRGGFTTKIHAKSDASGAIIGFDLTGGEKADAPHFPILLDIGPDIAPGAAIGDKGYVASQRPEGWILVPDRYDDGGISGATLERPALKRLLRDIEAGLIDVVVVYKIDRLSRSLMDFSKLVDVFDGNDVTFVSVTQSFSTTTSMGRLTLNILLSFAQFEREVIGERIRDKFAASRRKGMWMGGYIPLGYRLENRKPLVEESEAKTVRSIFEGFVRTGSATALAKILQADGITMRNGRAIDKGYLYKLLNNRIYIGDAVHKGTAYPGEHEAIIPQPLWDKVRSILKESPRSRASNTRAQTPALLKGLLFGPTGCAMSPTHTRKGGRLYRYYVCCGSPTGRSFRLDGLCCASVSKGSVTGFQEKLWGKDMGFIGFVGADRGNVAVATAVLALPFMAAIGLSVDFSNMNRTKSDLQAALDAAAMAIAIKVPSGLSDIELETLGNSHFAAHADMRLIQQGHIPQFRFHGLVTDDDGMQHVTSSLKFPYRTFFADAAEFVAKADMGVRQFSLVSRISVRTGDTACVYALSRTAPRAVEAAGNTSIIMDGCVVASNSAAEDAIYVGGSATLSADCLQSSGGIDATAGLSLDCASSRQNAWPLPDPFAHLREPMPPILLSEPKKSDTIVPSGRYWNLTLDGTKTLEPGIYYIDNDLDIKGTVTGEGVVFYIKNGSVTVNGDASLSLTAPTTGEYAGMLFISDAFNTSSHTFNGNGATDLNGYLYFPKGDLTYIGNNATSSNCLRIVANTVEMSGSSTLRSDCSAELGGREAKVSGPLHYTR

SEQ ID NO: 1900 - protein, 526 aa, unidentified
  source 1..526: note = uncultivated organism
MNSLNIQGSSALSRQREIVRIEATATDVHTKLRVAGYARVSSDSEDQLNSFSAQVNYYQRLIEKNDKWEIAEIYADEAVSGVSLDKRDDFARMISDCKKGKIDRIITKSTSRFARNTLDTIRVIRELKDIGVTVYFEKENLDTANLTSENLLTLYSLFAQEESMSISKNCKKGARMRMAKGTYVSSNPPYGYRLTDNQLEVNEPEAEVVRRIFAEYLGGRSSTSIAQGLMDDEIPFKNGIEKWRNQAITTIIKNERYIGDMLLQKFYNEDALPYRQFKNNGELPKYYVKNTHEPIVDRLQYELANILLKERAVHINNEYSQYPLSRKIRCSECGTAYRRKVNNKTTYWVCRQHDRNKDNCGSQRITEEAVHGAFIRLYNKLKQHYASILLPIISSLEKLQELNTRNNPEISTLNKQIAELSEQNHVMNGLLSKGILDSALFISQTDEINRKIRSLKLAKSRILTEQESDSMFDKTEELVEIIENGPERISKMDTALLHELVDTILACDTQSVDFKLINGLVLTERL

SEQ ID NO: 1901 - protein, 608 aa, unidentified
  source 1..608: note = uncultivated organism
MTIRKRAALYARVSTEEQATEGYSIQAQVSEIEKYAELHNIEIVARYIDEGASGKSIEGRPQMKQLLKDVRDKKFDVIMVYKIDRLARKLKDALEISETFENNNAKLISLRENVDTTTPAGRTMFQMMCSFAELERNTIVERAKLGMTQRAKQGKYNGGIVLGYDAVNKELFINEEEAKIVRTIFDYAEQGMGLKAITRRINEMGYRTKKNNLFNVLGVKNILTNPIYIGKIRFNQLENWAEKRRKGKNEEYILADGTHDPIISLEQWENVQRIMKKRSYKTVRSHTPFILAGLLRCPKCGHGMVAGRSKGSSGQTYRYYNCGQHHNKGKAACSPHGIRADVAEQQVFDELSRIVTNDFLLHKLVEKINSDRLHAEKPLLEEKNFLESKIAKTQKKLDNLKEKILTDTELLDMFKPNLIALQDELKALYKQREELLIKIDNQQLEPVDFDSLKKLLSDFYNVLMSVEPDEQKSLLRLIIKDIQITKDAPRKVGRRVTQINLLFDFTIDALQSDSYELLRRIYDIDFIDFDPRWLDDVNPSNFHKTMLGEVMNSHNILPLAMIRLPAHDAECPVQLFQQHDPHHLVRIGQAAEGQPPVGAPQHFGGKAQ

SEQ ID NO: 1902 - protein, 531 aa, unidentified
  source 1..531: note = uncultivated organism
MSKGIIYGKIKINQKKSPKGSAAWATYHPREDVIIIANRKRAVLYLRYSSDKQTEQSIEGQEHVCRDYARAHDMKIVDRYIDRARSASKDIEKRASFLRMIDDAESGDAFDVVLVYKLDRFARDRADSAIYKRRLKMAGVSVISATESLGSGPEAVIMESMLEGFAQYYSLELSQKIRRGQRESVAKRKFLGGRVPYGFMSQDGHLAPDPVTSPAVKKIFEYADDGASFTQIAQILTELGYRTQTGSEITSQFVHRILHNKRYIGYYIYKDVEVPDACEPIVGEELFESVQRRLDRERTRRKKYMDNDYLLSGKLYCGNCGEPMLGDSGTSKTGKTYFYYSCYGKKKKRSGCTKASVRKDDIEEFVLEKAREQLTSEVMGQLTTDIFAVIDEQQKRQDRTPALLEQLKEVDRKISNLVDAIADGKSSSALIARLDKLEDEKEAIQVSIDKEKDIHDRMINKEDIAEWLAKIKLAEVRSDRALIDAFIEKVVLFDEDDGKNRKVQTSYRLADPGQKFDYHLDSSTIRKFTFR

SEQ ID NO: 1903 - protein, 519 aa, unidentified
  source 1..519: note = uncultivated organism
MKPRRHPEIYSNNFRSNALLISRGNQEVRLLCQTIFSPNISHKRESSVTLTITERSDWTFAGLYYDEGITGTKKDKRPELLRMISDCEAGKIDLIVTKSISRFSRNTTDCLELVRKLLGLHIPIFFEKESINTMDAKGEVLITIMASLAQQESQSLSQNVKLGLQYRYQQGKVQVNHNHFLGYTKDENGKLVIDPEQAEVVKRIYREYLEGYSMKKICQHLEADGVLTGAGKTKWYDSTINKILRNEKYMGDALLQKTYTTDFLTKKRVKNTGIVPQYYVEDDHEAIIPKELFMQVQAELVRRRNVHATKSGKKRCFSGNNCFSQIVCCGECGELYRRIHWNNRGKKSIVWRCISRLEPSAAEKNCTNRTVSEDLLKEISLKAINRIRADSDSFIKQIQENVAKAVMNNDSLSPEGLDKRLEELQKELIDKANSKQDYDAIADEIFRLRSQKQQSQIDAETQKENLKRVKELQDFIASQPTEITEFDEDLVRRLIEKITVFADHFTVEFKSGVSVDIKE

SEQ ID NO: 1904 - protein, 574 aa, unidentified
  source 1..574: note = uncultivated organism
MKNYQTVGNNKVVFYGRVSTEHEEQTYALGNQMQWYEELKKSYPNWIIIERYVDDGISGTQAKKRPEFMRMIDDAKMGKFDLIVTREVARFARNTVECLEITRQLKNYGVEVFFVQDGIRTMDNEGEMILTIRAMVAQEESRKMSERIKAGQAISRKNGVLYGNGNLLGYDRVGDTYVINQEQAETVRMIFDLYESSLGVQAIRNELIKRERINSSGLIKWDSTRILRCLKNTIYKGIMAYNKSHRNNFLEQKVIINHDENTFEYVAATFEPIISEEQWEHCKLIRESRRNMRIVNVDGKAKMQFWGVHKGGNIWTKKLRCRCGSSMRMDKWRPKLNDERPVGYKCYNQINKGANKITNRESEGFCDMRAICGWKLEMMAKVVFRKLWKDSGLLEKAIKIFMNETVMEQQDIDRIRNEYRLEIKKISEKAERLIEMRLNGEIDRYNYLRLKAAVDADEKQAEQQLLDYENLPRVSQSYPFSKEQIKKHLHEFISTNGTNFDENIIDKFVTQIKVESETEFSWYLYFYAKENFNTEKKLYCTFTIPFKDALRYRNKRKHLLRKNQYKELLVKVYI

SEQ ID NO: 1905 - protein, 575 aa, unidentified
  source 1..575: note = uncultivated organism
MITSQKRSIRCAIYTRKSSEEGLEQSFNSLDAQREACQAYILSQRQEGWRAINAQFDDGGYSGGSMERPGLKRLLADIDAHKVDTVVVYKVDRLTRSLADFAKMVEAFDARGVSFVSVTQQFNTTSSMGRLTLNVLLSFAQFEREVTGERIRDKIAASKRKGMWMGGMVPLGYDLKDRHLIINEKEAENVREIFELYLKLGCVKKLKAHLDQRGLKSKMRTSRSGRSSGGAEYSRGALYKILQNRIYLGEIPHKGQSYPGEHSPIVDRDLWERVRTLMSENVRARRHGTNAKAPSLLCGLLYDEEANRFTPSHAVKRGKRYRYYVSQKVIKDAASAPGQPSRVPAQELEKVVLTELKGFLASADRVVTALANEGDDVAITSLLIEGAAVCSERLESNSPSKLSEVIEQIVTRILVHQTSVDIQIDRNKLRAQLLGSDPTNLRPPQTADGLKGQPMVLTIETRLKRCGREMRLIVPARSTDPKERDAAPALLKAVSRAHEWLRLIVAGEYKDQRAIAAALGLNEQYVSRIIQSAFLAPEIVEAIVKGSQGPTITLAVLLDEVPLSWADQAAKCSAI

SEQ ID NO: 1906 - protein, 588 aa, unidentified
  source 1..588: note = uncultivated organism
MRASEGKIAIYSRKSKFTGKGESIGNQIELCREYIRANHGQADADAAAVYEDEGFSGGNLERPAFKRMLRAARERKFKAIVVYRLDRISRNISDFSGLIEELSRLDIAFVSIREQFDTGTPMGRAMMYIASVFSQLERETIAERIRDNMHELAKTGRWLGGTTPTGYCSKSVRTVTVDGKAKKACMLELIPEEGETVKLVYALFAETHSLTATETELLRRGVTTKNGKTFTRFSIKGILQNPVYLISDQAAYRYFIQRQADVFSDEREFDGVHGVLAYNRTDQSKGKSTVYLPVSEWIVSVGKHRGLISSEVWLEAQAALEHNRSKAYRRPRSNEALLTGLLFCRCGGRMYPKLSKRSLADGTRSYTYVCREKERSRRSLCNGKNADGNMLDSAVLQAIGALAEDKAGFAGRLAQSKGGSMGEPGLAGEKLSALRKELGGNAKKIDALVDSLAQAGAAREHILKRIGTLHELDRELRKRIGELERFAAQNVLGARELEAQRRLLVAFPESMETMRLAQKRAAVQALVQRVVWDGESAHVVLAGTAEVPADFLCAEEGRIEREERSEAHGDGNTQFVNTPAPHWREDSK

SEQ ID NO: 1907 - protein, 520 aa, unidentified
  source 1..520: note = uncultivated organism
MKQLKSQSHPTIRCAIYTRKSTEEGLDQQFNSLDAQREASEAFITSQRHEGWVILPQRYDDGGFSGGSMERPGLKRLMDDITAGLIDCVVVYKVDRLSRSLLDFARVMGTFDNHGVSFVSVTQQFNTTHSMGRLTLNILLSFAQFEREIIGERIRDKLTAHSKRGQWTGGFPVLGYDVDRGERTPKLVINGGEATKVRRIFALYLELKSLGSVCIELSKLGWQNKSWRTKKGIGRGGREFDKTSLYSLLTNPLYAGKIKHKDNLYAGQHEAIIDQRTFDRVQAQLRSNNNNAGNRLPGKYGGILKGLLRCPDCDVAMVHTTARRGARSYRYYKCLRAAKSGRAVCKYPSLPAGEIESAVVEQVSQIAADQKVQAEIMRQATVAFESRTAELETRRQQFSRQLARDHSELNRLVTGGEAGPATLERIADLNQRIERCERELVQTERQIDDTSAQIVPPQEVPDSLADFERVWRFLTTQEQAELMQLLVARIEFDQDDCTLAITYHDLGIRKLKELQKQELA

SEQ ID NO: 1908 - protein, 673 aa, unidentified
  source 1..673: note = uncultivated organism
MTARSCNRRKSMYNTKEGKSCVIYIRVSSERQVKGYSLDGQKHYLAECAERRGMTVLDTYVEEGKSGKSIEGRTEFQRMLDDIQSGKVHTDYVLVFKLSRFGRNARDVLNSLEFIMKYGVHLMCVEDGLDSSTSMGKMMITILGAVAELERENIIAQSLLGREEKAKSGGWNGGFAPYGYRLVKDDDKSKGKLETVPEEKAVVQLVFDMFLNRNMGYTAISGYLNRNGYTRPPAKNAIRPSYGEWSSDHIKRMLSNPVYTGRVAWGKRRTEKVPGKDNEYRLVKQDEYILSEVISHEAFVSKEDFDRVQEIKAIRGKKGNHNIGQYNAHLLSGIVRCPQCGAPMYIGMTKWTNQDGTERRTESYVCSYATKHRGTSVCRRNGVVASQVEDEVMEYTRKIVRNPQFIKDLQEKVMTAVDMTEVENDITAYKNQLSALQRSRDSLERDIDRIAPDDKYAERRRADMTRRLNDLYDQIYKAEDLLQESMMKKATLESEQMSVQSMMGILSSFDAIYDRMNAAERRDLVKYLISEVELFPREEQKTQKRFVKAIAYKFPIEQKVLTQFDECGASVETVCLLSKLQSKEHIEIEVKMDELDLTAAEKKATYEEIKAYVLEHNGLKVSHLYIAQVKQKYGIIERENYNKPKSEDAKQPQCPPDKENAIMEALKHFGMIL

SEQ ID NO: 1909 - protein, 511 aa, unidentified
  source 1..511: note = uncultivated organism
MKDSNPTRAALYIRVSTERQVQEGYSIPAQKTNLTKFANDQGWSICGIYVDAGVSAKNIEDRPNVKRLIKDIKDKKIDVVVLYKFDRLTRDMSDTEDIIKLIQQYEIGVYTISGGTVDVTTASGRFIVRMNGAIAQLEREQTIERVKMGFIEKVRQGKSLCGNTASYGYDRPKHQEIQSINKKEAKVVKRIFKMYTLENKTFTEIANILNAEGIPTKLKGRVRKKPNSDEVYTINSVWQPKTIRLMLSNITYIGGVRYGINKENGFEVLNGLHEPIISQELWDKTQEKLGKIKKIHRTNHPKDDVYYSGILVCGYCGRKLTTQRTIKTHKDGSTITHFGYRCLYRERGQCIALGMSHKKVEEAFLKYIDSIEDLSEIDNVNPELEKDETLEDINDLKKRISQIESKKKEIMNLFMEDEIVYNDMKYMTSELDKKLAILKDELTQLEKKYQPVKQLDKSKIAKTIKEHWQFLTNRERLEFLNQFVKEIVIINRDKDKVNGKAEIIEVKWYDE

SEQ ID NO: 1910 - protein, 523 aa, unidentified
  source 1..523: note = uncultivated organism
MTAEGGEIMKKVTKIEAVQQPLNNNRTRVVAYCRVSTDSEEQLGSLESQVAHYDQLIDSHPEWDKVGIYSDDGITGTNMDKRPGLQSLIDDCKQLKIDLVLIKSISRFSRNILECLTVIRELNALKIAIHFDKENLNTQKMDGELLLSSMSILAENESRTISENIKWSLRKRVENNSYRHISAPYGYKVINNNLEIDEKEARIIQDIFESYLAGEGTYRIANKLNSKDITPPRKDIWRDSTILYILTNERYVGDFLYQKTYTDSEFQRHVNDGDVDMLYIPDNHEAIISREDFEKVKDLLSNRSETKVSRGNTVYPLTKKIICGHCGSNYKRRIHYSTNQSNYIAWCCPTHISNKEQCPMKFIKETDIQAAFMTMINKLIFAREELIEETIDAFSETSFVTQNRLNLVEEKIMDCQNNIQTLTELKSSGLIDVEFYHQYLNRIEQEKKNLLNEKRTVLEEDENKLIRFQELKKLNQFLKRRNPFNEHEDSVLSEFLERVKVENRETFHFYLKCGLRFTERSSQ

SEQ ID NO: 1911 - protein, 699 aa, unidentified
  source 1..699: note = uncultivated organism
MSDKKRVRMLLRVSSNQQLEADGDLSIQRDIVMEYIKKHDDWILDSKEYFEGSKSGYKKAVKKRDILLDALMDAQRKEYDILVVYKDDRVGRRMWEIGAYIMQLKSFNVDIYTVKDGCISPAMDDAMGQMILALRYANAQKSSSDTAQRVKDTAIELVKRGKYAGGNVPYGYRLVESGEISKKGRILHKFEIDEEKAEIVKTIYDYAYFQMLGPYQIARLLNADTQLKTKAPSGDFWRSETVARILKNPVYYGTVVYNRRTSIGDGRTKVVNNSEWVYSDEINEDLKIIDRRIWNGIQERREVRAKQQKEAMKLHETALKKNTGTLPLIDVIHCGYCKHKLTNGTKYSYWTAKDGEKRCKRNRRYQCKHNALHPDKVSSYDAEDIEDEVFSAVCDYLEQLTKRMKQGILDEIVKNNISERVELERQIATINKKIEKIEKDIGIMKDHIPEAMAGTYPLSIEVIAETIDRFNNNLDDQKNILTEYLSEQKKLSIEEKDFNQFYEAIPPWIDTLKNNDLKTQRVVVDTLIDKIFITEEDIAIKFKATIDQDGDSENFNYDSEVEFNSTSESNQLPRIIMTHGDRTRVSCGIIGMPHLKMSLYSHHLTHCEDVAVDVETHVEACEGDAISAVGIMLVAGTRIFCKNADQGRTLGFRDHCQKLRRKDDIQFFRMNVFGKTAGGIRVAVRIWNIRFDIIYRSTI

SEQ ID NO: 1912 - protein, 555 aa, unidentified
  source 1..555: note = uncultivated organism
MLISSEKIYKAADYLRLSKEDGDFSFSSKKAESDSISSQRKIIERFVAQQPDIELVAEYTDDGYTGTNFERPQFQKMMEAVKAGKINCIIVKDLSRFGREYIDAGRYIEKIFPQLGVRFIAVNDNYDSLKFSTSDSLIVPIKNFLNDSYCRDISIKVRSNFESRRRNGEFVSNYTPYGYLRAPDDKTQLVIDEVAGEVVRDIFRWKVEGMSPVTIAEKLNARGVLSPSEHKRSLGINYKTAFQTNARSKWSPKSVIRILTNEVYTGVLIQGKRTTPNYKVKHTIIKDEQDWSRIEHAHEPIIQVREFELVQKLMQEDSRRASGSDTVYPLSGRVYCGTCGVLAKRYSVTNNGAKYVYYTCPNAKKDGSCEKRRISEKELESTVLAILQSEIKLILNMEQALNQIEELAWEHRETARLDKAIEVKAAEMQKCRTMKVSIYEDLQDGLISQEEFLQMKDSYSQQISEIEQDIVKLKKERAMIQDGVANRSGWLSQFREYQNLPSLSRASVVNLVDKIELYPDKKIRVVLRYQDQLANMVEFLREQDATKSIPEAEVG

SEQ ID NO: 1913 - protein, 517 aa, unidentified
  source 1..517: note = uncultivated organism
MKTITKIEAAEPSVRREERVAAYCRVSTAMTEQKESLQAQREHFEQVIAQRRDWMFAGIYSDEGISGTKKETRPALQRLLQDCENGLVDRIVTKSLSRFARNTADCLEMVRHLLDLGIPIYFEKEHLDTGRMENEFLLTLLGGLAEDESRSMSKNIKWSIQRRMENGTYRSVTPYGYRQDEDGWHIVEEEARWVRYMFEQAAKGVNFQAIAESLNAQGVKVPRTKPWTKDTLLYLLKNEKYIGDCRLQKSYMDSDFHRCVNRGEEAQYYVEEHHEPIVSRETFQAVQRVIALRSTRRKAGKVGYIPQKTYPFTGKIVCGLCGARFKRRIHSEGKQSYAAWACPTHLKDKDACTLKFLREDRIEQAFTTMMNKLIFAHEAVLGTLLRSLRSETYSETLERIQALDERLQKNLEARDNLQTIRAKGYLADDLYRENEAALREESAAMDEERRALAVRVSTDIRRAESVQTLLRFARNSTMRKTFDAAAFDRFVDHIVAEDRGHLIFHLKCGLRLREEVH

SEQ ID NO: 1914 - protein, 509 aa, unidentified
  source 1..509: note = uncultivated organism
MAAYCRVSTEKEEQEKSFETQKEMYTERIMLNPHWQMAGIYADEGLTGTIAKKRPQFMKMIEDCRKGKIDAIITKSVSRFSRNNLDCLMYVRELKERGIPILFEKEGINTLQVSSELLIILFSGLSQAESESISENVKIGKRRSAQKGNVAICFKNMLGYRRGADGEPEIDPDEAETVRLIFDSFLEGMSLLNIARMLMQQGRKTGRGNTEWSAGGVKRILTNEKYKGDALLQKTFTDDPISKKKKKNNGELTMYYVENSHPAIIERAVFDRAQEELARRNGKRKVKEVGTTTEQGKYSSKYALTDLLYCGECGTPYRRCTWIRKGGKKIVWRCISRLDYGTKYCKHSPSLEEYRIHAAIADAVTAYARQGGADVERLKAHIRFYELQSSEQSCLIQKRLTELEAAFSDLLKLSGKNRQDEQYDETLQKILEEKAVLSGRLQKQQAGGAAQQSLLDRMEHTDAILEGLKNRPVEYDDQVIRQLVECVKVLSADKLLICFYGGDHMEVPV

SEQ ID NO: 1915 - protein, 564 aa, unidentified
  source 1..564: note = uncultivated organism
MTTPSRIRCAIYTRKSSEEGLEQSFNSLDAQREACEAYIVSQRHEGWQLVPAQYDDGGFSGGNMERPALKRLLDDIAAKRVDTVVVYKVARLTRSLADFAKIVEQFDKQGISFVSVTQQFNTTTSMGRLTLNVLLSFAQFEREVTGERIRDKIAASKRKGMWMGGSVPVGYDLEDRHLVVNPAGAEHVREIYRLYLKLGCVSKLKEHLKQAGILSKKRMSRTGRSSGGANYSRGALYLILHNRIYLGEITHKRASYPGLHAAIIDQEMWDQVQAQSQSNLQAPRKRPRSTEQSLLMGLLYDERGNRFTPSHATKNGRRYRYYVSQAVIKNTRNRQHGPVRIPASEIEALVISQLILLLRSPQRLVDILADVDYSQRDIETLVQASRVWNAATGDNFQTMVLSIVKRVIVHKDRIEIEVIRSALRQTVLGASNDPEIPINNPDEVVMIETAAELKRCGGDMRLILPPDSPGAPSHEVPSLIRAISRARDWVDRIVRGEAVNQRSIAKETGLDERYISRVIPLAFLAPDLTEAILEGKQAGHLSLDSCLGNISEDWNRQRTQLLGN

SEQ ID NO: 1916 - protein, 642 aa, unidentified
  source 1..642: note = uncultivated organism
MRMPLRACSLWADEQYQNIQRRWLVKMIKKQWKYARNYVNIRFEKRQRMSYEKGISVSVSNLIYVYWRLSCLNNLRRITHMSNTVDKIYHAAIYVRISKEDGDVASAAKAESNSISNQKNLIKDFLKNKNDIIVVSERVDDGYSGSNFERPAFQMMMEDIKRGTVDCVIVKDLSRFGREYIDSGKYIERLFPALGVRFIAINDHIDSKEGNGRDDIVVPFKNLMNDAYCRDISIKIRSHLEVKRKNGEYIGAFTPYGYKKDENNRNRLVPDLYAAGVVKEIFRMKLHGMSQSAIADRLNGQGILSPMEYKHSLGIRIQDNFKTHEQAEWSSMSVRRILENEVYIGTLIQGRHSTPNHKIKKIVDKPEKEWIRIEDSHEPVISRREFAIVQRLLGMDTRTSPNEDEVYVLSGLAVCADCGAPMIKRNVPAGGKVYSYYICSKNAATKECGTHRIPKDKLESLVFDVLQTHIANVLDMERILTYIDTVPFQELEIKELERQKEAKEQEVKRCQELRDMLYEDLKDGVVSKEDYAELYEGYSNKRKKAEDAVRIIRNKVKNVLEAKTDKYEWLRYFKEYQNISELNRAVAVELIDRVKVFGKNHIEVDFAFADCFQSAIRQIQSTGCTISKEETGRMEIRRREVV

SEQ ID NO: 1917 - protein, 517 aa, unidentified
  source 1..517: note = uncultivated organism
MKIVTKIEKAKSKRKKILRVAAYCRVSTDSDEQLESLNTQKSHYESYINSKDDWQLAGIYYDKGISGTGKAARPELEHLISDCEAGKIDLVITKSISRFSRNTADCLSLVRRLLDLNIPIWFEKENINTGSMESELFLSILSSMAADESYSISQNMKWSARKRFENGTFKVVYPPYGYDWNGEQMVANRKQAEVVQFIFNEALKGTGSDTIADLLNGKGIPARSGRAWRRSTVHCVLTNEKYTGDCIFQKTWTDSSFKRHMNRGEKDAVLVKDHHEPIISREDWENVQRLIRQRSQEKNIEKDSQKYLNRYTFTGKILCGCCGNTFKRRIAYSSSGSPVIWVCKTHLQGKTKCPMQSIKDEDLKRSFLTMMNKLIYSYRLILRPYAKSLKDNARKETLDQIDTLKGRLSENARKRQTLTQLRTQGIIDQTLYSRETTALLAASEDIQKEIDRLENSASDVTEVLLKARALLHFAEKSEMLQEFDDERFEEFVDHITVHSRHEITFCLKCGLELKERM

SEQ ID NO: 1918 - protein, 517 aa, unidentified
  source 1..517: note = uncultivated organism
MNVIDITPLSREKAEKIRLAAYARVSSKSEEQLHSFAAQVQYYSEYVKDHPEYELIDIYADEGITGTEMSKRKELNRLLRDCKNGKVDRIITKSVSRFARNTEELIAVLRMLKELGVSVYFEEQGIDSEKLNMEMIVTFPGLAAQKESEAISGNLRWSFQKRMESGEYNCTFTPYGYERINGEMVIKESEAAVVRRIYELYLNGTGIQTIKSILNEEKVPKRYGKTHWHHSSIKYILTNERYKGDALLQKKYTTETLPYRRRQNKGEYTQYYVENSNIPIISKEVFERVQELLKFKKNEKSPYNHYLLSRKLICPECGGAFRRQQIEEKVYWLCMKTSLGYTECQSRRVQEDMVYETFTDMLYKLKHYQDQIIGSLLYSLEQLQNRTSQNQERVRQLDKEIADLAAKNLIVTRLHTSGILDSSEYSAQTSEIENRLNELRSERRKKLSEDEDPAIEELKELNEIMEEYQPSSRFNEELFEQIVPKIIVDDSTKITFHLLGGLELTQEINEKGRCKVV

SEQ ID NO: 1919 - protein, 569 aa, unidentified
  source 1..569: note = uncultivated organism
MARVSKRLAAHTTVSEDRGIRCYKAGIYARLSSDQDKEKNESVEMQVQIAEKYIEDMNEKQAEQIEIVDRYIDFGKTGSNFKRDEFGRLLQDIRLGEINCVVVKDLSRFGRNYLEAGNYIEKIFPFLGVRFIAVSDQFDTGVDGNEKKQMVVEIKNLINDMYAKDSSVKIRQSLRQRRQAGGYVGGPAPYGYRSEYKKNVRRLIPDENTADIVRYIFERFIQTASCSAVADDLNRRRINSPTVYRQTGEVFFSERQEENYRGWSRSAVERIVKSETYTGNLVQGKTSIMARDESNRIHKSEDEWCIKENTHEPLIDVRLFEQAKETLQKIHERSKQCKHPTKGCTISEDIFDEVLDCGVCGKKMTRSSQVKTYQSKKKQRIDGYFCLNGGQTKVDVCPETNRISKEILVDILLQLFRTQFDVYLKKPKKYIALVQKQLSDTEKEMENRRKKVLRSREMLREKEGLEYVRYKEGNILQREYVAYKMQQEDKRQDLNRQLARIEEDLKKAAILAEKVPAMIRSILHIRSGKELTKEMVKALVDRIYVYPGKRIEISWGYTDELLQEVLKYE

SEQ ID NO: 1920 - protein, 505 aa, unidentified
  source 1..505: note = uncultivated organism
MIAIYARKSVERENSVSCEMQVEYCKAMIKPEERREKVVTFIDNGYSGGNLERDGYKQLMKLVSKGKISKLLVYKLDRVSRSLSDFVDILEQLRAHNVQFVSSQESFDTSSPYGDMIAKLLAVFAEFERNSIIERVTQAYHHRSELGLYMGGRCPYGFTLRETEIHGIKTKMLDVNEVDMEHVRLMFDTYSVGGVSLRRVMDNLIKSGHKPSDGGEWTTGKISAILRNPVYVRADANVYEYYKSRGANIISDISEFDGIHGIQLYGQSKHKTDDLSDIKVIVMRHEGVISSDVWLSCQKKLVKNKQINNSMSNQTSWLGGKIICKSCNHKMTVTRGGKRADGTSQRYFNCTGRSKRSCHGTRVTLYADSLEQMADELISEKLATLKNTRRVVSDDNSAKLNQLKSKLIEIKAAGERLADLVMNEGLEPEMISLLNAKAKKLSEERREISEKIEALETTESEVKSIINLSLEWSRATYDEKKAVANLLIDKILIAEDGSVEVVWNI

SEQ ID NO: 1921 - protein, 566 aa, unidentified
  source 1..566: note = uncultivated organism
MSPSSRIRCAIYTRKSSEEGLEQSFNSLHAQREACEAYILSQRHEGWQVVRESYDDGGFSGGSMERPALKKLLEDIARKSIDTVVVYKVDRLTRSLTDFAKIVEQFDKQGVSFVSVTQQFNTTTSMGRLTLNVLLSFAQFEREVTGERIRDKVAASKRKGMWMGGIVPVGYEVKDRQLVINPTEAERVREIYRMYLKLGCVSKVQEYLDQTGVRSKERTSRTGRSSGGAVYSRGALYGMLQNHMYLGKVHYQGTYYPGQHPAIIDPELWDKVQAQFAASLQAPRRRLRSANKSLLTGLLYDPQGNRFTPSHAAKGARRYRYYVSQAVIKKPGRTADGPVRLPADELEELVISQIQLFLRSPQRMQDILCGPNAGSVEIQSAADFARKWATAAVAHVRSVVPTIVQRVIVRDNLIELQLSRGAIREAVTGLREIPSLANDSGAPEDLVILEAQATVSKCRGEVRLVLAPDAAQGSPRAIPSLIKAVIRAHDWVDRIAKGEVPHQRAIAAETGLHRRYVGRIMQMAFLAPDITEAILEGRQPPHMTLEILMGDMSADWVTQRRQLLTT

SEQ ID NO: 1922 - protein, 639 aa, unidentified
  source 1..639: note = uncultivated organism
MESKRNAAIYARKSKETDKGESVSNQIKRGIALCETRGWDYEIYKDTDYSGKNLSRPDFERMYKDIENGKIHTVISYKLDRVSRSVNDFSSLITDLSNRGVDFVSLTENFDTTNPLGRAMMYISSVFAQLERETIAERVKDNMHDLFATGRYVGGKIMLGYDLEKAVVEGKTLTNLIINKDEADIVRYIFESYLKDGASTITIARDLIQRGTKSKNGVNISNTAIARILSSLMYVQADELIYDYFSDKYIIVGENSRFDGTHGCQTYGKSMVTSTTRKKNDKNEWKLTAGSHDWIISSSTFIAVQEKLIKQRRLPPRRGTSVNSVLTGLVKCGACGASMCLRKSTAKDAVYKYMYCPTKTRYSLDSCCQSNIRADELESKVINLIQELSKDKDKFKKGLSDKLAAFSNKKEPMKSAREAALANLAQIDLDIKRVLDLLVREVISDQEYKIKADDLKKQKNELEKFIASSKDNLDNINYDELNIEHIFDTLDKMATLDTITDFKERRALIRSVVKEIIINGDQAEVVLFFDAEEPFENGMFDRLSISSLPHLYKLQNGQIIYSKGFALNMPPGISEDTFGGKMRNWRIANKISALDIANAIGKHKETIMRWERGDEQPSTNNIKVIENFINEFNKKSDIC

SEQ ID NO: 1923 - protein, 553 aa, unidentified
  source 1..553: note = uncultivated organism
MMKESVYYVAVYLRLSRDDEDIDGSMKAESNSISSQRELIRSYVRQHEDMELFDVYVDDGYSGANFDRPEFKRMMADIEAGNVNCVIVKDLSRLGRDYIEAGRLIQKTFPAFHVRFIALTDNFDSQTADNNTKSLVLPVKNFINDSYCRDISQKVKSHQKMKREQGKFLGSFAVYGYRKSPEDKNKLCPDGYAAEIVRNIFAWKCEGMSAQAIAQRLNELGVLSPMEYKKSLGINYTTGFRANITAKWSTVAVLRILKNEVYTGVMVQGKSEKVNYKVKKTVAKPKEEWIRVEGTHEAIISREDFEIVQNLLKVDIRPQAGEKYSHFFSGLLFCGDCGAPMCRRVNRYKEVSNVYFICSTRNAGQGCTRHGILEEELKAIVFQTLQTHISVFLDVCSQLEHIQKMEISFEEVARFDKEIERLHKEQEKYLELRAGLHEDLKTGLITEADFKNFRTIYEKKYEEAKEALQKQEEMLKRLFRNGVASGVKLEKFKEAMKLTELDRDTLLCFISRIEVFEDKKVYVEFWGQEEFHKMLVLQEYMAAKNVGGEETMV

SEQ ID NO: 1924 - protein, 514 aa, unidentified
  source 1..514: note = uncultivated organism
MVRCAIYTRKSTSEGLDSGFNTLDAQRESAEHYIKSQAAQGWTVVPAHYDDGGFTGGNMERPALTRLLDDVERGEVDVVVVYKVDRLSRSLLDFARLIERFEKRGVGLVAVTQHLDTSTSMGRLTLNILLSFAQFERELISERTRDKIAAARRHGKWTGGPLILGYRVNRERRALETIPEEAEVVRLAFDIYLRTRSIGLTAKRLNARGFKQKQHVTKNGRQIGGRHWDKNTVHRLLRNPLYIGKVRQGTQLFVGEHEAIVSLELFDRVQQGLSERTTGRGARKGRNPEHLLTGVLRCLPCDAAMTTSVVAGKAGRKYRYYRCRKQVAEGNVCPTGLLVADEIEAAVIAQVKLLAREGTLRERIVAELAEVDGAKLDIAAERERLCAHLVNLNAEAKRLLGAFSGADAGGKLLAGRLGEIETEGDHLRRRIGDLEVRIRATARATSDAERVTMLLDAFDDVWDALLAEERRDLLHALIKQVRVDPEHGTLHLQPYEPALRVAQGAAAAPAEGAP

SEQ ID NO: 1925 - protein, 538 aa, unidentified
  source 1..538: note = uncultivated organism
MPKNTQKKKAAIYVRVSTKKQSERDYSSLEVQENRCKAWVNYQNSRENVHYDIYDVYKDVKSAKNLNRPGIERLKKDAQNQKFDVVVIQKLDRISRSISDFSKLYDMLKDNDIDIVINDNNIDTSTTSGEMMQKLLMLFAEFERNIMSDRMKTKREETAKAGLWQGGKPPLGYDPVRKVLQIDENEEELVNEIYSRYIKLKSTPRVAKSLNKDGFTTKSWITQKGKKKGGKEFTNGIVRRILKSKVYLGKIEYKEEVFEGQHDPIIDQSTYDQVQGIMKGNRVKPKKYNKGSTPAVLKNIAECGFCTRPLTTSSTKKGEKKYYYYKCAKKNRQGNTEDHAPKPLSVPTLDEFVFSTFKILLKEPELMTALKKRAEFEEESQIDKLTKKINRLHQEIKSLSQKISQTKNLLTDGPGERARKLLLDELDSLALKREERENEVEIAKEEKRKLTEQDPKNSDTYKKLLNHVIHKWEHSMTEEKSDLTQTLVRNVISNVDRDSTGTIEIEYIADKKLNADWKEIYNNDPKDVEVRTVGLAQS

SEQ ID NO: 1926 - protein, 532 aa, unidentified
  source 1..532: note = uncultivated organism
MKIGVEYLRYSSDRQTEQSIEGQKRVCDEFAKRNDILIVHTYIDRAMTGTNDNREDFQRMLKDSDKKEWDVVLVYKLDRFSRNKYEMAIHRKRLKDNGVKIVSAMENIPDSPEGILLESLLEGMNQYYSEELSQKTKRGMHETRLKGHFIGGNINYGYSLVDVIDQNTGKKIASKVVVNETEAPVVKEIFTDYSNGKDVEEIIRGLTERGILNRGKPFINFTLYKMLRSEKYTGIYRINGNAYDKIYPPIVPVDVYEVVRERIEANRHGKHVPDVSYILRGLLFCGYCGRRMTSFTGTSKSGRVWRYYKCYKRKKCESKSIRKDVLENLVVDSLLKLLDTEENISTLADAIAEVHCKKLQSDTSLQALEKELNKIKKSLANLLTAIEAGILTDTTKERLQELEHEKAVIEARILIEKEKIKEQLTQADIRKYLSKAVSQNRKRLVELLIRQITVFNDKIELLLKYKKDDTPPEQPKRGRKKRNENNPDGFISDRGFLCLEYSYTYTMKKAGRVKPGEQAHAVYKSITVQVFI

SEQ ID NO: 1927 - protein, 559 aa, unidentified
  source 1..559: note = uncultivated organism
MKEVIKIETIKIAYAYYRLSREEVNQGESSSITNQRSIVERYCHENNIALANEFVDDGYSGSNFDRPGFQKMLDEIEKHPEVNMIITKDLSRLGRNMSESSYYAETFFPEKGIRFITANGEFDSDVTDIMTPFRLAMNETYIRDASNKVRSVLKNKREQGEYCACPPFGYMKDPHHKGVLVPDPETAPIVQLIFDLAAKGQSARAIAITLTDKGYITPLKYRVLYRDEFCEKGAERATDIWNHTTVKRILKNRTYLGHTLLGKTKKLSFKSTKKVDIPQEEWAITRDTHTPLVSQEQFDSAARFMGINTKRWREFDRCRQSIFNGIVFCAHCGGAMCSGGSVYNSEREKYWYLVCQNIPKRSQHHCEHGARINYADLCKIVLNELNDLISLSDEDIKDIISNATKKSTNTYKASKSENTLKKKLKSIDTMMLKLYEDNANGVIDDERLKSMVEALNAQATEINRQLDQIKSVADNSDAIQSAYEELFQLAKSYTHITELTPEIVRTFIDRIEVSEKILQEGKQVASHNVKFEQGIKIYYRFVGEIGATEVNYSNKDKSA

SEQ ID NO: 1928 - protein, 515 aa, unidentified
  source 1..515: note = uncultivated organism
MGIYTRLSEEDRNKANPEDDSNSIQNQKSMLIQYALAQGWEIYNIYSDDDYTGSDRRRPEFNKLLSDAEAGKFDIVLCKTQSRFTRELELVEKYIHGLFPLWGIRFVSIVDNADTANKGNKKSRQINGLVNEWYLEDMSENIRSVLTNRRENGHNIGSFAPYGYKKDPDIKGHLIIDEEAAAVVREIFTLFAQGHGKTAIARILNERGIPNPTEYKRLQGLRYKTSHNVNSKLWKYSAVADILSNEMYIGNMVQGKYGSISFKTKVCKPRPKDQWIIVEGKHEPIIDRDLWNRVQALIKLRAKPFDVGELGIFAQKVHCGYCGYVLRTNKNRGRHYLQCQTKHVSKEACVGTFMPVSELEQIVLAELNRLSEEYLDMDELERSVEFSTGIKQKRDQVARNIAIYERRVEECSNAIRNLYVDKIKGIINDADFVELSESFRADREHLEHLIADAQKELQELDERLRAGDNRRELILQYTNLKHLTREIVDILIDHIVIYRRNPETKQIPVEIYWNF

SEQ ID NO: 1929 - protein, 523 aa, unidentified
  source 1..523: note = uncultivated organism
MTARCPKGGRTLTAIYTRQSVERADSISVEQQAALCREALTAREAQTCRVYTDKGFSGKNTDRPALQRLLADAEAGRIDRLLVYRLDRISRSVHDFTGLCARLGACGVHFQSVAEGLTLDDSPTGTVMAQMMMVFAQFERETICRRVTDNYFARAKAGLYLGGVPPFGFTKGETTVGGKRTACYVPDPPRAALVAGLFTRYLREGETLGSLVRHLNGAGVPAARGGSWSTLPLGRLLRNPAFVRADAAVYRYLRAQGATMNDPAAAYDGQRGCYCYAPRGTRHGVQATGCFVTLAPHEGLVDAAVWLAVQRKLARNRALGRSGAGTHSWLSGLMKCEKCGYAITVVAKANGAGGHYINCGGRKRGAAVCEGRREVVTLEQIEQSVQPYLLDWLASYRGVRAEVVRPPSAEQNRLAAQIAAHEQQIDGLTRSLARIREADVIDRVAAQIHAENTALTALRQQHAALCRREAADALEPCYRAILAEWQDYTIEEKKRLARAVLRRVVVGDGTLRVVFRLPYGGGV

SEQ ID NO: 1930 - protein, 514 aa, unidentified
  source 1..514: note = uncultivated organism
MRIATYTRISTDEDHQPYSLDAQADRLGNYVASQDGWELVRRFTDQASGATTERPGLKRALAEAKAGRFDLLLVYRVDRFARSVRGLAQLLEELDGVGVAFRSATEPFDTTTPAGRMMVQMLGVFAEFERATIVNRVIAGMERKASRGGWCGGSRPFGYASDPATGFLVPVEGEAPLVPLIFDRYAHSREGARSVATWLNEAGHRTRAGRPWSHTAVLTLLRNPVYIGQVYFRGTFHPAPHEHLVDGELFSQVQALLTERGENYSKRASATSEYLLAGLIVCERCGKHFVGSSAMGNRYRYRYYTCFTRQRYGVAHCDAERLPAEEMDDAVLRALRTTYERSDLIERAVHGARDRAEGQRAHHEQELAFTDTETAKAEEAIERYLWAFEAGTLSEAQCGARLAKLGAKITDLRSRREDLLLAMDQASAEVPSDAELSTVRAHIDDALANGATPARKALLQALVHEVRVQSREEVVPWFRVRSDASVKVRALGGLAPPAGLEPATHGLGNRRSIL

SEQ ID NO: 1931 - protein, 561 aa, unidentified
  source 1..561: note = uncultivated organism
MQTTTSTAAVATAEKIWNACLYVRLSREDGDKEESDSITNQKALIRDYAATLTDVNIVAEMADDGFSGASFERPSFVKMMNEIKEGRVNCVIVKDLSRFGRNFTESGKYLEQIFPFLGVRFISVNDRLDSMSSKSYGDRIIVPFKNLINDAYCRDISIKIRSQLEIKRKKGDFIGSFVAYGYLKDEKNHNRLVPDDYAADIVRNIFKWKIDGMSQQGIAGKLNDMGILSPMEYKRSIGLNYTSTFKLGAKAVWSAVAVGRILKDEIYIGILAQGKRSTPNHKVKKNVTKPKEDWTRAFDTHEPIVSREEFDLANSLLLRDMRVSPNEETVFLFSGIIHCADCGMNMIRKTVPSGDKKYFYYICKNSKLKSCKSHSISEKLLEEAVTEALQAHIANILNLERILAFIDTLPIKQEEIQRIDKQLLKIQEEINRYKELKVSLYESLMSGIVEKDEYRELKESYSSKSDEAEKAALRLSGEIEKILNSKGEKNFWIEQFKAHQTITTLTRKAVVSLIDEVLIYEDNRIGIRFKYQYNYESAVNFVQSVNELVPLETDNLIREAM

SEQ ID NO: 1932 - protein, 539 aa, unidentified
  source 1..539: note = uncultivated organism
MAKTPELKAAIYARVSSDREGLEHSVQRQEADCRKLAKREGYEVVDVFVDNDISASTKSRAPRPQYEEMLAGARAKQFSVILAYSNSRLTRRVREYMDLIDLHNQHGITIKTVVSGEHNLATADGRGAALTVAVWDAAEAERTAERVKRAKDDTAKEGGYRGGPRPYGFEKNGMKVRESEAEIIREMTKAVLAGRTLAGLTKELNKRIDAGEKAARPAQLKWASGPDKGKLRGSGYWRYGALRDMLLRPRNAGLLAHGLPGKSGQKYKFEELARAKWPAIVPEEEWRAVVALLTDPARRSTTKGNETKWLGSGVYRCGAPLVKRDENGLMVKAPGADGKLAPIPILDDRGQPMLCGAVLRTVPHGGTEGRKYARRMLYRCVEFAHLTIGQQQTDELVIAKLIERLRRPRIMQGLVPRGPDVTADREARKAQELKIARFERDYFEGNLSAADRKKFTALANEEIARLDEKMGAALQRSSSSPVLRSADPAAAFLRAPVLVQRAVLALEMTVTILPAAGRGAGWRPERVQIEPIEAEPDPT

SEQ ID NO: 1933 - protein, 534 aa, unidentified
  source 1..534: note = uncultivated organism
MGRRQNIDGNLALDSKKVIVIEATKRPEAQKLRVAAYCRVSSDSSDQMNSFAAQLNYYTTLISGKENWVMTDVYADAGISGTSAKKRPDFQRLLSDCRKGRIDKVLVKSISRFARNATDCLETIRELKSIGVGVYFEEQNIDTSNMTGELLTAMFSAIAQKESESISGNMRWSYQHRMKSGTFLPSSVPFGYMIQGKDIVVNDEQAEIIRKIFNSYLTGMSMDDIAAQLNHEQESAGTGGDNRRWLQSAISYILSNERYIGDSLWQKTYATETLPARQVRNHGERQKYYVEATHSPIIEKDIFRAVQKLRAQRGEKYNCNNPRQENPLHGIIHCGECGSPFRRKICRGNTYWVCHNHDNSKKNCSMSQIPEKQIHAAFLRLYHKLRLHGGPILKQMLSDLQSVWERRMLWSLDIIELNKRISEINDQDRMLADMNKCGLVDPDIFIAKSNLLAQQLRAAKQEKERILGAEQDDTIPKTRELMELLETMPDFLPDFDGEIFTDLVAGITAGPGNVLRFRLKNGLELTETIERSAR

SEQ ID NO: 1934 - protein, 541 aa, unidentified
  source 1..541: note = uncultivated organism
MSKRIRCAIYTRKSTDEGLDQDFNSLDAQREACESYIQSQRGRGWVVRRKRYDDGGISGGTMDRPALQELLADIEKGKVDLVIVYKVDRLTRSLMDFAKIIETFDSRNVSFVSVTQQFNTANSMGRLTLNVLLSFAQFEREVTAERIRDKIAASKKKGMWMGGLPPLGYDAVDKKLVINSEEADTVRAIFGLYLDLGSIRDLAAEATRRGYVTKRRPTGARGGKAFSRGHLAQLLRNPIYIGRIAHRDETFPGQHDAIIDQQTWDAAQRMLDGNCRGRWSRSNKNQACLLTGLLFDESGDRLTPSYSNKKGRRYRYYTSSRLINEPDAKNGWRLPADQIEQAVLDGLVTFLNDNAPEDAKLVREIEEGTIEAGERVRSLLERVNIEPGNLRLEISRTGFSDIGMDDLSQTFPETIDLPLCIRRRGVESKVIIPGVTRPRAPDAELVKVVSDARAWFERLAEGKAETIKDIAQADDVDPGDISRFIPLAFLGPDIVEAILGGKQPIELTAEKLKRLRHMPFSWKDQQEFLGFSDDPKIFRHP

SEQ ID NO: 1935 - protein, 542 aa, unidentified
  source 1..542: note = uncultivated organism
MAGRIWNVAAYMRLSREDGDKEESNSIGSQRDMIRDFILKREDMVVVREYVDDGFSGVSFDRPGFQRLLKDLEAKRIDCIVVKDFSRFARNYIDSGRYLEKIFPSMGVRFVSINDNYDSSGARSQSDALIVPFKGILNDAYCKDISMKIRSQLDIKRKTGDFIGAFCTYGYRKSPENKNRLVVDEEAARVVEMIFRLRIQGMTNSSIAARLNSMGIPSPSAYKAGKGMNYRSGFRVAGQAGWTAVAIRRVLTNEVYVGTLIQHKRGTPNYKVRKEIQYDESDWIIIPNSHQPIIEQTDFDTVQSLLKRDVRLAPSREELYLFSGFVYCGGCGHCMVRKTVPSKGRTYHYLVCSTHKAGQGCSTHSFSEKKLEKIVFTLLHDHIGQICEVGRTLAYIASLPESRREIFNYDAQIERLNGEIRKYQDLKLNLYGDMADGIISKEEYTEFRAGYDRKIAERQQSLRLLEEERTQAVRDNEEDIPWIRLFRQYENITELHRHVLVNLVEKIVIYDAQHVEVFFRYQDKFEKALQYIRRMDGMKEEA

SEQ ID NO: 1936 - protein, 531 aa, unidentified
  source 1..531: note = uncultivated organism
MAHPKRVVVYARLSVAREESVSIRRQVESAQKYAEAQGWTVIGEPHIDDGVSATLNRPEDRLGWQRLLASSDHFDAVLVWKIDRLSRKALDFLHADQALQDRGAGLVSVTEQIDMTTAQGRAFAVMLSVFAEMEAEAIRGRVKASRDYLVKAGRVVGGTIPYGWHSVANPRGHGLVLTIDPERTQYVRGMTERALNGDSIYSICKWLNEVSAPLPRASQGARKHAGWSHSTVDRLLRNPVLAGMTPYQPGRGRHDTVDPWAILRGNDGLPVVDDVVAIISVDERRRLLTALDNRGTPQARPRASKGATSPLLSGLMTCGHCSRTMHRGTTQKRPSLSCPACHQTISRNQLDSHMAQRLLDERGAVPLWETTNLTVDNSTDLATIEEAIGQITREMEQDVADMDALLERLGGLKELRAKARLDLPSQRIWRITGRSVREAWQKANSEEARREVLLGQVDQATVVRGKVGRILDPLRVIITWKEIPEGMPLPDGTLVGQHVAAPLGTGRVGNPIVLMPDGSHHVLTGDPGIKH

SEQ ID NO: 1937 - protein, 529 aa, unidentified
  source 1..529: note = uncultivated organism
MKPGSAKRHVRCAIYTRVSTDQGLEQDFNSLDAQYDASQAYIRSQTHAGWTLLRSKYDDGGFSGANTDRPALQRLLADVRARKVDVIVVYKVDRLTRSLADFAKLVELFDANNVSFVSVTQQFNTTTSMGRLTLNVLLSFAQFEREVTSERIRDKIAASKRKGLWVGGMVPLGYDTKDRKITVNDGEAEAVRTIFRLYLKLGSLNLLMAELRKHCIVSKTRTLKSGTTVGGIPFTRGPLAHLLRNRFYLGEVTFKGEVLQGEQEAILDRDLFEAVQAKLDEQGNNHKRTRTRSEALLTGRIFDDGGNRMSPTHARKAGVKYRYYLSSALLHGIAERAGSVARVPAAEVEAVVVKSVRGHVRSREPIDDQILIETHVVRVEVHTDHLIIKLVQAESEDDDTRLETVLSVPWHKTASTRRREIMIPEGTSPQHVRRIRSENRATLVASIARSRRWLNELITDPAASAESIAKREQCSVRNVNRTLSLAFLAPDLVTAAIDGRLPHGMGVTRVADLPAEWSRQRRILGLASR

SEQ ID NO: 1938 - protein, 554 aa, unidentified
  source 1..554: note = uncultivated organism
MTVRCAIYTRKSTDEGLEMEFNSLDAQREAGENYIKSQKSQGWKLIDERYDDGGFSGGNIERPALQRLMEDIKQDKIDMVVIYKIDRLTRSLMDFSKLVEVFDEHHCSFVSVTQNFNTADSMGRLTLNMLLSFAQFEREVIAERIHDKISASKKKGMWMGGRIPYGYDSVDKKLVPNEDAETVRLIFKKYLVLQSETQVKDYINSLGRQIKGKNGMIKFTNATIRGILINPIYIGKIRYKDEIYDGMHKAIVSEDLYNEVQKIKSKDIRDRYTPNPVMQHSLLKGMLRCESCNSAVIPSRTTQKSRVYEYYVCVHAVKEGRKHCPLSAIPAGLLDDFVLEKLQFVLNSPYVMAGVINKVTSQLPTVPDIRVIEKLKDGAECLKNLPTDTQRLLIHYLIKQILITPDSIKIMFTETALELMDKEQRAKLKSYGDDPIENMLVLKVCFRKHKETTKIFVPDDYNPLSNDALCMALVKAFKWNKILEDERIPIYELAKRCKMSREQMGKILRMTFLAPDIIRAIFEGTYPKKLSLTQITEREIPLLWSEQRKLYGFI

SEQ ID NO: 1939 - protein, 573 aa, unidentified
  source 1..573: note = uncultivated organism
MARKKTGPAPFIPNGRRGALYVRVSTKYQIDKDSLPLQRKKLKEYCKLIDIPDFEIFEDDGYSAKNTDRPMFQEMMNRIRAGEFTHLIVWKVDRISRNLLDFASMYQELKDRKVIFISLNEQFDTSTPIGGAMLKIILIFAELEREMTSERVTATMLDRAENGLWNGSRPPIGFTVDPETKTLVPVPEEKETVNLIFELYAKMRSCRKVARFLQQNGPTPKYYHEWLPESVRRTIRNQIYIGTYIYNRRENHKLDRPEADWIIKENNHPAIVKKDLFDLCNDIMDKNSRTRDVSEVRQTKHIHIFGGKIICNMCGGGMNASKDKARENGLRPSVFRCGRRARMLDCGNKRTISDLYLGPFIFNYIANLARIQKDFTKINSMEKMEAALLAGEIFDGVKLAPECMKKTFSLLAHKDIKKGAYIPDINDSGDEENAIGERIMILEKEKDKCKNAISRLTELYMFDPDAITKEEFSEKRRELNQRIRELSSQILELEKNGGTTAADLSFIKKASAFLVARRISSKEYIDYLQMSADLDAEILKDFVDQVIDKIYVQDGKIVKIRFASGLEHEFIYK

SEQ ID NO: 1940 - protein, 523 aa, unidentified
  source 1..523: note = uncultivated organism
MNFAIYARKSIYSDKSDSIKNQVRMCREYIRMKYNDIGSVLEYYDEGLTGANTNRPELQRLLADIKDGLIDVLAVYQLDRLSRDVRDFSNICGLLNEKRVEFISVKENIDTSTPIGKAMTYITMVFAQLERESIAQRVTDNMIGLAKRGYWTGGNPPYGYVRQRINVEGKKHVTIVADPDAVKWVKGIFADFLDNEYSLQGMETAYKRAGIKTQNGAFFSTTQLYKILTMPYCVADTPEVYDYYESLGCIMDADSPRSAWDGTHGVMIYGRSTEKNKKHELQPKSAWQVCIGHHEPFMDADTWLKAQAQLKRNKFVRKRVYDIPLLKGTLRCGKCGRLMQVSRKKRVDGSVFSAYYCLTRMRKGIEFCDVGQTDITLLDREVMAVFAGIEADPKMIEQYAKDPDDAQTDALVDYTEEIATMDAQIGRLTRSLADAEESSAAKYIVAEIERLDRDISALRREQELQEIKQKREKNRQKSTSQKAQDIKNIMKDLSGFTADEKNRVVKEVVRELTWDGDTLFIKL

SEQ ID NO: 1941 - protein, 675 aa, unidentified
  source 1..675: note = uncultivated organism
MEDTYCSRKGKKCVIYIRVSSERQVKGYSLEGQKRYLKEWAEFEGMTVSNIYVEPGKSGKSITGREVFQMMLNDISSGSVEADYVLVFKLSRFGRNAKDILNSLTYIKRYGVNLICKEDGLDSSTSMGKMMITILGAVAEMERENILAQTMLGREEKAKQGGWNGGFAPYGYELSDGKLHIKEDEATIVRLVFDKFVNGGMGYSTIAGYLNRQDIPKMPSKNSHGRKFVDWSIHHIKRMLDNPVYTGRIAFGRTRLERVEGTENEYRRVKSDDYILSDEVVHEPIISDELFEAAKRKRQETTTTGNPRVGRYAKHLLSGILKCPMCGSSMYADIVQWKNKDGKVMQKNKYQCGHYAKSKFGQCQKNTISAEWIEGEVIAYTKLLVRNKQFAEEIQSKLGNKTDVTEIDKELDNYHKLIKKLEKSKSNLERDIDAIYDDDKYAERKRQDMNNRLNKIYEEIYDIEDRITDSEKKKEAAQQDVLTKENVFKMLLVFDKIFDKMNDVDKRKLIESMIAEVHLHPKETWEEGKNPIKEIKYAFPVSKEVMDALRENVASVETVVLLSKGAKGPVDLCSARTEVERRMVDSRKVKVDFSLEDMDLSEFKEKATYEQIKAYVLEQTGLKVSSLCIAQIKKKCGLDVGENFNLPKSENARQPKCTPEKEDAIMQAFRHFGII

SEQ ID NO: 1942 - protein, 500 aa, unidentified
  source 1..500: note = uncultivated organism
MKVVIYARFSSSSQREASIEEQVKICREYAEKNKYAVVKVYSDNAISGKIDNRPQLQKLLSDSSKQTFDAVLVYSIDRFGRDLTQTLLNEKRLNENNVVLISATEHFTDDASGRFFRNIMMSYAQYYSDELSAKIHRGMDYNAERCLYNGGGVPLGYRINKNKQFEIDPATAPAVKIIFEMYSDGKTITQITQYLNEHGYRTSSGVAFNKNSLHTILKNKRYLGYYIHSGVEIAGGIPQIISNDLFEKVAEKMAVNKKAPARARAKEEYLLTTKLFCGHCKEMMTGFSGTGKQGKIYRYYICNGTKRKPKTCDKKMVHKDYIENIVVNECRRLLSIENIRRIAKSVVEISEAEKDTTNLKRLKKLLTENERKHENTLNAIMESDIESVRKALGAKIPMLEQEHMELERMIAVEEEPYPIITEETVMLFLVALKKGKVDDIKYRKTLIDIFVNRIYLYDDRVTITYNSGDEPVTITDALLSELEDIAGDEKVLFKDGSGPP

SEQ ID NO: 1943 - protein, 543 aa, unidentified
  source 1..543: note = uncultivated organism
MGEVRCAIYTRKSTDEGLEKEFNTLEAQREASENFIKSQKHQGWVLIDEHYDDGGYSGGNMKRPALERLLKDIADNKVDMIVVYKIDRLTRSLTDFAKMVDVFEKHQCSFVSVTQNFNTADSMGRLTLNMLLSFAQFEREIGAERVRDKIAASKKKGIWMGGGVPYGYEVIDRKLVIKPEEAKEIRFMYDMYIQYKSAQAVSELMEEKGYKKLARTAIYRMIQNPIYMGKIKHKDIVYDGQHEGIVSQEVFMEAQEVSEKRPSTQRICLFNNNEVGIMRGLLTCGCCHASMTPTASQAHGTKRYYYTSNIAKTHGYHRCTNGAVQQAAMDDCMIKIVSQLLQDPKVFQALIEKVAPNKTMELFRILRTPEKVLYKLADRYKLLLMRLLITGVTLNYETMEINWTDLGLSLLSESLLQSTSGHQTVLPIPFVKHKGHTEIHLPDNIMANPHFDNELIKGICLGFRYQKMIDQTHRSIAEVSIKENIDAGYLSRLLRLTSLSPAIIRTILKGHQPPKFYLRTLMRSDIPPLWEDQEKKYGFTILD

SEQ ID NO: 1944 - protein, 568 aa, unidentified
  source 1..568: note = uncultivated organism
MSMVNELCTNNKEWSGKKKRIWQAALYVRLSREDGDKEESDSVSNQKALLHQFVELETDIEVSDVYVDDGWSGTNFERPEFSRMMSDIKAGKIECVIVKDLSRLGRNYIEVGQYIEKIFPLMDIRFISITDNLDSYKNPQTMNNIIVPFKNLINDEYCRDISNKVRSSLDMKRKQGKHIGSFACYGYLKDPEDHNHLVIDEEAATVVRDIFRWYISGMSILSIAQKLNAMGILNPSAYKRSIGLHYRRPNDQFSDNKWVDSSVRRILGNQMYIGNLVQGVLKIKSYKIQVAQKVDKSDWIIVEGTHEPIISKEDYETVQALLKRRTRKAPQKKEVYLFSGFVKCGDCGRSMSRKHYHHDYGEYTYFVCTTHVKFDKTACSKHTTRADKLEEIVLSAIQSQIALAVDMEQAIKEINTNENVNKEAVRLKKLLEKAKGEIQKADGMMLDLYPDWKSGIISRAEYIKLKERFELQKQNAVEKMNSYQDQIEKAEKGQDSSNEFLEHFIKYRNIDKLTRDVLVALVDMIYIYEDKKVKIAFKYQNPFKDALEYIENNKEVLDKDTVDALLGA

SEQ ID NO: 1945 - protein, 510 aa, unidentified
  source 1..510: note = uncultivated organism
MKPATKYCAVYTRKSTDERLEMEFNSLDAQRESCLAYIASQKAEGWQPVKKLYDDGGFSGRNIGRPALTELLADIKAGKVNIVVVYKIDRLTRSLMDFAKLVEIFDGHGVTFVSVTQSFNTTTSMGRLTLNVLLSFAQFEREVAGERIRDKIAASKRKGMFMGGVPPLGYRVENRQLLVDEQNAKITKHIFERYLALGSTLDLAAELKEKNIKSPDRVSEKGLKYDGAIFSKGALHQILTNPMYIGKTRHKDALYDGQHKGIISVDMWSKVQDKLQNGAVSARGSTKAPDESLLRKILVDADGRSYRATFTNKSGKRYRYYACEKIDGAVSKLPAHEIETIVENDIRSCLCDIKKTAEIFHLDEEYDNYLLNKIIECSPCIPTSDLLGTAVKKVILTEMKVIISLDMAGLRKLILNHAKADFPNGEFKSTHELVVPYKKTRASKGAIVIKPEGGKKDMLDLPPQELKKLIQGFAWRDEHFNGLTIRQIAQREKVSDSYVGTQIFQTFEVR

SEQ ID NO: 1946 - protein, 546 aa, unidentified
  source 1..546: note = uncultivated organism
MPLTSPGTGRWRTQLTFEALNVRKTVPVTTAQTRRRPKAKSGTTPVALPRIAVYTRLSRSSEASVSISKQRTACEARAKERTGSMQYDPRPWRQGGDYYEDNDKSAYQSSVVRPSFDALLERMEEYRGGVVIFYALDRLVRRTRQWLDFYEAAEEHEVNLISTTQAIDTTTPHGRVFAAVLVQFAQLESDTIASRVRSAQEVIVRSGRFRGGTPNFGYTTALRENHGWVLALKPREADTLRKGADLILDGATLTEAAATLNRTGHTNRKGGPIRGPNLSKWLRNPATGGDSIWRSNVARDAEGERTTWIEEPVLESARWRRVVAALDTNHPAGQGSGRRTNDILLTGLVQCGLCGSRMNGSGSPKGTYGCYAAGDGSGTCRYNTISRQGLEAYVTTWAVERLSPEAISAGEKERRKGDKESKRALQLRRDIEETTEALNRLEDDRAAGIYDEQRSLARYRRRYGQTTEMLGRLENEIAAVELRQARMTALVAKPLTLAEWDALDIDQRRTTLRAIIDHVSVGPSAKGRRSGPKFDAGRVTIAPAQD

SEQ ID NO: 1947 - protein, 529 aa, unidentified
  source 1..529: note = uncultivated organism
MKRSNDKRTAGQPIRCAIYTRKSTEHGLDLEFNSLDAQREACEAYVKSQASEGWQVIKEHYDDPAYSGGNMERPALKRLLKAIEAGLVDVVVVYKIDRLTRSLADFAKLVEAFDAKTISFVAVTQQFNTTTSMGRLTLNVLLSFAQFERELASERVKDKVAASRKKGKWMGGNVPLGYDAIDKKLVINPAEAKIVRMIFDRYLAVKSLQKVIDEMHANGIVSRRRYVKDKQTGGVPFTYGPLAYLLKNRTYLGESGHGGKWFAGEHDPIVDKKTFQAVQNLIKENSAGRSGKRYRNGALLTGVLYDDRGHRMSPSFSVKNGVRYPFYVSQALLKGRKTEAGAVARITASAIEATVLHTIGAADPDETPQSTNPRDLLESLIERMVITPDGITLTFADKRPPLHVQRQWKDAKNIYGPPHHARPDQADPKGQALIHSIVQAHRWVEMVLSGDVNDLDELAKQENVHPKIIRNRIRLAFLAPHVVSAMLEASSSQPQADRSNEFALKWSDQRERSSAIKESSNSSLSATTP

SEQ ID NO: 1948 - protein, 560 aa, unidentified
  source 1..560: note = uncultivated organism
MARTSKYRQAYSSAASQSRWRVGLYIRISREDGDRIESESIASQRALLQRFAEERPDMQLFDCYTDDGFSGTDFNRPDFQRMIKDAANKKINCIIVKDLSRFGRNYVEAGKYLETVFPLFGVRFIAVNDQIDSVASPASVNNIIVPFKNIINDEYCRDISIKVRSALDIRRRQGKFIGSFAPYGYRKDEADRSKLVIDDGAAQIVRFIFKEFLSGNGISAIVRSLNARSVPNPTAYKRSKGLSCNRNSENSSLWVDSTVRRILLNQLYIGNLVQKKNEVISYKIHKTRAVDSASRIVVENTHTPIISKADFAKAQQLLSRDTRTSPKTGKLSVFAGLVKCADCGRAMQKRTVVQPNKAYSYYVCSTYKKLDKTACTKHAVRIDVLEAAVLEVINRYIAFAVNYQSLSQRVRLARSGGGTASRITAELNARRGELLKAQRLLTEIYPDFKSGILSREQYFALKERYENMCSSTQAAIEALQRELNGLKDEEEGINEFIACFGKYAQLKQLTREAAVELIDNIYIREGGKIDLHLKFRDIYLAAEHSLNNADNNAEKAALRK

SEQ ID NO: 1949 - protein, 539 aa, unidentified
  source 1..539: note = uncultivated organism
MIAQRNYQVGIYARLSRDDERFGESVSIENQKLMLTQYCEQQGWTISDYYVDDGWTGTNFNRPDFQRLIDDVQNKQINLVIVKDLSRLGRDYIEVGRYTDCVFPYYDCRFIALNDGVDTLRQNDDVSMIIKNVFNDIYARDTSKKIRAVRKSNAESGKFMGQKAPYGYQKSAQDKHKLEIDPVAAAVVQRIFSLRRGGNGYQMIARILNQEGVMPPYDYHFSSRGEANPYPTNHLWSRETVKSIIRNEAYIGNMVQLKQGSISYKDHRQKNKPKEDWVHVENTHDPIIDMDTWEAVRAMDGGGFKPRVTNNGVVGLFSGFLRCADCGYGMKRNVSHKTRSGGVVRAYVSYLCINYNQSGKVACSSHAISEEPLKAVVLHDIQEKIAMIDIDEVSMIKAIQSQRSKISKDAYQLQLAERTNLEKRLGELARLIQALYEDKVSGEVPPSVYAKLMPQYEAETQEKEARLKEVTAELSAVQEITSEAEDWVARMKQYRDVKELSRELLANLIDKIEIGESHIVDGQKQREIRIHYKFVGWIG

SEQ ID NO: 1950 - protein, 605 aa, unidentified
  source 1..605: note = uncultivated organism
MDNEKKIAGLYIRVSTEDQAREGFSLPEQEKRLRAMCEYKGYEIYKVYKDAGISAKTGNTRPAFEELLQDIRDKKCNTIVVLKLDRLTRSVFDWEKIIRFLEENDAYLDCANDDINTTNANGKMISRILTSVSQNEIERTSERTKIGLAGAIKEGHIPGHTPFGYKRDGKLMIPDITTKHIIERMYQLYFEGNSYQTIANIFNAENVGNKRWRDNTILEMIENPIYKGDYIHGKTTYYEDVVEPIISKEMWENCQVQQLKNSRSYMRYQTYLFLQKLKCPVCGRIMGGKATYKKKFDRTYYYYGCNECKNNIKEDFIEESILDLLGDIFEYDSVVNEFFLPMIKSKISNPKEQIEKEIKNQQAKRERIKQAYINGSFTLEEHDKEVKYVDETIAELERQILEQEQIKELKFTPEDILIKRDMDFINRVKLPMLYKAIVECWEDLDREEKSRIIMNYIDDIKLTKNNKGQYVVDSVNFRTTFYKDFKKLYDDGFIDWKRKFIYDFNGIRIGSKIRYSEYLPFKKVYEHIKRLSDCYDVSFYKGTYYKDTEKVDMLPLKKGEVIVRMFPTEEDDSNKDKIGMGMICVSDSPNDIHVDYHDLFESIPE

SEQ ID NO: 1951 - protein, 521 aa, unidentified
  source 1..521: note = uncultivated organism
MKRITKIEPTQSKEVHKTRVAAYCRVSTGKDEQLESLKTQRSHYEEYIKEHDDWEFAGLYYDEGITGTKKELRADLLRMLEDCREGKIDFILTKSISRFSRNKIDCLSMVRELLGLGIGIYFEKENINTKTMNDEFLLTILSSIAEAESQSISSNEKWGVIKRMQAGTFKQGMAPYGYDTKDGTLVINEEQAEIVRFIFKRTLAGAGSYKLAQELNEKSIPSPGNKKWYPGSVKGILRNERYIGDCLYQKTYTTESFVKKKNKGEVDQYYVENHHEPIISREDYERVQDLIDQRCADKNVDVGSEKYNARYPFTHKLKCGECGSYLKHKYINGRVSGRYEAWACSGHILDKNSCSLKAIPQECIEAAFTTMLNKLIFSKKKLLDPFLKTVKNIDAGGISDRLAEIEEELDQNAKKDAAISNLAASGVLDAGAFMNAQAEIKAKRLELNTEKSMLAMRLTEGYKSNAEAIRLVQLIDHLTISTEFNKEAFESMVETAIVHSRTDISFKLKCGLEFHEEVKLK

SEQ ID NO: 1952 - protein, 509 aa, unidentified
  source 1..509: note = uncultivated organism
MRIAIYSRKSIETDTGESIKNQIEICKRYFKRENQECKFEVFEDEGFSGGNTNRPDFKRMMELVKAKQFDAVAVYKIDRIARNIVDFVNTFDNLEKLNVKLVSVTEGFDPSTPIGKMMMMLLASFAEMERMNIAQRVKDNMKELAKLGRWSGGTAPTGYIVEKVKEGTKIVSYLKLMESEADNIREIFLKYSQGYTAFEISKFFESKGFQYKFNIIYNMITNPTYLISTPESIKYLENQGYAVYGEPNGCGFLPYNRRPRKNGVKSWKDKGRFVGVSQHKAVIDLDLWILVQERLDKKAVEPHPHESQFSFLTGGIMKCKCGGGLGVSVSAKRADGTRRYYFICRSDRYRKSDCENLSIRVEKAEQEVRNFLQSICDKKILNEYMKKSNEVKNINSVIKGVNKKISENKRAIDSLIDKLILFSEEAAKEVTKRIEELTKTNNLLKEELLKLEREKIFSEVDNNNVDATYMNIKQFLATDELEDKRRLIKLIVDKIVWDSDENELRIFLS

SEQ ID NO: 1953 - protein, 539 aa, unidentified
  source 1..539: note = uncultivated organism
MAVRVRCAIYTRKSTEDGLEQAFNSLDAQREACAAFILSQKHEGWTLVPHLYDDGGFSGGSMERPALQRLLADVETGRVEVIVVYKVDRLTRSLADFAKIVAVLDGKGASFVSVTQAFNTTTSMGRLTLNVLLSFAQFEREVTGERIRDKIAASKKKGLWMGGPVPLGYEVRDRKLVVNPAEAAAVLDIMQRYLRSASANILIEELEQAGIRTKVQHRVSGPHRGGIPFRRGSLYHLLKNPVYRGFIVHKGNTYPGEHEAIVDEELWAAVQDKLAGNAAARKTKVNMRHNALLAALLFDAENRPMVFSHTAKGQVRYRYYASRRDPDDKRPATRVTAETIEQVVLEQVRNWLRVPSNRQASTSAHELADALSDDSRRHDALRRIVDSITMEDDRLALRVRQPTMEEVNNADEHRDDIISEITVPFRPERWVRDRRDVYGAAPAASPDRNAHALLKLVRKAMDAQALVLENPAMSLAAIAASQKMDRRQLGRLVKLSWLSPSIIERIHAGDVPRSLTRSRLLEADLPLDWDQQERVLGFC

SEQ ID NO: 1954 - protein, 621 aa, unidentified
  source 1..621: note = uncultivated organism
MIYNRNTILTKSKKVGRKMAKRKLNCYIYTRVSTELQLDGYSLEAQKERLRKEASHRGMRIVGEYSDEGKSGKNVAGRPEFRKMLADIKSGKDNVDYVLVFKLSRFGRNTADTLNSLQYMEDYGVNLLCVEDNIDSAGASGKLMISVLAAVAEIERENIKEQTMAGRQQKARDGLWNGGFAPYGYKLVNVDGQKSKMLVVDEEEAKLIRLIYEKYLQGMGVNAVAKWLNENGYTKTVRQNGTVPNISAHFVTNVLDNPVYCGKISYGRRRTEKIDGTRNEFHVVKQDKESYKLYQGQHEAIIDEDTWYRVQVKRKKNAFKREKTHSLLHEHILSGIIKCPVCGSSMYGVVNRKKKKGSDEFYTDMWYYLCKNRKMVSGHLCDYKKHIRQDEINAEVIQLVKYVFCGENDMKDQILKKLGSDDSLSELLQEKERLTKEHEKLDSKKSKQLRRINELDIDDELYDDLMKTYRAGVQEINEQIAMIENQMYQNDLSIENAQGENLSAEVYKRIIDEMLDHIDDMPDSDKKLMMNLLIEKVEIYEEKQKDGRWVKSVQFKIPLNIDGKVVDTMFFDDDEDTENSLYNEKHVETVCLLGKRKPDAKVKIGIDMDDYYRIRDNAESK

SEQ ID NO: 1955 - protein, 545 aa, unidentified
  source 1..545: note = uncultivated organism
MKPLRCAVYTRKSTENGLEQEFNSLDAQREACEAYILSQRHEGWSLVPDHYDDGGYSGGNMDRPGLKALLDEIDAGRVDVIVVYKVDRLTRSLADFAKIVERLDAKAASFVSITQAFNTTTSMGRLTLNVLLSFAQFEREVTGERIRDKIAASKRKGIWMGGPVPLGYEVVERKLVVVPEEAERVRYIMRCYLEERAAPQLLGRLARERIVTKIQNRVSGPHRGGIPFARGSLFHLLHNAIYRGKIVHKGQVYDGEHRPIVDEELWNAVQAKLKEKAPPRKRDTNDPQPALLRGLLIDQQGRPIVGTYTSRGTRRYAHYETRKDLARPDHPPSTRFRRGQLDQHVIDHLFILLMDDHALRRISGLTEGDQLRTLFATARQLSARLEQRPYIEDTARSLITRIQVHADELEISINCKALGFDHSATLSWSIPRPARKPFREAKLRIDGSEKGKEPNRPLIDLLAQAREVQQLVMASPELALHQLAKREGRCRKQLTKLLRISYLSPRIVEAILKGTQPKAITRKQLLGIELPIIWTQQEELFGLAA

SEQ ID NO: 1956 - protein, 534 aa, unidentified
  source 1..534: note = uncultivated organism
MQNNRVYCLYRVSTDKQVDFNSEHEADIPMQRKACHRFAAEHGWTIIHEEQEEGISGHKVRAEHRDKLQIIKDHARQGKFDILLVFMFDRIGRIADETPFVVEWFVKNGIQVWSTQEGEQRFDNHTDKLLNYIRFWQADGESEKTSVRTRTSLHQMTEEGHFTGGLAPYGYDLVKSGRINKRKHELYELAINADEATVVRMIFEKYVNEGYGAQRIATWLNEQGYRARSGKPWHHASIRGMLCNLTYTGVLRCGEARSEILPELTIIDSAQFEAAQEIRQARANHAEENRTVPLNTRGRSLLAGNVYCAHCGARLNLTTNGKYRKRADGSVDKTPRIRYICYGKTRKQTECDGPTGYTMHVLDGIIDQVVHRIFSQIRGVSKHEMLSSRYQEEVQRRKAKLKDAKAAYDKAERDLASLKAEIVKCIQGESSFCQDVLAELIQNTEQNCKELSQTMEDAAAELQDAEEILSVVTSQYDELISFAELYDSASIETKKMIVNCLINRVEVGRGYKLNIEFNFHLSQFFCGLDLDASA

SEQ ID NO: 1957 - protein, 568 aa, unidentified
  source 1..568: note = uncultivated organism
MSTVNNVQLKSRGRSGKDKIWQAALYVRLSREDGDKEESDSVVNQKDLLQQFVSLEPDIMVYDIYMDDGWSGTSFERPDFIRMMNDMKEKKINCVVVKDLSRFGRNYIDVGQYIEKIFPLMDIRFISITDNLDSVKNPQTMNNIMVPFKNLINDEYCRDISNKVRSSLDMKRKQGKHIGSFACYGYKKDPDDHNHLVIDEEAAEIVRDIFRWYISGMSILSIAQKLNELRIPNPSNYKKMIGLKYKNRYEKISNGKWPDSSVRRILGNQMYIGNLVQGVQKIKSYKVQVAQRQEKDDWIIVENTHEPIICKEDFELVQELLDRNTRKAPTKKEVYLFSGFVKCGDCERSMSRKHHQHDYGEYTYYVCTTYTKLDKTACSKHTIRADKLEAIVLASIQSQIALAVDMEKAIKRINSSTQANKESVRLCKMLEQAKREAEQAEKMMIDLYPDWKSGVISKDEYIKLKERFGDQKFAALQRIQELQAKIEDAVGGQDSTNQFLESFIKYKNIDKLTREVIVALIDMIYIYEGNRIKIVFKYQYPFKAAREYIENNKELLDSLQANTLLGVS

SEQ ID NO: 1958 - protein, 532 aa, unidentified
  source 1..532: note = uncultivated organism
MKKIRYVNYGRVSSIRQKQEDTIEMQKRALHEYAKLHQLTIVGEYYDEAQSGTLPMEERPEGRRLLEDAKKGLFDAVLFYRTDRLGRSTFEGLRIAKTLEQLNIGIRSITENYDTTNPNSKLYFTMLLALAENELQSIKMRLNDGKQRKYHDGKYLVAKAPWGFVKKNQCLVLDTSTLPGTTYTPAGVVQLIFQKTAYEDYGQVRLAVYLDSLGIPAPNQQHWTYGSINRILKNPKYKGEMIVNGLSKYYEPFTISVPPIVSPQLYEDAQKAMKKRKSQHKRTGKTYLLGYGLLRCGYCGQAYSGFTRSHNQTPAYRCAGSVSRAEYYENRKRCTKSSVIDAAYIEGLVWNHAVHLLTHKDSLQKELRKQLQTHSPNALKKGKEKELQALQKRQNDLKSERKRLVSNLIKQRLTENEFDELAESIKQETERVAQKIQEYQKQTIDVIDIEATIQKAMVFYEALAQELEHPLTFERKYKVLHNMFEKIEVYTSRKSVKTSMYNKINDFIVLKNTLQPHHIDAATRHLVRRQRV

SEQ ID NO: 1959 - protein, 598 aa, unidentified
  source 1..598: note = uncultivated organism
MNMLDKIRARKQVVRAVIYARFSSDNQRDESIDAQIRAISEYAKKNEIVIVGEYIDKARSAMTDNRPEFLRMISEASEQKFDIVLVHKLDRFARNRQDSIGYRMQLKRHGVSLVSVLEYIDESPESIILESVLEAMAEYYSKNLAREVQKGMKENALKGLHTGGKPPFGYDVDPETKKLVINEKEACAVRLIFDRFLEGYGYDKIMNELNVHGYRTKCGNPFGKNSLHGIVRNEKYTGTYIFNRSAAKDVDGKRNNHKNKDDDEIIRLDDAVPAIISKNIFEQVQRKIVARKNNKPSNKAKEVYLLSGKIYCGECGYSMGGNKKMSGRSKTPHVTYRCMGKKNRHICDNKEMRREYIETYVLEKLSEYVFDERLISKLVKEYVAYQNSTNSDVIAKKESIKSRLNEVAREAKNLINIMAKTGSNMILERITELEEEKSILQASYEKICFDNSTPDITEDELSERFNQAKSMLKYGTLSETKKLIELFVNKVNVFSDRVEVIFNFHPDLIPYETFDIKKDCLHNEKQEENDESPSDEDELTYKMEVSTLVGGYCGGGEENRTPVRKALAEAFYERIRLFTFPHQHAKRQACQFSSFINS

SEQ ID NO: 1960 - protein, 564 aa, unidentified
  source 1..564: note = uncultivated organism
MRCAIYTRVSTDEQARSEYSSLERQKEVCASYIEIQKEKGWHLAGVYEDGGYSGKDLSRPGLQELLQDVRDRKIDVVVTYKIDRISRSLKDFYEFWEVLKEHGVSFVSATQHFDTSDSTGMLMLNILLSFAQFERELTRERTLSKMAGRAEKGLWNGGYVPIGFDYSRETQQLRRNEREAETVTFVFRRLVETRSPSTVANEANSLGYRTKRRTVVRRQGSSQEVGGKRFDEDTVKAIVRNPIYKGFIRYNGDLYPGNHEPIVDQETWEQANRAIGNGREGNGLHYKDDHVHLLKGILRCGPCGLAMTPYPSGKKTKDGRPYLYYACTSVTQDGSYSGCSVRALPAREFEALIKQVLADLGNNPSILQACVDAANRDATRSLTSLQKEQRRHQEEIGKLTVGIRRIIEVMKQEDMLSEDVREEYKQLVREKERLLALCEKLQLDIERQQKRVVDAEIIRRSLQDFERLVNLLPLEDQKELFQLLIREVEVHLFDPAKEKLPKARGAFATRVRSKWYRVNVTLHQLPGVDLGEQAYIVSSDNKRTGSPGRTRTCNLAVNSRPLYH

SEQ ID NO: 1961 - protein, 576 aa, unidentified
  source 1..576: note = uncultivated organism
MTKRNRIAIYARKSVDKDTNSVSIEMQIEACRKKAAEYDPKAIVDEYSDTGYSGKNVKRPDFQKMLELVKLKKYDAVIIYKIDRISRSTVDFVGIYEELKKSETKIIAVEDPLDTTTPLGEGMMMILAVFAELERNAISTRITSAFSASAKNDGRYLGGSAPVGYKRHRNELNHPSLIIDQPKADMVIDLYNKYAYDINCSLYELTAYLAERWGVEKYAGAIRTILTNEKYVKADNKIYKYWQSQGVQILRPQSEWTGARACYTINTLVHHRDGRTTPRPKAQWQVALANWEGFVDSDTWLIVQDRLAKNKMIPTGTIVNKRKWRELTGLIKCGECGSSIRIVGDYRNISCARKWKGKGLDTCTQRFTKLRPETVHANVAEKIQKYLDNDDLRNSKNLIEKSYESQIQVMQDNISRLAKTIADNPSPALMAELAKREKQLQDMQYKVVQNYNSNDDLVRARIQKFAKDGKIIYADLDDEQKAELLKILLKEIKLYRDGTVVFAWADGISKDPDDAMALARLDYEKSESERIEKEKAKMKIMQLAKDAGIDVNIDEINNNTYNPDDDPDIIWEEVDK

SEQ ID NO: 1962 - protein, 520 aa, unidentified
  source 1..520: note = uncultivated organism
MPQIQQLRYAPIIDDRPLRVAAYCRVSSDSEDQLNSYAAQIAFYTEYIGQRPDWELVDIYADEGLTGTKTEKRDDLKRLINDCRRGKIDKVIVKSVSRFARNTYDSIYLTRQLKSYGTGVYFEEQNIDTADMNDETMLAMQSMSAQGESMTISQNMRWSYRDRMEKGEFVGTISSYGYKLVDGTLEIFEPEAVIVRRIFDMYLSGMGKQAIANILNTEGVPRRYGNEKWSANSSVHYILTNERYIGDALLQKHYTTEFPFRKVLNKGQMPQYYVENSHPPIISREIFDAAKRRIEEKKKYTRSDTQHRLTGKLICPDCGHPFRRQIVNGTVYWVCAHQTSGRTQCQPLRYPEETVYTLFPLLVNKLAANRDDILTPLIGQLERMQSRGSSIQKQVYEIDKQIADLNEQNHIVAKHHAMGFMDAAEYAAQNGAVNNRVSALRAQRRKLLAEDENDEMIDGLKMLDAFIAKLDAVQINFDESLFAEIVTHIKAVSNTELRFRLIGGLELTETLSRTERRPTK

SEQ ID NO: 1963 - protein, 570 aa, unidentified
  source 1..570: note = uncultivated organism
MAKQKVAIYARVSSQEQAVEGVSIEAQIAALKAYAKSQDWEIADQYIDAGYSGGTDERPAMRRLLSDAGLDKFQIIAVCKLDRFFRNLRLLLNHLYSLEQIGIKFVATQEGLDTTNAYGKFAVQIMGVIAEFERGRIGERVRDSLQYRISLGRWPGGQTVYGYRWLYDKNEWEIDENEAAVVRYIYDLYLKENLGTMKIPFRLNEEGYHTRRGYRWGFSIVYNILSHSAYKGAHPKGYKMPAIIDEETWEMARAKRREARHVRKAVHNWLLQGRCICGECGHVLGCQQKDATERRYYGCPGRSKDTHLDGSPRCKLPRMKADLLERAVWERLKLVLTDSETLRESIRRTLTELKERREHLYQSTGSVDQKLEAIVAKKERLGLSFADGAISRETYQKKLQEAARIEKDLLNSRDNLSPDDRSEIGELDQAIASLEKTLNSESVKILLTELGIQVAYTPEGWITGYDVPGVVEGLENWAVVEAPDTLRIPEMGMTMSIVDRLESNWNLEVTRDTIWRNIRETFNRLSIKVYIFNDRVEIRGHIPTEIINISHEDARSRREPIICSGRGLGG

SEQ ID NO: 1964 - protein, 517 aa, unidentified
  source 1..517: note = uncultivated organism
MSRKKEKPAAPALRCAIYTRKSTEEGLEQEYNTLDAQRDAGESYVKSQTHEGWACLESRYDDGGYTGANMDRPALRRLLADIEAGKIDCVVVYKVDRLSRSLLDFARIMETFDRHNVAFVSVTQAFNTASSMGRLVLNVLLSFAQFEREMISERTRDKIAAARRKGKWSGGMPVLGYGVDQTKLVVDPEEAERVREIFSLYLDRESLLDVVKELNERDWRTKRWTTKKGTERGGRPFDKNSLYNLLTNVVYVGKVRYKDEVHDGEHEPIVEHETFARVQAMLRRNGKSGGRATRNKYNALLRGLIRCEACGCGMSHTYSSKRNRQYRYYVCTRAQQCGWQQCPTPSIPAGEIERFVIDQLRAIGRDPTIVRETLDITRRQAEERIGELKAERSILRNELNDGHSRLVDLATSGAGDPERIEVQDRIRRAERRLTEIEDDLLVLEGQVVGEADVVAALGDFDAVWACLAPKEQARIVELLVERVAYDADEGTVAVSFRPAGIKALAGGLAQQLEEAAA

SEQ ID NO: 1965 - protein, 552 aa, unidentified
  source 1..552: note = uncultivated organism
MARKSRKPQASELLLPEQKAICAALYIRLSVEDNQSGSSSIETQKLILNRYIDSAPEIFVYDTYIDNGATGTNFHRPDFQRMLADVEAGLINCIIVKDLSRLGRNAIDTGYYIEQYFPAHNVRFIAINDHYDSDDPDSAHSGILIPLKNMINEAYALDIGKKIKAQQRQAMKDGDFIGSRPPYGYLKAPDNCHQLVINPETAPVVKQMFEWAAAGESITGITRRLNKAGIATPGSYQKHIRDTSEKSAAADTGIWQSRTINRILRLETYTGCLVQGHTKMIDHKQIKADADNLIKVSNTHEGIISKELFLEVQSILANTALKCGMSKVSANTPNLLKGKVFCAHCGGSLHRQKKSRKLSDDVYYYCCISNNRVASGCIGAYIREEPLLTALVDILQRQLEATLGAYSLLLPTGEEQNMYLSELSSQHGESQQAVLEYRSRIRGLYENFVQGLITSEEYSEFKRRYEERISAHEQEVSRLDKEHKLLLLKQARQKALTLDLNLLKTNPTLTSDLISRLIERIDVSDSKHFEVKFLFQDEFANIKEALSKCAHI

SEQ ID NO: 1966 - protein, 521 aa, unidentified
  source 1..521: note = uncultivated organism
MTCAIYCRLSKEDENTLQESESIQNQKNLLVNHAVQQEWDIFNIYCDDDYSGADGNRPEWNKMLRAAQAGRFQIVLCKNQSRFTRDLEMVEKYIHGLFPMWGIRFVALLDNVDTDVKGNKKARQINGLINEWYLEDLSENVRAVLDQKRRAGKYIGSFPAYGYRKDPADRNHLVVDEEAAEIVRKIYGLYLSGMGTHAIAHRLNEAGIPNPSRYKQDKGTGYVNGNAATGHQGCWNGTSVARILKNEVYNGNLVQGKKRKASYKSKRLLDVPKDQWFRAEGTHEAVIDRETFDAVQHRIGNRVRSDGTGKTHMLAGKVKCADCGSTMQRLTHTYKGTQKSYLQCKLYAVTRKAPRCTGHTIRLDKLTEVIQERIRAYTAEFYELSDLRRFRVEADYQIRNERAKKEIALLRRQEAQLQEALKNLYLDKVDGLVTTEQFLEMNNGLLANKQLKAKRISALEKQLGDTGRQRKDDSALQVQVSELITMQTVSRELVDLLIDSIEVGEKDKETARQQVKINWRI

SEQ ID NO: 1967 - protein, 502 aa, unidentified
  source 1..502: note = uncultivated organism
MYDAIYARQSIEKIDSISVESQIDFCSYETRGGKYKKYIDKGFSGKNTNRPAFEEMLKDIEKGLIKRVIVYKLDRISRSILDFSNMMEVFQKYHVEFVSSTEKFDTSTPIGRAMLNICIVFAQLERETIQKRVADAYYSRSKKGFYMGGRIPYGFSLKETVIDGVKTAKYEPVEDEMEQIKIMYSIYSQPNKTLGDVLRYFSAHDLKHLRGKVWCTARISELLRNPIYVKADSEIYDFYKNQGSNVINDAADFVGENACYLYKGETDNRKQYSLENKHLVLAPHKGIVSSTEWLKCRMKCINNRQVATSHKAKNSWLVGKVKCGNCGYALVVRKSDRRRKTIVRYFVCSHKTSSGLCDGCGTVRADDLESFMFESIKNKLADFKVLIDTSEHIFDPKINEYKIKLSQINKEIDDLLKKVITANSVLMQYINEHIEKLDEERKQISEKLISLSKGSTDTDISAITDYISHWDETSLEDKILVVDALIKVIHIADGKIEITWKI

SEQ ID NO: 1968 - protein, 604 aa, unidentified
  source 1..604: note = uncultivated organism
MQEAKVELDLRSIAIYSRKSAVTHKGDSIANQKENCLNFVKCSGRCSDKDSIIYYEDLGISGATTARPQFNQMLKDVKDNKIKIVVAYKLDRISRQLADLAELMNFLKKYNCLLLISSDNICSDSAASEMMMLLLGVFAEFERNILKERIIDNLNEYAKNGQWLGGRTPLGYDSEKREVGIGKKRTTVCYLRQNLEEAEIVKFIFDTFIKTRNYKETARVVSKKYKTQKGNEFNARAIQDIIRNPVYCIGDKAIYEYFLAKGGNLYGDIDDYNGKYGIAVYNRTKQELIDDDDSTILEGKRTRKMTFNDESDWIITIGKHNGIIESDKWIQAQTIKEEIADKYNRPHTATNALLSGIIYCPKCNSRLYPRSQSNRYTNGRKRFTYSCTTHERSVKNNTEECDYNSLNGIFLDDYIIEKLSDYFNKNKESYIGKLKKHIKDAIHNDEFEQHIKELQNEINKIEKDIASQVKNLRDAQEEIKAYIFDDINRMKIEQDKLNEELTVLLGKRQDVTLLEKDFDNIMKKISSYEEFLKDSTPEEKVTFIHSIVERIYVYGEDENRKCHIFFRGSTTEEYSDFFENELCDSNDNRQLHSYICRSAIKKRV

SEQ ID NO: 1969 - protein, 500 aa, unidentified
  source 1..500: note = uncultivated organism
MVNEAVIYTRLSAARGGDDETLDDQERTCRQLAESHSLRVAEVFSEGSGVSAFKKNVARPELDALIAFVRQNPGSVVIAWEISRLTRRLSDLSSWIDLVDDFDARIITPQLDTAQSGGRLMLSILATMAEEESRQKSSRVKDGKRRQREAGQYLGGHAPPGYTKVEGRLEIHTAEAEMLREAARLYIDDRLSLRAIAIRFNESGSRTQKGALWNAQVLRRVFTSPLTAGMVAQTDGSLKAAAGLAGGGVLTLERLHKIKLRMESRSKKAASLGARRPASSLLSAGLLRCGGCGSGMTSNRLSKGSDYRCSRYTDGSCDNGVSIRAHLVEPPVLLEALRRIDAAQAAAAHEDDWVALNRIFETFKSLNNPEDDLRRSQLQAERSDLLSRESHINDVFLGGSLSAEGHRAALDKLKASLEAAEIELGLLPDPSTSHPLPINAGEWLNQLADGEITNADLPAAFLTACGSLEMARDVLKSVFESITLNHRKAGLKPVDRLVFV

SEQ ID NO: 1970 - protein, 503 aa, unidentified
  source 1..503: note = uncultivated organism
MAIKKQKDIKTAVIMARYSSDNQHETSIEGQLDVCYKFAKDNNIQIVGEYIDRAVSGTSTKGRKRFMDMIDDSAKGMFDAVIVYKTDRFARNRFDAMFYKKKLQDNGVRVISATQPFTDAPESVIMEGLMEAYDEYYSLELAQKVLRTFALKRRDGQYCGGKPPYGYDINDKKAYIINENQADTVRQIFNMYVGGMSISQIQHKLNNPALDYDKIRRILSNEKYTGTLHHEEEEIKNVIPAIIDEGTFLLAQERHKVAVRNKTYVKSTDVLALANKVYCYHCQSPLIVSSGTSKNTKRYYYYKCNNAKECHFKPINADYLEDTIFENIIYYLSKYSVDIANKTAELVSKELDDNTRKELKSQLKKKELEADKTFDTMVQLGVTERGKEKYHKLEQEIAELKRQLEFANQKEVTPQDILDYMQKLLAIQDTSPDFKHDLLLNIVDKVIVSNRVITVYCNNSNNGANIPENEKFAKSVSGSPYELNYELSIYKTHFTILIPRKIA

SEQ ID NO: 1971 - protein, 515 aa, unidentified
  source 1..515: note = uncultivated organism
MDVCLYMRYSSDRQTEQSIEGQNTVCTEFCNQQGYNIVARYIDRATSAFKDTDKRLEFQKMIKDSEKHPWDAVVVYKLDRFARNRYDSATYKNRLKKNGIKVISATENISENPEGVILEAVLEGMAEFYSKELSQKITRGMNESAKKCNSIGGHIALGYKIENKKLVVVESAAQIVREAFDLYAQGWTVADICTRFNNKGYRTAKGAEFNKNSFRSMFKNERYIGVYTYKDLRIEGGVPAIIDKETFETVQQRLVKNGMSPARGKAKVDYLLSGKLFCGHCGNKMVGESGTSKTGEIHNYYTCTTRKRQHTCDKKPVKKEEIEQVVVENALALINPDTIEELAEMAVKAANEEIAKNTLLPSLEAEMQEIEKGIDNLVKMVEKGIVSESIENRIRELETRRKSTHRRILEAQADMLYLEKYQVIYWLEKFVKGDINDEEFRRDVIDMLINSVTIWDDPDGGWKITTAYNLTSVKSKTLHLTKEFGLKESCSTIRESSEPLVWGRMLVVTTKHRVG

SEQ ID NO: 1972 - protein, 523 aa, unidentified
  source 1..523: note = uncultivated organism
MTRQERERPALRRVRCAILTRTSTEEGLDSEFNSLDAQRESGENYIASQKHEGWVALPTLYDDGGYSGATLERPAVQRLLADIEAGKVDCVVVYKLDRLTRSLLDFAKLVEIFDRHKVSFVSVTQHFDTSTSMGRLMVNILLSFAQFEREIIGERIRDKVAATRRKGKYTGGPPVLGYDVDRERKRLVVNPQEAKLVRRIFSDFVKTGSTTVLAQALTAEGYTTKCWVTKEGKHRPGKPWDKVLVYRVLNNPLYIGEVTHKGERYPGEHEPIVPRQLWDQAHSILERNSHARGVRTRTKTPALLRGIIRCAHCGCAMGPTFTKRRGKVYRYYLCVHASKHGPGSCPVGAVPAGEIERAVIEQLRAVFEAPEVVAATVRAAREQRETRLEEVTHQHTAATVALAALREEAQRLMSGALGNSALVAGRLAELTAQVEEQERAVTQADQDIQALSSHVSEREVIEALASLDPVWEELFPAEQERIVQLLVRRVEVGPDGLDLELRAEGLESLAVEMRTRDREEVAA

SEQ ID NO: 1973 - protein, 552 aa, unidentified
  source 1..552: note = uncultivated organism
MKQEPEKPKHLVCAIYTRKSTAEGPEKEFTSLDAQRESAENFIKSQQHEGWSTLPTRYDDGGFTGANTERPALQALMNDIKNNRINCVVVYKVDRLSRSLLDFSQLLEFFDSHGVAFVSVTQQFNTNTSMGRLTLNILLSFAQFEREIISERTKDKMGAARKRGQWLGGRPPFGYHKENKKLIIAPNEAEVVRNIFRIYLEKKSILHVVQTFNDQGLRTRQWTKNSGAVYGGKKYGVSQLQHMLNNRLYIGKVEFGGQIYAGQQPSIIDEETFNQCQKLLAANRVERKPFKHSECFGLLSQLLKCKHCGARLFHTYSMKNQNTKYRYYVCSSAQKRSYSTCPNRSIPAHIIEAEVIEKLREILPVHIKNTPRSPAVEAFLSPVWDTLFNEEKRRTLKDIVKEIECDTVAHKLTFTLLDSPAKIEVDANIRRSKLGRRWRKETGVKTEPSIRQALILAHNIDRLMKEGRIKNTNQAAEWLSLGQSQIHHNLGLLLLAPAIQEEILTGKDDLMEVISEYKVRMISFEMDWSKQMDLWREVKGFTQEAALSLLTD

SEQ ID NO: 1974 - protein, 590 aa, unidentified
  source 1..590: note = uncultivated organism
MNTVTRAKARTRRATSREIAALSMLTRVAFYVRVSSEEQAERATAKNQIDFLHKKYQANFEPDSLEPMQFVGQFVDDGWSGALPVEDRPEGKRLLDLVQARGVDVVISYRLDRLGRRLGVLLDVHEEFERFNVAILSATEPFDTRTPIGQFVFQLLGSIAELERSTIVERFTLGRDRSARDGKFINGPVPIGYDIENERLVPSLRCVEQLACTEADMVRQIFERAAAGESAAALTVWLRAHGVASTKRFIRRDGSESETVKPTWNAGRMQDVIHSPTYYGDRQLNYSGAVLHQDVPPLVSRDVWDQANAYVSGRISKFNAGQNEGYVYLLSGKLFCTSCGWRMVGNYRPPHPRWDKKARLYYKCSSAKASQARRTSNRCTARRNHDGWALESFVLEAIDEYVANPEAALKILREQARERRGTSADQQERVKALRVRLADYERGKTGLLALVRRGQISQEEYLRETASAAEEAGAVRHELELLEADDALSSVIETRLLESVRVLHELHDEWSRARAADDRVALRGMVQTALQEMYLSPDGQVRMAFVFSAPSARETSQSHYKRLWRDDSGGAAGVVRLDLYRSLTGATKPA

SEQ ID NO: 1975 - protein, 553 aa, unidentified
  source 1..553: note = uncultivated organism
MENEINIIILINIYMEVSIMTTIRAVSYSRFSSNNQRTESIDAQQRAIYKYIAENKYTPVGDYVDEALTGTNLQRPGFQSMLDDAKKGMFDVVIVHKMDRFSRDVYDALDVQRKLAFYGVRIESVIERFEETPEGQLQKVIQLGVGQYYSQNLAREVVKGLKENAYKAMHNGGIPPYGFDVDPETKRYIINEHEASGIRIMFEKIIQGWSYRELAEYLNLLGYRTKIGNKFSATSSFYDILTNPKYMGVYTYNRSVSKPKQIGMKRSHRKNKNEEEIIRVPNGVPAIVDKETFELVQKLLKQRRRSKGQHKAKEVYLLTGLVECAECGSAYHGSSRIGGRNKSKYVSYRCSKRKKLENPCKCKEINKTLLDEFVVNQLYTTLLNQTNLEQLLEEVNVKLKQKYEDMDQDLPQLQKQLDEVNQKISNLVQAIAMGGLGSLDTITQEIQRLEHDKVKLTELVQENQVKKESLTLTLEQLKQVLDESKQYMLSNHDDMVKYILSRFIHKIIIGNETIIVNYNYGGFYFDFKSILLLESVTYQRDDVYSNSSVKEVI

SEQ ID NO: 1976 - protein, 573 aa, unidentified
  source 1..573: note = uncultivated organism
MKPASPILTDTAPKSVGIWIRVSTEDQAQGESPAVHERRARLYAEAKGWKVEDVFHLEGVSGKAVMDHPEAKRMLEAVRSGRITGLIFSKLARLARNTKELLDFSDQFRAAGADLISLQEAIDTGSPAGRFFFTLLSAMCQWEREEIADRVSASIPIRAKMGHQIGGQAPFGYRWKNKKLEPDPQEAPVRRLIHELFAEHKRKKTVARILTERGYRTRSGKPFTDTTLARLLEDTTAKGTFRANFSKLTPDGKSRTLKPESEWVYTQVEPIVDEALWDTCFHILDSHRRGYTKASRKTVHLFSGFAYCACGSKMYVWSHSPTYRCGKCRRKIPTDDLEAIYRDRLGEFLVSPDEIAAHNAAANDVIADKEKLVRAAESELQKLTSDDKRMMDLYLSGELSKEEFGRHHRPLAERRAQLEDELPRLQASLDVLKIDTISKAEAASEATTLATHWGTFSFDDKRAIIEAITEKIVIGNEEVAINLLYRPSGPTSDKRATPPSPCGRVEKFERSETFFGEGQEHSSLRLAPPRSFLFAGAQRKPSTFPQREGGRPFSNFAFATSPLQSFQSMLSVS

SEQ ID NO: 1977 - protein, 668 aa, unidentified
  source 1..668: note = uncultivated organism
MIAIYSRKSKYTGKGESIANQIELCKQYIKLHFGNAEYAIYEDEGFSGKNTNRPQFKAMMLEIDKGNIEKIVCYRLDRISRNMSDFVKLIDLLNEKGVQFISVNEQFDTTVPMGKAMMYISSIFSQLERETIAERIRDNLMELAKTGRWLGGITPTGYRSVEVESVGINGKTKKAHRLEIVESEAEIIRLIYNKFMEKGSLSQLEAYLINRDIKTKNNIYFSRFTLKSILTNPVYAVADEDSFEYFKDYDIFAEKSEFNGEYGVIAYNKTKQSKKRTKINPVEDWIIAVGGHKGIITGYDWVRVQNILNENSNKAYRKPRVNEALLGGIIYCSCGSRMGPKMGRKGAFSYACRLKLKSNKGKCQAENINGIKLDNYIVELIKSLECDKISLIRELEKGKKYIKGKTENDTSALYRKMNTNKNEINSLVSKLADVKNSSAEKYIIERINTLDAENADIGEEIAELEKAESVKKAEKFEFDEFKKKVMTFSACVENMSFDEKRNAVKALINKVVWNGSKIEVHFTSKYIVSVNWNNMFIENKGNETWEKLKYWRCKRGYLQREVADAVGITRAMYMSYEKKNGFCPAKNLVKIAEFLRVDFDDIAEDYHYFQLTDNQCERVKMARENMGLSKTKFAKLVGVDRSTVYKWEKYEGKMSRRDYLKVRKITEL

SEQ ID NO: 1978 - protein, 560 aa, unidentified
  source 1..560: note = uncultivated organism
MVKSKNSSRDGQATRIAFYTRISTDEDHQKYSLGAQSDRLEAFCKAQYGDEWRLHKVYRDSESGTHMNRPGLEEMLFDAGAQAFDVLLVFRVDRLSRKVRELAQMVDELAKHGVILKSITEPFDTANAAGKMMLQMLGVFAEFEHATIVERTKVGMEKKAKSGKWVGGVVPYGYQLDPVKGLVVNEEEAIVVRKMFQMYAFGRQGVHTICHKLNQAGYRKRTGQAWDKRVILHIIKSPVYVSKIRWRDAIYEGTHESVVSDVLYNKAKGILKDRVESLSGRRFDNGNERLLAGVIKCSRCKSHMVGVSTHKKERRFPYYLCSKRWNTRECDQDYIRADHVEATILRDIKAMFRDEPFIVRVLEEANKRLVVAKPGLEKEIAWLESQMTKAQGAIDRYFEAFETGTLKAELCSEKVGDLKARVVGLEAERRDLETRRNRLELPAIDLEMLTSFVANLDQLIAAGTNPQKKHLLRLLVKKVLVHDRHTVEVWYALLHPFAGHTPESETVIQRHFGATSPADVDDLVEAVADLVVTFLQRKRNSIESSADRPKRTCDLVEMAG

SEQ ID NO: 1979 - protein, 564 aa, unidentified
  source 1..564: note = uncultivated organism
MRCAIYVRVSTDKEEQKSSLENQRNLFINFVSQKGWTVHDIYVEIESGTTSKRPELQRLIADANARKFDCILAKELSRLARNGRLSYEIRDLALNKNIHIITLDNAINTLEGNTHMFGLYAWMYEQESQRISERVKHTFQIKAQRGQFKGSVPPLGYEVRDGKLYIRNDATPDIVRRIFRDYLSGKGHDRIARELTEEGIPTPSQIAGKNNASDRWGGSTVRLILTNPHYVGDLVQCRSTTKSVTVKDRLYRHPKDYIVVRNTHEPIISRKDFELVQQMIAQRKRIRPQAEVHLFTNTLFCADCGRGMHYKKHVRGYLCGSYNRYGTQFCTDHLVREEELKEAILADIRAMAAHLSKESVMKKLEENMAKQRKFQEKQLKSIENQLEKLKKRKKIAHDKHFDGEMSKSEYDEYMLRVNEEIQSLTQQKMQIEEALRKGDDLKMIQEFKESLQRYLAFNDLTPESLHRLIKRIEIKADGSPRIFYRFSNPSASYLLRSINAQHSTWNEPIGLMSLVVFLTLRSREYVNGLLTNFLQMTVQGNKSTGNDYHHQTPVFYILHMVQNK

SEQ ID NO: 1980 - protein, 533 aa, unidentified
  source 1..533: note = uncultivated organism
MTTRAAIYARISSDQEGRRQGVKDQEQDGRKLCAERGWQPIEPAYVDNHRTAADPTKPRPEYDRMMVDIRAGKVDVVVVTMADRLHRQPAELEVFVADCKAAGMPLLAEVRGGDTDLPNPDALLMLRTKGNFAAHEVAKIRARVKRRHQQRADDGLPNGGTRPFGFAQDRIAHKPDEAKLIRELVDRFLVTGSINAIANDWNARGIKTVATQDHERFLAGERAKDRQPTVWRQPGLLKILRSPRIAGLRQHKTVDAKGIPVVAAPVPAVWEPIIPQATWQQVQSVLDNPSRRWVRTDHTFPLIGILTCDTCGRPLGQQRRARGSEYACRWAKCTKRITVDAEAIDNYVLPILLPLCDSPAMRSIVATETGVSEEEAQALVMANADDEAKVSELADLLASGDLDPAAYAKATKRLRGAIEERQAQLASLRSESALDLLGGSVADAWDDLSQADRCAILGQFVSAVRVRRSTTHRGRVHGGGPFDSARVTIVWRWASLAKAALGIWDLMSESEKAEAHEAVLATLTDAERYGQAS

SEQ ID NO: 1981 - protein, 661 aa, unidentified
  source 1..661: note = uncultivated organism
MYNTKEGKSCVIYIRVSSERQVKGYSLDGQKHYLAECAERRGMTVLDTYVEEGKSGKSIEGRTEFQRMLDDIQSGRVHTDYVLVFKLSRFGRNARDVLNSLEFIMKYGVHLMCVEDGLDSSTSMGKMMITILGAVAELERENIIAQSLLGREEKAKSGGWNGGFAPYGYRLVKGDDKSKGKLETVPEEKAVVQLVFDMFLNRNMGYTAISGYLNRNGYTRPPAKNAIRPSYGEWSSDHIKRMLSNPVYTGRVAWGKRRTEKVPGKDNEYRLVKQDEYILSEVISHEAFVSKEDFDRVQEIKAIRGKKGNHNIGQYNAHLLSGIVKCPQCGAPMYIGMTKWKNQDGTERRTESYVCSYATKHRGTSVCRRNGVVASQVEDEVMEYTRKIVRNPQFIKDLQEKVMTAVDMTEVENDITAYKKQLSALQRSRDSLEQDIDRIAPDDKYAERRRADMTRRLNDLYDQIYKAEDLLQESMMKKATLESEQMSVQSMIGILSSFDAIYDRMNAAERRDLVKYLISEVELFPREEQKTQKRFVKAIAYKFPIEQKVLTQFDECGASVETVCLLSKLNAKQHIEVNLEMDELDLTDAEKKATYQEIKDYVLEHSGLKVSSLYIAQVKQKCGIIERENYNKPKSEDARQPQCPPEKEKAIMEALKHFGMI

SEQ ID NO: 1982 - protein, 525 aa, unidentified
  source 1..525: note = uncultivated organism
MMDVVLYMRYSSDRQNEQSIEGQHRICKQFCEANGYNIVDVYIDRALSAFHDTAKRIDFQRMIADSEKRQWQGVVVYKLDRFARNRYDSATYKAKLKKNGVRVISATENISDNPEGVLLESVLEGMAEFYSKELSQKIRRGMNESAHKCNTVGGNIPLGYKVKDKKLIIDPTTAPIVQEAFEMYANGDTVAHIIEVFNSKGYRTSKGSEFNKNSFKSMFKNERYIGKYCYKDMRIDGGVPAIVTIEQWDAVQARLKENAKAPARGKAKVDYMLSGKLFCGHCGKPMNGDTGTSKTGAKHYYYNCYGRKVLKNCKKKQIQKDYIEYVVAQKTMELLNPETIEYLADIIVAENEKELNKNSIVPALEDKLKETERAIHRLLKLVEKGADSPSLSQRLNELERERRNYEKRIIKETEEDWIIDKPMIIYWFNQLLEGDLETEEGRRHIIDMFVNSVFVYDNDDGTTTLDIAYNTTSGKHDKVVLSDLDKSSVLGLKRPPKNPEFVRIWDFYFLPTTPSLFTPALFRIF

SEQ ID NO: 1983 - protein, 762 aa, unidentified
  source 1..762: note = uncultivated organism
MSNSTTQPDDQPRAALYARVSTGEGMQADGFSIEAQFTEMREFAAHRGWEVVAEFVDIGVSGTKTERPQLDAMKAAAAEHAFDVLLVHDLSRLSRASVYETFGIFEYLGKHDVGFASVKEPQFDYSTSTGRLFLTFLAGINQYYIDQLKMHTRKSKHQRARDGLYNASLLPYGYRHAGGTRTPPEIVTEEATVVKLIFEKYATARFSYQDLADFLNAHGHTTRKGKRFSKDTIADMLRNPFYAGKIAYKRGRHAQDAGEIYTGQHEAIISLGLWEVCGEVRASHHNASRPFQPQVRTYLLGQLTHCHVCGRHLRSQHSRSHAYYREMSNARGFDDCPNARRGTRADPLHAQIHAIVRQLHLPPDWQEEIAALVGEDEEAASLNNQRARLVAERRHLKRDRQRGVYDDDEDLFYAGLERIRRELALLPTAADLARLEQAAVKLERLHEVWDDATEQDQHDLLLLMLRRVTVDVVQSRLVLLFPTAPFIPLFRAIPLLRERDLGAFVPSWPPDIAETLPLPYTICPSITALPDEPVTLPFLPVWPWQPSARTRITPALSDALKARRQAGLEGGLVLDVPQRGVPPLRLDSRKWPTVSLTQTTLSAALEGPDDTLAFLYTPLVVQEHPDRETLAQRVYERLAPHGIWHWIDLSFVSMPAHWLFTYFPDTWPYVQDAYWSTYRIFNQLRKIGFTVEEKESTCYQPLRLETVQAIAQQRPGLLQLLQDAVYEKGMAQLAEEITQQGAESLIGSEVTLVTVTARKGDN

SEQ ID NO: 1984 - protein, 520 aa, unidentified
  source 1..520: note = uncultivated organism
MSRVTKIPATISRYTAAPIDTPVRRRVAAYARVSTDHEEQLTSYEAQVSYYTDYIKQHSEWEFIKVYADEGISGCSTAKREGFKQMVADALAGRFDLIITKSVSRFARNTVDSLTTIRKLKEHNVECYFEKESIWTFDGRGELLISIMSSLAQEESRSISENVIWGQRKRMADGKPNVPFSRFLGYDRGADGKMIVNKEEARIVREIYRLFLSGLTPHTIAKKLTEQGIRTPAGKEKWHSSTVKSILTNEKYKGDALLQKTYTSDFLTKKKKINHGEIPMYYVEGSHEGIVTPEIFEAVQAEMEKRQLQKSRYSGVDILASKLICGECGCFYSPKVWHSTDRYRRIIYQCGHKYKNQNRCTTPHLTAEKIKSFFIQSVNAMLKNRDEVISNLREGIKMVSDCTALEQERDRMKEETVLLAEMVESIIMENARVALDQTEYRKKYDSLSERYETAKSRYEALERQIEEMHQRVQMMENFINSISKMNPLTEFDETLWGALLESITIYSTEDIRIKFRDGMC

SEQ ID NO: 1985 - protein, 666 aa, unidentified
  source 1..666: note = uncultivated organism
MPVAVYLRVSTEEQRERQSIATQREFGERYCQLHKLAVYRAYADDGVSGTVPLEQRSDGGQILRDARQGRFDQLLVYKLDRLGRETRLILNAVAELEKLGVRIRSMTEEFDTGTSTGRLMLTMLSGFASHERDVIRERSVAGTNRVAETGAWLGGIVPYGYRKAGERQNSHLVVCEEPIPGMAMSEAEMIREVFRMAAVDGKSCRVIATRLNDLRIPCAYVRDDRLALRGKRKQRTSGVWRAGRVRGLITNKTYMGTHEFGKRSVSERPIISRPVPAIVTEDVWNKAQATLRANFLFSARSAKNQYLLRGLIKCGLCGLTYVGVAANRPNGKREFYYRCNGAHTPSVYSKTGRCQAKAVRGDQLEEQVWSDVESFLRNPEPVLEQLRARLDSDAKGSDQTRKQVTRLEGLLAQKTTERSRMVGLYRRGRLTDAELDAQMDEIGKEEAALEAQIAELGGRIASADSIAGNIGSAQALLANLRKRLDEPVSWEQKRRLIEVIVAGVRVDTVEECGVKQSRTTVTYRFSEPKQPMPLVLPQSYIIGSVIRIPTEPHTIGDHIRNQRLRRKMLQREVAEQVFRRISERLNAAPCTSSRFRMLSRPRRCNRRIPPVSYRCAKLRSVNSLRSFWSLLLRSPPTRRRFAYVCFCSSALPLPCQFRRPRSGSGM

SEQ ID NO: 1986 - protein, 513 aa, unidentified
  source 1..513: note = uncultivated organism
MPRAKLISPITKESLGKRVAAYCRVSTNYVDQKTSYATQIRVYQKIINDNPDWTLVDIFADEGISGTRAENRPEFQRMISMCERGGIDIILVKSLSRFARNVKEALEYTRKLRRAGVSVIFEKEGINTTSMGDEMLLSTFSAIAEEESQSISQNLRHSITKRMELGEFIDSNAPYGFRLTDKRLEVYEPEAEVVRMIYDMYLSGQSTSEIAKTLTEKRVPTKDGREKWRSARIGYILTNERYAGDSRYQKTFRSATVPFRQSKNRGEADMFYASMTHTGIIDRETFDRVQELYGRRSEQFGKSGAVVKVYPLTKKIRCAECGAYFRRKVMNGQVKWLCSRHNEDKDSCRSFYYSEERIYSGFISMVNKLRFGEEQIIRQTLQKLDMVSALNKRNSKSARQISESIAGLNAKLVMLDGLRSKGYLDADVYKSQTMEIKKKLSELKSERQDSFESKITGMASEVRKLESLIQAIDAPLEEFDGKLFNEIVVGMTINNRDELTITLIGGLEFTEII

SEQ ID NO: 1987 - protein, 524 aa, unidentified
  source 1..524: note = uncultivated organism
MIKQIRCAVYTRKSSEEGLEQDFNSLDAQREACEAYIKSQKHEGWNLIEKQYNDGGYSGGTMNRPAFQELLKDIEQGEVDIVVVYKVDRLTRSLMDFSKIIDAFDKHQTSFVSITQQFNTTTSMGRLTLNILLSFAQFEREVTGERIRDKFAASRKKGMFLHGTAPLGYKKEKGTLIEIPEQSTIIKLIFEKYLEFGSSVKLQKYLEENNIKTLNGKIFSIGHLTRILNNKVYTGKITYKNEEYDGLHSGIIDNDLFEKVQQCIRNNKGERKFDTNNHQYSLLCSKLFDDKGNCMSPTYSYNRHKKRYRYYVSQAIIQHREQDAGFVNKIPGNEIENFIRQEVKAFILNKANIQQYLSNYTVVNQNKILKLLEKLKINDQIIRLVVHKVTIFKTKVKLELNKNIMIKILEELVYNQEISVKMQETEFITIAKNTNLISTPRHGNKLIIGNEVEYNSTLINAIIKGFYYYKLWEEGKLSPEQKKSTYVYRLMNLRFLPPKIVMDVLNGKQGPTLTMKKLHELAKI

SEQ ID NO: 1988 - protein, 535 aa, unidentified
  source 1..535: note = uncultivated organism
MKPLRCAIYTRKSTEEGLEQEFNSLDAQRASCEAYVLSQAGEGWTLLPQHYDDGGWSGGNMERPALKSLLKAISEGRIDVVVVYKVDRLTRSLMDFARIVETFDGHGVSFVSVTQAFNTTSSMGRLTLNVLLSFAQFEREVTGERIRDKIAASKARGIWMGGNLPLGYDVNDRKLFIVEEEAELVRHIYSRYIELGSVLPLVRELDASGKRTKRWTSSRGNVRGGYRFSCGAIYHILSNRIYLGEIVHKGKAHKGEHQPIISQELFDAVASSLAGNRVKRVKRNEKATASPLTGKLFDPDNLPMRPTFGHGRGKRIYRYYVSETLLPAGRTAQSHNQKGTRLSASRLESVLGASLLPLMPTGGDAEAVFKAIARIRVKDTQLRVRLELAALLGEDEIDDDVLDRAQQIDPAAAIDGHHLIVSIASSAVRRGSELSAPDHITSDTERRRLLADLIHKSHGQLKKLHASPLYPEDNAHMTAPINEWGRRRVTIGLLAPDIQKMLLQGKAPLHITPDVLLNSDIPMDWDEQRRMFGMG

SEQ ID NO: 1989 - protein, 686 aa, unidentified
  source 1..686: note = uncultivated organism
MRVAVYARVSSEDQAERGTIENQLEFARKYCDLHQLDVVEWYRDDGVTGTIPLEMREEGRRLLEDAKAGRFELLLIYRLDRLGRSARIILNAVYDLEQHGVKIRSMTEPFDTGDPNGRFLLTILAGVADLERETILERMWYGANRAARAGKWLGGIVPYGYRVNEEGYLEINEDPLPGMDMSEADVVRLIYRLIADQGYSTIKVADYLNALGVPPSYTKDGRQIKRGKRKVNTAGIWRPGRIRNMVVNTTYKGIHYYGKRTNKKRELIPREVPALVTEETWEKAQQVLRDNQLEAMKNAKRQYLLRGLIKCGVCGLTYHGTAYGGPGGKPKSYYVCGGKTAYRGPLDGKCTSKNVPQEWIEDMVWQACVDFINNPGDAIKELAASMEERKSQKAALTAELEMVRNAAKEKEAEKQSILDLYRKRIIGSVDVEQQLQQIAREKASLDQRARDLEKQIEAEEGLAQQFNSAEELLADLKAKLEANPPFEVRREIVRALVKEIIIDTKPGDNGRPRAVVTARYTFSKVVSRTAKRAENILDLSVVRRAKMPPWLLGHQWSGDSPGARLRQARVAKNMTIRDLSTATGLSVTAIGNLEADKFNAALPNLRLLAKALGVPIAYLGCFEKLPENTLGQRITKARLYHGLTKEEMALAIGVDPKTLRNWEQGKHVPLPRYFNVLNQYLKVLEE

SEQ ID NO: 1990 - protein, 545 aa, unidentified
  source 1..545: note = uncultivated organism
MKKQQHYNAGLYCRLSVDDGNFGGSVSIETQKILLEQYCKDHSITSYTFYCDDGCSGTNFDRPSFQKMLSDIDEGKIDLVIVKDLSRFGRNYVETGMYVQRFTERNIRFIAADDNYDSLTNGDDLLFPIKNVVNEMYARDVSKKTKAAKKAKAKAGQFIGSKAPFGYKIDPNDRHHLIVDEPAAQVVRRIFRMASEGIGYNKMAKIFREEKILTPIAYFNLNNPEYFKSDYWRKEFDWHVTSIRAILNNEVYLGKLVYGKKRNKSMKSKEKVSNPKEDWIVAENCHEPIITQKLWNTVHKILNSKHRPAKTGEIQMFAGLLYCSDCGHALTYSQKKHKDGSYHGAYSCWMYKTHGKEYCASHYITFDNIYNLVLIDIQRNLFRYRQDTDKFKSLLSRKYQSDSEKQAKQLKSDYERKQKRCEELDKIISRLYEDNVLGRISDERYESMSQSYESEQAEIRRLLPELKSQINELKKQSDCADNFINVIKKYTIIDKLDASILNELIDKIVVHHREKTEDGSTFQQIEIYYRFVGKLTAGNELSEAA

SEQ ID NO: 1991 - protein, 569 aa, unidentified
  source 1..569: note = uncultivated organism
MAEQKEKLLQLCKFKEYEVFNVYEDAGISAKDMEHRPSFQEMLADMKKGRINYIVAYKLDRITRSVRDLEELISQLEMYNCYLICDKDDVNTSTANGRFFVRMLTVLSQLELEIVSERTKFGLNGAIKSGHLPGIVPLGYKKDSSKKTIIDETTKDVIIRIFNMYLEGKSYQQISNTLNDEKVLYPKHWRDTSIMKIIDNKVYMGDYEKGKSNNKDTTVFMNVVEPIISRAMWEEAQHQKEKNQRSYVRDRVYIFFQKLKCPKCNRIMKCKGSGGIKKKYMYYNCEHCKIYYREDKIEECLQRFILELVEYDMSVKKYFLPILADKKETKTEKLEQEIDTLEKQKERIKKAYLSGIVEMEDFSEDYKIIEEKINILETKKCEMLNINHLSFTPQQLMADRDIEREKLIRTNQLNDILKQEWNRKSKEEKQEFISKFIESMTLLKDKNGEFYIDKINFRSSYIEQLTKFFKLGVADIYVPIEVNEEEKEIRTSVNINQEQLDDYIQRLNKEFEIEFYELFSKNKNKNDEEIEIKLNKEKQKLIRLVAVKNDKNFSKINKENYKIGAIISN

SEQ ID NO: 1992 - protein, 512 aa, unidentified
  source 1..512: note = uncultivated organism
MAEEQKRKVNEKHEAIYARQSVNKLDSISIESQIERCEKEVTCGNVKVYADRGYSGKNTERPEFRRLMSDIAAGDISRVIVYRLDRISRSVLDFAGMIDEFKKHRVDFVSTVEKFDTGTPVGNAMLMLIMIFAQLERETIQLRVTDAYAARSRRGFYMGGRTPYGFRLCETVIDGIHTKMLMPDEATAPVVKNIFDLYAQQQNSLGDVVRELDGLGIKSSSGKPLNRNRVREIIVNPVYVRADGRVYDFFESQGTNIVNPRGDFIGVNGAYLYSGTEEKRKHLNLSGHTLVLAPHGGIVEPETWLKCREKCLGNRSVAKASKAKRSWLAGKLKCGVCGYAVGAKITRLKTKPDKRYYLCTHRLQSLQCSLGALDADAVDAAVFGEMCKKLEEFKTLSGERERRSDPREDELRSELERVEADIKSYLDKIPEASGAAMKYINSRVDALDARKNELARELDELQSARASLRTDSITGYLDKWEQLSMPDRIAVVDLLIESVHVTKEKIEIRWKI

SEQ ID NO: 1993 - protein, 569 aa, unidentified
  source 1..569: note = uncultivated organism
MLNNDNDKILRCAIYTRKSSEKGLELEYNSLEFQYNRCLEYIKSQPNLEFVKKYEDAGISGKDTKHRPGFLEMMRDVEARNIDCIIVYKLDRLSRSIVDLANLVEHLQNLDAHFISVTQQIDTSNSCGKLSFNMLAAIAQFEREIASERVRDKVASAKIQGLWCGGNVPFGYKAENKRLEIVEDKAEIVRFIFKEFTNGIPIYSIMKELQLKGVKTNKGKDITVDIVKHILENPIYIGKVRTKGLLYDGVHKAIIDYFTWGKTQQLLSERLKKFNTKNKKQLVTKNLLSGLIFCGECNSALTPVHTKKNNLLYRYYICQHYTKGFNKLCHIKRVAANQIEDLVIREIFKLLTSETMVKAVISQSSDYLPNELAKCCEHIKDIWNLLLTAEKRKLILQIINRINVYSDNVEIEIKTNGLENVISEALYIKKEDIEEKDNICITIPTTTLRARSSTKIIQSKNENYEIGDSKYFNPLIQKIAIAVEWRELLDSGKYSSLTELANGKNLEYFTVCKIYHLNYLAPDIIEYIANHQECCQNLTYRKLCRMQFPLLWQEQRELLLPMLKGEKSS

SEQ ID NO: 1994 - protein, 537 aa, unidentified
  source 1..537: note = uncultivated organism
MPKYYATNYVRLSYTDDKTCESDSITNQKKYIEEFVKHNPDIKVVNVKVDDGYSGIVFDRPAFKEMMEDIRNGKINCIIVKDLSRLGREYNETFTYLRRIFPALGVRFIAINDNIDTAKEAVTDDLSISFKGVMNDEYCRDISVKVRSALNVKRNNGDYVGATPVYGYKKADDNKNQLVIDEYAARVVRDIFKMKMDGYSAERIADELNRLGILSPRQYKKDRNIPLPRNGFCDRENSKWSATTILRILKDEIYTGKLIQGKQGTPNYKIKEIVNRSKDEIFVTENAHEAIITKKDFDLVQRLMQIDTRISPQKNKLHLFSGILICGCCGNRMTRKTVTYKGKKYFYYYCPTGKKNGCSGSNMVKETDLIQCVTESIKAHIRSVASLQKLFVGINSQAINKDMCNKISAQIKEIQKQIKKCNEYKSSLYENYVSGILNKDDYKVLKTTYTDDGKRLEAALSELETELDEYMNNTSQRMLWIEHFKQFENISEINRNIVIQLIMSIHIYDKTHLQITFNYKDEYEQAVAALEELKEAV

SEQ ID NO: 1995 - protein, 594 aa, unidentified
  source 1..594: note = uncultivated organism
MNEEKRICGVYLRVSTEDQAKEGFSLPEQKERLEAFCKFKGYKIHDYYQDAGISAKTGNFRPEFERLLQDGKDGKINTIVALKLDRLSRSIYDWENIMSYSDKYNVDVICANDDINTTTANGKMITRIMMSVSQNEIERTSERTKIGLVGAIKKGHIPNKPPLGYRHVNKKLEPNPLTKDIVIRIFNLYFEGNSYHTIANIFNAEKVLNRTNWKDTIILKIISNPIYKGDYLHSGVYYEDVVEPLVSEELWENCQVQKKKNSRNYMRSQTYIFLQKLKCPKCGRILGGRATHKIKADKWYHYYGCENCKNNIKEYEIEESIKHILNDIFEYDSIVNEFFLPVLKKKMELYEIDFDKEIIHLENKKERIKQAYINNSFTLEEYDEENNKLTSQINELKRKQLEQVQTNELDLSIEDILVFRDIEFINKIKLPILYDVFIYSWDDLTKEDKFKLVMRYIDDIELEMKKNKCVVKQVNFRSTFYEDYKSLFEDGFIDIKRDMVLADGIKQKVRYSNYLPFDIVRENILKLSEEYNVMFYNGVLNNITNKFDYTFPENSTIVRIFPLEKNTKDEETLYGIIGIPNSGPNMAEINLKEL

SEQ ID NO: 1996 - protein, 503 aa, unidentified
  source 1..503: note = uncultivated organism
MKAVIYARYSSDSQREESIEGQLRECKEYAERNGITVLSTYIDRALSAKTDNRPDFQRMIKDSAKELFDIVLVWKLDRFARNRYDSAHYKAILKKNGVKVVSAKEAIAEDSTGILLESLLEGYAEFYSVELSEKIHRGQKENALKGLNNGGGIPLGYLLGKDKRLEIDPMTAPVVLEIFTRYAEGETVRAIVESLNKRGLQTKRNKPYSMNSFNAILKNRKYIGEYKYQDVIISGGVPAIVPQELFDCVQARIEKNKRAPAMSKADEVFLLTTKLFCGKCGRLMVGESGTSHTGKKHYYYKCGSAKRKTGCTKKAVKKDWIENLVVERTMRIIFDDMTLEAIADMVLDVQAQENTSLPVLKEQLAQVEQGIQNMLNAIQQGIFTPSTKQRLEELEESKERLTVSILQEELQKPRLTKEQVLFFLHRFRTIDTSKQEQRQRLIDSFVNAVYVYDDKIILTFNYQDGTETITLDDINGSDLGVGAPPNGHDTNTCFFKGGFAVLV

SEQ ID NO: 1997 - protein, 543 aa, unidentified
  source 1..543: note = uncultivated organism
MARRKATTAEETPQAARPIRCAIYCRKSTNEGLEREFNSLDAQREAGEAYVLSQRQEGWVVLPQLYHDGGFTGGNLERPALQRLLADMEAGEIDIVIVYKIDRLSRSLVDFLGLMQRFDAHHVALASVTQQIRTDTSMGRLMLNILAAFGEYERELIAERTKDKMGAARRKGKFVGGGLPLGYDLDAGPTGSKLRVNPTEASIVRELFRLYHRHQGLLPVVKEAARRGWRTKTWVTREGKVKEGGALDRANLHRLLTNVVYIGKVDYEGEQFDGEHEAIVDDMLFHDVQAMLKGQARTKGAWGGNGHPDALLKSLLRCGHCGHAMIHGHTRKRQGDPYRYYVCTTSQKQGVAACPTSTVPAAAIEQFIIDRIREMVTQPALIAQVVSEAEAVRSTRVQALQQDITTLDAHLLQRQRAGQQLTRTLEAAEDTTPNTLILEQVQQIEREIAETGQALAEVKHELAALTARKVSLSDFRAALELFDPVWEVLYPIERARILRLLIEQIDFNAGTGKIGITFRPTGVAALHDEMMAAQQLAAHEEAS

SEQ ID NO: 1998 - protein, 559 aa, unidentified
  source 1..559: note = uncultivated organism
MARKSRRNIPAENVQKQPEGMKIYHAALYARNSVENERKRQADTIGTQIELLRSFAQQQEDLIVHDVYCDDDYSGANMERPELKRMMADVQAGTVDCIIVKDLSRFVRNFLEAGEYLERWFPDRNVRFIAINDHLDTSMDSIDISIQVKNLANEMYSKDISRKIQSTKLTHQHQGKITGGSIPYGYRRDPADKTHLIPDMETQHVVREMFEMIARGETMRCVAATLNRRGLPSPGKLKYLRGEDKRENFASAQWYQGTVKKILQNPVYLGWVVGGQYKSQYLERGEKKAERQDEDSWIVVKGMHEPLVSEELYQAAQDYIASLNTEGTRVARYDSKSKRENLFRGILRCGECGKAMIFRRKGQKPYYCCALHDHYGQDYCVKKGVPAEKLESVALKLIQNHIARYVDAKNVIARMNATAQSKKTSHVFEDQLAQVHQQIERYAALKAGLFQDLQEGMITRQDFAEMRDTYTEKVSELRLFASELEKVVERYRKDGTEQTTLDALVEQYMGGSHLTREMVEAFLSSMTLYEDGHVEVSFACQSDFDRIAYEALSRQKEGV

SEQ ID NO: 1999 - protein, 519 aa, unidentified
  source 1..519: note = uncultivated organism
MVLQAVKKIGFSKKYLILYFQKKGMLKMIAIYARQSVDKKDSLSIETQINLCTNYINASPHSETIETYQDKGYSGKNIHRPDFTRMMADIESGKISKIVVYKLDRISRNLLDFMSMYKIFNEHKIEFCSVNDTFDTTTPMGRGMLKIAMVFAEMERESIQLRVKDNYYERIKDGRWAGGPAPYGFKNGRTKNNIPTLIRVNDEITAVKLAFNHYEDDFSMSLGKVARLLESKGYQSRKRKAFDNVTIGRILQNPVYAIADETLYKFFKTRKAKILNPIEEWDGTRSAVIVGKRVANNNTRKYTDLSEQTVYLTNFKGVIKSRQFVKVQERLAQNQQIKRANAPTRMKELAGLLKCAKCEYAIKIYNDPKLDCYNNRGLHSCDAQFKTVDFEELRKSIRIKVLDVIKHLAERVEESERGYKKIEEELNKLVEERDNLVSLSRGKTKLEKAFADTIERIQDQIEQKELQLSTYTPIRYEAFNFDIIEIELADVEKAKEIYRKLIKRVLLEENGDYTIEWKI

SEQ ID NO: 2000 - protein, 552 aa, unidentified
  source 1..552: note = uncultivated organism
MSDRKRIRCAIYTRKSSEEGLDQDFNSLDAQREACEAYIASQKAEGWVALPGFYDDGGISGGTLERPALQRMLEDIDAGKVDQIVVYKIDRLTRSLADFAKLVEKLEKAGASFVSVTQSFNTATSMGRLTLNVLLSFAQFEREVTAERIRDKIAASKKKGLWMGGLVPFGYAADGRTLCIVEPEAKTIRTLYKLYLELGTVRAVQSKSQGLDLRTRTREHKSGTRVGGIHFGRGHIHQILTNPLYAGRIRHKEKVYDGQHPAIIDVETWESVQVMLKAQAARGRLKVNAAEPSPLIGKLFDETGDRLTPSHASKRGVRYRYYISHRLVSQSGEKELTGWRLPARAIEEGLAKTLVEELERPAFLTRVLPSSGASELKQILGRLDVLISELTGVNKTVNTASLIAVARIGAGEMKIWLDRDVLSKKLGLPKADLFEESLVFSKAFQLRKRGVETKLVLGGLQAELDQTLIRNIVVAQKWFEAIRQGKMIEQIAKDAGLTKSRILQMMDHAFLAPDIVKQIAVGEQPIGLTSEWLQRNALPIDWQEQRQVIANL

SEQ ID NO: 2001 - protein, 518 aa, unidentified
  source 1..518: note = uncultivated organism
MATARDNLARKQIYIPATQPEEEIVLRVAAYCRVSTDSDDQINSFTAQNNHYTEMITAHDRWELVDIYADEGITGTSAKKRKDFQRLLADCRKGRIDKILVKSISRFARNTTECLETIRELKSLGISIFFEEHDIDTKMVSSEMLTAVIASCAQAESESISRNMRWSVQKRMENGTFNTCRAATGFQLSENGLEIAPEEAPVIYGIFADYLQGKNSREIAARLNGEAALGRSWNRKLVDYILTNERYAGNALLQKKYRTDSFPRMKKPNRGERPMYYVHNRNPAIIPQEMFEQAVQLRSSRRVEMSDTDARPFSKRLYCGRCGSLCRSKKTNDVWYWVCRRHEEENAQCDIPPVPEDAITAAFLRLHYNLKHNPEVLSFHTKQMAEVRKRQMLWSPATVELNRDISDILNQSHALALLNRQGLVDPDIFITRSNQLSEQLRKAKQQKETLLKREDNDIIEQTKCLREVLLDGPEYLDVFDGELFCELIEKIIVECNTKIRFRLKNGLELPESIERTVR

SEQ ID NO: 2002 - protein, 525 aa, unidentified
  source 1..525: note = uncultivated organism
MAPHGKQQVQQVRCAIYTRVSTVDQAQGEFTSIDNQREMAEAYIKSQAGKGWVLLDEHFDDSGYSAGTVDRPALQRLLAAIAMGSVDVVVAYRLDRLSRSLSDFMKLMDRFTAAGVAFVSVTEAFATDTAVGRLTMGLLATFAQFERETIADRTRDKIHAARRKGKWTGGIPILGYRVAPGGGRLEIDPEGAEMVREIFRLYLADQSVSEVVEEVNCRGWTTKEHVTKTGRRVGGQPFNKSSVNYLLKNPTYAGKLTLKGELYDGEHPAIIDDITFQRVQDLLRKNGSGAGGPNGNKYGYLLKGLVRCAACNAAMTPSTARRGQKVFRYYTCVSAQKHGYATCPCPTISAQKLEDIIVQQIRVIGQDRELQRATLAQVKSSREARRPALVGEQKRLRRRLEKVRADIRSLLDALAVGERGASVGARIAELEAEAEKLERRLAEVAQELAGLDADAVDEADLRKALSLFDPIWDVLYPVEQARVIQLLVERIEHDARTGKLAIEFRPTGISALADEVDAATTMVTA

SEQ ID NO: 2003 - protein, 558 aa, unidentified
  source 1..558: note = uncultivated organism
MHICRSVWYRPMLFCEVMRMKFFLYSRKSVYTGKGESIENQIEMCRQYIVAKFPGATDADITIYEDEGFSAKNTDRPQFQKMLRDIKTQKPEFVVCYRLDRISRNVSDFSALIEDLNEREISFVCIKEEFDTSKPMGKAMMYIASVFAQLERETIAERVRDNMLMLARTGRWLGGTTPTGYSSEKVSEIIIDGKVKTACKLMDNPDELAVIDSIFSIYLETRSISAVSKRLMRQGIRSRVGTYYSLLGIKEILQNPVYCMADKAALDYFTEQRADVCFDEKDCTGKHGLLSYNKRDYKKKHAPRQSIDKWIIAVGRHKGRISGEQWVAVQRILADNIPTGKKPARQCNDYSLLSGLIYCDKCGGRMFSKIRSGSPTGQFDYICDKKLRGGTSVCDCQNIGGQQADDLVCDSLMDYTESGSEIYPLLEKLRRDIQQEDRQQPMATIESQIAKRDTELKNLMAALSNGNLVQAFIERVNARVAELDNELKELQREKARLEQQAEGESDSALQLDLLANALSSLKTYFPQLSVYEKRTLIRLITRKIVWDGQDFHIFIDGG

SEQ ID NO: 2004 - protein, 539 aa, unidentified
  source 1..539: note = uncultivated organism
MSQKLATKRRCAIYTRKSSDEGLEQSFNSLDAQRDSGEAHIAAMRGEGWVCLPERYDDGGCSGGNMERPGLMRLMHDIESGRIDTVVVYKIDRLTRSLTDFARMMEVFDRHAVSFVAVTQQFNTTTSMGRLMLNVLLSFAQFEREIASERTRDKIAASRRKGKWTGGKPILGYDIERREGGNRLAVNEAEAVRVREIFWLYQRLGSLRETCAELARRGWATKAWTTRDGVARGGRPFDKSALYALLCNPAYIGKIRHHSDLFDAEHAGIVDPEHFEAVGLLLASHGRGGSTVVNNRHGALLKRLLYCGGCGVRMGHSFASKKCKGGRGDTSSGERRLYRYYVCQSAQSHGAGACPATKGGGSGSIPAEQIEALVVAKVKHVASQGRVVQSVAEVMETRWRERVAAARAECRRVELDLEAVGRQRSLLAGRGAAASAETLAALDSDAREFESERARLARTLEELEANPPDAALAEESLTRFDGVWMTLSPAEKALVLESVLERVEFDRLRGEVAFVYRPGMAVPDARTSAESTLAREAAA

SEQ ID NO: 2005 - protein, 543 aa, unidentified
  source 1..543: note = uncultivated organism
MRYDTYEQPEQILRTYKAALYIRLSREDGDKPESDSVVNQKRILENFVNSQPDIELSDCYVDDGYSGATFDRPAFLRMIADVYAGKVNCVIVKDSSRFGRNASESGRYIGEIFPKLQVRYIAVNDLIDSGKSQSVAIDFLNNSMRGMINEYYVAANSESIRSTLNMERRKGEFIGSFAKYGYTKAPADHHKLVIDEPAAEVVRMIYSLYLSGVGIRGIVRRLNEHGIPNPSTYKRMQGLNFKARTVGDSSLWCDKTVRRILRDEMYVGTMVQGKNQKINYKSKAIRSCVPDEWIRVEGTHDPIIDKDDFDRVQKMLKTGVKGAVQSGSIDLFAGLLKCADCGHALIKKTNHNPDKTYVYYRCSSHCKCKTACAAHTIRYERLYYCVLYCLQQMVDAAVNADEVLRQMKENQVKISDEGMKKQLEKQEQELEKVLQRMADLYPDLKDGTINADQYRIMKEKYEQAQKDLTQSIRKLKASLGQAEDDNVAPNDFIEHFKKHGNIRSLTRPLLTELIDRIAVHKDGTLDIAFNFCDTFAGMQKRSA

SEQ ID NO: 2006 - protein, 575 aa, unidentified
  source 1..575: note = uncultivated organism
MAVQVIAATSAKTTGFGTALKPLRTAAYCRVSTDTDEQETSYEAQRTHYLARITEDPALELAGIFADEGITGTQARKRPEFLRMIAECEAGNVDLVITKSISRFARNTLDCLNYIRKLKALGIPIIFEKESINTMESSGEVLITILASIAQQESASISANVRMGIEFGFQEGRGRLNYSTFLGYRRGTTPSSYAIVPAEARVVRRIYREFLEGYSPYMIAQRLEAEKVSAPAGGPTWYASTVRSILRNEKYCGDLLMQKYYTVDFLTHKTVKNEGQRPQYFVEDDHDPIVPKEVYRQVQGELRRRSKLVSDPSKLRYGARLALNGRLVCGKCGRTLKRYVKPSHHLTDWRCRDRALVKKSDVKEQPGSRCDCRIVKERAVWGAVVRAFNQLPGERDRIVALARGSAVGELARIDALLEREREQTQALRRRLEETGASGGVASSGPETEVAGSAASETEFLRSQLDGAKSRKDALYVERAEWANKAVKARILLELVDQMTGMARTEGGPVEDDPACHDYEDFFLRTRVPLPRHTFNTAGRMVAFNNDFVIRYVDRIVVHDETYEVHFKPSLVVVVA

SEQ ID NO: 2007 - protein, 543 aa, unidentified
  source 1..543: note = uncultivated organism
MHVALYARVSTTRQAENDLSIPDQLRQMREWAEANGHLVIQEYVEPGASATDDKRPVFQQMISDAMMKQPAFEAIIIHSLSRFFRDGIEFGVYERKLLKNKIKVVSITQPTSDDAGGEMMRRIINLFDEHQSKEISKHVSRSMKENARQGFFNGSRPPYGYQAVATDIAASRGRTKKKLAINEAEAGIVRQVYDWYLHGIEGRVMGCKEIVKHLTDKGLLMRGSAWNVHKTHKLLSDSLYMGDYYFNVIDSKTGQKRPPDEWVKTLIPAIIDAAIFERVRAKREERAPNKTPPRRVSSPTLLTGLLKCGICGHAMTLVTGKSGKYRYYKCASRHSKGNHACTSGNLPMEKLDELVLEQLAIKVFAPERMQEMMTELRKRIKSSKGGQQERINELNRQIKKTELRQQRLLEAIETATIELDEATQRRAQQLKSSREALFIELAGVRRDTSLPAVEYLKASQVDTFGKVLRQKLLAKGSPLAKNYLNILVDEIVVEGKAATIKGSYSALAETMQAIKKGNLNNQVPSFMHDWCARSDSNARPLGS

SEQ ID NO: 2008 - protein, 585 aa, unidentified
  source 1..585: note = uncultivated organism
MKQTKENTGEQIAIYSRKSKYTGKGESIENQVELCKQYIRPRYPNCNDEGILIYEDEGFSGGNMERPRFKEMMAEARTKKFSAIVCYRLDRISRNIGDFAKLIEELDGLNVSFISIKEQFDTSSPMGRAMMYISSVFSQLERETIAERIRDNMHELSKTGRWLGGISPTGYKSEQVEKITVDGKIKKACKLELIPEEADLIKQIYKVFLETNSLTKTETYFINNGYKTKNEKLFTRFALRNILTNPVYMIADGDAYRYLVENEVDLFAGKESFDCIHGIMAYNRTIQKSGKANQIRSMEEWIVAVGKHTGMIKGVEWIQVQEYLEQNRSKSFRKPRSNVALLSGLLFCSCGDYMRPKLSKRLDAQGEFIYSYLCAMKEKSRCHVCNMKNANGNMLDRVVCEEIKRLGADSSEFIRQLELGKTQLEGNLEGYDDLDQLCSALAKNEKKIARLVVSLAELEDTATKGSIVKGIDELHSEGELMKSRIAEIESLTASHTLSNIEFDIIRQMLTTFRDTIDDMSVEQKRAALRTFVKKVVWDGENVHVYLFGSDDSGGIELPPDDFLSKSDGLIETEGNNSEPLCENSK

SEQ ID NO: 2009 - protein, 544 aa, unidentified
  source 1..544: note = uncultivated organism
MAEIADNDRKCALYVRVSTINQAEDGESLDEQVQTLKSYCAYRKWQDCTVYREEGFSGKDLKRPAFQQMVADIRKGKINTVIVKKIDRLSRSIIDFENVYKSFQDQGVDLISTQENFDTSTAIGRSVIRIVLIFAQLEREQTSERTIDVMAHRAKQGMFNGGYPRLGYDIDYENKCLVPNEDEIPIAKEVFTTYLKLGSLSETAKSLNDRGYRVKTWTTQAGRTRGGDKFQKNNVSRMLNDPVYIGKVRYKSGIYDGQQPAIISEELFEAVQTILQANNISKTGYRQNENTFYLKGLVRCGSCRSSMSPSFSYSKGKKYYYYRCMVNNDHSKDQCRIGSVHARKLEDLVVNELKFLAGDPRIIDGVVENASKEQREKVKALAAKKKVLTDRLTQVDKKAKNLLEVLGEGGAQNNRSGYITKELDGLDIQAKQMRKEIEALEFESNDLENKILSADMIRENFKIFKDVYDHLTHDEKYDLLHLLVKKVIYFEEEGKDKDGKKVGKIKMDLWELPPIDPSILSSAKDFAERHVWLPNPDSNQGQGG

SEQ ID NO: 2010 - protein, 524 aa, unidentified
  source 1..524: note = uncultivated organism
MFGTGRQIDPAKAAVYIRWSTEEQGQGTTLEVQQEACEYYCRSQGWFFRPELVFVDEGYSGATLDRPALSRLRQAVADRLVDCVIVYKLDRLSRNLLDCVTLVRKEWGEVCALFSTKENFDTHSPVGQMVFNILVSFAEFERNVIRDRTLSGKMKRAEQGRNAGQLYPYGYVKGPDGNWALDGRDAAAKCFTGRAAIVRRIFDEYLAGRSARAIAAGLRADGIPAPRGGSWRNNSVAAVLDNPAYAGTYSYGKRRGGRRAAQPTLTVANALPPIITEREWANVRRLRTERAAAPPRSLGSGYLLSGLARCAKCGGSMAGAGKATDKKRRYYTCTNRVFLKNCDCAYIDADSLEAAVIAEVKAVIQLRDTRRLVEPMAAELRQRTVQYTHVASEAAEALAALGRKRRRLDREFLAGYLDGKSFSRLAQALNAEAADARRRVERAQADLRSARDATAEPERLMDLARQVDPWAELSQEELKQVLRDAISSVTVYQQKAAVRSRRANPNPIDVVWRPKLDRYHLAEP

SEQ ID NO: 2011 - protein, 558 aa, unidentified
  source 1..558: note = uncultivated organism
MKKVRCAIYTRKSSEEGLEQAFNSLDAQREACAAYILSQASEGWSLIPDIYDDGGLSGGTLQRPALQRLLSDVADDRIDIIVVYKVDRLTRSLLDFSKLVEAFDKANTSFVSVTQSFNTTTSMGRLTLNMLLSFAQFEREVTAERIRDKIAASKAKGMWMGGTPPLGYRPDGRSLAIVEDHAAVVRMVFERYLQAGTVAALLDRLRAEKVCVPARATGGGRFFGGRPFARGQLHFLLRNPIYVAEIRHRDRTYPGTHPAIIDRATWNTVQAMLDANTQGDTRAPRRTKPSLLAGLVVDETGEPLVVNHACKGTVRYRYYVSRQLRGSGASASPSVRIPAREIEAAVLDVVATGFQDPLQLASAANLPIITADITSIVSIGAATAAALRAGDHEQLQSLISGVQVLPDRLQVSVSVAEVAAIFRLPCTTPMATIPLSTALRVTRTGHTVRLVLPGGQSAVVAPPNMALIKLVLTSRRWWARIAVGDVDVTELAREEGVSRSYVCRTLRTAFLAPSIVDAIVAGSQPAALEARRLKEPGAMPHSWEEQRRRFGATERERA

SEQ ID NO: 2012 - protein, 576 aa, unidentified
  source 1..576: note = uncultivated organism
MMPRDPTKPMTRCAIYTRKSTEEGLEQDFNSLDAQREAGEAYIASQRHEGWVLIKDRYDDGGISGATLERPGLQRLLDDCRSGKIDCVVVYKVDRLSRSLFDFAQLIETFTAADVTFVSVTQHFNTNDSMGRLTLNILLSFAQFEREVIAERIRDKMAASRKKGKWVGGRPPFGYDVDYQKKLLLINDEEARWVRWIFDRFLQTRSTTVVIEELKANGVATKTWTTKNGSHIKGTPWSRSGIYKLLSNRTYLGEVEYKGAVYNGEHDAIVDRSVWDEVHALLAEAPQARANRDRVISTRAARNPAFLIGLVRCAHCGSSMSPSATTGKNGALYRYYRCQTAQKHGADQCPVGSVPAGDLEREVLKRVKGVFQAPEVLAAASRAARKRGDQDGVAVDHQAVTDALRKIDTVWNELYPGEQTRIATVLLDHISVGLNRVAMTVRSQGLEHLMDLGDELELTAEGVEVELPVVCRRRSGRTRLLGPANGSETQGDEPNLALEALARGFVWQEALERGDAPSVRALAMAEGVDEAFVRRLLDLVGQPPRIVTSLINGGSLHCAADIKSMSKQGASYTWAD

SEQ ID NO: 2013 - protein, 569 aa, unidentified
  source 1..569: note = uncultivated organism
MNNTNKMIYRTGIYLRLSQGDEDIDGMEKQESNSISNQKLLLEKYVSERADLKLVDIFIDDGYSGSNFERPEFKRMMQAIEDGNLDCVIVKDLSRLARERIGADELILKTFKKYGVRFIAVTDHYDSLTANRSETQTIIPFKNLMNDHYNQDISMKVRSSQQAKRANGEFIGSFAPYGYKKSKTDKNKLVPDEYAAGIVRDIFAKKLGGMSALAISNYLNANGVLAPLEYKMKLGEKYTTSFKGAGEAKWSAKAVLRILKNDVYIGNLSQGKSTKISYKVKKEIKVPQSEWIVVPNAHEAVVSRQDFDAVQMLLTRDTKSKNGGSEAYTYAGFLYCGDCGMSMVRRDTRYKGVAKVNYICSNYNRNGKEKCSRHKISEEALNEIVLGELQSYIGSMCNYEKVLEHLESLDLNYDTAVAHDKEIAKLREELTKYSALKSSLYQDLKDGLINKEQFARYREQFSQKEQELQHAIEEQEKIIKKVYDNGIAVTKDLERYRDGIVFDKVDRLLLVTFIDRILVYENNTVEIIFKYRKEMEKVDGLIDMASELFFEPEYSMVEGIPVLELKEVG

SEQ ID NO: 2014 - protein, 553 aa, unidentified
  source 1..553: note = uncultivated organism
MNKSDKLKFAVYSRKSVYSAKGDSIDNQILECKKRILMQFPDTCGDDIIVFSDEGYSAKNTERPEFQKMLAAIKSGKISGVVCYRLDRLSRNVGDFANLIEELNSLNVIFISVNENFDTSSPMGRAMMNIASVFAQLERETIAERVRDNMHALARKGQWLGGTPPLGFESEKLEKVTVDDKVKTACRLKPNPEETGIVRIIFEKFLELKSLSGVSKHLISRGIKSRKGNMFSLIGIKEILQNPVYCAADEHALLYFTEQESDVCFEEKDCTGEFGLLAYNKRDHHKKNIPRNTVDKWIIAVGKHKGIISGEDWVSVQKILESNKTDNRRTSQSSNNAPVVVHNDYALLSGMIKCEKCGARIFAKNRYKKNNPNLFDYVCSNKIRGSKKLCGSENIGGQEADILICEYLTQELNQSSEIYKYLDKLKKEVSEKKRENPLEAIEKEINKRITEKKNLLDALKMGVNAELVKNINAETVRIDDELKPLEAERRKIEKGINTFEFQELQIELITEALTDLRNNFRDLTLHEKRTIIKLLVKEIVWDGESFHIFMYGE

SEQ ID NO: 2015 - protein, 561 aa, unidentified
  source 1..561: note = uncultivated organism
MNKLIDQVFKVAIYLRLSKEDGDLSFSSNGKTESESINNQRDLILGYLSKHPEMEIIDEYKDDGKTGTNFDRAEFQRMLEDLKKGVVNCVIVKDLSRFGRDYIDCGYYIDKLFPELGVRFIAVNDNYDSSSATASDTMVVPFKNLINDSYSRDISMKVRSNLQSKRERGDFISNFAPYGYVKSEVDKNRLVIDDYAASIVRDIFNWKIEGLSPAGIAKRLNDMGILSPMEYKHSCGINYRFQEDGGMAVWTHKTVRRMLQNEVYIGVLVQGKYTTPNYKTKKFVLKSESEWVRVEKTHEPIITRRDFEIVQELLREDTRACSDSSISPYCGRIFCGDCGAPAVRRTVTARGKKYVYYVCSANKSDKSICSKHSIREDVLETVVLATIQKQIDAVLELDAALSGAFELAWERSELGKIEASLELQNEQLQKNNTLRLSIYEDLHQGLIDKSEYTAIKEELTARIAECVRAIDELNKMKAELDEGLSSKQSWMAQFKEFSNITEVSRRVIVHLVDSIRIYEDSEVEIVFRQADKVASAFEFLEEQKRMQAGSKILVMPRLEVV

SEQ ID NO: 2016 - protein, 521 aa, unidentified
  source 1..521: note = uncultivated organism
MSKRNAIKKTPSVRCAIYTRKSTSEGLEQEYNTLDAQRDSGEAYIASQKGEGWVCIPDRYDDGGFTGGNMERPALKRLMEDIEAGKVDCVIVYKVDRMSRSLMDFARMMVTFEEKKVSFVSVTQQFNTTQSMGRLTLNILLSFAQFEREIISERTRDKIAAARRKGKRPSGRLVLGYDADPVTKKLVINTKEAKLVRDIFRMYLEKRSLLHVSQELNACGERTKFVRASTGMTYGGREWDKAAVQKILNNLLFRGRVRYKDEVYEGEHDAIVDDDLWTKVHKVLRHNGYRGGTLVQTKHGSLLGGLLNCAPCNSVMGHTSTSKNKKRVYRYYVCYRAQKQGWDACPSGSLPADQIESFVVDQIRRIGSDPALRSLTLAKCREQMESQRLAAENELSGVERDLARLGRELSQAAGDADSNPHASARLADINEKVRVAEEQTAALQHQIDEACDGVITKEEVDAALGKFDGVWSSLSSKEQAKLIRMLIQRVDYDATKGDVSITFHPLGLKSIGQQACEEVAA

SEQ ID NO: 2017 - protein, 516 aa, unidentified
  source 1..516: note = uncultivated organism
MLCAIYTRLSKEDEDKQQLESESIQNQKSLLIHYAVERGWDIYHIYCDEDYSGADALRPDFNRMLEAAEAGKFQIILCKSQSRFTRDMELVEKYIHGLFPIWGIRFVALADNADTDVRGNKKARQINGLINEWYLEDLSENIRMVFDMKRREGQYIGGFPVYGYQLHPEDKHKLVIDPEAAQVVRQIFQWALEGHGKQEIARMLNDRNIPNPTRYKQDRGWTFRTATKQVYGIWNKTTVWRILHNEMYIGVMVQGTKRKASYKSKTMLDVPKEQWFRVEGTHEAIIDRATFTAVQQAMKLRSRTDGSGEVHALSGLLRCMDCGSTMTKNSHTRNGKRVSYLRCRLYAESGKNKHCTCHGIRLDVLIELVTERVRHYVQAYFDMGKLQVQPQQSGRREALLQEQKALTVQQEKRSLALKNLYLDKVSGVITEGQFEELNQSFLEEKTHFAVRLKELEQELMHQDQPQNKDELMRRAKELLKLDTLPRELAVLLIEKVEIGEKDPATGQQEVRITWKF

SEQ ID NO: 2018 - protein, 573 aa, unidentified
  source 1..573: note = uncultivated organism
MTSRAAGYVRVSTPIQAKEGESLSTQRQAIEKYCKSKEGVELVEIYADEGISGAVTEKRHGLLRLLEDAKAKRFDCLIIHRLSRFGRNARELLNNVEELNKNGVMFISLKENIDLANPYGRAMLGMLASIAQLERDIINEQMNENKITRWKRGDTFIGKPPYGYLWNKDKKVLEINPVESDVYKRIVNMYIHEGMSYRDITIKLKEEGIICKRAPFSNVTIQYILNNPAYYGNYILNQYQYEGNRRKKVYNIGGKKKAILMKPSSEHITFNISPLISKSEWDKVQEKRKFNIVKGKRISISRDYWLRDLLVCAECGATIKPHHGSTRKNGTFPRYYSCSWASTSKKGLKAAGKSKCKLPTIKAEEIESEVWSSLINKLSFGGFELGGEYCPSYLERSLECENYEKQIKQLDIAIENMIRELKRKERAKQNIYTMIEDERFDINDCYDKLRGNDKEMIELKSRINDFSIKRDALQSARANSFALLEFVKDNSEWLENMQIELANLRPDDKKIFSESLIGKIAVYKDVEAGAPKPWSFENLSINFNRAIFERFASEGKISRLDKNGPFDPAASQF

SEQ ID NO: 2019 - protein, 513 aa, unidentified
  source 1..513: note = uncultivated organism
MTCAIYCRLSREDAEKVQESESIQNQKAMLAAYAASQGWEVGAVYCDEDYSGADRDRPGWNAMLAAAERREFQIVLCKTQSRFTRDMELVEKYLHGLFPLWGIRFVAVVDHVDTDLKGGKKARQINGLINEWYLEDLSENIRAVFAQKRGAGKYLGSIPAYGYRKDPADHNHLVIEPEAAGAVRTIFSLCLEGFGKQKIAALLNERGIPSPAAYRRARGWIRNETGGGLWNRTTVGRILRSELYVGTMVQGVKHRVSYKSKTCAAVPKEAWCRVEGTHEAIVDRASFDAVQALLDRRTRSGGTGEPHPLAGIARCAGCGGPLVKVSQLYKGKRRSYLQCGLYASSRSCPRCTRHSVRLDALTGVVEERIRMLVRARYRLSHPERLLPPGEAEGSLRRERAEAQDLRNQIARRMDALRALYLDRVDGLIGREEFSGMSARFREERQALEARLDALEARMREAPPEPPGRLAERAEALLRLEPMPRELIALLVDSVSVGERQPDGTQEVSIRWRL

SEQ ID NO: 2020 - protein, 500 aa, unidentified
  source 1..500: note = uncultivated organism
MRAVIYARLSEDRERAESVSTQISYSTKLADRMGCDVAGVFKDEGRSGFTGEVRPGFEDMLKFLSRGDVQVLIARHHDRLTRNPDDFGRLMKICERSKIKISLYTGGELDLSTASGGFYGFMETGRSWYESAIRSQRVKDAHERNARAGKRTGGGSRPFGYKIIRQDLGEGAPRRWRIVGEELEPAEKELIEEAATRVLRGESMRSIAFDFNDRGIRAVAGGRWVGSTLRRVLISPRIAGLREHNGEVVGKAAWPAIIDRATHDRLVGLLDDPSRRRESFGIPRVHPLVGLVYCASCGGKMTTAIAPRQGRGYVCRKDENPICPARVRIVAEPLEAYVEGYVIDQWRNPEARKIAQSDDDRMSRIREITDEMRRLQEQKNEALRMKLRKEVDAKTFREVTAEIEAAHDQLAREHKSLTSEAAMPELPDPSLAWEDLSAEDRRALTEMLVDKIVIAPHPQKIDKDGRRHYLIRAIPYQDPQQEAERLKAVHEARVKIVPRV

SEQ ID NO: 2021 - protein, 582 aa, unidentified
  source 1..582: note = uncultivated organism
MSDGPRAVIRCAIYTRKSSEEGLEQSFNSLDAQREACESFISSQRQEGWRTLPATYDDGGFSGGNIERPALRRLLADVEAKKIDTIVVYKVDRLTRSLADFAKIVEALDARSVSFVSVTQQFNTTSSMGRLTLNVLLSFAQFEREVTGERIRDKIAASKRKGMWMGGTIPLGYDVKERKLVVNSEEAVFVNRLFHLYVELGCVSKLKYRLDQEKIQTKRRTSLVGNRSGGSPYSRGALYKILQNRMYLGEIQHREKSYAGEHAAVVSRELWDEVQARLKSNTQGRRDGIRANASGLLAGLLQDGAGTRFTSSHTLKSGKRYRYYVCPNTAGFPESKPIRLPAHDAEKLVSAAVQSFLQSNRQVIDGLARAEDAPASIQRLIAAATRRSEQGLSESSSYHEFVKQVVRRVVVHENRLEVELGKQELLTALDEPTTSLPSQPPIDEQVHASGEVIRLNIEARLRRSGGEMRLVVPPELPGQTRSPVSSLLKAVTRGRQWYDWILSGEASSQRSIAHKLGLNERYVGRILECAFLAPDIVEAILDGRQPLELTFQKLTCRLPSSWSEQRKSLGFPPVRGGRPQSN

SEQ ID NO: 2022 - protein, 520 aa, unidentified
  source 1..520: note = uncultivated organism
MNAPGKLARCAIYTRKSTDHNLDLEFNSLDAQREACEAYIKSQAHEGWRLVPAFYDDGGISGASLERPALQILLSEIQAGKVDVVVVYKVDRLTRSLADFAKLVELFDQHGVSFVSITQSFNTTTSMGRLTLNVLLSFAQFEREVIGERVRDKIAASKRKGIWVGGPVPLGYASVNKKLVIVPEEAETVREIFRRYLELGAVRLLAADLDKSGIKSKIRDLSGGRTSGGGRFGVGALSHFLKNRFYVGEISYRGEIHPGEHEPILDRAVFEEVQARLLSNNVERGLKQKGSLSLLAGRIYDDRGNRLLPSHTVKNGVRYRYYVSSAIQQKRDGDVGSISRVPAPEIEELVIKAVREFCEHETEAAEPLNGDMLARLKHVVITPSAIQVHIGGAGEGSSILDAGREPAVVSVPWESSKFAAVKGIVQVPVETTPALKPESRDAILRAIAKSRLWLDELVQNQSSVPDIARREGKIERHVRLLLPLAFVSPGMVKAIANGSVSTHVTVTGLAKVVPLSWNQQ

SEQ ID NO: 2023 - protein, 505 aa, unidentified
  source 1..505: note = uncultivated organism
MKRREDITTATRPVRCAIYTRKSTDEGLDMAFNSLDAQREAGEAFVLSRKHEGWTCLEARYDDGGYSGGDINRPALKRLMIDIEAGLVDAVVCYKVDRLSRSLLDFSRLIEVFDRHRVMFVSVTQPINTADSSGRLMLNVLLSFAQFEREMIADRTRDKMAAARKKGKWTGGFPVLGYDVHPDGGTLVVNEEEAEAVRQIFTLYLDFGSQQATAAELNRRGWRTKSWTTKDGTFHAGVDFDKNHVARLLSNPLYVGKVGLRGQVFPGEHPAIVDQELYDRVQARLAANNISGGAVAKNRYGHLLRGLLHCTACGCAMSPSVTRRKGRVHRYYVCGNAAKKGWKTCPHPSLPAGQIEAAVVERIACIGRDPGLLQETLAQLRTIKATRLPALVAERRRLDRELARLRDRGSDEVQVGRIEARLAEIAEELAVLDGQSVDRRDLARVLQLFDEVWSCLFPSEQERVITLLVERVDFDAERETVAITFRPTGIRTLAEEIAEAQEVVA

SEQ ID NO: 2024 - protein, 581 aa, unidentified
  source 1..581: note = uncultivated organism
MKSAIYIRVSTNKEEQKQSLDNQKELFMNLLSEKGWDLYDIYLDIQSGTKTKKRPQLKRMIEDARMNKFDIILAKELSRLARNGQLSYEIKNLAENRGIHILTLDGAIDTLSGNTQMFGLYAWMYEQESQRTSERVKTALRVRAKGGKFKGSIPPYGYYVEHGVLKIKDDFTPNIVRRIFNSYLSGMGFDSIARELLEEGLPTPSMVAGKRNASPLWHGSGVRIILENPHYIGNLVQQRETSINVTSEKRKKNDPSNFVIIEDTHEPIITKEDFNVVQQLIAERKRKRPHAKKHLFSNISYCADCGRSMHFKKSRKGYVCGGYNKHGRTQCSDHFVKEDELIKIISDDIKEMFSKLSTKSIQHDIEKKITKLIQRDQKRLTVIHKEIENLKKDKTIALRMKIRGEIQDDEYRLLIEDNGNQIAKLNEEKVKIEKGLLQQKQTIDFTKIIRNLENFVQNPILDEEMLHKLIERIEIKEDGSPRIFYRFSDPYISSIFLLATHSTRRAPYAETYQQAAPQASHTRHPPAPANRAPGFPGCKTHTLHVSASSPKSSAARPRRSLCAAGQPLACQPQCLPHTTPE

SEQ ID NO: 2025 - protein, 500 aa, unidentified
  source 1..500: note = uncultivated organism
MRIATYTRISTDEATQPYSLEAQATRLDSYVDSQEDWRIARRFTDQASGAILERDGLERALREAEAGRFDLLLVYRVDRLSRSVRGLAQILERLDAAEVLFRSATEPFDTASSAGRMMVQMLGVFAEFERATIVERTVAGMQRKAERGEWVGGNIPFGYRIGEDRHFLVPELTEAPVIPLLFQRYAERLQGSSALAKWLTERGLRTRQGKPFNVRAVLGMLRNRTYLGEVSFQGTHYSAPHEPLVDKDLFEHVQEILGERSEDISLRRSNQSEYLLTGLVKCAHCGKRYLGASANGNGGRYRYYVCFSRQRYGKKACEGDRLPADELEEAILEQLLAVLEREPMVREAISEAFAELDADQPKREAEMERIDAERRRTSESLERYFRAFEEGTMPESACAPRIGELSEKLRGLEARREELAAEEPLEREPLTDEDLALLQAEVREVIEGGDPPTRKALLQSLVDEIRVVSRAEIFPSFSLPAVRPPQRAVPLRGFEPRFLA

SEQ ID NO: 2026 - protein, 581 aa, unidentified
  source 1..581: note = uncultivated organism
MRKAATGMTSDRRTQVRCALYTRKSSEEGLEQDFNSLDAQREAGEAFIKSQKHEGWVCLPEMYDDGGISGATMERPALKRLLAEIEAGRVEAVVVYKVDRLTRSLGDFAKIVEVFDRRGVSFVSVTQQFNTTSSMGRLTLNMLLSFAQFEREVTGERIRDKIAASKRKGMWMGGWPPLGYDVRERKLVVNEREAETVRYIYRHYAALGSVLDLKNELDRDGIVSKARVDRFGRPTGGSTLARGTLYLMLQNRIYRGEIVHKEASYPGEHAAIVDEALWNEVQRKLASNRIDRATGAGAAQPSLLAGLVFDDAGERMTPTHANKEGTRYRYYISHGLVSGARRQAPGGRRVPAGDLEGLVEERLVQFLANETELFRAIESLVGDVNERGNLISGAADLARRWPQLEPSRKRAILMILVDRISLLRETLEIRILPGRLPSVLDDQPEPHHRSRPKEKTELTITFTVPARLKRIGMETRFLIDGSDGSARKKPDHSLSRLLAPAWQYNSMVMRGGGKTMAELAAEAGVGGSYFTRVLRLSFLAPEVVKAILHDRHPIELTAKRLANEIRLPIAWSEQRALLDAD

SEQ ID NO: 2027 - protein, 777 aa, unidentified
  source 1..777: note = uncultivated organism
MAKLTKPLKPEVKPIKSAAGYLRVSQPSQAKPDKISLEQQEMKIKEYCQGEGWELPENHMYKDAGKSGASMDKRTEMQRLLRDANKGAFEIVITWDVTRFGRSLRDTTNNIADLKALEIPLVALDQGIDTRKKDKASNLQLNILNSIAEYEHETIMERTLGARSVLLNRGDIFLGQPPYGYQWNKEKKCLEHHPEQAPVYKRIVRDYLYLGKGIPQITIELNEGNAPRRRKGGRWHTSTVSSIFRTEAHWRGQVTVEQDGETFIFPCDPLISPSEWRDLQTRLRNANKRAGRPAIAADHFLLHRKLWCGVCGSKLGTWAGQTRKDGTRLRRYFCTWDWKPDKHLNGHPKCSFNSIRAEIIEDHVINQLCGIIRGEGLENLKNSQNEIKVQELTKRIEYAGRTLAKRRRALASLEQEFDEGDYPAKFYLDKKIELTNQITGLQLEHDDAEEQRNKIQQFQTETENFQRFALKYKLALMYLTDQIRQAPYRIKKKLIEGFFDGRASVPPDHDLSKMDIPWRYNLPVLREVLAELRPDPGPDGLHGKRGFRYLRVEELEALWDELLSDEDTVNSCKDVYRHGHERSGEPSVLRPQHGEVGLRRAAVLPGVGCKRRRGSSILYLPEGTGRICLGASRLAGQFRDRPVSVGGEHPRAAGSGDKHGFGLLCSAKDHPGDKRRPAGEVCRAHERPEFSHQRSERRHKSLVCGLRASVQRERWWTGNGDFRTRSFERGDREHPGRWKRAAASGGNRGVDNATVSGPDGDGRAALRRAAPDALHGA

SEQ ID NO: 2028 - protein, 572 aa, unidentified
  source 1..572: note = uncultivated organism
MPPKQETVLPQKPKVAAIYVRKSTTHGLDMDYNSLEAQTDACRAYIRSQAFHGWVEHPIVFSDGGYSGGTIERPALTDMLARIKAGEINVVVVYKLDRLVRSIVGFVHLQEVFEEHEVSFVSITQQFDTSTPIGRVTQAMLVSFGQFEREMASDRVKDKILAAQTKGIFCGGIIPYGYISDHGKLKPDPLTAQNVATVFRLFNESKSLVEVARKMNCMGIPHKEGREWQPQTVSILLRNPRYVGDIRAGSEVVRGQHEALVSREEFDAAQVVFAKRRENHSARKHSPTHALLEKRIFCGDCDSPMIFKWTSRKQTISDKIYGYYCCHNTITGSTSCRLKSVPSCVVEKQVERAVEKALGASPSLLAIVAARAELPHKMLIASLRSEGAVWRDLDGESRRKLVRSLVLRVAVYPDALEIQLDTAELGSGVHALATFGVVQESGSLMMRLPVTVKVISGNKQIVRAAQQEDVSAVSTEKIGMAQNNPLLRTLARGYAWLGMLDRGEVSCIADLSERTGVDKHFIRHTLKLAMISPRIPRAIINGQEPDGLTLAKIRDLETDDWAEQERILGFAG

SEQ ID NO: 2029 - protein, 583 aa, unidentified
  source 1..583: note = uncultivated organism
MTASIRCAIYTRKSSEEGLEQSFNSLDAQREACEAYIRSQRHEGWQALTAKYDDGGFSGGNTERPALKRLMADIQDGNINTVVVYKVDRLTRSLADFAKLVEQFDKMNISFVSVTQQFNTTTSMGRLTLNVLLSFAQFEREVTGERIRDKIAASKKRGMWMGGNVPLGYELRDRKLHIHPEEAATVRTIYSNYLRLGCVMALKDYLDQNGIRSKPRSRWIGTKPAETSFSRGGLYLILSSHIYVGEIFYKGTAYRGNHEAIIGREQWNQVQKLLKDNRQGKPRKARATKVSLFTGILFDEEGHRYTPTHASKGGRRYRYYTSQAVIRRASETEVPARIPAHDLEVAVTERIIKLLKTPKAVLGALAPSGKHSRGRHYAQLLRQASEKVASWSELSSGARERFLRAILERVVIHQDEVEISIRKDALIHQLAGKTAAQSAAGREMIALRCPFRHATKGKAVRLIVGDQQAPLAASTLAILKAIARARKWRDQIIAGEATGIRDLARIHKLNHSYVKRIYSFASFSPASIEAILNGEVPPDLSLDSLVHRIPLAWTEQGSVLASATGATSQQRGRDVLYLKSEWG

SEQ ID NO: 2030 - protein, 572 aa, unidentified
  source 1..572: note = uncultivated organism
MRAAVYCRVSTDKQESEGTSLQTQLEACQKYCLDKGYSVVSQTAEAYSGLSLERPKLNELRRLIRENEINVLVIYCLDRLSRDPVHGVILTEELEKHHVALEAVTENVDSSDLGKLITYVRGYAAKVETEKIRERTRRGARKRAEMGKIPFGGTGHLYGYCYVRGKEQGQGVRIENPDESKWAKEMFRWLVEERLSTGAITYRLRDLVVPTPSGKGYWRSSTVKKILKNPAYSGKTYVFSYTTKEPKFKVKSSTQRKKSTVVRTPREDWVELPNATPAIISEKLYMAAQEQLAENRRMAERNPKGEYLLHGHVYCQLCRRAYWASGGLKVKNGRGVRYPYYKCSGKIRKVSPIKCTNKQHTAKRIESLVWAEVEKILSQPEVVFRELANQTAKNQTPLWEKDLDTVLFQLANREKQKARVWRAFELTGDEATFRRDIGTITKDFEQLAQRKAALESQIESSKQFDPDISDIKKACGLVASKLHNLSYEEKRLALRALQIRVMVDGDNLTLKGIIPIAIGSAEDTSPRFGNASGIQLGDLKLPVFRVLSSRGMIRFVKEDSMKHYKAPLSGCL

SEQ ID NO: 2031 - protein, 546 aa, unidentified
  source 1..546: note = uncultivated organism
MIAAVYSRKSKFTGKGDSIENQIQLCKEYAKEQLKDKNITEFLIYEDEGFSGGNTNRPEFQKLLEDAKAEKFNVLICYRLDRISRNVSDFSSTLKILQRHNIDFISIREQFDTSTPMGRAMIYIASVFAQLERETIAERIRDNMLELSKTGRWLGGTAPIGYAANPITYFDENMNEKKMVKLRQVPEELKTVKLLYKKYSELKSLSKVETFALQNNIKTKRNADFTKANIRLVLTNPVYVKATKDIFDYLKSQHITTCGAPDGEHGLLTYNKQKSVSNDNGKIIRILREKSEWIAAMSSQKGIIEADDWLEVQHILNKNKDAFPNAGKTHNALLTGKLRCAICKSNMQIAHGHVNKKTGKESYYYVCSMKVHSKGTRCNNKNAKVSELDPAVIKQLKKLAVNKKELLDNLRSQNKKAKELNNSLNKEEIINKSIADKNKQIQNLMNKLAIDNGISDLIADKIKSLKNEIKELKIELDDLNKMNAAFDETNLDLSFIETMLNKCSIIDSLDHEEIQELIDVLIDKITWNGDSHEVTINFTGSNSEKD

SEQ ID NO: 2032 - protein, 555 aa, unidentified
  source 1..555: note = uncultivated organism
MKQVRCAIYTRKSSDEGLEQSFNSLDAQREACGAYILSQASEGWTALPEVYDDGGLSGGTLVRPALQRLLAEVAAGRVDIIVVYKVDRLTRSLFDFAKLVETFDAAGTSFVSVTQSFNTTTSMGRLTLNMLLSFAQFEREVTAERIRDKIAASKARGMWMGGTPPLGYAPHERSLAIVEDHAALIRHLFARYLALGSVRLLEEELVGAEILVPARTRLSGAAMGGGAFTRGQLYLILRNVIYTGRIGHKDRIYPGLHPAIIDIATFDAAQAKLTDHRQGHRSRAGAAESSPLAGKIVDADGEPLIATHANKGKVRHRYYVSRGLHLATTDVGMRVPAREIEALVTAQVVKLLGEPLELVSAAALNLRVDQVVAFHNRCALLASEVQERRSPALAAIIRNVRVEPTGVVITCNAASLASTIGIEQLDGGPATIEISSSAQLKRSGRMLRLVQESGVVSQATPDRALVRLLIQARRWWAILRAGQISTGELAAREGVTSSYVTRVVRLAFLAPDVTEAILAGQQRAGVTAASLTLDTIIPPDWTMQQATILPAFASR

SEQ ID NO: 2033 - protein, 513 aa, unidentified
  source 1..513: note = uncultivated organism
MIVTDISKRENNSNKPIRLAAYCRVSTSSDDQIHSFIAQVKHYREFERDHPEYQLVKVYADEGITGTSMEKRENFKCMIQDCRDGKIDRIVVKSVSRFSRNNEECLTVLRELREIGVSVFFEKENLDTGVMNSEFMIALFGMNAQQESISISENMRWSYQHRMKSGEFNTCKPALGFNLVNGKLRIVEEEAQIVRRIYDMFLSGMGKAAIAKKLNEEGVGKKMGFSKWHVYPIHYILTNERYMGDALLQKRYTTSTLPFREKFNHGEKEQYYVENSNDAIISKDTFQAVQNLIALRREGNPIQNKDQNPFQGILLCSTCGKAMRRIRRAREPKWVCQGYSKQNGDCAAHTVYEKDIERAFVNLVNKLKDNQKEIIDETITLLAKAIEISGGNQERIHELNAIIADLCKRKHQVALLYEKSILNDHDFTVKSRDIDAELYSMRCERRKLLAQDKQIESLDELNDLKKSIEKYQRQDDFDAELFDEVVHSIEVTEDGALSFHILGGLKLKERSSR

SEQ ID NO: 2034 - protein, 558 aa, unidentified
  source 1..558: note = uncultivated organism
MTVRCAIYTRKSTEEGLEQDFNSLHAQREACEAFVKSQKGLGWKVLPKHYDDGGISGGTMDRPALQDLLADINAGKVDLVVVYKVDRLTRSLMDFARIIETFDAKAVSFVSVTQQFNTANSMGRLTLNVLLSFAQFEREVTAERIRDKIAASKKKGMWMGGPTPLGYDVEDRKLVVNEPEAETVRQIFGLYVELDTVRRVKDQLDQLGIVTKRRVQKNGKRTGGKPFSRGNLYQLLSNPIYIGRIPHKSETYPGEHEAIVDQEVWEAVQGLLAGNATTRTQPSNAKGAFLLTGKIHDESGDPLYQSQAHKSGKRYCYYISGHLMHGAHENNEGWRVPATTMEDVVMAPLLAMLRNQSQLIDNLHLGTAAVPTLNKLETQAANVAQSLEVGKPDKKRNILQAIVQRVDLRPESILLTLDRCTLAETLGMPRPNDVEPISLYVPVRLQRRGVEAKLIIDGPNAVTRNLDKDLCHLIARAHAWFGQLASGEASTVREIAKREGTNEHEITRVLHLAFLSPRIVEDILDGRQADTLSVYRLRRLSSIPFHWQEQAELLGNLR

SEQ ID NO: 2035 - protein, 510 aa, unidentified
  source 1..510: note = uncultivated organism
MQTRSVHYIPSVSQENVRLRMAAYARVSSSSEDQLLSYAAQLEHYERLILNNPAWELVDLYADEAITGTRADKRPDYQRMMKDCRRGKIDKIITKSISRFSRNTIDCLQHIRELKSIGVEVYFEKEQIDTGDAGGEMILSFFSAMAQEESLSISSNLRWGVRQRMKNGSYVISQPPYGYRLEEKRFEVAPQEAGVVQHIFRQYLSGIGMEGIAKNLTAMKIPAPQGAATWNPSAIRIILKNEKYIGDSLLQKTYTADTFPFERKVNKGEIAQYYVENSHEPIIRKDDYERAQNLMARRRIDKTCKKYPFSLMFYCNECGASFMRRVVRNKAYWVCRSHDGGKENCPVGRIPEIELEQAFIRLHHKLRLHIREILIPMLDQLRTLRQRAPYSSERIKEIDLAMLELKEQHVVLTRLHSEGHMDIVHHSTQSHILNQTISALRRERAALIENSHDESIEETEALINLLRNSPEKLECFDSDLFKGMVHRAVIDCDRQMHFQLCNELEVTEQL

SEQ ID NO: 2036 - protein, 509 aa, unidentified
  source 1..509: note = uncultivated organism
MRQEAIYARQSVDKKDSVSIEAQIEQCRALAKTREPLVFQDKGFSGKNTERPDLKRLFEAIRAGRISTVYVYKLDRISRNIVDFNQLYQTMEAYGTEFVSVNEKFDTSSVMGRAMMQIIAVFAQMERETIQQRVKDNYYYRITDGRWAGGPAPYGYKNARTENNVPTLKPVPEELNLVRAAFSLYDGTAHLSLASLCTWLYNQGYRTRKGGKFVSCTLSRIMQNPVYVQADQKLYKYFQTKKIKFLNEQEEWDGSTSCCIVAKKKGNSSLSKYEDMKEQSVYLTNIPGIVPSHLYISVQSRLKKNEQFKRANSPSALEELAGKLKCASCGHTIKSYSQSTNMRPYLSCPGRATHKICGESYRKVNFETLQEQIGREIQGYLDSIEGRERQKQEENRKLETRKEELKKELDNLIALAAKGGLTAEVLQAAIEERQTEINGIELKVQMNTSAVDFLKVNLENNSELNFYHGPQEHIEYGLLLMEQKKELVKLLIEKITLHSDGAYEIEWSL

SEQ ID NO: 2037 - protein, 509 aa, unidentified
  source 1..509: note = uncultivated organism
MEQSFNSLDAQREACEAYIMSQVGEGWSAVPTHYDDGGFSGGSMERPGLRKLLADIAMKKIDVVVVYKVDRLTRSLTDFARIVEIFDGHGVSFVSVTQAFNTTSSMGRLTLNVLLSFAQFEREVTGERIRDKIAASKKKGMWMGGTPPLGYRAHERTLLIDEAEAATVRHIFERYLALGSVNALKDELQRDGVRSRPGKRFNAEQGANFGRGPLYHLLSNRIYVGEIVHKDQSYPGLHPAIIDREMFDRVAAGLEHNRQTRTDQSIAAARAALTGLIFDADGRPLCPVSARNGRGRIYRYYVSSHLQQGGRREELAGVRLPAPEIEALVLERMQRLLPGTCDLARARSHLVRVEVTDEEVMITARPEGRPALKSLAEADRATVDADGTVRIIVPMTVRRWGGRSHVVEAARDHASVRARVDKSLIRGLGRAHALVATARTFPHRTVEELAVHQQASESYIRRLSRLAFLAPDIQQAIIDGRQPNGLTLERMMRIDLPIAWSEQRRVLGF

SEQ ID NO: 2038 - protein, 554 aa, unidentified
  source 1..554: note = uncultivated organism
MADDGQVRSHLRCAIYTRKSTEEGLEQQFNSLDAQREAAIAYVQSQKHLSWTVVETRFDDGGFSGGNMERPALQKLLTEIEAGNVDCVLVYKVDRLSRSLLDFARLMDRFDQRSVSFVSVTQQFNTTSSLGRLTLNILLSFAQFEREIISERTRDKMSAARRKGKWVGGTPILGYDVDPSGGRLVVNSKEAQRVLEIFELYRRHRSLATVVSELTARGWITKSRKSLRGIRHTGRPFTKASLRHLLTNATLCGKVRYHDVIYQGEHPAIVEPELWELVNSDFRKVPRTLSGPRNEPQAAPLAGLLICAGCQQPMIATYSKKGTQRYRYYVCQTAREKGWRACATKSVSANLIESSIAIELSSRLRLPETRESFQVSESQWTALLKQDPESLPQVLQSLVDQVHYDGPKGAVRIRLRDIGDGCVEEHVLTFEYKIPRRRGRALPACRLRSASDTLTRPPRLARLVALAHKLEAQVRSGRVKDFKELARLAQVTPARIGQIVILAQLAPVIQERILFLPSEHDVPLPERELRAIAREPRWDRQQELFERLLDDRAG

SEQ ID NO: 2039 - protein, 540 aa, unidentified
  source 1..540: note = uncultivated organism
MSDTKTKTIVALYGRVSTEQQVQHGDSLAAQRDTLTHWAQSMSWEVFDLYIDQGITGGISERPELQRLMKDARAGRFNLVAVLKLDRFYREQRLLANCIHEFDELHIGFISQSESIDTRIPGMTRVYLAMMGSMAQYERECIAERQIKARAFHKSLAQWSSGRTLFGYHYNKATKTLEIVESEAEAVRFIFTKYTTQKIGLAKLAIELNKTTLPPPRVRKHQQRDFWTQGGILHILKHPAYKGGPSAEWAYATPAIITPELWQQAQDRRNNNFHFRPSDQGKTKYQGRLVCGLCGRRLSIGYNGGHHRVYTCPGRAHLAHADGSPKCTLPRFDTDTMDKQIANKIEKLCKDPSLLFDYLTQYTKNVEKEQVALKAQLKPLQKEADAVREDMNIIDAKLELKRISVEDYKSRMATLKSKLTGIESRTSNLDPMLVREIERNTTWLDASKSFLEGWPKIVGDTRVSSWDLAQHVRIAADLPRWHEAVKESFKVLKGETTIEKADPVLKMVGDAFQLFVIYPDKIEFKGNISVANLQNSTAYC

SEQ ID NO: 2040 - protein, 601 aa, unidentified
  source 1..601: note = uncultivated organism
MEVQVIEKIQGRIDRTTGLQINRKLKVAAYARVSTDSEDQLNSFESQVKYYNEKISKNIEWSFVEVYADESISGTQDYKRSNFMRMIQDSMNGKIDLILTKSISRFARNTLDTLKYVRMLKEKNVAILFEEENINTLEMAGELLLTILSSVAQQESETISSHVKLGLKMKQQRGELIGYNGCLGYTYDKENKSISINQEEAEIVKYIFNRYAQGVGSSIIARELTNMKYLTPKGLTRWSDSTVRRILKNEKYKGDVLQGKTYTTDPITHKRVINMGEENQYYIKEHHTAIIEPELFDKVQQILEKRAGSRSKGKRRGNYSRKYPFSSRIYCGFCGTVLTRRNWNSKTKNETPVWHCMNFVKRGKQECPKCKAMRETVIENCFVDVYKILCSNKGDIVNKFITRINSIITENSSSKLIENIETEKEKLKSKMNKLIDLSLDNAIDRDTFLERKEKMQNQIEQLNLKQEKLVLDERNKTNRKLSLNKLKRYLENGEIITEFDKDAFEILVKQVIIGGYDEKDKADPKQVTFVLKNESKVNYEDYLQTINDISQKNLQMSDHTCGSLCVARVKEMPVILEFTGFQDTIMFRSYTILYGCMLMNI

SEQ ID NO: 2041 - protein, 573 aa, unidentified
  source 1..573: note = uncultivated organism
MNSSKKVKIAIYIRVSTDEQGEKFGLDTQIRKIEDFIKFHSDDGWIYDRSLIYEDKGYSGTLPPEGRPALKKLMQDAKKGLFDLVVVYKLDRFFRSMRYLLETIESLQEMEIGFYSVSEKFDTSPMGKLLMNIFGTLAQFERDLIIERTSEGKISAARAGRYVGGAVPFGYKVESTKGLKGTKGTRIIIPDKEDSKIVKDIFYWFVDLDYSPLEIARALSKRGVLTNRDKEYKGKYRRANPVGKWSETTIRNKLGDTHYIGKYYYNRRDGSGKEKPESDWIEMECPRIINDETFNKAKRKLEAMKRGRNNKKYDYMFSGKIVCGLCQSSFTGYMSSKKTKNYRCLKTNKSKVVKTCRASHISEKILEETIFPVIENLLKHPKAALEYMQKKLNQSAEYNFYKGQRVSLKKQMDKVEASKAILIDIRMGNQITKEDFNGRLKELDRQYLGLKEELESVESMLTSEQLKKEKIESIKEVLKKYKDKLNEKTSYSDKCSIVKDVVKRIVINGDDVKLELFIPRKIQEEVSQRGGSLPGELTKTPQKNLFGKVKLKNLCGGTGGTRTHEWRFCKPQR

SEQ ID NO: 2042 - protein, 553 aa, unidentified
  source 1..553: note = uncultivated organism
MPKIRCAIYTRKSSDEGLEQEFNSLHAQREACAAYVTSQKAEGWVLLPAEYDDGGISGGTLERPALQRLLGDIDAGLVDQIVVYKIDRLTRSLADFAKIVDRLDAAGASFVSVTQSFNTATSMGRLTLNMLLSFAQFEREVTAERIRDKIAASKRKGLWMGGQVPLGYEAEGRTLRINAEEAETVRTLYDLYARLGTVRAVKAEADRLGLVTKVRSRPDGSCTGGISFHRGHLWQLLTNPLYAGRIRHRGQVHEGQHPAIIPPGDWDALQAKMQAEAKKPRARGKGEGSKGAGAHRSLLAGRIFDETGDRLTPSHAKSKAGHRLRYYVSHRLIKQSGETGVAGWRLPGPELEALVLQTMRRHLDEPAFIPRVLPQADAAVIGQVRSRLADLMATENDRPLFELVERVDIAPGQIALRIGAQSLGKMLGIEPGQIDPPALSIAAPFRSRKRGVETKLILNGTARPVDPVLLANIARAHSWFAMIREGKSYEEIARATGTSRHRVQQMLHFAFLAPDIVRSITEGRQPALLTTKWLTRHPLPSDWQAQRRILATL

SEQ ID NO: 2043 - protein, 509 aa, unidentified
  source 1..509: note = uncultivated organism
MISAVVYARYSSAGQNEMSIEGQIEECRKFADANDLVIIREYVDRAKSATTDKRPNFLRMVDDSRVGDFNIILVYQFDRFARDKNDSGYYKKILRDNGVRVVSAKEFIAADSSGVMTEGFLELYADYFSKQLSEKVTRGMYQRANQCKFNGGTMTFGYAVDSEGYYILDEHTAPIVKEMFERTAAGETAKSIGDDLNERGIKTVRGNLFTKNSLQNILRNEKYKGIYIFGDTRVPDGIPRIISDELFDDVQTVLGSKSHGHRPAKEDYILTGKLYCGLCREQMMGTSGTSRNGAIYRYYTCKNSGKTCRKKNVSKEFIEKQVIDICRKSLTNGLIEQVVKTVEAYNKKDQEGPEIIRLKDEIKSVEKKIDKLIEQIEDGLASSRVTSRLAQREEELSHLEKCLKKEMAKQRIIDPGMVRDFMRKLRKGTYDTLQYQKMLVHIFVDRIYLYDDHFSILLNNNNRQAATSEKEAEIIEQYFTGVCSKTEECSVPRESSNALKTGRLRILIF

SEQ ID NO: 2044 - protein, 558 aa, unidentified
  source 1..558: note = uncultivated organism
MADKTLRCAIYTRKSTEDGLEQEFNSLDAQYEACAAYALSQQHEGWVVIGARYDDGGFSGGNMERPGLKQLLADIKAGQIDIVLLYKIDRLTRSLTDFSKIVEVMDNAGASFVSITQSFNTTTSMGRLTLNMLLSFAQFEREVTGERIRDKIAASKKKGMWMGGPVPLGYEVQERKLLVNHAEAEQVRHIMRRYLALGNVPALAEDLNEQGYRTKVQRRTSGPHKGGCIFRRGTLYHLLSNRIYRGMIIHKDNVYDGEHEAIVDEALWNSVQERLASNACGLSRRRKHQHPSLLISKVFDGEGRAMTPSHAQRGSRRYRYYVTRPEGVDGSPAWRVSAHDLEQLVCDQIARRISDERFVLELLKDCDSEAADFERGRANTNLLVAQLRNGKSHDLAKLLKQMVQRIDLHQDCVEVGLCGTAIGRQLELASVAGTPLSITVPAVRVRRGHQLRLIIPGKEPATAAPTQRDDKLIALLADAIEASKLVEANPDKPLASLARDHARCRTRLGNLVKLSCLAPDIVTAIVEGRQPTDLTASCLSKMTLPLAWEEQRKQLGFG

SEQ ID NO: 2045 - protein, 524 aa, unidentified
  source 1..524: note = uncultivated organism
MSKELRRCAVYTRKSSDEGLDQAFNSLDAQREAGEAYVKSQASEGWRALPTRYDDGGYSGGSMERPALQRLLADIARGQVDVVVVYKIDRLTRSLADFARMVELFDRHGVSFVSVTQAFNTTSSMGRLTLNVLLSFAQFEREVTGERIRDKIAASKARGMWMGGLPPLGYDPPDDPSRTLRVNAAEADTVRQIFTRYLELGSVHELERWLHAQNIRSKRHVIRTGRVMGDLPFSRGALFHLLRNRIYRGEIVHKDIAHPGNHEAIVDEALFDAVQAQLDRSAVRRGHKAVSERAPLVGRIVDADDRPMSPTTSVGARGRSYRYYVSTGVQCGRGQMQDTSIRRVPAVKTEALLRDVIRRVAPQVTEPLDLLMRVQVRADRIELMLRGVSLADVRRAVTDGQVERDHDEAGQLRLTLPITLRWRGGLAAIHLAGDEARPDQVMIRALRHAHVMIDRDGRGLPLLDVAPATPYLRRIVRLALLAPDIQSAILDGRQPVELTLERLTRAEIPLGWEQQRQIFGFATA

SEQ ID NO: 2046 - protein, 551 aa, unidentified
  source 1..551: note = uncultivated organism
MPKANRSNAKRSKNPSPSSRVAIYARLSVADQDKPGYTSIDHQVDSCRSYIHLRKPDGWDQSPEVFVDEGHSGGTLQRPRFQELLRRVKEGEFAAVVVHKFDRICRSLSDFLNLADLFTRLGVTLASATEHIDVSTPVGKAFRNIMMTFAEMEREMARVRAKEKRTASVKKGRWPGGNPMLGYDRGSDPCLLVVNEAEAERVREVFDIYLKERSLSRTARVLNGRAWRTKEWTTRAGNSKGGHKFTKTNVAALLRNPIYVGKLRHDGQLYDGNHTPIVNPKAFARAQRHLDRNGTRRTSPSQNKHNFLLGGLVICAACGSHMTPNFAHSKGRKYFYYKCTSVDHLDKSACPVRSVPARALEDIVIERLSVLAEHDELLQEMADRAQSASRDALPKLRKERADVETSLRRVEKKARRLLSVLEQEGDNARTSFPLQRLQELEEEEEQLQTQLSELDGQMVATDGRVVETEAVRDALREFNTLLGKLTPQGQIEAVHLVVRQVVYDEQNGQIRLLLRPLPGLEEAVRKSGADIEGVGFDESGTWLAAVRSRAA

SEQ ID NO: 2047 - protein, 674 aa, unidentified
  source 1..674: note = uncultivated organism
MYNTKEGKSCVIYIRVSSERQVKGYSLDGQKHYLAECAERRGMTVLDTYVEEGKSGKSIEGRTEFQRMLDDIQSGKVHTDYVLVFKLSRFGRNARDVLNSLEFIMKYGVHLMCVEDGLDSSTSMGKMMITILGAVAELERENIIAQSLLGREEKAKSGGWNGGFAPYGYRLVKGDDKSKGKLETVPEEKAVVQLVFDMFLNRNMGYTAISGYLNRNGYTRPPAKNAIRPSYGEWSSDHIKRMLSNPVYTGRVAWGKRRTEKVPGKDNEYRLVKQDEYILSEVVSHEAFVSKEDFDKVQEIKAIRGKKGNHNIGQYNAHLLSGIVKCPQCGAPMYIGMTKWTNQDGTERRTESYVCSYATKHRGTSVCRRNGVVASQVEDEVMEYTRKIVRNPQFIKDLQEKVMTAVDMTEVENDITAYKNQLSALQRSRDSLERDIDRIAPDDKYAERRRADMTRRLNDLYDQIYKAEDLLQESLMKKTTLESEQMSVQSMIGILSSFDAIYDRMNAAERRDLVKYLISEVELFPREEQKTQKRFVKAIAYKFPIEQKVLTQFDECGASVETVVLLSHKKPDGHINVKVEFGEGEGKVPLNNIAKRAESYKPKERVTYKMIKEYIEAKYGFKVHTAYIAEVKRDLGLPMYDVPNAVEELKQPRKHPTAEKVEAIKDTLKHFEVI

SEQ ID NO: 2048 - protein, 512 aa, unidentified
  source 1..512: note = uncultivated organism
MIVTDIPRNSNSEEKIKLAAYCRVSTNSSEQIHSFMAQVKYYRDYEKNDPRYQLVGIYADEGITGTNMNKRDEFNRMIQDCRDGKIDRIVVKSVSRFARNNEEALRVLRELKELDVSVLFEKENIDTDTMNSEFIVALFGMNAQQESMTMSDNMRWSYQHRMQSGEFNTCKAPFGFKLSEGKLVIVKEEAELVRRIFNMYLSGHGKFSIAKTLNDECAGKEFGITKWYPTEIMYILKNERYMGDARLQKRYTSTTLPYRLLYNHGEKEQYYIENSNDAIVTREVFQAVQSLIEQRKNHNQHNDTTDNILKGLIKCPECGNTMRRIGNVNRPKWRCRGYCLKTSSCSAHTIYEDEIFVAFTNMANKVKDNQKELILDTISLLDQLMQIAGSNKERIHEIDVDVADLSKRKYTFAQLHEKKILSDRDYIVKTNEVDSQLAKLRAERKKLLDDDKSTECIDELYSLNKIISSYEKKSLFDSNLFEDIVNKIEVDDKGNIVFSLLGGLAFTERIRR

SEQ ID NO: 2049 - protein, 512 aa, unidentified
  source 1..512: note = uncultivated organism
MPKVTLISPATKQEVTKLRVAAYCRVSSNSADQLNSYARQIKVYTDIIKRRQDWEMVEIFADEGISGVEAAKRPEFLRMIKACEHGEINLIITKSVSRFARNVKETLEYVRKLKLLGVGVQFEKEGINTQSLGDEMLINTFAAIAQEESTSISMNMRLANRKRMADGDYFNASEPYGYRYDGEKLVPYEPEAEIVRDIYRYYLEGNSTETIADLLSSRGIPTKSGKDKWRASRVACIISNEKNIGDSLYQKTFTTPLPFKKIKNRGEEDKYYISETHTGIIDRETYERATALLEKRREENARKGEITEYTLSGKIGCTDCGSYYRRRVVRGAVRWACTNHVKNADSCNSHYIGEDRIYDGFVAVVNKLKYSDTDILAQTERSLESAIQMMKRQNTDAMQISRQISEMNAKLLMLEQLRSKGYLAPEIYQSQTNELTNELNKLKAKRQSAYESKLEDELKKIQTLRKRIDEIGEPLAAFDDMLFHETVESLALNNKDELTVTFIGGISFTEII

SEQ ID NO: 2050 - protein, 541 aa, unidentified
  source 1..541: note = uncultivated organism
MRKVAIYARVSTEHEAQLSALENQIQYYDEILERHPDWLLVDKYIDEGITGTSTKKRKSFMRMMEDAKRGRFDLIITREVSRFARNTVDTLQETRKLKKMGVEVYFTEDNIWTFKDDDGELKLSLMATLAQNESKKTSQRVKAGMQISFENGVFYGTGNILGYIKINKNKMVIDDEQAEIVRYIYKEYINGKGTTSIAKDLERRGYKTSTGMTRWCASYITRVLRNPFYCGTIVYRKEYVPDYLEQKRAKNTGQVEKVIVEGSHEPIISKEVFEKAQAILDNHSKLVKAGLRKAQGVAKNIWSKKMVCECGSAFNRRVYHKNQDGKTYAYTCYNRKMHPKGRVYSYDYVPCEVKDVQEWKLLYMAETIFKGLIQNEDNRAELTKILTEGSKIDEQEEKLLKKEISRLKKIIDEENTKLDRLLDMYLDSVVDIESYERYQKSSEERIERYKLDIEEYEKKLERLEPIEIRRENARKSVMKLLDINYNGIDDRIIEEVVEKIVVHKDYFEWKLNFMDDPIKLEIIGKSQKDFFVVEYKKNHAK

SEQ ID NO: 2051 - protein, 570 aa, unidentified
  source 1..570: note = uncultivated organism
MNEMKYRACAYLRLSREDDDKRGSTDESNSIKSQRMMIESFVRGLPDVELVKEVCDDGFSGTDYERPAFMEMIAMVERGEIDCIIVKDLSRLGREYIGAGNYIQKYFPQKNVRFIAINDNYDSLTANSSDRYMVVPVKNFVNESYCRDISIKSRSNQQVKRMNGEYIGSFVCYGYRKDEQDKNKIVPDEEAARVVQDIFAWKLMGLSANSIAAKLNERGTLSPAEYKKAHGEKFKTSFQRNPEAKWTPKAVLRILSNEIYIGVLEQGKREKVSYKVKKTIEKPKSQWIRVENNHTPIITEADFKAVQELLKRDTRAKESMTEPKLYAGLLFCGDCGRGMVSRKVPYKDTVNEYYICSGYNRGKECTRHSIKVDVLNEIVLGEVRKYVKQLTDTKKLLSILDAKQIHFEEALNRDKEIAMLKEKEQEYSAMKSALYTDLQEKLITQEQFNRYREIYSNKLSEIAQAIKVQEATVKSIYENGIAAGQWLDDFRENMEIERLDRILLVSLIDKILVYEDKTVEIVFKYRNEMAKAVELVKGEIEAEKVEVVATTADAVALNSGALELPMREVS

SEQ ID NO: 2052 - protein, 527 aa, unidentified
  source 1..527: note = uncultivated organism
MSTRRQLAATPASLVDTKRCAIYTRKSTTIGLEQEFNSLDAQREACEQYIRSQAALGWQLVLEEYSDGGYSGANIQRPAFQRLMQDVEARRIDIVVVHRVDRLSRSLLDFAKLMDRFNRAGVAFVSVTQNFSTADAMGRLTLNVLMSFAEFERAMIGERTRDKMSAARRKGRWTGGPAPLGYDVVDRKLVVNETEAALVRRIFALYLDLRSAVAVARALNAESQTTKHHVSTKGNNHGARAWDRQAVLHILRNPIAAGLMSCHDEVHEGQHQAIIDQVTYRRVQSMLDERSGERTHWGRNPGYILTGIIRCALCGQAYTPASTRRGSREYRYYRCSTRDKRGHDACAGGPLPARAIEDFVVARVRDALADGTLAADVTRAVKDRLADQRASLVTERRELPSKIASLSSEGKRLVEAVSNVKGAGQRLLDAKLQEVGEQLGRLEARQREVERRLSLLDGCELEAEWVSRCLADFNQVWDTLSSENRGRLVRAVIERVEVDEPKGDVRTFIANLGVATEVIASAAGAST

SEQ ID NO: 2053 - protein, 510 aa, unidentified
  source 1..510: note = uncultivated organism
MRVCLYQRISTDEDHQPTSLKTQRERLERYCEAMEDWRIVAAYEDQASGTSLDRPGLQQALDLAREKRIDLLLVYRVDRLSRKVRQLAGVCEELDQLDVVLKSATEPFDTGSAAGRMMLQMLGVFAEFEHATIVDRVTAGLERRVREGKWMSGRTPYGYARDKETKLLVPDQVKAPVVRRIFNLYAEGKLGTTAIARTLDAEAAPSPRKTGWSPNALQLILANPAYKGLVRWNGETHPGLHDPLVEDETFEKAQEILRRRGEDVSLRRGNPTDYLLSGLVRCHHCGRAYVGTSAHGRNGRYTYYACSTRYKYGPAKCNGDRLPKDRLEAAVLTQLAELYRDGHLIEKALADLAAATDGERPELEEQLASTRTEISRVESKLERYFEGFEEGRLVADLFQDRVRGHRDRLEALRERDTDLTARLATHAHTPPDGAALRGLADQLEAIVGGENPEQAKELLRLLIKEIQVHDRRRIIPTYRIPAAVRATPRKVELGGLEPPTSWVRSRRSPN

SEQ ID NO: 2054 - protein, 526 aa, unidentified
  source 1..526: note = uncultivated organism
MARNSASRFPAKASDGSGPGKTIRCAIYTRKSTEEGLQQEFNSLDAQREASEAFIASQKNEGWQVITDHYDDGGYTGGNMDRPALKRLLAAAEAQSIDCIVVYKVDRLSRSLLDFARIIEILDRNGVSFVAVTQQFNTTSSLGRLTLNILLSFAQFEREIISERTRDKMSAARRKGKWIGGHPVLGYDIDSKGGRIVVNPAEAEQVRTLFGLYMKKGSTLPVLLETQRIGLVSKQWTTEDGKVRGGKPFTRGSLHATLTNVLYTGMVDHKGVLYAGEHDRIIDQETWDRVHEILRSNGNDKGASVRNKLGALLRGLLFCVPCGAPMMHTYTMRKSKRYRYYVCYNAQQQGWQNCETKSVSAQAIETAVLDSIRRIGTDPKLAEAVAAEAIDQVARQRVALDKELDTQRGSLRRLNQSLAREAADTSVDSGARFDRIVALQREIETTESRLKELAAERKSCDADRINADDLRTTLAEFDSIWSSLIAREQEQLIQLLVAKVGYDGRTGKVTVNFRSAGAKELCQGKS

SEQ ID NO: 2055 - protein, 524 aa, unidentified
  source 1..524: note = uncultivated organism
MRVALYTRISTDEDHQKYSLDAQRDRLEAYCKVQYDEFTIHKIFRDTSTGTNMNRPGLEQMLADVEAHTFDALIVFRVDRLSRNVRQLAQMVEVLTDNKVVLRSATEPFDTANAAGKMMMQMLGVFAEFEHATIVERTRVGMERKAKNGEWCGGFVPYGYQRVEGLILIEDSEAAIIARIFRNYVYGMKGTTNIAEELNKSGIRKRRGLPWDNRAMIVILRNPFYTGVIRWKDKIFPGKHEGIISQEIFDKAQEILETRNVAPKGARFSLKSDFFLTGFIECGMCGKGLVGRSAHRNGHRHKYYSCSSRANHRGCKLPFIRADIVEVLVLEEIQAIFRKPVLLQKIWDLVNEQLQADRPSILTELNKVREDIIKAKFGLERYFGAYESGVINDETIQARVAELNLRVQQLEDEKVILEDQLSESDLKAIDQDAVKAYLDALEVVLLDGTNEKKKQLLGVLVEKLIVHNKDKYEFWFRLPDGSILSEEVKNATDGTANSLSVNQLVPSVCNHEHVAPREGFEPPT

SEQ ID NO: 2056 - protein, 589 aa, unidentified
  source 1..589: note = uncultivated organism
MKENNPFVIYSRKSKFTGKGESIENQIEMCKQYIRVQFGDHAADSVLVYEDEGFSGGTLERPKFKKMMADAKKIQFRAIVVYRLDRISRNIGDFAKLIEQLKNMKIDFISIKEQFDTSSPMGRAMMYISSVFSQLERETIAERIRDNMHELSKTGRWLGGTTPTGYTSESISHVTVDGKTRKACKLKIIPDEIDLVKMIFDRFLATGSLTRTETYLIQNGYKTKTGKNFTRFAIRGILTNPVYMIADNDAYQYFTENEVDLFSEQSEFDGFHGIMAYNRTFQQPGKANQIRPMDEWIVSVGKHEGVIEGWAWVQIQKKLEQNKSKSYRRPRSNVALLSGLLICGNCKEYMRPKLTNRYNAKGETIYTYKCSMKERSKAHVCNIKSCNGNILDADVIEQVKALSEDGSDFIRQIEQSKRVLMGNRDSYDEQISKLEADITENENEIKGLVATLAKVSGTSAESYIVEQIDELHNRGEGFKRRLAELKELTASHALADIEFRLLAQLLSSFKENVDDMTVEQKRAALRVFVKEVIWDGENAHVVLFGSDYEYEFPETPIGIGGIQEEKIEEENMVGGAENRLLEPLGEYSK

SEQ ID NO: 2057 - protein, 574 aa, unidentified
  source 1..574: note = uncultivated organism
MKQKDTRGFAIYSRKSRFTGKGESIENQIELCRQRLRSMEVPERQIVVFEDEGFSGGNTQRPQFQAMMKEVRAGNLQGVICYRLDRISRNVLDFAEMQKEFGEHGVDFISLRDNFDTTTPTGRAMMLMSSVFAQLERETIAERIRDNMYELAKSGRWLGGHTPTGYKSVQVTGSVTVNGKVRRAYQLETIPEEAELVQLIYRKFLETYSLTKVDAYLLEQGIKTKTGRDFTRFSIGNILRNPVYLVADEAAWEYFEKNQVEVYADRAEFDGNYGVMAYNKTVQKPGKTNQTRAMEDWIISVGRHQGLISGADWVRVQEILDRNKSKSYRKPKSNVALLSGLLFCGNCGSYMRPKLTQRQNAAGEYIYTYLCEKKERSHGAVCSQKNLNGNELEKAVCRQICALTEDTSEFQRQMKKVKAAFETSNTGHRSHLDALLKESRENEAKIKNLVASLETAAGTASAEYITGQINDLHEKQQKLEHQISELENLTRDTAYSDADFAVLQEALAQFSAAFETMSVEQKRAALRLFVRKIVWDGENIHVYLFGDSEAQIDSEDLLQALSEGASMPLGGDSK

SEQ ID NO: 2058 - protein, 532 aa, unidentified
  source 1..532: note = uncultivated organism
MQRTHGALILARYSTDNQDEDTIEVQVDRCSKWCQAKGLPVLGVYADLAVSGMHDTRPQYARMMDDLRAGIGDTVVIYDQSRMFRRLTAWFSFREEAARLGAAVASVTQPNVGGDLRDPTNFVTEGSMALINQFWVLQTRQKVIDALRYKARTGQHTGGKPPLGYRVVDKRLEVDPAEAEIVRRIFGEYAAGRSYREIIEGLNRDGIRTKRGGAFGGNSLHDLLHNDKYIGRVTYGAHPYDERGQRNTHGAAAPSAIIIEGAIPAIIEREQYEEVQRRMASNKRLQGGRPATCRDYPLKGKVYCAECKGAMVVRRSKGNYYYYACARRKRAHDDGCKVRPIRVDELEHRVAEAVRATIGKPDNMEGLCRILREQTGEVCSAATRRVTALEAEAREVSAKLDRAINALLDGLSSPALRAQIEALEQRKAELAAEITRAEGQARRADLPEVKLREIVETIANGGGGDEAVLSIVARVEVAQEYITIWTILDSGPDGRIHYEDEEGGVIITPGAPSGVPIVIITPGGALCIRARR

SEQ ID NO: 2059 - protein, 724 aa, unidentified
  source 1..724: note = uncultivated organism
MNVKLDVESAVAASQNFVSRSSKITPGHLEGIAFVYVRQSTANQVLNHRESAARQYSLVDRAVEFGWQFDRVEVIDEDQGQSGATAESRTGFQRLLAEVSLGHVGIILGLELSRLARSNKDWHQLIELCAIFGTILADQDGIYDPTNYNDRLLLGLRGIMNEAELHVLRGRMHDALLSKAKRGEVYVRAPVGYVKSSAGKFELDPDEQARHVIYLIFAEFERLGSVRSVLRYLFEHDIKLPIRPHAGPNKGQPEWRPATPSVVNRVLKHELYSGTYRFGYRQTDPRLKKPGQPDAGRVVVPPEKYHALIPDHCPAYISKEQYARNQERIRENRFGRKTQGAARDGSSVLAGLLFCGKCGRRMTVVYSGPRAVMRYYCTTGVVDFRTSRCQSLSGAELDSLVTEKVLLALEPASLEISIEAVADLEQEQQRLQDNWNHRLERAAFEVDRAKRQYQLVEPENRLVVRELERQWESALHEHQQLSQEYARTRQLHLAALSKDQLQLIRSLAENVPRLWRSPTTTCSERQRVVRLLLERVTVTVQGTTEKVDVAIRWAGGFASHHELLRPVRRYDQTVDFERLRVRLSELKLAGKSYSEIATQLNLEGFRPAKQSKLFNTAIVGRLAKKLCRELTTSRNVGLELSQNEWRVKDLSKTLGIPRSTLQTWKDRGWLHVIRQMPGRSGMNIYWADEYEIDRLRRLRKTRWHYGDPPLSKELTTPKLDTSQT

SEQ ID NO: 2060 - protein, 523 aa, unidentified
  source 1..523: note = uncultivated organism
MATKTEPRKTVRCAIYTRKSTEEGLEQEFNSLDAQRMAAEAFITSQVGEGWVCLAERYDDGGFTGGNIERPALQRLLTDVNAGQIDAVVVYKVDRLSRSLLDFARIMGVFEEHNVAFVSVTQSFNSANSMGRLTLNILLSFAQFEREVISERTRDKIHLARKQGKWSGGCQVIGYDVAPEGRKLVVNPHEAEQVRAIFALYLELGGLLRVIEELDKRGWTNKTWITRNGKLHQGKPFVKNILYWLLTNPIYTGKVRHHGVIYPGEHDAIVDEETFAKVQRMLARNGRSGGEADQQYGFHSSAILSGLLRCKACDCGMVNSHSQKHNRRYRYYLCHNAQSRGWKHCPRPTLPAAEIERFVIAEIRAIGRDDGLIHEVVEQTGRIREKQLDEFTGCERLLKQELTSYRRQEQGFVARSHEPGAASSLTAIRERISQIERELAEVHGKLTSLRASTLAEEDIAQACRLFDPVWDTLTSREQHRILRLLIQRVDYDAKEETISITFHPTGIKTLNAEQDRELQKEAS

SEQ ID NO: 2061 - protein, 536 aa, unidentified
  source 1..536: note = uncultivated organism
MKNGPAKSVRCAIYTRVSTDHGLEQDFNSLDAQYDASQAYIRSQVHAGWTLIRSRYDDGGYSGGSTERPALQRLLVDVKARKVEVIVVYKVDRLTRSLADFAKLVELFDAHGVSFVSVTQQFNTTTSMGRLTLNVLLSFAQFEREVTSERIRDKIAASKRKGLWVGGMAPLGYETKDRKITVNEEEAERVRTIFRSYLRLGSLNRLMVDLRGRGIVTKVRTLKTGQTIGGIPFTRGPLAQFLRNRFFIGEVVFKGDVLPGEQPAIVDRDLFEAVQVKLSEQQSHHVVSRTKSEALLIGRIFDDRGNRMSPSHARKRGIRYRYYVTSALLQGQPERAGSVRRVPAAEVEVLVSSAIREHFNEPNKADDRELIHAHVVRVEVQADQLVIKLNSPTPRQARRQTPDGRQKMEPTLLHVSWQKTPLKRKREIIVPKSTTIQNARPIRAETRAKLVTSIALGRRWLEEIVTGSVTDVEQIAAREKCSVRKINMTISLAFLAPDLVKAAIEGRLPHGIGVARLCDAPVEWGRQYSTLGLPNP

SEQ ID NO: 2062 - protein, 555 aa, unidentified
  source 1..555: note = uncultivated organism
MNNTNSEKIYYAAVYVRLSHEDGDVSRAVKDESDSISNQKSLIQHFIRKQQNMELVEIFEDDGYSGVFFDNRPGFLRLLEAVEEGKVNTVIVKDLSRLGRNYVEVGRTVEDFLDVYGIRLISINDNVDTIDGDEKVRDIIIPFFNIVYEQYARDTSGKTRSALDVKCKSGQFIGSYAPFGYKKSEEDKNKLVVDEQMASIVQLMFQSYIEGMSAQSIANMLEGMHVPTPMDAKREQGVRCGNGFKTYKKSTWDVSMINRILRNEVYLGHLVQGKVSKKNFKQKKRYTKTEAKWIRFENAHEPIINELDFEIVQQLLQEDTRRANAEEVLFPLAGKVFCGDCGEAMHRRKVKSNDKYYNYYRCSAHKKDKSVCSQHNIAEDVLQNAVEESVRLQIQLLRDIEPVLEYCKQQWDRKRSTENLEIQRTELEELLSVQMGRIQSLYEDVKDGLITKEEYFDYKLGYQQKAVEIHERIAQLDEKRKNREIALDDRQWMERFQAYESEGSLTRVMVAQLVKSVYVYEDKRIRIVFNYHNQLEELKEMLEECNLQIPKEVAV

SEQ ID NO: 2063 - protein, 561 aa, unidentified
  source 1..561: note = uncultivated organism
MTKAVTRVSSIPCAIYTRKSSEDGLEQDFNSLDAQREACEAYIVSQRSLGWINSPVIYDDGGFSGGNTDRPALQQLLADVKAKRIKVIVVYKVDRLTRSLADFSKLVELFDEYGVSFVSVTQQFNTTTSMGRLTLNVLLSFAQFEREVTAERIRDKIAASKRRGIWMGGLAPIGYLPKDRALCIHEEDAIRIREIFKLYLDLGCVRQLKDELDARGWKTPARTTKREGAMGNREFSRGHLYKILSNPVYIGQIVHKDEVFPGNHPALIAPEIWHAVQERLTANLQSYRNRKNAMNPSLLAGLVFDANGCHLTPTHSKKGKRRYRYYVSNELHQGSAEDVDGLRIPAQELEGAVLQGLKSFLTDDSKLLDWLGSTQVGDSNSKDIKATLEFAKQHALNLQSSPIETLNKILNEVVIHEDKVEIGIKPSVLTNAEGSDESFWISVPVELKRCGMAMRLIVNGPEDQVRKPDLKLLALIARGHIWFKRLRDGDADSLAMIAKEEEVTVNYVSRLLLMAMLAPDIVERISKGEHPPQLTAKKLISHLPLPADWAEQRKLLGVPER

SEQ ID NO: 2064 - protein, 580 aa, unidentified
  source 1..580: note = uncultivated organism
MVESEKTSRRPAKRRRCAIYTRKSSEEGLEQAFNSLDAQREACVAFILSQKHEGWTVSSALYDDGGYSGGTMERPGLQRLLADIEAGKIDVVVVYKVDRLTRALSDFAKLVEVFDRHGVSFVSITQQFNTTTSMGRLTLNVLLSFAQFEREVIGERVRDKIAASKKKGMWMGGMPPLGYDVKDRKLVVNKEEARTVADIYRRYLALKSVRDLQADLASAGIRSKRRGRPDGTKYGGQKLARGALYLMLQNRFYRGEITHKGNSYPGEHPAIIEQQLWDEVQAMLAKNRIERTIGMRAKQTSLLGGFVFDAAGERLTPTYAVKKGTRYRYYISASLMRVARHNRSGGWRIPAGDLESLVINRMHAFLADPAALLDAIEDGSQSDSNRGQLIKRGRQLAQELRAETPDKVKATLMALRCRVAINPDRIEIDISRSRLAELLAGQSIDLTRQDQTLERNSDDVVTLTSPARLKRVGREMRMIIDSDDQTAADPSLLRIIARAHGIQIRLSQNTQLTVHDAAREERVTTAYIYTLLRLPWLAPDITTAIVNGRQPRSLNAKTLMRKASRLPADWAEQRSLLGFH

SEQ ID NO: 2065 - protein, 580 aa, unidentified
  source 1..580: note = uncultivated organism
MTTKRAAIYMRVSTQWQADNGMSLDFQEEKLLEYVKNNKYSLDKEKHIFIDAGVSGAKEDREWLKSLMKSAHRWEIDIVLVYKIDRFFRRILPLIEYVDILADYDVWFSSINQWDFNVDSVTGKIVLPIFWALAEMERDLIRERTMEWKRKKADMGYYVGWWKPPFGYEFDKSPQWNKLKVVVDEKRVVNKIFELYAKERKTLWEVAKILERDWELTRDDKIMALWEQKTKKVVSGRWHPTVISRILKEERYIGKYYYGKTQKVTNRKTRKVEIKPSPPEHMIELSCEPILEDFSLFEKAQELLELNKRTKNTKTGYPLTGLMFCSHCGKNYVWYKHSKNKETYSYRCNGKMKYKKGDKEPRCTNGEVSGTYVLNEAWDKIYEIFKSPDNALKKYYNEKKSHSDIAKFQKQVQKLEELIKKHNGWIKDAIKLQIDAAAENRPIYDEVIDEKRVHIREAENGIRELEQKIESLKNLEYAKNNLYRLKEYYDEKIKNITDEKKIEIVQELVYRVLVNFDGSTTILYKFQEHDDEWDDGEWKKPQKWENTFQDELDNDAPFEAIKNFGQNVKAFTTTTIIFLK

SEQ ID NO: 2066 - protein, 571 aa, unidentified
  source 1..571: note = uncultivated organism
MSEDIIKSIKCAIYTRKSTDEGLEKEFNTLEAQREAGLNYVKSQVHQGWEALSEHYDDGGYSGGNMNRPALKRLFEDIKAGKVDMIVVYKIDRLTRSLTDFSKMVELFDEYNVSFVSVTQNFNTYDSMGRLTLNVLLSFAQFEREVSGERIRDKISASKKKGMWMGGPLPLGYDLQDKKLVINPKEAALVRLLFEKYTVCKSPQYLADWLNSNGYRTKSKVTKKGKVVGGKQFDRAHLYRILDNRIYLGKIFYKGELYDGQHEAIISQALWDKVHKLKDKPVSEKGPINKTFEFKTLKGLLFCGCCGYAMVPTKAVKHNKEYYYYTSLKAIRKSYRFCEVKSVPALALENYVMNKLKTLITDPLLVHSLSKEVLKHVPNKTEYDVVKVVQGNKLINSLSAETRQQLCNLAISRITIWPDKIKIQLKNSMDKLVQNSLLENNVWVYNPETSAYEMTENVAFLKRRQQTEIYVGDEAEERHQDKQMIVALVRAFGWQHKLERGNLNIQELAQLEQMDRSYMGKIIRLTCLAPDIVESILAGLQPRDLTLKDLIRNTIPVDWNEQRKMFGFRQE

SEQ ID NO: 2067 - protein, 535 aa, unidentified
  source 1..535: note = uncultivated organism
MFCLRNVYAYNRGVNIRERIDVACKNAGFTRAECARRAGISPPEIQRICDGRVKRSKHFPAIAAARGWPVAEEICDPGESASNLNRPGMQAVMERLRGGEVAGVIAWRLDRLTRSVRDLLELLDLTSKAKVDLVSVTESLDTTNPMGRFVVHLLGMIAQLERETIAARTKSAMAYAKSKGFYSGGRPPVGTQVVADGERKRLVAGPDADRVRPVWSLILDGGSLRDAAAYLRRSGLPGTWTPQTARNLLLSPLLTGLLVEPIMQERVRHTLATKATPMRNGKHTTPRPAETPSPLRSIIRCPACNAAMVQVTARGNGGKYRYLRCTSRIKDHCLQRDLRAEPIEAAVMEAVADACQPGGPYRALLEADFEARRGTIEQDRAERAQLTAEHDQIAARVADLTLNHQIGTPSWNMAMKSINTRLEFIEPRLAVLAGRIASAESDRLSTDLILNDLWDRLQTLAQATVEEQTQLLTCLVQSARIEGDSVALTLYQPAPAAKAEGGPGSLKAQITFPRMDGIRTVVCLVPLRRALAIRL

SEQ ID NO: 2068 - protein, 579 aa, unidentified
  source 1..579: note = uncultivated organism
MASQNSNGIGRNQKRLRCAIYTRKSSEEGLEQDFNSLDAQREACAAFIASQKHEGWTALPEMYDDGGFSGGTMERPAFKRLLADVSAGSIDVVVVYKVDRLTRSLSDFAKIVDIFDKRNVSFVSVTQQFNTTSSMGRLTLNILLSFAQFEREVTGERIRDKIAASKKKGMWMGGLPSLGYDVKDRKLVINDAEAKTVQYIFRRYVELKSVRQLKADLDASGIVSKTRKASDGTRYGEKPLARGALYLMLQNRIYRGEIVHKGECYPGEHEAIIDEALWAEVQSNLMGNRVDRTLGTAERQVSLLAGILFDAHGDRMTPTHAINHSNRYRYYVSQSLLARGAKDLGQRIPASTLEALVMRRVRGWLADSASMLDIAQSYISDATTQKRMMDALGRHVATWHELKADDFRNLVLSIVARIQVYADRIDIVLNQGRLTHWLAGTDSQGERPPETQSDIESYCVTLSIPARLKRTGNEMKLIVADGSEPASPDPSLVRVLVRAHMIRDRVLQDKSLTLDEIAKSENIVPSYATRLFRLTLLAPDIISAILGGKQPSELTAQRLMDDTRLPLDWIEQRRSLGFS

SEQ ID NO: 2069 - protein, 508 aa, unidentified
  source 1..508: note = uncultivated organism
MKKGFSYIRCSTLGQAEEGFTLENQKRAIQEYCRSHNIQLLHTFEDGARSGRTVNRPEFQEMLKQIKEKNINCIVIYKIDRFARNITDFSRIVNELKAKQIELISLQEGNLTNGTSLVPNIFASVAQWESEVNSERTKDALMQKFRSGWQPCPPPIGYRSVGGEGERKSCEPEPYTAPIIRKLFELYSTGSYSIEKLKEWLEDKNILSKYGTIISFSRIHNILTNHFYYGLIRWHGQSKIGKHIPLISKELFDACQNILAKHRNFVIRERKYDFLLRGFVYCSCGMRLTADWHVIHSNNQKIAYYHCQRRYAPDCKQPYVQTKDLESQIEEKIKQIKFTYEFIQNLRDIADDFLASGKKNIESMKQALVNQKMSLELKRNRVEQLYIDGAMDKETYDRNHADLQSRIDNLQAQITNTEQEEKIDVPLIEKTLLLTKDVYQTYKEANDTIKRHYLRFFYERFVVKNKEIVEEKPTPVFDSLQRAFSVRLRTFQLPGLDSNQKPRSYTNP

SEQ ID NO: 2070 - protein, 571 aa, unidentified
  source 1..571: note = uncultivated organism
MKNKTIRCAIYTRKSTDEGLDQEFNSLDAQRDAAESYIKSQKHEGWEVVPTMYDDGGFSGGNMERPALKKLLLDIESGKVDIVVVYKVDRLSRSLSDFAKMVDIFDGRNVSFVSVTQAFNTTNSMGRLTLNVLLSFAQFEREVTGERIRDKFAASKKKGMWMGGKQPLGYDVIHRKLVINKDEAEIIRFIYDYYDKKREGQPLWKILDELKQKGYKGKTYISQKGRKVEGKDFTLNQIYKILSNPLYNGKMKHKNEVYEGEHESIIDDELWNNIQSKIRKKEFVNNPNKKSEEPRLVGKVYDYLGNRLSPTYSYKYSANGRYKMRYYINREIKTKGNTDSEFRRIRAEYIDNIVVKQILAVIEILYNAISKTKNVQLSAAILKELKTAKSNPIDVLSKLVLYPQNMELNLKLNNECCELPNDVVAELEFVLQSYKAEISIDSARQLIAKINIDAVYKRSAGQMHIITKDGKESKSERDARYSHSNDKTFSFIAKSFYWNKMIEGGVYNSQKEIVSSEKQSSEYVKKAIPQRYLSPKIISEITSGKCKSQIAVEKLIQCRHWAWKKQEEVLL

SEQ ID NO: 2071 - protein, 575 aa, unidentified
  source 1..575: note = uncultivated organism
MQKAGVRPIRCAVYTRKSTEEGLDSDFNSLDAQREAGEAYVASQRNEGWVLLPDRYDDGGFSGGALERPALQRLLRDVEAGRIDCIVVYKVDRLSRSLMDFSKLVELFDRQKVSFVSVTQHFNTTDSMGRLTLNILLSFAQFEREIIGERIRDKIAAAKKKGKRCGGLPLLGYNIVNGKLEVNPAEAKLVRHVFDSFLRIGSTTILARQLNGQGHTTKTWTTHQGKERKGGPWSKAHLYRLFRNRTYLGEVTHKGNVYPGEHQAIIPRELWDKTHSILAKNYHARTAKTKAETPALLKGLIRCGHCQTSMGITFTRKAGRMYRYYLCQNASKGGYGACPVKSVAAGEIERVVVDRLRNVLRDPEITARISRMAESPLSVDDIRDALQNVDALWNELFPGEQARIVELLVESVAVEEKGIVLTFRANGLRSLALESRGAVQTEAATSLGADPITIRIPMKLKRRGGRKEIIVPEGNAPGVKVAAPPQEPFVLAIAQAHRWQEMIDSGQYETARDLAKHLRVSREYVTRTLSLNYLAPDIVQAILDGREPSGLSLGKLARPLPLLWNEQRAQLGFAR

SEQ ID NO: 2072 - protein, 525 aa, unidentified
  source 1..525: note = uncultivated organism
MNRAALYARVSTARQEQEETIDSQIAEVKSRIIEDGALLTSERTYIDEGYSGSMLERPSLDAMLEAAKNQEFDVLYIYDLGRLSRQLSHLLIVTEQLEKYGREVVSLHERITGTPEDKFLLHIMGSMHEYERAKIAERFRRGKMYKARSGKIVGYNAPYGYTYNKETGLFEINPHEAIVVKNIFKWVIEEGLSTYAIIKRLHDEGFQPQKKMNDYWSRGPISRILKNETYFGKHHFNKSESILPRTKIKDTTKYRKIQKTGRRSRPREEWIGFDVPSIISEELFNKAQVQLLRNSNFNPKNRKHEYLLTSLIKCTCGAGRNGDGPEGKKYYRCTARHRFQPTETKCHVGGLNVQVTDALVWSKISQLLSSPELIRNHALKWLEQRSKHETNTDSSLYKNELQELKNEQKRYVDIYGKGLIDEEMFSTKMAETNKQMKSFHKQLTNSSANRGIVGKIDIEELISKASQKIGNLEFEQKKFIIERVIDKIVANPKEITIWGHIPTPSLVPAYAKVNHVSQYRNCRVA

SEQ ID NO: 2073 - protein, 550 aa, unidentified
  source 1..550: note = uncultivated organism
MREAIYYVAVYLRLSRDDIDSSTKAESNSISSQREMIRSYVREHEDMELFDIYVDDGYSGANFDRPEFKRMMADIEAGNVNCVIVKDLSRLGRDYIEAGRLIQKTFPAFHVRFIALTDNFDSQTADNSTKALVVPVKNFINDSYCRDISQKVKSSQRTKREQGKFIGAFAVYGYRKSEEDKNKLCLDEYAAQIVRNIFAWKLDGMSAQAIALRLDELGILSPMEYKKSLGEHYSTSFRTNITAKWSAVAVNRILTNEVYTGVMVQGKSGKVNHKVKKTVEKPKEEWVRVEGTHEAIIAREDFEIVQELLKVDTRAKADGTCSHLFSGLLFCGDCKEPMYRRVNRYKGVSKVYFICPTRNRGQGCTRHSIPEEELKEIVFQTLQTHIAVFLDMCSQLEHIRKMEVDFEEVARFDKEIERLRKEQEKYLDLRAGLHEDLKTGLITEADFKNFRAIYEKKYEEAKEALQKQEEMIKKLFRNGVASGVKLERFKEAMKLTELDRDTLLCFISRIEVFENKKVYVEFRGKEEFHKMLILQDYVASKAEGREGAAV

SEQ ID NO: 2074 - protein, 554 aa, unidentified
  source 1..554: note = uncultivated organism
MSKPIIRCAIYTRKSSDEGLDQAFNSLDAQYESCASYIASQRHEGWKLIKGRYDDGGVSGGTLERPGLKRLLDDIDAGRVQMVVVYKIDRLTRSLADFAKLVDRLDAADCSFVSVTQAFNTSSSMGRLTLNVLLSFAQFEREVTAERIRDKIAASKQKGLWMGGVCPLGYDKHPDPKARTLVVNDAEAKTLTKLFELYDQLGCLRSVEEDARRLGLLSKRHYYSTGRVAGGRTFSRGQIYFVLRNPLYLGQIRHKEKTYPGQHPAIIAQDLWDRVQSKLTEASQRKRGQTQDQKPNAFLLTGKLTDDIGNRLTPTSTVKGNKKHRYYVSTRLIAGKQDNSAWRLSAPMLEKKVITVIADHLGVHAKRMTLCPDLSLHQMEQLRERTAELTAELKNTAITKTGDIIASVRLEMDQVGIGLNVAALAEHLQINVDKLAPEIAVIQRPWQIKRRGVETKIMIGDEVAPPDATLIKRLHQAHAWAQEIRRGVSLKTIASQAGVTPAYIRSRSKLAFLSPKIQEAILAGFLDPKFTVNHILAMKIPSDWDQQETLFLKN

SEQ ID NO: 2075 - protein, 575 aa, unidentified
  source 1..575: note = uncultivated organism
MIIMFLDNEFKIDSAVHIYARVSSEDQQERETIENQIDFAKKYCDLHKLDIVDIYKDDGISGKIPLENRPEGQRLVKDASDGKVKVVLIYNIKRLGRSARDILNSVYQLEQYGVKIRSMTEPFDTGNPHGRFILTVLAGVAELDRETTLETMWLGANRAARKGKWLGGIVPYGYFVNSEGYIEPCEDPLPGKEEMTEAGVIRLMYELVANQKWSATKVANYFNSLGIPPAYVKDGRTVKRGKRKVRTAGIWTASRIYNMLVNTTYKGIHVYGKRTKKDRELINRTVPAIVSEEEWERAQQVLRENRIEAACRVHHPYLLRGLIKCGICGLTYHGTAYAGPKRKLKPYYVCGGKVVHRGPFLGRCPSRNVPAEWLEQIVWNECVSFIQNPGEMINELAGSMNDQKARRNSLEEEIKLIKQELERKDLERHDIITLFRKRIITASDVEKQLQVMMNERASLQKRLRQLEEQLSNESNLIQHYTHAQKLLNDLREKIKGDIPFELKKEIVKTLVKVIIVKNAVPTDPEDKIKRKPPVVVEVHYGFTNAKELSLTDTDSSSPPAGNGRGTGIPSSPGRW

SEQ ID NO: 2076 - protein, 510 aa, unidentified
  source 1..510: note = uncultivated organism
MATITVIQPSIMNETVKRRVAAYCRVSSSSEDQLNSYQAQLTYYSHKFEDSTTEELVDLYADEGITGTRDDKRDEFQRLMKDCRRGKIDRIYTKSISRFARNTKDCLKNLRELKSLGITVFFEKENIDTANMTDEIMITILGGLAQEESTSISANMKWSYQKQMEEGTINHHSAPYGYQIKNGVLEIVQEEAEVVRKIYALFLSGYGYMAICQELNKSSQPKDKKGHRWAVPGIQYILTNERYIGDSLWQKSYNISLPFKKVRNHGEKQQYYIRNTHEPIIDLETFEKVQDLINERKKPRVEKLSLYPLSKKIICSHCGSTFKKQIRNGKSYWVCRNHYINAESCDVKRMSETEIYQAFIRLHNKLLHHYRSILIPIQQMLQEIKCKKYGGNIRIMDIHKEIAKLREQNHVIARLRTKGFMDEGKYQEQTKELNSKIKKLQAELKKITRSDDEDDVLDQLDMLVDYFEKRDHMMVSFEPETFDSMVDKITANQNELTFHLLGGIELKEKI

SEQ ID NO: 2077 - protein, 512 aa, unidentified
  source 1..512: note = uncultivated organism
MAQVQIIQPYQPQGEVVEKVAAYCRVSTDSKDQLNSYHTQIGYYTNFIAQHPGWELVDIYADEGISGTSLEKRDEFKRMLQDCRAGKIQRILVKSVSRFARNTLELIETTRELKDLGVVVVFEEQGIDTAQMLGEMQLTLLAMAAQEESTSISKNMRWSIQKRMESGSFVTNYAPFGYRLEGGVLFPEPEEARVVKAIFTLFLSGRGALSIAKELNADQIPTRHGGKWGRSSVEYLLKNERYMGDAIVQKRYRTPTIPTTRRINHGELPMYHIHGCHEPIVPKEVFEQAQRLLAQRAVHTDRGEGGSVSLKMECPDCGNQFRRMKIRNTYYWGCRNRENNGSPCTKIRCKETQVQMAFLTMVGKLYTNINVIFPSIFSLLEEIAARQEQGNAKLYELNTVLADLNEKAHTLQRLHNKGFIEDADFREQSDALASQRKKLSDQRAQAIRGSKALETFDKLRDLQEQLAALPEIPWEFDMDLFDQLVEKIVPISNTELLFKLKCGLELKEVIPQ

SEQ ID NO: 2078 - protein, 549 aa, unidentified
  source 1..549: note = uncultivated organism
MREKIFYAAMYLRLSRDDIPAGDGGRPASVKAESESIANQRELIRAYIREQPDIELYDIYADDGFSGSNFDRPEFKRMMRDIEAGGVNCVIVKDLSRFGRDYIEAGRYIQKTFPALGVRFIALTDHYDSLQADTGESSIVLPVKNFINDSYCRDISTKVKSGLEVKRRNGEYISPFAVYGYRKDKENRNRLVADEYAAGIVRKIFAWKIAGMAVAAIAEQLNGLGILSPKEYKKSLGLKYSSGFSGAGRSLWGSASVKRILTDETYLGHLLQGKTQKVNYKVKKSVEKPKEEWVRVENTHEPLVSEDDFQIVQNLLKSDSRLGPGMEKAGLFAGLLFCGDCKEQMVRRVNRYKGKEKVYYICSTKNRGEGCSRHSIEEEALKELVEKTVKKYANTFLEEKALFDRAKEREEGFEAISAYDKEICRLKEEQDRYYSLCSGLYEDLRAGVITKEEFERLHGSFKGKAAQLEEAQKKQESLIKEMFKKGVLSAGRLKAFQDCVELRELDRHTLGSLVKRIYVYEGRRIKIEYYFMDQYRVMLGAGHDAERGA

SEQ ID NO: 2079 - protein, 557 aa, unidentified
  source 1..557: note = uncultivated organism
MARTKNRGSEEKISAPLNIRWKLGEYIRLSKEDLNRGKDDSNSVINQKALLDDYYRQHMDEFESVQPPYVDDGYTGTDTNRDSFQRLLSDIYAKKVNCVIVKDLSRLSRNYTDAGSLIENLFVQMNVRFISLAEGIDSYLNPDSISNLIVPITNVINDNFCYQTSKKIRQVFDMKRRNGKFIGGFAAYGYLKNPKDKNALIVDDEAAEIVKNIYEWFLDGMSKNAIVHNLNDRGILCPSEYKKSKGLNYQNPSGSERPLWSAKTVSDILKNRLYVGDMVQGRQRVKSYKIHTQEQVPENEWYIVQNTHEPVIDRPVFEKVQELLKRDTRTAPQQKKLYLFSGFLRCADCGKAMSRSQVKGIVYYFCRTYKDQSKTACTKHSIKHNQLEAAILYAIQQQIYLVVHYANILEYIRAAPLQKNQSMRIDALIEAKEKERSKIMRYKQSIYQDWKDGEISHSDYRHMSEDYERQMAEINAILNRLTEERKKLQNNADPEDAYLTAYRKFKTLNKLTREVLMELVDHIKVHENGNISVKFQFADELREGMEHIEIDAQSEAI

SEQ ID NO: 2080 - protein, 529 aa, unidentified
  source 1..529: note = uncultivated organism
MAMRNGKGKANGNVGAPVAKSIRCAIYTRKSTKEGLQQEFNSLDAQREAAEAYILSQRHEGWQLRPDRYDDGGFTGANMERPALKKLLGDIEADKVDCVVVYKVDRLSRSLMDFARIIEVFDKRGVSFVSVTQQFNTTNSLGRLTLNILLSFAQFEREIISERTRDKQSAARKKGKWIGGHPVLGYDIDPHGGRLVVNAEEATRVRGIFDLYIEHQAAIAVVEELRQRDWRTKSWQSAEGRAHGGKPFTKSRLYGLLANVVYAGKINHKGTIYEGEQDGIIDAKTWEHAQKLLGRNGVAGRDRTRNKYGALLHGLVFCVPCGTPMIPTYTMRGAKRYRYYVCLNAQQRGWNTCETKSVAAHAIEAAVIESIRRLGSDPEIARRTAEHARAQVAARTEQLRNDEAAGQLQLRRLNTEMACAATMSGTGDGAAARFDRLVELHKEVQSIEDRLVTLRAELEVLKDDPLDAADVLSALERFEPVWNSLRTHQQTRMVNLLVERVGYDGRTGKVTVAFRSQGMRELCSGRTVE

SEQ ID NO: 2081 - protein, 539 aa, unidentified
  source 1..539: note = uncultivated organism
MRSSLPKQPQAKLLRCAIYTRVSTEHGLEQEFNSLDNQREAAEAYIKSQAHEGWRMLPSRYDDGGYSGGSMDRPSLKQLLADIQARLIDVVVVYKVDRLTRSLADFAKLVELFDRHGVSFVSVTQSFNTTSSMGRLTLNVLLSFAQFEREVTGERIRDKIAASKKKGLWMGGQVPLGYRVQDRALHIMEEHALLIRSLFERYLTFGSVVRLKAALDQEGITVPERQDRAGRVSGGGAFSRGHLHKILTNPIYIGQITHREQVHQGQHPPILDRTLWHAVQERLASQTCDRGTRQPSEALLVGRLYDDCGHRMTPTWAAKGDKRFRYYVSQALLQGRKAEAGSCPRVPAEAIETAVAHAIADHRTSIGARGAGIGREEADGCLPEAVERIVIGSGQLVITIKGEGEAGETRTIQVLWTSASPRRQRAIIPCEAMGENAALRPMRVEAHAKLIKGLRLAHSWLDELLADPTCSTRSIAEREGRSERSVRMLLSLAFVDPAIVTAALERRLPRGFGMSRLTDLPPDWSEQRQTLGLPATGPI

SEQ ID NO: 2082 - protein, 571 aa, unidentified
  source 1..571: note = uncultivated organism
MSSIQKLRCAVYTRKSSEEGLDQEFNSLDAQREACSAFIASQVGLGWKLVYDRYDDGGISGGTMERPALKRLLADIAAKKVDVVVVYKIDRLTRALADFAKIVEVFDGNGVSFVSVTQQFNTTTSMGRLTLNVLLSFAQFEREVTAERIRDKIAASKKKGMWMGGTVPLGYKVESRKLLIKEPEASFVRHLFDRYLELRSVPALAAEVTAHADAMDQDDPATSGMSPPQVYTRRCRAGMLYNLLANPLYVGKLKHKDSVHDGEHQLIVDAMVFDKVQQLLAEQAATPRGSSAHADVHLLTGLLVDDAGDRMSPTHARARGKRYRYYISGRINGAKRTDTTAWRIPAPELDSTVTRFIARLLSDRSRLVEWIGMYAPTADIKRCLDAAATIQTKFANDRTADQRVMLLTLVHKIALGTAAITFTIDAAALVSMLQDGMSTAHPSVPDDHEQTDALVTIDFPVTIKRRGNEMRLIIHNDDLARIPDQSLVMMVARAQLYLQHLTHSPGISVTDAAEHFGVHRVDVGRILPLAFLAPKLIDQILSGNQPMDISARRLARDNLPLLWVDQLAALS

SEQ ID NO: 2083 - protein, 528 aa, unidentified
  source 1..528: note = uncultivated organism
MTRTKTRKAPTVSPTMRCAIYTRKSTEDGLEQEFNSLDAQRLAGENYIRSQVDEGWEIIPDEYDDGGFTGGDMDRPALQRLMSNIKEGKIDCVVVYKVDRLSRSLLDFSRILETFDKHNVAFVSVTQQFNTANSMGRLMLNVLLSFAQFEREIISERTRDKIAAARRKGKWVGGMPVLGYDVDPRGSKLVVNDDEAVRVRTIFDLYLQHQSLITVIRELDNRGWVSKRWVTKKGVERGGKTFTKTSLHKVLTNVTYRGKVRYKDEVHEGEHEAIVDPDIWQQVQTVMQRNGRTGGANVRNRFGALLTGLLRCVTCDSAMSPTHTTKNGNKRYRYYVCCHAQKRGWHNCPSPSIPATEIERFVVDQIRSIGRDSDLIRETASQVHEQANSQLVVLEAEQASLERELARWASEIRDVVAQVGPGDEDSPAVDRLADLQERTRTAERRATEIREQIRVISGRTIDQSEIAAAMASFDPVWDALTPREQTRVIELLVERVDYDGERGKVAVTFHPDGIRNFSDKFATEENTA

SEQ ID NO: 2084 - protein, 545 aa, unidentified
  source 1..545: note = uncultivated organism
MSETTLRCAIYTRKSSEEGLDQDFNSLDAQREACEAYIASQRHEGWKQLAEHYDDGGISGGTLERPALQRLLADIDAGRIDLVVVYKVDRLTRSLPDFAKLIERLDAAGASFVSVTQSFNTSTSMGRLTLNVLLSFAQFEREVTAERIRDKLAQSKAKGLWMGGYIPLGYTPNGRTLDIVPDEAQTVRRIFNLYDELGCLRLVERAAVEEGLRTKTREANDPKMRGGKSFSRGRIQNLLRNPLYIGKIRHKDIIHEGQHSGIVDDEVFKRVQEKLDAASRRADKRRAGNPGKIVSPLAGKVFDDQGRRLTPSHTSRGSRRFRYYVSRDLIRKSGNTNVDGLRLPAKTLEDAVAASLSKYLSECQGELSAGQNTSVTEISKRTNTLEALAKSDQETRLATIQKVVIEPGKLTITAELVRSDGDARADEELVTFVAPFTHRRRGVETKLILSDQAPTPDANLQKNLGRALAWLEDIHAGVRMEEIAERENLSSRFIRDRLQMAFLSPKIMDAILKGTQPAHLTSNTFVRADIPLDWSEQEALFGFTN

SEQ ID NO: 2085 - protein, 542 aa, unidentified
  source 1..542: note = uncultivated organism
MPKKLTPRPKTAAARLGDSVRVAVYLRRSTDEHNQPYTIGAQEHQLEAFIASQPGWSLVARYTDNASGAADPEERDGLRSLLDDASEGKFDVVLVVRIDRLARRITLLYELLETLENSGVALRSATEPFDTSGPMGRLFLGILGILAQFERELLVDRIKSGIDEKARKGLWLGRPPYGYDLVDKVLVRNDTEAAIVERVFNLYVDERLGAAAIRNWLNEKGHRNRSGRRWSTQAIVDMLGSYAYIGLVTHYDELHPGQHKPIIERALWDEAQQISEQRGDSGARKRVESDYLFSGLLRCGICGSALSGQSAHSRGERYRYYSCISRIQRGSEECNLDRVDANDVDRSLIAALIETYSDTDLFLGAARQWLANRDRQLPSLEAELAGAQAELAEVKEGLERWYAAVEHGNVAEQLIAERLETLISRRGSLQRRIDELGAALSASISDLPAEEDIVAYATRVAEALTEETVTPAKKALPATLVDHVTVQPGRVLHPHFKVPGTTMLLGESAQTERPMNPSESNGDAPNGGVCLHEVCSGGGDRT

SEQ ID NO: 2086 - protein, 517 aa, unidentified
  source 1..517: note = uncultivated organism
MATQDVTRAAIYTRVSSDEQVDGTSLTTQEERCRAYADAQGWVVVGIYSDEGVSGAKTSRPALNRLLADARAGRLDVVVVLKADRFSRNIGHLHTTVDALTNQGVGFRSVTEQFDTTSTSGRAMLGMLSTFAQMERDLIRERTQAGRQARVRSGGWGGGDLAPFGYRVEGSGRDAHLVVDEREAEVVRQAVALVLDHGLTTGQAADRLNALGLTPRKAPAWTGWNLRTCLSRGQWGGTWTFGKPGRHTVPEPITQAVEPVLSPERWAALQAWLQATATSRGIRGEHPLSGRLVCSCGATMYGMSRKGRRRRYHCSHAKGGPSNPRQAGLCHEPTILADAADRAVWAAVLDLLTDPDRLMAMARERLGMLEGAQEVTTDALAAAEAAVERTQAALAQGAARCIAMGLDEPTTAATLAELRAQHLAAVEHRATVAAISQETAHARERMTAAQRLAEVARDRLVNADATLQGKVLGLLDVRAQVQRDEGQGVRIVLTGSVAHDLLLGGLEATAPVSLATG

SEQ ID NO: 2087 - protein, 523 aa, unidentified
  source 1..523: note = uncultivated organism
MSASGSSAAFQTAAYCRLSREDGDKAESDSIVNQQRLIEDFCASHPEFELAGVYIDDGATGTNFDRPQFRQMLDDIEDGAVNCVIVKDLSRFGRDYIDMGYYLERYFPQRGVRFVAINDAVDSLNGPYDMMLPLKNVFNAQYAKDISGKVRSAFRAKQRRGEFCGAFACYGYAKDPANKNRLVVDPAAAEVVRRIFHMAAEGIGQISIAKALNDDGIPCPSEYKRMMGSRYTNGNRLQTTCYWTYSTVHKILRNETYLGNTIANRSVRAVMHGKAKATDRSEWIVVSGTHKPIIERELWEAVEAVVAKNTRPAGLSGVVSLFAGFLRCGDCGRSLVKTTWGARTTYSCGSYRRYGFTACTSHYIREDRLAALVLDDLNRVIAGICDLQAIADGLPARQKPEDGREKLEAALSRVRRLKRDIYEDYRDGLLDREEFILYKADYSAQEAALNAQFDAMTEANALRRNHWAETLIHRGSLESLDRTTLAQALDGIRVFADGHIEITYRFSGAQPEAKETRKNERLP

SEQ ID NO: 2088 - protein, 521 aa, unidentified
  source 1..521: note = uncultivated organism
MTTITKIEPMKKDPEQKQRVAAYCRVSTNKDDQLESLDAQKKHYEQVIKSNDHWAFAGVYCDEGLSAIKMKTRPDLMRMLDDCKQGKIDLVLIKSISRLSRNVTDYLSIVRDLNSRDIGIFFERENINTLKENDEFMMSVLSSLAESELVSISGNEKWGIKRRFMNGSYKQSIAPYGYVMKDGELVIDEDTAPVVRFIFNEACLGKGIRHITRELNVKKIPSRQTDHWSETTVKWMLKNERYIGEVLYQKTFTDDNFKRHNNRGYRDQYLLNDHHAAIVTREQFERTQELIALHRKEKGIDSEHINYQERYTFTGKLICEQCGSRLKRKSITGRNRKKCVIWICVTHLNNIKKCSMKGISEEAIKSAFTTVVNKLIFSKNDLLIPFVKAERECDGDGTQRIVERIDQKLDDNSVKAQKLATLVADDLLEPVNYQKALNELSAECNELNGKKKILLNQLQNKNLAISEGSELLKRIRQKEVTDEFDDELFTECIKVVHIYSRDEFGFEFTCGLTFREGVSLK

SEQ ID NO: 2089 - protein, 535 aa, unidentified
  source 1..535: note = uncultivated organism
MTIKCAIYTRKSTEHGLDMEFNSLQNQEESCKAYIASQAFNGWQYYKTYSDAAISGGTMERPALKQMLDDMAHGLVNTVVVYKVDRLSRSILDFHNMMKYFEKYGANFVSITQSFDTSTSMGKLTLNMLLSFAQFEREVSSERVRDKIRASKAKGLWMGGAPCLGYDLINKKLVVNPTEAEQVRHLFEKYLELQSVNNLTEYAQQKGIYGKRWETAKRKMRGGNPIAKMSMHRILRDKVYIGQIENKKEGTFAKGEHEPIVSNELFNRVQVALANNSNNKTTSTCAPNILTGKLFNHNGEKFINQRTSGKNKKTVNYYAIKGFYLSAVRVDEIVIKTITDFLNSDMSKLPINLSTVLKQVNIVDMAYTQKRCFIRTLVEKVVYSQEQLIYTLTTDGAKLQPFVSEKYINQNAEPMEYIIGDNSVTITEKVFLRKYVNTVYDRGKNGVLSVTDNNHLIVRAFAIAWKYRELYERDGGVDNIIHNLHTSPRQFYRYLDIAYMNPDKINQILSRKLNINVNDLFQIARQNQMINDPEN

SEQ ID NO: 2090 - protein, 544 aa, unidentified
  source 1..544: note = uncultivated organism
MTRQRQFAKTGIYMRLSRDDEKAGESMSIENQRVILQKYVAERGGTIIDEYIDDGWSGTDFNRPGITRMLDDAQSGKIDTIVVKDLSRFGRNYIQVGQYIDYIFPAYGIRFIALSDNIDTADRGSTAMDMMPIMNVFNEWHAANTSKKIRAVQAANQRAGKYTNWSYPYGYKAGTDEFRTAVIDEEAAKVVRRIYEMRAQGDSPRKIIRTLTDEGIPNPTNYFTSLDGKKWNRESSGHWCARTVMWILTNPTYLGNMIQHKTTRVSYKNHKILKVPESEWVVKENAHEPIISQELWDKVQSVNQSVARGKTDKNGEVHALSGLLVCADCGAKMKAKYTWGKNGKVYQFTCRTYTDLGKKYCASHTIMERKVESIVLQDIQSMLTEVNLDDEKARERFMRNKARSSEQNRYSDERQLKAIKSRLAELDKLIESAFEARVLGNMPESVCSKLCTKYQSEREGLEKNEEDIEQRLAEEDKNEEDVEEYIRRLKEYGGCETLTREMCVQLIDFITVGEKNSETNCRDIHIYYKLISNESLDDFRKSLK

SEQ ID NO: 2091 - protein, 553 aa, unidentified
  source 1..553: note = uncultivated organism
MKNIACMYLRLSREDGDSSESNSISNQRQIIKSYAKDNDIQLSYEYVDDGYSGSNFERPDFKNMIDDLNKGKFNIIIVKDLSRFGRDYIESGKYLQKIFPEKGVRFISVNDNYDSENADMSDTHLILPIRNFINDSYCRDISMKVKSSKEVKRKNGEFIGSFAPFGYKKDDKNKHQLVVDVGVSHIIERIFNMKIDGYSSKAIADFLNSIGTITPSRHKENNGDNFNTGFVVKNAKWDAKMINRIISNKVYIGVLEQGKTTKLNYKSKKEIDVSKEDWIVIQNAHEPIVSKSIFLLANKMLLRDVKQSKDKPYILSGMLYCKDCGSPMIRRKVKSKDGYNIFYICSEYNNHGQCTRHSIKEEYLMNATIHALNDYLSRYNELLEKVSKVDISKLTLKVDFESLSAEKKKYERLRQSLYMDLEEELITTEEFEKFRKNYLLKIKEIDKQIITKQNIVEELKAKINDKGSLVSDIVPNIESNNLSRLSLVSFVDRIEVGEDNAINFVFNNIETVNLLEAIIENEKAIDKKDDRKLISIHRYLGNHEPTVTIGGVC

SEQ ID NO: 2092 - protein, 501 aa, unidentified
  source 1..501: note = uncultivated organism
MRIEAIYTRQSVDRADSISVESQAEYCKKELTGNRYRIYTDKGYSGKNTDRPAFRQMMQDVAAGRIERVIVYRLDRISRSVLDFANVIDVFQTHAVSFSSTMEKFDTASPIGKAMLMIVMIFAQLERETIQQRVIDAYASRSRRGFYMGGRVPYGFALRQITIDGVRTHCYAPLERESAVIRRIFSLYAQPQASLGDVAAYLSAHNIKNRSGAPFSRSRIRDLIVNPIYVRADPRIYHFFQTQGTEIINLPADFIGVNGAYLYSGDADKRKTASLSGHTLVLAPHEGIVDAGTWILCRTKCLHHQSTAKPRKAQRTWLAGKLKCGCCSYALTVKVGRRKRQADVRYYLCSHKYASKGGCTFGSLRADTVDALVFEEICAKLREFPTLYPAPPVSGRSACRLQAQMDAVDSELQALVRQVPQADAGLMRYINRQITALEAQKEALCTRLSALERQAQADAPEITGYLQNWDRLTTGDKAAVADCLIESICATETELQIIWRI

SEQ ID NO: 2093 - protein, 648 aa, unidentified
  source 1..648: note = uncultivated organism
MKPIKTAGEENRIIRCYGYVRVSTLRQSDIEHGSLDAQADEIRHYLKFRETPQTQFHLKELLREEGRSAKDTDRPQLKKLLEAVRRGAVDAVVVTKIDRLTRSVKDFYDLWAEFEEHDVQLISVRDQFDTTTPMGKAMVNMILTFAQLEREMTAERTRNKMLWHAEQGLWNGGRPLGFRLDPQHKGVLFPDPQERKLAEMIFRKYLEVGSAGELARQLARQGITTPSRTSRRGRKVGGKPFYKTTILSILRNPVYIGKIRYNGKVYKGRHEPIIPEELFNQVNGHLMLHAPRHKNPRVPRKHVYLLQGLLYCGKCGAHMTPKTCTSTKQDNFYYQCTKSGHTNGGLCDMRYAPAPALEQAILGKLREIALKESEIERIVREASANTDGSLKELVEDRRRVETRLERVVAETRKIIDVLKELGKDGLRTLGDELRKLEAERIALEAQRDDIVGELNVLERRSMDAAVMGTSLRTFADILDEATPEERKGLIPMFVDRIVFHEPDKGGNGKVQISLFECPVRRDGNGCNHPGFKSAESSDWLPGQDSNLQPCGYERPDLSAGLGLSHRPEGRRALPLQNHDRPLESTAFRPSLCTFPPPPSAEGFAQDHLAPSRGLGFPEFTRFFNRGFPRKLLFARVATRAVNSRSLYH

SEQ ID NO: 2094 - protein, 587 aa, unidentified
  source 1..587: note = uncultivated organism
MNNEKKKSAIYIRVSTEDQAREGFSLGEQKEKLQDLCKYKGYEIYKVYEDAGISAKNMERPAFQEMMSDMRSGKINIIISYKLDRITRSVQDLEKLLKELEKYNCDIACAVDDINTDSANGKFITRLLTSVSQLEIERTSERTKFGLIGAIKAGHIPGITPLGYTRDNKKMIIDPLTKDVIIRIFDLYLSGKSYQTISNMFKEENVLNKKWCDSTIQKIINNKIYMGDYEDGKRTRKDIVLYKDVVEPIISRKKWEECQMQIPKNQRNYVRDRYYLFFQKIKCPKCGRIMACRGAGGKDKSKKKYLYYKCLNCSEYIREDYVLKKLLLFIFDIMEYDDIVKNYFAPLLIHKLENPKEQLEKELLDIEKRKARIKKAYLSGVVELNEFENDLKEFDEKSKLIKEQIKEESELDDFSFSFEDLTLTKDIERAKRINKDGDFTKGLMEKFATMTKEEQQNLIMKYIEFIEVEKDKEDVYIKHIEFRNTFIDELANLFEEKAVEITLNLTNEDKTEIIKIPFGLERTRKEAKAYVEKLNKYVKVDYYEIKIEEQNDGDGLISVKLDNPSNGVLKLFPLTDEEEIFGLIMVV

SEQ ID NO: 2095 - protein, 513 aa, unidentified
  source 1..513: note = uncultivated organism
MAAPRKRCAIYTRKSSEEGLEQDFNSLHAQREACEAYIKSQAGEGWEALPAPYDDGGISGGTMERPGLQSLLQEVKKGRVDVIVVYKVDRLTRSLVDFARIVETLDDRGVSFVSVTQQFNTTTSMGRLTLNVLLSFAQFEREVTSERIRDKIAASKKKGMWMGGYPPLGYDIQNRRLVPNAAEAETVRLIFQRYRELKSIVKLGQDLKARGVKGKSWKTQKGRIHEAGHLTNGGLQRLLRNPVYIGKIRHGEIIHEGDHDAILDEALWRRVQDLMTDSARRSKETRKTPQRLTSKVFDDVGNLMGPTYSKGSSGKKNYYYASRALLTGEKENVGNLSRVRADVLEEAVWTAIGGEGALAEASVADAFADVSRVDVGIERLRIWLKDGENEPEAIDFAIDLSKPDHAKEVLGMPDETGTNESLIRGIAQAMYWLKDLEAGRFVSVAEIAKRVGISERYAWKIIGLAFLSPSIVQDASSGRKRGRFSLGSINSQPYCRQWYPQAGDDPVFTAADS

SEQ ID NO: 2096 - protein, 500 aa, unidentified
  source 1..500: note = uncultivated organism
MPKTSIKPSRMDQYVRVSRVAGREGESFISSDVQREQGEAWARLRGVEVPMVHEDLDQSGGKLDRPGLNALLARIRAGETDGVIVSKLDRLSRLGVADALRLVEEITDAGGSIAAVDLGIDPTTPFGEFGMTIMLALARMERRRMSESWEEAKTRALDRGARMGPTPFGYERDSDGRLQPHPRWAPVVKQAFRLAANDGVDAALKYLLEIDPPQPSPDSPGIHRKLSADHRTWNAWTVRRLLRKRTYLGETRYGDRLVRDSHPALVDRVIFERAHPGEETPQRRAAAIFPLSGFATCAGCGEILVGGRGGVNKDGSGKRTYRCRASLASWRGQRCLAPANVMADRLEAYLLERIKQAYDRSGAPVLATSVAHNDADANFEDLQYELQAAESELERFAADPTAAELLGQAAWAAAVRTRSDRVQAARLTYREHVDTMRTPDIAIPPVELLNSLTPKELTPVLRAVFRTVRVTKGRGPLPPRVHLTFHGEPQARVTTLKNTA

SEQ ID NO: 2097 - protein, 514 aa, unidentified
  source 1..514: note = uncultivated organism
MDRAQRGLRAVATVTSPTRCAIYTRVSTEDQASKEYSSLDAQREMAAAYITSQRHEGWVAIEDRYDDPGYSGATTKRPALQRLLADIEAGQVDCVVAYRYDRVSRSLLDFLQLLEFLKKHQVGFVSIAERFDTSTPHGEMALNMVLSVAQCERRIIGQRTRDKIHAARRRGRWTGGTPVLGYDTAPEGGRLLVNEGEAEQVRAIFQLFVEVASLIPVSQELNRRGWTTKARKPWTRVTLRTMLTNPLYIGRQKLGAETFPGEHDAVVPRKLFDQVQRLLANSRSTGSAGARNGHGFLLRGLIRCAACDAAMTPGWSRSRARLYKYYRCVHAEKNGHAVCPTKSVKADKVEAFVVGEIKRIGADPALQQAVFEQALAQVKAQRRGIKAEAKRLERELVTAHADVERLVGAVSRVTGPAADAIAAELAREQERVGTLESRQREVEAEIAALGKQDIDREAVASALQAWDELWSVLLVPERERVLKLLVDRIDYGGGTLQIQWRLAGFGQLASEVAP

SEQ ID NO: 2098 - protein, 556 aa, unidentified
  source 1..556: note = uncultivated organism
MSAPRIRCAIYTRKSSEEGLDQDFNSLDAQVEACAAYIASQKHEGWKMLPARYDDGGVSGGTLARPALQRLMSDIDAGRIDMVVVYKIDRLTRSLADFAKLVERLEAANCSFVSVTQAFNTSSSMGRLTLNMLLSFAQFEREVTAERIRDKIAASKKKGLWMGGVPPIGYDPHPDATRRELVVNVAEAEVVRQIFDLYLRHGCLNAVTRAAADAGLRSKRHEFRSGRTQGGNVFSRGQIHKLLTSPVYIGLTRHKDKTYPGTHAAILDKSIWDQVQTLLQAASARRRGAAAGTTGTGPAPLKGKFRDETGDPLTPSHTLRHGKRARYYVSNRLISGGTDPTGWRIPAREFERAIATILADHLADHARCHAVLARADAPASNSASEATRILAEDIRTKDGVLASALITSGQIRAGSVTITLDAAAIAGSTNLSAADLSPDLLRLDAPFTSRRRGAEVKIIAGDRCPTPDATLIRGLRLAHLWSERVKAGTPLRQIAAETGVTDRYVARLIPLSGLSPKIQAAIMNGTQPVDLTLEHLVRRPLPLDWIEQARRLGFGI

SEQ ID NO: 2099 - protein, 534 aa, unidentified
  source 1..534: note = uncultivated organism
MVDRKLTDRSMALQDKQCRVITIEATEKPRDIKLRVAAYVRVSSASDDQLNSFAAQNRHYVELISSKENWSLVDIYADEGITGTSADKRADFQRLLADCRRGLIDKILVKSISRFARNTKECLEAIRELNALGISIYFEKESVDTSKMSGEMMTSLFASFAQAESESISSNMRWSYQRRMQNGMFLPSSAPYGYKIRDHQFAVDEEEAAVVCRIFRDYLAGINMAEIAASLNGSGVPKRKNDPKVKWHEASIRYILSNERYIGDSLWQKKYMTDTFPPVAVRNHGEKDMYYAESTHPAIIAKEVFHAAQALLQQRAKREALPRNTSPFDQKIFCGLCGTSFRKKVSHGKLFWTCRQHSRDALSCPVTQVPDTEIREAFLRFYYKLKQHRDIILTPMLNFLQSILQHRMLWSEDIMELNHQISELSSQNQMLATLKEQGLIDPDIFIFQSNELTQQLRAAKQKKERLLATDGDNTIHRTRDLMEILDEGPDFLDSFDAELFGELVDRIMVENNERLRFRLKNGLELTETMERTVR

SEQ ID NO: 2100 - protein, 542 aa, unidentified
  source 1..542: note = uncultivated organism
MENAVIYARYSSAGQNEQSIEGQLRICKEYAESKGFNVIKVYIDKAKSAWTESEKRVDFQKMLDEANGNAFKHIIVYKFDRFSRSRVDSMMYKAQLKKKHGIRVLSATEPVSDDEGGEIYEMFLEWNDEKYSQRLSKRVKDGLDISVENGTYCGGYLIYGYKIDLEPVTGKTGRFVKRVSIEEEQAAIIKYMFEKYDKGDTKKNIAIALNEQGYRFNGKPFQAKHFDKWINNPKYTGEFHFGGRLCNNMYPPIIDKALFERVQDRLKKNKYFAGGMATAREPYLLTGKLFCGHCGAAMVSDGGTSKTGKKYQYYACKQKKKGKCIKKHQHKEHLEKYVVECVVEFLRQPENAEMVANDTVKYYQSRTGTDSLKSIETKIANAKKEVAELADAFVKAKSSLLQETIEQKMNDYEFFLDDLLTQKSKLELERAYRLRKEDITEFIGDVVNGDPNDKEYQRSVIENLISLVICADDDTIVTFNFRGCNMPDGEAVTKAEIQGAASLAKLVQKQLPLSRQIYMGFKNLKSYRCILPLIFTLKNREL

SEQ ID NO: 2101 - protein, 598 aa, unidentified
  source 1..598: note = uncultivated organism
MSPRAAKRSGKAAPRSERTGPVRCAIYTRKSSEEGLEQDFNSLHAQREACEAYVASQRHEGWTVLPEVYDDGGFSGGSLERPALRALLAAIDAGGIDVVVVYKVDRLTRSLADFAKIVEVFDAKSVSFVSVTQQFNTTSSMGRLTLNVLLSFAQFEREVTGERIRDKIAASKRKGMWMGGNVPLGYAARDRSLVIEPEEAATVRQVYELYGRLGTVRLVKHEVDRLGLVSKRRPRPDGRVLGGVGFTRGALYKLLSNPVYAGDIVHRDTRHRGLHEPIIPPEAWEEVQRQLTSNAVRARGQGSATSPSLLAGLIVDQAGAPLTPTHANKKGRRYRYYVSRALVAGPRTGSGAEATPSTDDRAARRRDADTWRLPAAEIEALVIDALHDLLIDQSRLADQLGLGLLRPDALDAALLIGASLADTLKRASGHEQRDLLQSILDRVEIGAERIVIALNPAALWAELGAAGEMPPGLEDRDRRLALTIPIRLARRGSELKIVMADRPETHRDRSMIGRLARGYLWFEELRTGSVKSLGEIAEREGIQVTMVRRACDLAFLSTDMIEAILAGEQPVDLNSEAFKVSYPLPIGWEEQRRVLGFA

SEQ ID NO: 2102 - protein, 500 aa, unidentified
  source 1..500: note = uncultivated organism
MLSQKDSLENQKSFFENYIQQKGWELAGIYADEGITGTSTAKRTQLQLLMQDAEQGKFDVVLVKSLSRLARDTVDSITLVRKLKSYGVVLITVDDNYNSFEDVNEMRLQMYSLFAQQESESASVRVKFGIAEKSRNGVFHGTPPYGYDKVKGKLVPNQQHAETVRLIYRLYLHEGWGWQKIANYLTDKKIPSPRMLIGAKNAGTMWHETAVKIILQNRHYTGDLVQGRSSVDRDNKLFHQEKGYKLRHQIDESKWFVVENTHFPIISREEFTAVQEKIAFKSRAMFCGRGKKSLFARLAYCAHCGKGMNYKNDREGYVCATYQKRGKKGCPSHFIRHDELKESVLADLRQLSVNALDRDSLVEKALKKANEKSSHALTELKAIQKKTQKLQQEQLELVRAMTRKMIDDDTFQMSNTALKDEQQALKARGAVLEAVLNQGEANERIMQQFRKEVRRFAELQFDDEEAIREVLQRLIERIEIELDGGIVIHYNFGNPLSAGA

SEQ ID NO: 2103 - protein, 515 aa, unidentified
  source 1..515: note = uncultivated organism
MNARKKNVRCAIYTRKSHEEGLDQEFNSLDAQRSAAESYIQSQVHEGWRPIAKRYDDGGFSGGNIERPALTQLMQDIRDGLIDCVVVYKVDRLSRSLLDFAKLVALFDENEVSFVSVTQQFNTTTSMGRLTLNILLSFAQFEREIIGERIRDKKLATARQGKYIGGQPKLGLDIVDRRYVINEDEAKLVRRIFKLLLELESCRKVAEKLNAEGIRTKRYTTKTGKEFGGTRWIGRRVYDVVTDRKYLGKIVHKGIAYDGEHKAIVTQELFESVQQVLAGNKTYTHKHQKQRFALLRRMLRCQECRSLIQPVWTWNHNREYRYYTCSKRIKTGYAKCKLPSLPAGEIESMVVDQLRSVFQNPEVIARTFREVATLAKDGPSADELARLDELRTRRKQVGQAIRSLLTLDDPESEFLQTELKDLHGQLKSLDESIRQIETRPATEADLEAVTSALQRLDQIWDVLYPEEQRRVLELLIDEIGVGKTAVTVQFRADGIEQIVTELEPIGERNGRAGTQ

SEQ ID NO: 2104 - protein, 532 aa, unidentified
  source 1..532: note = uncultivated organism
MTTAIYLRISSEDVDLKTGEKDESESISNQRRLLRDYVSAHADLSGSEILEFCDDGWSGTNFERPAIKELLEQVKRGKINCIVVKDLSRFGRDYITVGDYISRVFPFLGVRFISVNDGFDSINPQDIDSLDTSFRTLIYDLYSRDLSRKVRSARKARAERGAFLSPYAPYGYIKDPEDKNHLLVDEEAASVIRRIFQRAADGLKTWEIAAELNGDGVISPKNYKIDAGCTRTPWRSIQEDNFWTANLVGKFLRDERYIGKVVFGKRVRDAVGSTHTVKISRNDWIVVSDMHEAIVSEALFEAAQACMREFRECASPTDSDKPLKRKVICGVCGHVMKRDGRKNASYSCGTRRLNTRFDCPDEKVPEADILDAVMDTIQVYAQYAVSIDRLLIARQNQRLLDRKQAQRQLQSLQSKKAQLDKRLQDLYEQLVEGELSRESFAAQKKSITARMEEISRTISELERKASSDDGSSNTLIEKFKSYAGITALTREISDELLKSVTIYPDGYMDIQLNLADEIKELMETLRRESCTA

SEQ ID NO: 2105 - protein, 574 aa, unidentified
  source 1..574: note = uncultivated organism
MSRIPNRSSGAQAVKLRCAIYTRVSSDAGLEQEFNSLDNQREAAEAHIRAQQFEGWHLIPTQYDDGGFSGGSMERPGLLSLLDEVRAGLIYIIVVYKVDRLTRSLADFAKLVELFDVHGVSFVSVTQSFNTTTSMGRLTLNVLLSFAQFEREVTGERIRDKIAASKKKGIWMGGTVPYGYRVENRKLLVEPQEADEIRVIFRRYLALSSVPALVSELRQEGFVTRQRKLGSGRIIGGVPLTNGPLAVILKNQAYLGEINHKGKSFAGEHEPIIDRELFDAVQRTFAANTRGSCETWRSSGAIPIGRIYDDRGNRMTPAHANKYPGGKTGSAGRVRYRYYVSCAIPQGRKHECGSVSRVAAHEIEELVVAALRARFLRRGSKLSGEESSSAGLTLDNSRTQEDIELLADKALIAHHLDRVTVGPRTLELVLKPEMEETEPPEPISIPWSRPVHTRKREIIRPEGPTQTGAHPIRAEARARLIAAIARARQWVAELATDPKVTTVFIATREKLSERSVRMAVPLAFLSPTIVIAAVDGTLPFGTGVMALAELPIDCEQQRRAISEGGRTDPRRCAD

SEQ ID NO: 2106 - protein, 533 aa, unidentified
  source 1..533: note = uncultivated organism
MTDAHNRPKVIRCAIYTRKSTTEGLEQEFNTLDAQRESCAAYITSQRHEGWIEIDKHYDDGGFTGGNMERPALKELMEDIKAKKVDCVVVYKVDRLSRLLMDFSRIMDIFDKTGVSFVSITQQFNTTSSMGRLTLNILLSFAQFEREIISERTRDKMSAARRKGKYVGGRAVLGYDLNRETKKLVVNEIEAERVRQIFNLYLENEGLIGTVQAIESRGWRAKLWITSAGKSLGGGPFGKTSLHALLTNPIYIGKVTYRDEIHEGEHKAIVDPDVFAAVQKKLHDARISFGDRVYGRSPGVFAGLLRCTACNRMMTHTTSGGSGRGKQYRYYICNKASKHGYKSCPRPSLPAEQIEQFVVAQLQSLAIDETLLDATCLRVDQSVSDQRQHLEKELSLLNTGLRNAERAIEAFSTPTGDTRRDAKRLESLAALGEQQSRDIRRRNDLQDELAIVYAAVLDRSSVVARIKNLESLWSHLTVAERNRLMTRLLERIDHDPVQSNLSITLSPTGLKAFQIESVAQTSHANSSPVSVNA

SEQ ID NO: 2107 - protein, 563 aa, unidentified
  source 1..563: note = uncultivated organism
MKRVRMLLRVSSNQQLEADGDLSVQRQLVKDYISNQFDWQLDEKEYFEGSNSGYKNAVADRDVLQEALQDAKAKEYDILVVYKDDRIGRRMWEIGAYVMSLKSFGVDIYTVKDGCISPESDDIMGQMMLALRYGNAQKSSSDTGMRVKDTAQKLVQKGKFMGGKAPYGYKLELSGEVSKHGRALHHLVVVPEQAEVVKYIYELSLHKEFGATKIAKLLNEHEVYKNRAPRDIWKCGTIVSILTNPIYAGYTAYKRRERIDGKYHKLESKDWIFAEKPDPEIAVIDENTWNRVQDTRKQRADKYIKTLENQNVTIIRRNSGMLALIDVLHCGYCGRKMTNGSKYNYWTIKDTGERRTSKIAIYKCQNAWIGVPHDKTTQYRADQIEPVVFEAIAEYIGKLQENEDVFTQIEANQNQQKVIKQSELDKEQSELENIRSKIAVMESNIPNAMTGEYPLSLEELAGIIRKHRELEKKHRGRVEAKKAELDAMKVSMDDWESIRTRIPTWQDVFWNADTSTKRVLVNKLIERIDITKTNINIRFKINLNDFFTLPRITDYHDVPEQRL

SEQ ID NO: 2108 - protein, 518 aa, unidentified
  source 1..518: note = uncultivated organism
MRGRVIRCAVYTRKSTEEGLAQEFNSLDAQREAAEAFIASQKHEGWTLIPDAYDDGGFTGANMDRPALRRLLADIEADRIDCVVVYKVDRLSRSLLDFARIVEIFENHRVSFVSVTQQLNSSSSMGRLTLNILLSFAQFEREMIAERTRDKMSAARRKGKWVGGIPVLGYDVDPRGGRLVVNPDEAGQVQAIFKLYVESRSLIPAVRELNRRGWTTKEWTTKDGREHKGQAFTKNALYRLLTNVIYTGQVNHKGTLYAGEHAPIVDATLWEQVQERLRGNGVDGGREVRNRYGALLRGLLNCDACGTAMVHTYTVKGSRRYRYYVCLTAQQKGWDACPTKSVAAQSIEDSVVARMRALGADPRIVLETARKVRERVEASSGELAVELKVAQKDLSRLQGEMVKLVATPGNGLRTDRMADLQEQIRVAERRAGEVRAELDALAAETVDEDDLRTALQSFDPVWQSLNTAEQTRLIQAVIDRIGYDGRTGRIAVMFRAAGFKAICAAAGQGAAVGQEAGI

SEQ ID NO: 2109 - protein, 557 aa, unidentified
  source 1..557: note = uncultivated organism
MPKTKTVYRTAIYARLSKDDGDKAESNSIASQKALCEEYITKHVDLELVETFVDDGYSGVDFERPAFHKMEDALRQGRVDAVLCKDLSRFSRNYIEGGRYLEKVFPMLGVRFIAINDSYDTLTENPQSHSFLIPFKNLINDTYCKDISVKIRTNLDVKRRKGEYVGSYTPYGYRKDPQDKNRLIVDEEAGETVRQIFSFYKDGMSIGQIADHLNELGVQSPMEHKIKSGIRFETSFKTGEAAKWSYNAVRRILTNEVYIGILAQGKRGTPNYKVHVVQKRDESDWIRVEDAHAALVTYDDFMAVRNMLDRDVRIVSTGRDVNPFSGFLFCGDCGQPMIRKVVSAKDKKYYYFVCSTHKRHEGCSPHSMSVTELMRTVKNAIASHISHILDLSRMMDYIAKLPSANRLVMNYEAQTEKLEEEIQYLHRMKLRIYEDLTSGILDKQEYADFRQQYKIQIEEKNTALENLRREKKNALLTGETEKVWVTLFRQHENIEEVNRRVLMALIDKIFIYEGHTLEVVFRYRDEYQRMSEFVEHHAELLPSVTEEAKIPQIGQEV

SEQ ID NO: 2110 - protein, 528 aa, unidentified
  source 1..528: note = uncultivated organism
MEKNKELKPNRCAIYTRKSTSEGLDQEFTSLDAQRESAESYIASQKHLGWIALPDKYDDGGFTGATMDRPALQKLLEDIKAKKADCVIVYKVDRLSRSLLDFVKLLQFFEEQQITFVSVTQHFNTNTSMGRLTLNILLSFAQFEREMISERTKDKMAAARMKGRWIGGRAGLGYDIDSASKKLVINPKDAELVRLIFSLYIEKKSLLEVARVLNERGYLTKAHKDKHKILGGVTFKNTNVQMVLNNVVYMGKVKYDGKVYPGLHEPIISEEIFNQARAILKQNVRERGVSKNRKFPGLLSGIFRCAACETSMSHSYARKNKYKYRYYICLNAIKLNRQTCPTKSISAAAIEEKCLELLMRITKDKRFEDSNWKTLPLEKQMAVINELVREIDYDGGKSKLRIYLKGDVRKYEYDLPIDELKKRIPASSQPDFKSEPVIKQQLLLAHQIQQMLDSGRAKDLKQISEWTGMSKARLQQIMNLLFLCPRIQEDILTLEQASLAKISEYNVRSINQEIDWAKQTSLWQSILA

SEQ ID NO: 2111 - protein, 511 aa, unidentified
  source 1..511: note = uncultivated organism
MATITRIDPQAFQQVGKRRVAAYCRVSSNSADQLNSYARQIRVYTDLITSRSDWSLVEVFADEGITGTSAKKRPDFLRMIRMCELKQIDLIITKSVSRFARNVKEALAYVRKLKVLGVSVMFEKEGINTQSMADEMLLNTFSALAQEESMAISQNLKLANRKRMEDGDYINASVPYGFTRLEGRIIPYAPEAETVRLIFSLYLSGCSTASIAKELDRRGIPTRSGLNHWKATRIGYILSNEKYVGDSLFQKSYTTEFPFKRKKNRGEEDMFFSENTHDPIISREEYDAVQRLLDQRREKSARQTEITDYPFTGKIHCAECGALIRRHVVRGRERWCCAVHIENSSKCSAHYVQTERIESGFITMVNNLRFGSDVLAATENALVRAIQQYRVHDEGSREISKELADLNGQLLMLEQLYGKNYIPIDVYQAKSREIAARVEELKASKSITSGAKLDEALKNVRQLKEYIEEIEDPISTFDADLFGKIVLSGSLSASDLLTLDFIGGIRFTEHI

SEQ ID NO: 2112 - protein, 566 aa, unidentified
  source 1..566: note = uncultivated organism
MKAVGYIRVSGEASKDGESPDTQRNDILKHVEYEGWKFSRHYEDLGISGSAISARPAFQQMLKDAKANKFDVIIVSRLTRFARNLRELLNFLHEFEKYGIKFYSVREKLGTTDDYFGKFFIQIIGAIAELELSNIESTMKDGKKAKWSDKRCYIGKVPYGYIWDKENKQILVNEEEKEIYLRVVDMYLNLGMSYKDITIKLRDEGILSKTKAFHSANIGAMLKNPAYYGRHVCNQFICERKKDELGNIIGKRFIRTKKLKPESEWIIFDMPPFISKQIFDQIQEKINFNVCKGTRRVKETDLYWLRDVLRCGCCGGRVKMKNGTRRKDGTFPRYYSCYYASCGPKVLQSTGKTECPLPFIKAEEIETKVWNRIMMHLSLQKKSLVKMVDPEKYEKKLKNLKSKLTRLEKERQSILTKKDRFYDLFGEGGFNKNELSKKLNGCDVEIIEKDGLVSKTEQEIIDLEETQKNDTLYKDFMKNASETLKTLRKELFDLEPNDKKKVVEGMINGEGIKVNIGLDIKDRIWLLGPYRLRFNPTVLLELKSLGKLTFSDSYIRKHNNSHGLTQ

SEQ ID NO: 2113 - protein, 519 aa, unidentified
  source 1..519: note = uncultivated organism
MSKNVTIIPPREKQPVTLRVAAYCRVSSDSSDQLHSYAAQIRKYTEEIGGHTGWDLVDIYADEAVTGTKTDQREDFKRMLADCRKGRIDKILVKSVSRFARNTKDCLATLRELTSLGVSVYFEKENLNTETLTTELMVSVSGALAQQESVSTAQNQRISYKRRMERGEFITCKAPYGYRLKDGKNLEICEEEAAIIRLIFTRYLSGTSTVEIAASLTGMGLRTRDGKEQWNTFAISYILQNEKYIGDALCQKTLATDSFPYVKKKNQGEKDQYYVDKTHPAIISREDFERANALLRRRSSTRGIALKKYLLTKTVYCGCCGSVFSRKETKSGYVSWACRTHNYQARKCPMGRIAETEIYAAFLRMYNKLKHHEDIILKPALAQLRDLNNALQRGNPAMLAVNRAIAETSEQSHKVAILRAEGLLDDDACTAKLRDIEAKLAELRRERRQLLKNEDIEEVMETLHQTAEIIHSGPDRLEDFDEALFADLVEKITAESVTRIRFRLYGGLELTEQLREVGR

SEQ ID NO: 2114 - protein, 546 aa, unidentified
  source 1..546: note = uncultivated organism
MTNEKPKDKKWVNCAIYTRKSTTEGLDQDFTSLDNQRESAENYIASQKHEGWIALPDCYDDGGFTGANIERPALQKLLNDIKEGKINCVVVYKVDRLSRSLLDFSQLLEFFDKNNVTFVSITQQFNTNTSMGRLTLNILLSFAQFEREIISERTRDKMGAARKRGQWLGGRSPFGYSVNPDDKKKLIINPEEATVVQEIFKLYLEGNSLMQVAQILNQRGLRSRKWTMRSGKTYGGKKYGVTQIQSLIKNVRYIAKIEYAGQIYDGQQPAIINEETFKKAQEKLKENAVDRKAFKNTECTGLLNHLLHCPTCNAVMFHTYTLKQNKHKYRYYVCSNAQKRGYDECPTKSLNAQAIENAVMGQLKLLCANRSLIKDHSCATEMEAIISPVWDGLFPDEKRKILKKILERVEYAHDTKRLSLIVKGIDKCFEFVADLKSCQPHNRWHKEIEIQKEPTIVKNLILARQISRLFDEGRIRDFKQAAVWLNMSPARVSQLMTLNFLSTEIQENILTLPTEKISHLSDNTLREIASEVDWQKQSTLWQATLK

SEQ ID NO: 2115 - protein, 557 aa, unidentified
  source 1..557: note = uncultivated organism
MDERRLISGIESPRRVRCAIYTRKSTEEGLEQAFNSLDAQREAAEAYIQSQKHVGWTLVETRFDDGGFSGGNMERPALQQLLEQIDARQVDCVLVYKVDRLSRSLLDFARLMDRFDQRSVSFVSVTQQFNTTTSLGRLTLNILLSFAQFEREIISERTRDKMGAARRKGKWVGGTPLLGYEVAPAGGSLVVNSSEARRVVEIFELYRTHRSLAAVVAELAKRGRITKSWKSRRDQRHTGRPFTKASVRMLLSNATYCGKVNYRGVVYQGEHKAIVEPALWDDINKDFSERSIQQPELPQVPQNAPLSGLLICKHCQQPMVATYSAKGKRRYRYYVCQAAREKGWKSCPTKSVSADLLETSIVIQLRSHFSGAETRQTFQVADSDWQALVLADTEGIPGILQALIEQIHYDGPIGAVGVKLRTPEGFRGDLASTFEYKIPRRRGRALPAFRLQPASETLTRPPRLARLLALAHKLEGVIRSGKVKDYAELARLAHISSARIGQIVMLGLLAPAIQEHILFLPAEQAGLIGERELREIAREPRWDRQRARFDELPAARD

SEQ ID NO: 2116 - protein, 575 aa, unidentified
  source 1..575: note = uncultivated organism
MHDNTNPQKAITKCAIYTRVSTDEQTRKDYNSLESQRDICRHAIAVKQELGWIESAAHEDGGYSGKDLHRPGIQQLLAEVRDGEVDAIIVYKIDRLTRSISDFYALWKILQQHDVVFVSATQSFDTSTPMGNLMLNMLLSFGQFERELTSERVRQKYTERAKKGLWNGGWVPIGYAYDKATKKLSPEPGEAAIIKQLFRLTKKLASPTAVAGALNEEGLVTKTREITMRSGQTKMIGGKRWIGDRVKRIVENPIYKGVIAHGGEQHAGEHKALVSEALWKDANEALASMNAPARPHAARNKHGLLLKGILRCDHCGNLMTPKPSGKKDSEGNPYLYYSCGDVTKDGSNSPCELRNISSRPFEEFVVKVIAEIGKRPDIIATTLEATKKESRRSLRPLKSKLAEIGTEWRQVTSDLTACIEFAKKSAGGRMANEMMAEGESLADRKHILGIEREKIEMDIARKEQMIADEAIIADALTGFEKVFDSLPFEDQQELVRLLIREIRVSRTDPGDKDFDANPSVYHTQIRTSWYRLNFQFYVTPSKPTGNGNGDTSSHLNRNGGQGGIRTHGTVSSSHL

SEQ ID NO: 2117 - protein, 546 aa, unidentified
  source 1..546: note = uncultivated organism
MSEKQFKACIYARLSREDGDKAESDSISSQRAMIRDYLSRQDDIGIVAEKVDDGYSGVSFDRPAFNEMMELIRDGSVNCVVVKDLSRFGRNYIEAGNYIERVFPFMGVRFIAINDHYDSAEEQNSSTSLVIPFKNLINDAYCKDISVKIRTQLDIKRKKGQYLSAFAVYGYLKDPEDHNHLIPDPYASEVVRKIYQWTMEGNSLQKIADDLNSRGVLCPMEYKESLGMKIQTIFRTGSKAQWGPSSVRRILTNEIYVGHLIQGKAGTPNYKVRKIVQKDASRWIRVEDTHQAIITPNVFQVVQDLLGRDLRISPDRNRSYLLSGFLECADCGQSMVRRTVTSGKKKYAYYVCGTNKARKGCSSHNISEEKLIRIVTDSLRCLVQHVVIAADFMQRVDSLPEKDPEVINVDTQIVHLTEEIEQNTNYMEKLYENLSEGMINKDEYFQFKQTFQERISKAEQAVSLLQKERQAVLDGKRRDLEWIRIFQKYDGFKELDRKMVAEIISRIIVHKDGTIEIITKFNDELRALEKYYPDAFGNNEENRMEG

SEQ ID NO: 2118 - protein, 529 aa, unidentified
  source 1..529: note = uncultivated organism
MTINKCAIYVRKSTEHGLDMEFNSLQNQEESCKAYIASQSFNGWQYYKTYSDAAISGGTMERPALKQMLDDMAHGLVNTVVVYKVDRLSRSILDFHNMMKYFEKYNANFVSITQSFDTSNSMGKLTLNMLLSFAQFEREVASERVRDKIRASKAKGIWVGGNPRLGYDIINKKLVVNPTEAGQVKTLFEKYIELQSVVELVRFARVQKIHNKQWVTKKGVVRGGAEFYQQTMHNLLRDEVYIGNMVCKSGGTSVPGEHEAIIDKDLFNRVQMALARNGNNKGNRYTGSPNLLTGKLFDIDGIKFTNQQTRKPGQPVKYYYAKSGFYIPSLSIDEIAMNTISEFLNSAMRDIPPDTALLLKRIDIQNMSYNQKRDFIKTIITKVVYSENKLTCYLVLNNELKRFISESFINENADDMTYIINKDAVIIERPFILSKYNKCNEYNCGKSGAISISDNNHLIVRAFARAFKYRELYEKNGDYKSIARAENVSESSVYRHLKLAYMNPHTINDIMSGKLQCSVDKLFNLPNML

SEQ ID NO: 2119 - protein, 584 aa, unidentified
  source 1..584: note = uncultivated organism
MTTENSQEKRLRAAIYLRCSTDEQTKGYGLAVQEEKLRAFCKSQSDEYILEDEHVYKDEGVSGSLNIEHRPELSRLFENVKEGKFDVVLVYRLDRFFRNTRRLLEALDILRSHSIAFQSATESFSTNEPTGRLLITLLGGIAESERETIRERTMSGKLRAAKEGKWVTGVPPYGYRVDEHKKLYLVPEEAKNVKKLFQWATDEKMSLRGIEQRMNQLKAPPPYTTKYEKKKTLGYWHKRTIGRILTNEVYTGTFYYRKYKRPFNNLTSITDKRCLRPREEWILLQTPPVITTEMFEAAKTQLLKNREFAKRNLKRDYLYSKIIYCGKCGYKMFAGFQPSKKKWPGAGGRYYHGTYHNDRPVGTSKRCEWCPVYSEIRLEPIWECLKEVLKNPKNMFDPLEKYIYREENPENVKGRLEEIDTELSSVRVKQSRVDDLYINGQIDQQKYKEHSGENHREEKRLGGEETRLRQSLLTKKEKTEREVAIREAYEQIKDRLENVSYEEKTKIIRLFIERITLYAKDDHALVIFHFPSSTEVATVKLGSRVSQEEKHFPLVLNIKTMTELARRQQIIRANPLMYVPKTLV

SEQ ID NO: 2120 - protein, 519 aa, unidentified
  source 1..519: note = uncultivated organism
MAEVIIINPREKIDIATDEIKVAAYVRVSSDSEDQENSFITQYDYYVDKINKTPEYKFVDIYADDGITGTELEKRDEFNRMYIDCAKGMIDLILVKSISRFARNTYDCIDMVRKLKNLGTNVIFEKEKIDTRTMTSEVELAALSSMAQEESVSLSKNVRLGIQFRMKNGTFKQGNLPYGYTLGDDGNWVIVEEQAKIVRLIFNAYIGGTSLRKIANELSKAGVIKNDGTSKWSDKTISYIIRNEKYMGDALLQKSYTDDFPFKSHLNRGEKDMYHVKNHNVPIVSEEIFRKANNLLDEQGSRYYRENRPQSDSVLSKIMFCEECGTMFRRKSGTINVYWVCRKRDHDASLCPTPQVAETVVCNGFVNIYNRLVNNVEIILTPMLGQLSGCKETRLRSKGEIENINKEIANITEQILVLGKANADGYIESALFMQESNDLNIKLAKLKKDKKMILGNDECDKAYKKTEQLINILKKTGPIGEFDEKTFKRIVKRILVNKDKVLTYELINGLKIKLEYSEV

SEQ ID NO: 2121 - protein, 503 aa, unidentified
  source 1..503: note = uncultivated organism
MKQIVIYSRKSKFTGKGESIENQIEMCRQYIRLHYGVEAADQAVVYEDEGFSGGNLERPQFKKMMEQLKEGAFQAVVVYRLDRISRNIGDFAGLIERLGELHVDFVSIKEQFDTSSPMGRAMMFISSVFSQLERETIAERIRDNMQELAKTGRWLGGTTPTGFCSKAYETVNADGRTKKACRLEGLPEELEIVKTVYQEFLRTGSLSGAEAALLTQGIRTKNGRAFSRFAVKAILSNPVYAKADEAVWQYFKSQGAEVFSEHGEFDGRHGVMAYNRSLQRPGKAHRERPEKEWIVAVGGHEGLIEGETWVRVQEMLLRNGKKSYRRPKSHEALLSGLLYCGGCKSRMRPKGSGRKREDGTAMYSYLCINREKSRGALCQMKNPDGNRLDQAASESLSQLPEDVAAFCTYLETERKALLKEQRKRKAKKDGTREEKAGRQPETAAESVSGEPRLTAGELSSFPFVFRQMTPEEKREAFRSLTEQVIWDGETARIILKGAEREYL

SEQ ID NO: 2122 - protein, 524 aa, unidentified
  source 1..524: note = uncultivated organism
MTTACATKKVPTKAIRCAIYTRKSSEEGLAQEFNSLDAQRESGEAYIASQKGEGWMALPDRYDDGGYTGGNMDRPALAHLLVDIAAGKIDCVVVYKVDRLSRSLMDFARIMEAFDKHHVSFVSVTQHFNTTSSMGRLTLNILLSFAQFEREIIGERIRDKKAATAKKGKWGGGVPVLGYDVDRSGNSPKLVVNAEEAARVREVFALYLKLGSLLPVVQELAQRGWLNKRWTSKGGRAMGALPFNKTNVYYLLTNPVYAGKTVHKKDVYDGEHEAIVAPETFQKVQTLLQHNGRTGGLEARNKYGALLRGLLHCKACGTAMVHTFVNRRNKSYRYYTCMHAIKQGWKTCPSKSLPAAEIERIVVDQVRCIGQDAEVLEEVLRQAHVQMEGELTALRAEQADLDSELARHHREIRRLAVKGPASSATTAQIADLHDKVAWAERRAAQLREEIAGVEHERVDGDDLKAAFADFDNVWQTLSPKEQAKLLALLIARVEYDAAESTVTVTFQPSGIKALSQGQLEETAA

SEQ ID NO: 2123 - protein, 569 aa, unidentified
  source 1..569: note = uncultivated organism
MIAKKNGSEAEKDGPLHIAFYIRVSSDKQAKKVDGSLDTQLDLLTKFADYKKSTGADWVISERFVEGESEGKRRGKSAKDTNRPTFQKMLEVAKAQLIDVIVITRIDRISRSVIDFLLLVEDLSRYGVKVVSLRENIDLTTPTGKFQTILMIALAQHEREMISARVKEKVEWRAQRGMPIGPPPIGYRMKDKMYEIDEKYAKHVQECDRLYLEHQSTEFVVREFSKRGYRTPHDRTYTVPRICDMLRNTTYAGKLAYEGELFDAQWKPIRPWETHERIQRILDRNNEKKHSPSRQATDYVYLLQGLLRCGNCGSAMCPQPGIGRNGHYYPYYSCSASEKSAGTACPFRYVPAEAADRAILEFLKRLVLKPDLVEAFARRANESTSETLSKIKSDLARVREQLVSVRAKIGNFLDAIAEGGKTAMASLKGRLQALESEREELEASEARLKAESEAESIQEIVAQDQMATLKLFDQLVKQNADRADRLKSLLSRFIEYAVWHTKDKGEGDIEVGLFPTPVALAPDAEVTGPLNGEWNSERKAVVSSETTGWYARQELNLQPLAPEANALSS

SEQ ID NO: 2124 - protein, 558 aa, unidentified
  source 1..558: note = uncultivated organism
MLQAAVSARAIKSKGAANMSKINSYNACIYARLSRDDGDKLESDSIINQKALIRDFLSKHPEIHAVSEKTDDGYSGVNFDRPAFQEMMEDIRSGKINCVVVKDLSRFGRNYIEAGNYIERVFPFLGVRFIAINDNYDSLDRNQSDSLIIPFKNLINDAYCKDISVKIRSQLEIKRKKGQFIGAFAAYGYLKDEEDHNKLVVDTYASEIVRAIFKWKIQGMSQWRIANKLNMQGVLCPMEYKLSLGMKVQTNFRVHKKALWSSKAVTRILTNEIYTGVLVQGKVGTPNYKIKKIMPRDEADWIRVEGIIPVIIDKDTFDSVQMILAKDIRIAPEEDAVYPLSGFVKCADCGQNMVRKSYNAGGKAYSYFICSTRKAGKGCGTHSISEEKLTDVVLQMVTKQIESVCEMEKMLDIVESLPEKQANVFNYDAQVVRLKEEIERNKSFKLKLYENLQEGLIGQDEYFLFKKSYAAKIAEAEAAILAIEDEREQAVSRNRDSLSWMESFKKYRNITSVNRSMVVDLIRQVNVFEGGRAEVVFRHADEAEKVVKMLEDFSRQAV

SEQ ID NO: 2125 - protein, 534 aa, unidentified
  source 1..534: note = uncultivated organism
MEKVGVYCRLSDEDRYKKNKNDDSESIANQKSMLLKYALEQGWDVVDIYSDDDYSGAGTYRPDFERMIKDCESGRINLVLCKTQSRFSRDMEVIEKYLHNKFVEWGVRFVSIVDNADTNNAANKKSRQINGLVNEWYLEDLSNNVKKSLKNKREDGLFMASFAPYGYLKDPNDKHKLIIDEDVAYVVKEIFEKYKNGIGYIRICQSLNKRNILCPSKYKKSIGSNFVCVSPKFQKLGIWIPDTIASILRNETYIGNLVQGKKTSISYKNHKYKKVPENEWCRIENTHEPIIDKETWYLVQKRLGKHERSLKTGNIHVLSQKVYCKECGHVFMKNQSKIRCTGGIIERRAYLQCKGNKKYHICNNNRSVRLDLMEEFVLNSINELLNNCNKKLLEEELTKELSKDDKMKNKMVSLNKEKSDLEKRLNESRLYFKNLYEDKLKGIISEEDFTTLRSEYSKDVEAYQDRIEEINQELQATEKSKNNTKDIKSILKKYKHIDKLNKIIVDEFIEKIYIGKLDKETKTRTIDIEWNLDL

SEQ ID NO: 2126 - protein, 502 aa, unidentified
  source 1..502: note = uncultivated organism
MALQYIMPQYDIRDVALYARKSRGESDKDLEKHLTILRDICLKNNWRYVEYIEIANSETIEFRPKFKQLLKDVENELFDAVLVVDYDRLGRGDLEDQAIIKRCFRDSNTLVITPEKIYNLTDETDDLLVDVKGLLARQEYKLIKKRLSRGKKIGARLGKWTNGTPPFPYVYDPVKKGLVVNENNREIYLTMKKMFLNGDPYYKITWYLNKLGVPSPRGSYWHDNTVRRILLDETHMGRIISNKTEGSGHKNKKTKPLKKLPREEWIVVENCHEALKTPEEHNEILAITAKRAKFHPSARKGAFIFSGLIYCKKCNKAMQMQRKPNGRVFLKPCNKPNHFGEICSNRGHKIEDIIDTVIFHLTEYEKKLLEEKDYDTERIDYQVLIDFKMKDIEKHNKAIERIKDLYEEGEYTKEEYNRRIESRKKAIEELQAEIANYNLLIKKQSEFTLESKITKIKRIVDLFKSGAEENEINLLLKEIIDKIYYLKSDAKDIPQIEVVFII

SEQ ID NO: 2127 - protein, 545 aa, unidentified
  source 1..545: note = uncultivated organism
MNEPVTKIWDTTLYLRLSREDGDKEESNSISGQRDLIRDFMAHHPDLREYAVKVDDGFSGSSFERPAFKEMMADIKAGKTNCVIVKDLSRFGRNYLDAGEYIEKIFPFLGVRFIAINDNFDSERERTSSDDLMIPFKNLINEAYCRDISVKIRSQLEIKRKRGEYLGSFAAYGYRKSETDKNQLVIDEYAADVIRDIFKWKLEGASPKAIADRLNSSGILSPMEYKKSLGMKYATSFKANAKALWSAASIIRVLKNPLYIGVLTQGKETTPSYKVHKRISKGEEEWAVVQDSHEAIISRSDFDKVQKVLALDTRTCKDDSVVQLFSGMVFCGDCGASMIRKTVPAGGKKYIYYVCSENKANKKACSAHSIRDTDLENIVLLSAQQYIQAVIDLQDLLELTDTAPLRTAEAQKVQRQIDMKRGELERYNRLLMSLYESLTDGIINKDEYMRLKQRYSEQNAEAEKQLLALQDVLSDIQEHGSASLGWMNEFREHQNITSLDRETVVALIERIFVFDDKRVEITFRWHDEYEWQADILQRAQMKEAV

SEQ ID NO: 2128 - protein, 526 aa, unidentified
  source 1..526: note = uncultivated organism
MRVATYNRKSVYSDHSDSVANQERMCREHARMRFGDKVESFAVYQDEGFSGKDTDRPGLQRLLSDVQAGKVDALVVYQLDRLSRSVKDFAEIYDALQRKGVAFVSVKEQMDTETPMGRAMINISMVFAQMERETIAERVADNARGLAMKGFWLGGLPPTGYRSVQVDAGGKKHFMLEVEPEGARYVKEVYRDFLVTGKASGALAAMYRESGKTSVRGQPVRQSQIYGILTKPVYCQATGEAYDYWRSRGCEIQGPGREAWDGTHAVMAYGKKRKDGRTSKTRDAGDWVISLGAHEPLISSRDWLEVQKRIAGNTFDKESRCPPPLLKGVARCAYCGCLLSVRRTKRRGREYVSYGCSKKVYMGADACPLGYVRAGLLDEEVMSLLRKASVDRDVLDRFFGEACEGEAHAAEIGRLDAQIASAEKKLRNLAASLAEAGESTVRKYILEELGKADAERCRLEEQKRGLERQQESLAAKAEEKEEMRLTLENFVASFDAMTAEEKNQIMKKLIRKCTWDGEKLVISMSD

SEQ ID NO: 2129 - protein, 656 aa, unidentified
  source 1..656: note = uncultivated organism
MRNRTLPAPRRKGRLRIAIYLRVSTAQQVEGYGLNVQDDVCRALLDRIFGKGNYDVTVFTDGAVSGKLASRPDLDEMNVQIKAGRFDVVVFGKLDRIGRTMKDIHRWVYDTTDLGVRVLTADGRLDSDDDMFGIVMSLLAFMAELEHTLILERTMGGRDRKLAEGGWPSGVTPYGLALQGKGKDAMVVLHEDEVHVINRAVSYFLDDGCSKEETGRKLNEHGDRRRSGKPWDCASIDSLLTSSHLLEGKVYFRKTDGRTRTKVDEDGQPLYGPTVALAVPRVLTEERAAELAEALKDRGRDKRASERYPLSRRIHGSCGKMYVGNGRPDGTRMYRCQGVADATPCGDSYLDAQAVETAVWGELSAFLEEPERLRQLAEEWAANLPGNQVAYIERAGSLRQQVAERQKALKNAFKNAAVLGLDEEAVREATDELNMELEALRASLAETDAWLAEYDSAQERAKSMVELISKAQGRMHTLDLDKQAEVFEMFDIKVTPEEHRFARRNGRPCQVTAWHVESGTLVPDDPDDTTWGQIQDVLLDVDPALLKGRYDQREALRAMLHRLRSGATWEELNGVFGVSTATLKRTQGLWFNSGAWELMMGVMTGGTPVYQAPVIPPLRAHGKITQDLFTNLLPVEGSSQSPPSQTQVLSFELTAR

SEQ ID NO: 2130 - protein, 605 aa, unidentified
  source 1..605: note = uncultivated organism
MNEERKVAGIYIRVSTEDQAREGFSLREQKEKLLQLCKFKEYEVFKIYEDAGISAKDIKNRPAFQEMLSDMKKGKINYIVAYKLDRVTRSVRDLEELIAVLEKHSIYLVCDRDDVNTSTANGRFFVRMLTVLSQLEIEIVSERTKFGLNGAIKSGHLPGKIPLGYKKDINKKTVIDETTKDIVIRIFNMYLEGKSYQQISNILNKEKVLYPKKWRDTTIMGMIDNRVYMGDYEQHRSISKQTNGETTIFMNVVKPIITRAMWEEAQMQKEKNQRAYTRDRVYLFFQRLKCPECSRIMKCKGSGGAKRKYMYYNCEHCKIYYREDKVEQCLEEFILDLVEYDMAVKGYFLPVLADKKETDTEKFDKEIQTLKQQKERIKKAYLSGIVEMEDFSADYKIIEEKINLLETKKYESLNVNSFSFTPQQLMADRDIERENLIRTNNLDKFLKAEWNKKSKEEKQEFISKFIESMTLLKDENGDFYIDKINFRSSYASQISKLFEAGILDLYAPIAIDGKEQQIRTSVNINQEQFDDYINRMNKYFDIEFYELFQIDSNEELKHEIMKFELNSKDENVIRMVALQNDNSFPIKEKDTYTIGAVTYTPAKVC

SEQ ID NO: 2131 - protein, 549 aa, unidentified
  source 1..549: note = uncultivated organism
MTLVTLNSTLPDVQTRAALYLRVSTGRQAEHDLSIPDQRRQAIAYCASRGWTVAAEYVEPGASGTDDRRPELQRMLDMATTDGTPFDVVLVHSFSRFARDHFALEYHVRRLRKHNVRLVSITQDLGDDPMSVMVRQVFALFDEYQSKENAKHTLRAMQENARQGFWNGAKAPYGYKIIAAEQRGSKTKKRLAIDPVEAETIRLIFRLFTNGDGTTGPMGVKAVANWLNDHGYRTRQGARWGIGPLHNLITSTVYKGEYRFNRKIWKTKEDKPAAEQIMVPVEPIIDIRTFDNLQAVLKARNPKATPPRTVTGPILLTGLATCASCQGGMTLRTGKSGRYRYYACATCAQKGKSACKGRSIPMDKLDTIVTDRITDQLLTPQRVEKLLTGLIERQANRSADYTDRVANLRKNLSDTEARLKRLYDAIENGIADPSDETLKDRITAIKTERDISQVALDRALTELRPEARITQDKIAAFTTIMRDNIQNGSIPFRRAYLRAMIDNVEVDDTEIRIHGRRTILERLVMGGGASPAGVPSFVRKWRTRQDSNL

SEQ ID NO: 2132 - protein, 582 aa, unidentified
  source 1..582: note = uncultivated organism
MAKKRSIKLDSKKAVLYVRVSTHWQVDKDSLPVQRKELENYCRYVLGIDDFVIMEDAGYSAKNTDRPAYQEMMARIRTGEFTHLLVWKIDRISRNVTDFVNMYQELKDLGVVFVSKNEQFDTSTAIGEAMLKITLIFAEMERNVTSERVTDIMVSRADSGKWNGGKSPYGYTISKGEYTIVEKEAQTVRRMFDLYESGKSLLNVARTINAQGIRTRTGAEWSATTVWGIIGNPTYCGTYRYNLRNEQKGSHEWSFRDDKDIVFKDDHHPPIIEKEQFEKCQEILDRRNSKKRGTKKTYERKNTHIFAGLLTCGSCGSQMSATVDRARKGGWRPSIYMCSRRRKTNDCTNKFVSDVTIGPFVMNYLSNMLKAYKSFGDTTKPATLEKKLIRGEALNGVVGIEHEGLMQTYEAFRQGSNVTEIFTLKTGVDDQELSDGSDEKNLLDNNKRRIERAMNRLKALYMYSDSDMSETEYSVERKKLLDELERINSRLKHLEELGSRSMLGSDDWMEQASYFVLTQELMSKRSISYETLLRAVDSKIIKNFVNSTVQNFCILDGKIASITFKSGISHKFLYEDQQQKKS

SEQ ID NO: 2133 - protein, 564 aa, unidentified
  source 1..564: note = uncultivated organism
MAANSRTAVSGRRTRTWLIGVYIRLSKEDARHLDESESVTNQRSIIEDYIASMDDGDEYRIVDEYVDDGISGTTDDERADFQRMLNDIRRGRVNCVIVKDLARSFRNYSDQGYYLDDWFPRYNVRFISLYHQPLDSYKEPKLMRSIAVPIQGVLNENHCAETSEKVREVFDMKRRNGEHIGSFAAYGWLKDPNNKNLLVLDEIAAEVINDMADMVLNGMSLNKIAEYLNDHDVPCPSVYKRQTLGLKYYNPQFDISTKPLWAGTTIRRILTDRMLCGDLIQGRYRVKSYKVHIQERVPEEEWFIAENAIPAIMSREKFDKLQNALNRDTRRSPKEVDLYLFSGFLRCADCGRAMSRKVSSNIVYYMCKTYRDLSKKACTIHSIRQDRLEEAVLYAIQQQIYLAVDYTKLVDDINRAPAAKTQSKRLLDAIEQKEKELAKISRYKQAIYQDWKDGEISQSEYRGMKADYERQTESINAAIEKLRKEEKELETGFDTESPCLAAFRQYGNIDRLTRDILIEFIDTIYIYEGGRISIKFRFADEFRKIQEYIELNSTKTTEQTVAFN

SEQ ID NO: 2134 - protein, 580 aa, unidentified
  source 1..580: note = uncultivated organism
MANRTIKQFVIYSRKSKFTGKGESIENQIELCRQYIAAHFGADEAKNAFVYEDEGFSGGTLQRPQFKKMMSDSQKMEFAAIVVYRLDRISRNIGDFAKLIEDLGNRKIDFISFREQFDTSSPMGRAMMYIASVFSQLERETIAERIRDNMHELSKTGRWLGGTTPTGYESESISSVTVDGKKRRACMLKMIPEEISLVKLIFDKFLETGSLTKTDQFLLAGQYRTKRGKPFTRFAIKGILSNPVYMIADEEAYGYLVENSVDLFAGKDMFDGKHGVMAYNRTLQKPGKAHQERPLNEWIVSVGKHQGVIPGAQWVQAQKILERNKSKSYRKPRSNAALLSGLLYCGKCGDYMRPKLSNRLTAAGEPVYTYLCTSKERSRSQVCNMKNASGNTLDAKVIDILKSFGKNSEDTARQITQAKKNISGRREGYDAEAARVREQIADNESQIKALVLSLGKAAGTHAEKYIMEQIDGLHEKGQSLQNRLKELDTILRRQDLTGIEFDMIRQMLSAMGESMEEYTVEQKRAAIRAFIRKIVWDGENAHIYLFHNDSDYEFPNSPANDSGSNKISPHTDGPLGEDSK

SEQ ID NO: 2135 - protein, 631 aa, unidentified
  source 1..631: note = uncultivated organism
MKTITPHIAIYSRKSKFTGKGESIGNQVELCKEYIRVHYGDAALENAVVYEDEGFSGGNLNRPGFKKMMDAARSRKLSAIIVYRLDRISRNISDFSGLIEELSHLNVAFVSIKEQFDTGTPMGRAMMYIASVFSQLERETIAERIRDNMHELAKTGRWLGGITPTGYASEAVKSITIDGKSKKACKLKLIPEEADIVRLIYDLYLETDSLTLTETELLRRGVKTKNGRHFTRFSIKGILQNPVYVIADSDTYDYFTSAEADLFSDKAAFDGVHGIMAYNRTNQEKGKTTEFLPTSEWIVSVGQHPGMIPGKVWVGIQASLERNKSKSFRKPRSNEALLTGLLFCGCGSRMYPKLSKRKTADGKTVYTYVCKLKEHSQRSVCNSKNAHGNTLDAAIIEQIKSLENDQSAFIQQLERSRKFYTGNREAYNDRLEAMQKERTETEKKIEGLVDSLAELSEGAARDRVAKRIEQLNGKCQDLDARIRELEGLTTQHALSDIEFDLMRQLLTVFRSSIDQMTIEQKRAAIRTVVRKVVWDGSNAHVVLFGAEDGEIEYPPLPGLAAGDSSEEENVEDLEPFGDVDYGDAGTETSGSANSKTSGDTEAEISGNSKAHWGENSKRDPDAVPRGQKKPE

SEQ ID NO: 2136 - protein, 573 aa, unidentified
  source 1..573: note = uncultivated organism
MGRTSKRSHVPGGITTVAQGASQGNQQGTKHYKAGIYVRLSSDQDIKKNESAEVQNEIAEKYVEDWNQHHRDKIEIIGYYTDLGKTGTNFDRDAFKQLMQDVRLGDINCVIVKDLSRFGRNYLEAGNYIEKIFPFLGVRFIAVADGYDTGVDGNNTRQMASEIKNLVNDMYAKDSSAKAKLSLKQRREEGSYVGGPPPYGYEAYQEGRIRRLRPDRNTAEIVRIIYEKFLETESYQVTADYLNERRINPPAVYKKSGEVFCSTGTEYRGWDKGAVERIVKSETYTGTLVQGKSSITARKEGNRIQKPKEDWVKRENTHEPLIDLELYNRALKICLRIQEQTRSHAHPTMGCPIKENIFDKVLYCGVCGRKMTRNSYVKDYVDGRRERKDGYFCLDSIGTKKGNCPESNRISKTELTDILSVLFQTEFATQLRKQKDYVEQGRALIRQKKQELEHKLWQMERQILALTEEESEKYMAYRTGKLIQEEYVRYRLWKDERLRELEKCKNQYQEEARYLEQKGETYLRAVRSLIKLKSQKALLKDIVEALIDKIFVYPGKRAEIVFTYGDILMKGAK

SEQ ID NO: 2137 - protein, 524 aa, unidentified
  source 1..524: note = uncultivated organism
MSETAARKVIKTIPATRNLFTATPIQTEKKRRVAAYARVSTDDEEQQTSYEHQVSHYTQYIQEHEGWLFAGMFTDEGITGTSTKHRDGFNAMIDAAMAGKIDLILTKSVSRFARNTVDTLTTVRKLKAIGVEVYFEKENIFTLDSKGELLITIMSSLAQEESRSISENVTWGIRKRFADGKVIMPYGAFLGYRKGPDGMPEIDPEQAEIVRYIYRTFLEGKAPSHIARDLTERGIPTPGGKTKWRPNTVASILTNEKYKGDALLQKTFCTDFLTKAYKVNEGEVPQYYVEHSHPAIIDPAMFDAVQTEIKRRANPGQRTRTPYTLSGKIFCAECGARYGSKVWHGKQCWRCNNRHLGKTKCVAPVLRTETIEDAFVTAFNQVIDRKDEIIRICLDTMAERCDVSAIDSRLATLNAELEVVAEMMAQQIAANARVALDQDEYQQKFQELATRHDSVQKEINELENRRTEMLAKLNGIRHYIDMIRDGDQIARFDETLWLNTVDRLWIKPDGTMRFEFKGGPAIEG

SEQ ID NO: 2138 - protein, 551 aa, unidentified
  source 1..551: note = uncultivated organism
MIRAASASTTSPVRAAIYLRISQDRELDGLAIERQREDCENLARFRRWEVVETYVDQSKGATDKTKKRPAYDQMVADYHAGRFSAIICWDLDRLTRQPRQLEDWIDWAEDRGLKLITANGDADLSTDGGRTFARIKAAVARGEVDRKSARQSRAHVQRAEQGRPPKGVRPVGYATDGKVVRREAAAVKAIYGAFDGGASLRGIARALSGIKEVDAAKAEQVLGVPKLPNHTMTLVIERNKKRAAEGLAPRDVPEDKPWAESTVLGILRNPRYAGYSVYTDVKDRRSTVQVNQKRKAELEAAKGEPVLMVKGKRRAWRDYIARDDDGQLVKGKWTPLVSEDLWQRVQERLDDPSRVTNRVGTHRRHLGSGLYLCGLCDEPIRGASRGYRCKHGHINRTGTPIDDFVLKTVARRLREPDALRNVPATDSPRLAGLQAEIDEHRAKISRAERDYDDGLLEAADLKRNRDRSNEAIARLEAAIQALPRGAVHIPVLAVADPAQHFLDADLNTQRHTIEALATVRLWPQPRGRKGFETSSVDVDFGDQVEIPVLAE

SEQ ID NO: 2139 - protein, 561 aa, unidentified
  source 1..561: note = uncultivated organism
MRKPEPQRGRQRCAIYTRKSTEDGLEQEFNSLDAQREACAAYVLSQRHEGWSLVPDLYDDGGFSGGSMERPGLKRLLADIEAGRVDTIVVYKVDRLTRSLADFAKIVDVLDAAGASFVSITQSFNTTTSMGQLTLNVLLSFAQFEREVTGERIRDKIAASKKKGLWMGGPVPLGYVVKDRKLIVDEAEAETVRHIMRRYLEAGSVRALIAMLARDGARTKIQHRTGGPHRGGIPFARGSLFHLLKNRVYLGLVVHKGAAYPGEHEAVVPQELWDQVQAKLGDNGPRLKRIANTRHPSLMTGLIYDGLDRRMSPSHAAKGSKRYRYYITHAEAGVDAARPAWRVSANDVERIVIERLRTFLTDATAVHTALVEHVPQAKDLEAILVAATDDAQALLNPEPHNRTVLLNRYIKRVTLCEGSIEIGVLCSGLLDHEGSIANDVIVLEARTVRVRRGHEVRLIIPAVRPEPPAKRDTRLVDLIAEAHAARSLVMASPNQSLDQIASVHGRCRTHLGRLIKLSYLAPDIVTMILGGEHPALLTRRRLMSVDLPLDWADQRGALGCL

SEQ ID NO: 2140 - protein, 536 aa, unidentified
  source 1..536: note = uncultivated organism
MTGALRAALYLRVSTAKQAEQDVSIPDQKRQGEAYCADKGLSVVDIFIEAGASATTDKRPEFQRMIEAGTAKPAMFDVIVVHSFSRFFRDHFELEFYVRKLAKNGVKLLSITQEIGDDPVHVMMRQIMALFDEYQSKENAKHTLRAMKENARQGFWNGSRPPIGYRLVVAEQRGERVKKRLEIDPLHADTVRLIFQLAHEGLGDGPLGVKSIVNHLNEKRIRTRPGGLWGVGAVHQILTRQTYIGVHEFNRLAKGKRPNDKADVIKVEVPPIISEEQFNAVQARLRSRQPAAMNPAVASSPSLLTGVLFCADCGGSMSVMTGKGGRYRYYSCSNRRRKGPSACAAGIIRTELLEKAVAQHIEKRLLDPSRLEEILAGLLDLRKERAKDRVDRTAELKEKASEAQQRLSRLYSAIERGAVDLDDKDISERIASLRAVRDQAQAEIARADPLSEPSGPETVSADLLPEFAKRVRRRLKGGNGKYRRDHFHLFAQRVEVGRRNIRISGAKETLLNAVINLGNVQGTGVVPSAVLKWLPG

SEQ ID NO: 2141 - protein, 578 aa, unidentified
  source 1..578: note = uncultivated organism
MMDLRKTAIYSRKSKFTGKGESIESQIDLCRTYLKLNFPDVKDEDIIVFEDEGYSGGNTNRPQFQKMLNECKQNNICRIVCYKLDRISRSIADFIKLTDELELHKVDFVSINDKYDTHTPTGKAMLSMTMVFAQLERDTIAERIRDNMLYLARDGRWLGGNTPTGYRSTETIGSITVDGRKRKARMLEIVDDEAEIVKLIFSKFLEFKSLTKTETYMIQHDILTKKGKLFNRFAIKNILRNPVYLIADEQAWNYFNALEVEVYSYKEQFDGIHGMMTYNKTKQQAGKANAINDISEWIIAVGKHKGIIKGNEWVEVQKLLNQNKSKSYRKPRSNVALLSGLLFCGNCGSFMRPKLSQRRNKDGELIYDYLCELKEHSRCEKCDIKRPNGNELDRLVCEEIKKITLNGSDFMKHLKQSFKNMNYDSEPYQEKLKDLRKSKNKYENQIKNLLQSLAESEDSSASTYIINKVNEVDLKIKEIEKQINEYLELANNISSSEQDFELLADLFSNAAKNIDEMTVDQKRNALHSIIHKVIWDGENAHIFYFGEEDQEIDLSIDGNNSEPQRVNCKRDPDAFPFG

SEQ ID NO: 2142 - protein, 540 aa, unidentified
  source 1..540: note = uncultivated organism
MSVTTRRVVREIPRAAIIQMELPQIERDVVAAYARVSTEKEEQEDSFERQVSHYTALITSKPEWKFGGIYADPGITGTRAEKRPDFMRMINDCRAGKINKVLVKSISRFARNTVDALNYIRELKDLGISVYFENENIDTMTPGGEVLLTILAAMAEQESRTMSTNIKWSYQKKFQSGEVTLNTGLMLGYKRAAKNDEDGHAVYVIDEQEARVVRRIYREYLAGTTLTRICRGLEADGIKTKLGKDKWQTSVIRNILSNEKYTGNAILGKTFKPDVLSKRRYKNTGQVPMYYAENTHPAIIEKQMFDLVQEEMKQRKDEKVSAVGTGRYTSKYPFSGLLICAECGHKLRRHVRRVGSGKLVPAWACSERVKNGRAVCDSHHVNEETLQRTYTTAIRNMLGDIDSLMEAVKDSARQAIQPNNKAALQRVEQEIIEIQEQVLALHKLKQQRGVSAADYAAQVKAYSEQLQALESKQAELQTTENKYSSVKLWLENFAEHIKSGEIMNADDSMVMKQLVQQIVVGDEGIEIQLQCGVSIKQEYV

SEQ ID NO: 2143 - protein, 524 aa, unidentified
  source 1..524: note = uncultivated organism
MKRVVCLYRVSTVGQVDHDDIPMQRIACRDYAATHPDWEIVEEISEKGVSGYKVAANDRDAIVEIKKKAIKGEFDVLLVFMFDRLGRREDETPFVVQWFVQQGIEVWSTREGQQRFDTHVDKLLNYIRFWQASGESEKTSIRVRTKHLQMIEDGQYRGGYLPYGYKLVHKGRTNKKNQPVRDLVIDEDEAVIVREIFHLLIEEGYGTNRVANYLNERGIKTKRGTTLWRATSVRALIDNRIYLGYMRMGDTYSPKQEHLQIIDEATWEKCQETVKGRATCLKHEMKVPERTDTRSLLSGLIFCADCGSRLTFSHNTTRRKLADGTEKLYERDCYRCYRKINARESCSGQSSYCADTINETVLYEIRRILSIIKQKPEAALLEKAKENHGDVYEVAYKQAEKDFFEAHKQMNALEDQTMKFLTGENTVDISIVNAMMPKYKEKLETAQRRMEEAKAKMEKEKDAAQTATQEVTDLLSWADTFDEANAETKHMIIARLVERIEINHDYEVEIKFRISVEQYMRIAA

SEQ ID NO: 2144 - protein, 524 aa, unidentified
  source 1..524: note = uncultivated organism
MSKTQSITTPRIRCAIYTRKSTEEGLEQEFNSLDAQREAGEAFIISQRHEGWTVMPQRYDDGGFSGGNMERPAMERLIEDVVNHRVDCVVVYKVDRLSRSLLDFAKIIETFDRNGVSFVSVTQQFSTTTSMGRLTLNILLSFAQFEREIIGERIRDKVAAAKRKGKFTGGTPPLGYDVDPEKTRLVVNPDEARLVRHIFKRFTEIGSPLTIAEELNKKGITTKAWMTKKGVFREGHPWNKTHIYRALYNRTYLGEVLHKDKTYPGEHEAIVTRDLWQRAHAVIEENRRHRSQHIRAKAPALLKGIIRCGACDKAMSPVSTGTAPKNYRYYTCGRAAKTGYHNCPVRSVPAGDIEGAVIGQLRAIFRSPEMVAQTYRATRELEAEELERLRAEKLELEARLAELKQTASRLLDSGASDRDTNDEIRRTNEEFVNTQHRFQDVDDEIQGMQARLVSERDVAECLRKLDPIWDELFPLEQTRIVHLLIEHVIVNPDGMNIRIRGNGLHSLVSEVRDKTALQERTDDQ

SEQ ID NO: 2145 - protein, 542 aa, unidentified
  source 1..542: note = uncultivated organism
MKRVRCAIYTRKSTDDGLEQEFNSLDAQREACEAFILSQRHEGWELVPEHFDDGGCSGGNMKRSGLQLLLAEVEAGHVDVIVVYKVDRLTRSLADFAKIVEQLDAKGASFVSVTQAFNTTTSMGRLTLNVLLSFAQFEREVTGERIRDKIAASKKKGIWMGGPVPLGYQVIKRKLLPVPEEAGRVRTIMRLYLASANTDDLLTELEKQGIRTKFRKVGHTTRGGIPFKRGSLFHLLGNAIYTGMIVHKGKAYPGEHPAIVDQPLWEAVQAKLKSKAPPRKRSTNSEQVAILKGLLTDPQGRSMVPTFSCKGTRRYRYYETRRDLAKKCDPKPTRFAMPSLDRHIIQALKTLLADKQLRRTSNKSSAREIELIQKAALELLALLDSNPSSVIERLVSKIEVKEHSLLIVFKPSAIGLGDASSQIGQSISLPHRKPFGEHKLRLSPKNTRLAQPDSELIALLQEAQTVQKLVLANSKTPLNQLAREQGRCRKRLAKLLQLSWLSPKIVSAILEGNQSPLLTRAKLLDEVLPHAWVDQENQLTNG

SEQ ID NO: 2146 - protein, 531 aa, unidentified
  source 1..531: note = uncultivated organism
MKKTVAYCRVSTDKENQLHSLENQKKYFNDYISNNEELEFVDIYADEGISGTNTKKRDEFKRMILDAKCGKFDVILTKSVSRFSRNIVDTISYVRELKSMNVEVRFITDGIKTFDNDAELRLGLLATFAQDESRQTSEKVVNGQYTSMKNGVVFGANTMLGYNIEKGKMTINEDEAPIIRSIFHKYLVEGKGSHVIAKELQEEGIKTKRGGNKWTNTSIYKILKNEKYCGDLIQQKTYTPDFLSHSKKYNKGEREFIKIENHHEAIIDKDTFEKVQQEIARRRKKAKADGSKYSNRYALSGKLKCASCGSTYVGGDNRKRKDGTIRKSWKCAEKHKYGKKHLNAQGESIGCNNDNVNNDIVLNAFNQLMIKITGDDKEKIVSDTMKTISSIVKKSCFLTDDEEKLVLKKEKINAKIQKAISLCINDIITEDELKEQKINLEQELALVNKKIENINEKQELIQNKELLLEKIQNSLKEMLLFKTTKEEICKQVLEKVVVKSKNEFDFYIKGYKAPFFKNYKSAILDTMCLYH

SEQ ID NO: 2147 - protein, 558 aa, unidentified
  source 1..558: note = uncultivated organism
MATRKTLPMGVAVQQPALACAIYTRKSSEEGLEQDFNSLHAQREACEAFVLSQKSLGWNVLPTAYDDGGFSGGNVERPALKRLIQDIEAGKVQVIVVYKVDRLTRSLSDFAKLVDLFDAKGVSFVSVTQQFNTTTSMGRLTLNVLLSFAQFEREVTGERIRDKIAASKRKGLWMGGVVPVGYQASGRTLVPDDEQAARVREIYQLYLQMGSVRELGQELQQRGWLTPPRAHKRAGFGGNKPFSRGHLYRILSNPVYIGLMSHKGQTHPGQHPAIIDEALWKAVQAKLDDQRNGHKSQSHATNPSLLSGKLFDETGRRLVPSHARKGQRRYRYYVTPADDLGPTLRLPANEIEELVAEAVANWARDPQRVLNAVGWTDAQKAQVAIAAGKQLAQDLAKSPRKHLSHCVEAVEVGPSMVRIALDLVGCAMVNETSPQQQHQIEVAAERKRCGMAVRLVVSGPEGACARGPDPTLVELLKKARDWLERLTQHGQGIADIAKHEGVSAGYVTRLLHLALLAPDITQSIAVGDHPREITATRLMRAMPLPLDWGQQRQLLGMA

SEQ ID NO: 2148 - protein, 528 aa, unidentified
  source 1..528: note = uncultivated organism
MEEYAAYLRKSRADLEAEAHGEGDTLLRHEKTLLELARKKNIQLTAIYREIVSGETIAARPKMQQLLQEVEQGKWSGVLVMEVERLARGDTIDQGIVAQAFKYSNTKIITPMKLYDPGNEFDEEYFEFGLFMSRREFKTINRRIQRGRVASAKEGKFLGATAPYGYNRTKLHNDKGYSLTINEEQARVVRLIYNLYVHGEELPDGKSVKLGCTRIAKKLDTMGLKPFNQQHWAKTSIQDILKNPAYAGLIRWSYRKQVKQIVDNTVKIKEYRDNNPILVEGLHDAIIDKHTWNKAQQIMTGRFKPPLKGDATLKNPLTGIVHCSKCGSLMTRLGPNKHNTYSSLKCTTPYCDNISSPLDLVEEVILESLEVWLKRYKFQMENYEPGVPYEKSAADKEAILKELSNQITKLNSQLDRTFEFLEQGVYTTEVFHGRRQKLTEQINTLEECKINLSNELNGMNQRQILCNGLIPRIEHVIEVYYDIDVMSERNELLKNILEKVTYLKLEPNKRGQRNNANFTIELYPKILI

SEQ ID NO: 2149 - protein, 540 aa, unidentified
  source 1..540: note = uncultivated organism
MRIAVYVRKSKWTGRGESIENQIFLCREYIEKYIENSREAQILVYRDEGFSGKDTNRPQFQKMLADMKLRPFQYLVCYRLDRLGRNLADLALLIEKLNREHTEFVSIRERFDTSTPMGKAMVYFSGVLAQMEREQIGERVRDNMYLLAKSGRWLGGNTPLGFQVREKHYGEGKLKKAFYLEVKEKEAEIPRLIFREFLDSHSLTKTAELLAERQIFTRRDRIYTPEAIGEILENPVYCQSGEKAYEYFASLGCQMGFSREEIREEKGLISYGRTVSSRYRGQEAPPQEWIIAQGEHEGMISQEDFLRVQKLLKRHRLGKPGEGRVQNEACLLSGFLFCSCGCRMRPKYYRREQITTKGQRKFSYRCPCRDKTRGRDCQEAPLLGNLGDCLVWKFLMKKTGEEFSLEEIFLEIRRRTEKEKSREGEWEKIRKEAQGLEREARRLTQRLAETEDGDLAEFLKKEIQSRLSQREYLREKANGEKNSFNKKERENIALRYSDPKFLASLLSIPNKRAYLGLWAEKLIWEGGVLKLYLFVSPELP

SEQ ID NO: 2150 - protein, 593 aa, unidentified
  source 1..593: note = uncultivated organism
MDEKKIAGIYIRVSTEDQAREGFSLGEQKTKLEDLCKYRGYTIYKVYEDAGISAKDTNRPSFQEMMEDMKNKKINVIVSYKLDRLTRSVADLEKLIKEFDKHNCILECALDDINTDTANGKFFVRMLTVLSQLEIERTSERTKFGMIGAIKNGHIPGVTPIGYKRENKKLVIDELTKDIIKKIFELYSTGYSYQKIANYLNKENALNKKWRDCIIIKIIDNVIYRGDYLDGKTTGKPVLYEDVVEPIITKELWYECQNQKSKNSRNYTRDVIYLFLQKVKCPKCGRIMAGKAPGGKKKYRYVYYKCCDCGDYVREDYLESKLTPLIMQLTEFDSLIKNQFGAVLTNKLSNPIPKTEKEIQLLKTKKERLKQAYLNEVIDLSEFNNESKTIDSNIKNLENKLKQEELNEKIDFSYESIMICRDIRRFEWIKNNDILGISPLHEYNQLSKLEKQNMFMRYIDTIEYEGEGKDLIIKKINFRSTFINEYNQCIQKGVFDEICNIQLENGKYLIYCSNPKTHDEITKYVNKLRELYDVNYIEFEVVNTERGQLFNIKPEDIKDGQRAIKMIPIKEENRLCNISNKKLGLITIPQKLN

SEQ ID NO: 2151 - protein, 511 aa, unidentified
  source 1..511: note = uncultivated organism
MAQVQIIQPYQPRSDTLEKVAAYCRVSTDSQDQLNSYRTQIGYYTNFIAQHPGWELADIYADKGISGTSLEKRDEFKRMLQDCRTGKITRILVKSVSRFARNTLELIETTRELKDLGVVVVFEEQGIDTAQMLGEMQLTLLAMAAQEESTSISKNMRLSYQKRMEYGKYVTTKAPYGYAYADGKLTPKPEEASVVQTIFHLFLEGKGQQQIADLLNQSGVIPRESSKWGRTTIEHILSNERYIGDALVQKRFNTETLPHKQVINRGQLPQYYITDSHPPLISCEIFQQAQMLKAMRADSKRPSPHTFIHRIQCPSCGRYYRHINSSGTSKWACPNRVNKVKNCPNYWISEMSIKSSFINLLGKLYLHRDTLLSPTLYLLEEISARQEQGNAKLYELNTALADLNEKAHTLHRLHNKGFIEDADFREQSDALVSQRKKLADQRTQAIHGSKALEALDKLRELQELLEALPEIPWEFDIGLFDQLVEKIVPISKTELLFKLKCGLELKEAIPQ

SEQ ID NO: 2152 - protein, 588 aa, unidentified
  source 1..588: note = uncultivated organism
MAMKRWTIHAEGKGWLKVSPFTLSPSPRVVGWGEWTSGKGAGTMSNSKANNQFAAIYIRTSSEHQAEKASPEEQEADCRQLAADHGLTVVAVYRDTERYRVKNRMVDPSGTRADRPGLLAMLHDGAAGQLDTILAWREDRLYRGMRAMLLVLETIQEHKIDILLARETFDPKMAPIKAWVAQMELEGMRERMTMGVKARLRAGKANTGQDRYGYQRNGDVIEIVEEEARWVRQIFDWYIEGTPIMEIRRRLIEADAPQKGSSVPRKIRWARSSIQAILGSAKEYASGIKIQTRCGEAFEIPVPPIIDQATCQQVLERRQANKTHPARNLKWDYLIGGMIYCPCGRKWGARTNRWKKRGEERKHPLGIYYCTETHKEHIHPDCPRTIGSKKADDLVWRKVCSVISNPDVLLARAAEYVDELRQRAETALEDRERIQGELDALTLERQWVITQARKGKITDEDMEYQLGALTLQELNVKRELATFVEIAHLTALNDWEVAAREYLADIQAGLEFLNTETQTDEERREQFEAKRQIVNTLVEKVLIGKGRTLQVVFKLDVLSLLERDTEPTQIELVGTCSRKRSTPPHRTL

SEQ ID NO: 2153 - protein, 515 aa, unidentified
  source 1..515: note = uncultivated organism
MTICRKVSMKNAVIYARYSSDKQNEMSIEGQIEECQRYAASNDLLIVQEYIDRAQSAKTDRRPEFLRMIADSEFGNFEVILVYQLDRFARNKNDSGYYKKILADNGVRVISAKENIASDSSGIITEGMLETISQWFSAQFSEKVTRGMLQRAAQCKYNGSTVPLGYAVDENDHFILDEQRAPIVLEIYERVASGETIKSVMDDLNDRGIKTQLGNQFKRGSLSTVLHNEMYKGIYIYKDVRIPGGVPRIISDELFEEVQEITRKRKHGHRPAIEDYLLSGKLFCGHCKDPMDGVSGTSSTGKTYRYYKCLNSPKKCNKKNVRKDVIEPLVLDACRDLISEEMIDNIIKAVEEQNHMDQESPTTISLREKIKSIESKIEVLLDQLEEGVNSARIVNRLKQREDELEELNRLLQKEQAKQRIIEPDLIRIFMRSIKLGSRDDLEYQKLLVNTLIDRIYLYDDHFSIFLNHSGRKGKVSNHEVADIEKYFNNNPSSSSITLDSGTPKNGQPANVIKLM

SEQ ID NO: 2154 - protein, 590 aa, unidentified
  source 1..590: note = uncultivated organism
MKVKKRIAIYSRKSKYTDKGDSVGNQVELSLNYINLHYPKDLYDTEIAIYEDEGFSGGSFKRPQFQKLLDDERNEPYDILICYRLDRISRNLADFSYLVNELNKLNTSFISIKEQFDTKTPIGRAMMYIASVFAQLEREVIAERIRDNMLELAKTGIWLGGYTPTGYSVKRYEKVTVCEKNSDDFIENRVKKACKLITNKDEMKDIDIIFSKYLELKSLVKLETYLIQNNIKTRKGVYYSTFTLRRILTNLVYVKNDNDILEYCNNKGIHIFFENDGRDKFNGKYGLIAYNKTKDNKILPIEEWIVAVGLHQGQISGRDFINVQVLLEKNADKKYRAVTDLNKNTVMVGILKCKDCGSYMRPKNGGNKKKDGTISYYYSCVLKEKSRGTKCNSKNVKGDFIDNEILNVLKNIFVPNSEIYKELKKMSISKNIKHKDEEVMKLKKQYEKNKYEINSLVEKIKYIDSSLIDVINNEMVRLNKQNENIEEKIKNLCDINNYQIQENKNISKGALNILEIVDNCFDVFNEYDLKTKRDIINLLIESVYYNSETEKIEINLLNDKIDESKKSFLISISEKNLNKKLSPDDNGRCS

SEQ ID NO: 2155 - protein, 626 aa, unidentified
  source 1..626: note = uncultivated organism
MSRQAARAIAPDTGEDAGPVRVATYTRISTDEERQPNSLEAQRVRLDAFVTSQPDWQIGRRYEDQFTGTVIDRPALTRLLKDAKLGRFDVLLVYRVDRLARSIRGLAQIIDELDQVGVIFRSATEPFDTGTPAGRMTVQMLGVFAEFERALIVERITAGLERKAARGGGCGGQRPFGLNIAVDRDRLERNATEAPLVPVIFDQYVNQQTGSSALAAWLNEQGYRTKNGRLWTSQSVITILRNRAYLGEIYYRGNWYPAPHDPLIPTDLFDRAQDILTDRGEDRSRRRSNPTEYLLSGRVRCGRCGKPYIGTASHGRNGRYTYYTCFTRMRHGTSHCGNDRLPAERLEQAVTRRLWQVLNDRELIDQAITETYENIAQHDAHQQNELAAIQGKLSETRAAMDRYFRAFETGTMPEDTCAPRIAALSQEAKALEARASELAAQDEEQPERATSDDLDAMRTDLRDALNSSAPTRVKIVLQTLIDGIQVHARDNIEPTFRVPAVRVDYGYMDLVRHLSNPVGPLKALLEGPPSIPNDSKRTPIERSTRPAADGVALAALHPHPGRIMGAIVRVLSEHREPMQAKAIHAAVEALLGEPVRWGTVKGALAGNIAGPSPRFVRVARGRYRLR

SEQ ID NO: 2156 - protein, 529 aa, unidentified
  source 1..529: note = uncultivated organism
MAMVAFYGRFSSNNQREESIDAQYRACKQFVEARGDTIVAKYMDKAKSGTSDKRPEFLRMMKDAEASKFDCIVVHKLDRFSRNKYDSAMYKRKLKQCGVRLISVTEQLDDSPEAVILESVIEGMAEYYSKNLARETMKGLKENAYRTQHTGGKPPLGYDVDAEKKYIINEKEAECVKLIYKMTIDGHSRSEIINELNERGYKTKINTMFKVNSLHSILTNEKYTGVYIYNKTASKNAFGKRNGHAYKDESEVIKIEGGMPAIIAKEDFQKVQEILKMRKAKPGSNTAKENYLLSGIIRCGCCGKAFCGNRRKAKNKPMYVSYRCAHRTKTSSKVCDNKEIRKEYVEEYVLSELERKIFNDEAIKILTEGINKNLKNQIKADDDKKSILLKEINDIDSQITNIVNAITQGFVQEEFKEKMDQLKKRKTDVQDKLSEIEAREVNKVVTEADVRNLLSDFSGYVMSRNIPECKKFIRDFVKEVVVFKDHIEVTFNVAFSLRKNRKEGVEVTSSIKRCELFERYSDSFYIKVG

SEQ ID NO: 2157 - protein, 525 aa, unidentified
  source 1..525: note = uncultivated organism
MRIATYTRISTDEVNQPYSLGAQSERLASYVASQEDWQLVGTFTDQMSGAKLERPGLQGALRAARAGRFDLLLVYRVDRLARSVRGLAEVLETLDTAGIGFRSATEPFDTTSPAGRMMVQMLGVFAEFERATIIDRVIAGMERKSSQGGWCGGTQPFGYRAVKGEGRLEVDEDEAPLIPVIFELYAKKRLGSHAIANQLTESGLSTRSGRPWQFKSILTVLRNRTYLGEVNFRGTWSESDHPPLVEQGLFDAAQAILVERGDDVSKRASNSSDYLLTGLVVCGTCGSRFTGTRATGRNATYRYYTCGGRQRYGTKSCVADRLPAEALDDAVVRSLLSTYEDTDLFSKAISEAQERAVLDESHHDGERAALQAELDKVERGIDRYLRAFEIGTMPEEICGERVKDLGTKATALQARMFELDAEVPAAELVAPTSTELSELRQRVEAPVAGGSNALVKSLLQALIHEIRVDSREAIHPVFRVPVGGDHRQDNAVRAPSRSVEVSGRLSNQTTREEIYALWSMTRHFG

SEQ ID NO: 2158 - protein, 578 aa, unidentified
  source 1..578: note = uncultivated organism
MKTTRCAIYTRKSNEEGLDMAFNSLDAQREAGIDYIKSQKHEGWQLVEEEYNDGGFSGGTMKRPGLKQLLDDIDRGRIDVVVVYKVDRLSRSLSDFARMMDVFDEKQVSFVSVTQQFNTTTSMGRLTLNMLLSFAQFEREVSGERIRDKLAATKKKGYWVGGQPPLGYRLQSGEETKGLFIIPEQADLVRTIFDHYIELSSPVAVANELNDAGHTTKQWTSKNGNVHGGKPLSQKYIHSVLTNRLYIGKITHTRGELTEIYEGLHESIIDQATWDTAQKLMTKQDRKNLHRWTHPHLLKGKLRTSERFAMSPTSTHRPLTKKSETNQKRLVRYYISQKAIKHGFKNCPIKTINAVHLDELVRGLVLGHLNHNDLDKQSTEVRDRWIRKAIHEVTLSPDSITVQLVTKRIEQLQRHTFRSPPMETPSRPICLRTPEVDDRGEHIQLMLQLQIKKLDGRRLLLSPDGHDLIIPSTPVPRQHFVDAIGLAYRWHDELIKSGSQITEFAKEQGIARTRIIKLLPLTQLGPKVLRHALAGTLPSTITLDDLLTASMQLDWDRQTAELGINAATIDQHNVRSAG

SEQ ID NO: 2159 - protein, 511 aa, unidentified
  source 1..511: note = uncultivated organism
MGKTVTELTAPKKAERLIRLAPYCRVSSDSEDQQHSFAAQVKYYTEYTSSHPEYALVDIYADEGVTGTRMDKRSDFSRLIRDCRKGKIDRIITKSVSRFARNTTELLTAVRMLKEIGVSIYFEEQGIDTETIDLEMILTFPGMAAQRESETISENMRWSYQKRMESGEFNCCRAAYGYDLIDGQLRINETEAEVVRRIFSLYLQGYGKQAIANILNEDSVPKRYGHKTWHLYTVSYILGNERYMGDALLQKSYTTDTLPFRKKRNHGEKARYYVKNSNPPIVSRETFQAAQALQKSRATGNQSSKNRYPFSGVLKCPVCGHTYRRQIVNGTAYWLCSYKASGRTQCGSMRIREDAAMASFTRMSRKLVLNREEVLGDLIRQLEKLQARTSGSSGQIYQLDKQIADVNAQSLVVAKLHSSGILNNAEYAAQSGELSRKVSALRSERRRILMEDEDDEIIESLKSMDSVLAEYTPTAAFDEELFGQIVESVTVVSGTTLRFCLAGGLALTENL

SEQ ID NO: 2160 - protein, 555 aa, unidentified
  source 1..555: note = uncultivated organism
MKKVRILLRVSSNQQLEADGDLSVQRQLVTEYIQQHPDWKLDAKEYFEGSNSGYQNAVTDRDVLQEALEDARKKEYDILVAYKDDRIGRRMWEIGAYVMSLKKYGVDIYTVKDNCISPESDDIMGQMVLALRYGNAQKSSSDTGMRVKDTAKKLVQQGKFMGGKAPYGYKLELSGEISKHGRALKHLVIWQEQCEVVRFIYEQALHKEYGSVKIAKILNSHEKYKHMAPNDVWKAGTITSILTNPIYAGYTAYNRRTRIDGKYHKIGSENWILAAAPDPGISIVDADAWNRVQYMRKERADRIAKTEDHQKRDSVVIRNHLGTLALIDVLYCGCCGCKMTNGSRYNYWKIKGTKEQRSSKTRVYKCQNKDRGIPHPGTGAYRADKIELIVFEIISEYVEKLQKNKDVAEEIKLYKQFEKKTLIAVLEKERQALDRIKKRINVMEDQIPQAMTGEYPLSLEELVPLIDKQKQACTRQQKIIKEKEMILESMDRPDSEWKLSTENVPTWKQVFMGADPHTKRILINKLVEKIHIKENQITVRFRIPLEESDTLLVES

SEQ ID NO: 2161 - protein, 528 aa, unidentified
  source 1..528: note = uncultivated organism
MFNENTKPRALLLLRVSTAKQANGNDDCLLPVQQEKCTALCEENGWKIVGTITETKSAYKNGMYERESIIDIANRTSNNEFDILVAFKLDRIGRKGNETTNFITGLLEKGIRVFTVVEGEITADSFEDEFMLTFRGLSAKQESRNISVRVKAALEILVQNGGYRGGPPMFGYQLISTGETNRKGRLINVLCIKEEEAEHVRELFRMTAEEGKGTHQLADCLNQKGIRTHKGAEFQPTGILRILQNRIYIGHLDTKDIKGPYQEHLRIIDDETFYKVQEILEQRSAKNAEKRTISLNTKGPTLLSGNVFCGHCGGRITASSSSCFYETKEGIKQRYANKNYVCGNRANRRCDCDGQVGYKITIVDSEIEKMVTNILSNIADTPQSVAIAKTYEARISELKRTEKRLRAEISKCSEKEKSLILEIGNALIGESKFTTDQLNAGLEAVKAKRMSNEEELKECSKRLENLSVEKESAKNGYSKLTTWAEEYSLASIERKKMIIAEIFDRIEIKKGYEIIVTLNEIYKTYITE

SEQ ID NO: 2162 - protein, 587 aa, unidentified
  source 1..587: note = uncultivated organism
MRGYIYARVSTQNQDYKRQLSELKLYAEQHDIEIVETFQEKVSGRKNIRPELERMKKSIVGNKNKPDGEKIDIILLWEISRLSRRMIDLQKNVFFFLDEGIRIYCKKDNWTTHTEDGKLDNAHLGMLSILASFAESEVQNTRDRIKSSISYRLSRGDSYATKPPFGYKIVDHKLVIKEEKKEGEDLSEAEIVRRIFNDSANGKSTHKIGIELRAETGNRNKWSNNTVLRMLKNPCYCGYAYFGKTRQRNELKEGIDKDKLSPLIKVETPAIVSKELWERSLEAITERKSRSKALQTYPKALLRGLLFCPICGHRYTYNKKLYQCTTLGTDKYDYCGAKGISVKNLDYAIWEMISTFFKNQMSSEKMEELKEPLLNEIRKLNDNINIYRSHLENLEKEIAEQLKQANNFLKKQMTRAYNLTIDNIGKIEDQAKDTEKLIEETHFEISQRNKKIAKIESSNISITEVTDKRVFCVRVIESIHLYTIRLDRKYLYIVFKNGLSCQMWYRYNRGNRRSYYAFLIDDGTVAFNWKQDQILSGLPKDILDSISDFTICTNTNSYFGEEYFGEFTYDEFWDVLLKHNYVHIIPE

SEQ ID NO: 2163 - protein, 545 aa, unidentified
  source 1..545: note = uncultivated organism
MIPQRCAVYTRKSTEDGLDQEFNSLDAQREACEAYIVSQKHEGWTLVPGRYDDGGFSGGNMERPGLKALLADIEAGLIDVIVVYKVDRLTRSLADFAKIVERLDAKGASFVSVTQAFNTTSSMGRLTLNVLLSFAQFEREVTGERIRDKIAASKRKGMWMGGPVPLGYEVVERKLVPVPEEAERVRTIMRRYLELQSVPALLPHLKAAGILTKVQVRASGPHRGGIPFARGSLFHLLKNPIYRGKIVHKGQVFDGEHEPIVEPDLWERVQQTLREKAPARKRPENDPQRAMLHGLLLDPQGRPMVPTYGCKGTRRYTYYTSRKDLTRKGEPRGTRFRRGEIEEHIVQLLTALLNDEHALRRLSGCGDGAILQTVLSAAKQQSQALAIRASAADAVRAVVGAIYVTNTELQIDIRPTALGMSTTGTWTYSIPRPPKRPFRETKLRMDAKRTDERFDDDLITLLSAAIQVQRLVLQSPELSLSQLGKREGRCRAHLGRLLRLSWLSPRIVEAIAEGTQPQSLTRNKLLSVSITLEWEAQERLLGMAA

SEQ ID NO: 2164 - protein, 505 aa, unidentified
  source 1..505: note = uncultivated organism
MKRIAIYSRKSKETDTGESIKNQIKICKDYFEKNYDNCTFEIFEDEGFSGGNTNRPAFKRMMQLAEHRQFDIVAAYKIDRISRNTLDFLTMFEKLKIYDIELVSVTEGFDVNTPSGRMMMSMISSMAEMERANIAQRVKDNMFELAKLGRWSGGTPPTGYRSVRINVGSKTEVYLELIPEAKDVVKKIFTMIADGYTTYEVGKVMNLSPRTILNIVTNPTYMASDEEGETFLKSLGYKIYGQVNGKGFLSYNRRPKKNGKKLSNSSDMFVSISTHEAIVTSSEWIAAYSNIKSRKIEAKPRVSQLTFLSHLVKCKCGSGMFVSPGRYKKDGTRVLYFRCSDKKNNKNCDSSYLKVQDVENSLLDTLNSIALDKSLLNAYIKNQTPDNLENEINKLKKEIAKNTDDISSLTEKLILINGSAVEIISNKINEIHSHTELLNSKLFELEREKLLLKSSSLDIDSLYKGIKDLLDNWNDLTILDKQVSIKKLIKSIDWDGSDGISINLK

SEQ ID NO: 2165 - protein, 539 aa, unidentified
  source 1..539: note = uncultivated organism
MKAPSVKPVRCAIYTRVSTDRGLDQEFNSLDAQYDAASAYIRSQAHAGWTLIRSRYDDGGYSGGSTDRPDLQRLLDDIRARKIDVIVVYKVDRLTRSLADFAKLVELFDAHGVSFVSVTQQFNTTTSMGRLTLNVLLSFAQFEREVTSERIRDKIGASKRKGLWVGGPLPLGYQMKDDKIAVVEDEAERVRLIFRRYLELGGVNALVRDLKAKNIRTKTRLRATGVTHGGIHFERGSLFYLLRNRFYIGEVNYKGDILPGEQPAIMDRDLFDAVQQKLLDQWSHRNHAKMKSDHLLTGLLFDDAGHRMIPTHATKAGIRYRYYVSLPHLHGESKTASVGSVSRISAADLEDVIVKYLNAHQIAQKETRTSKVPQVGDPKTILEQVARIDAHEDHLVIRLKPADGEEISNSDDGHTFSVPWKKPPSRRSRQILVPNGVSRNDVRPTRIERRARLVSAIARGRRWLDEIISGKVTELEQIAAREKCSVRQVNMTISLAFLAPNLVRAAVQGRLPRGIGVERLRDAPAEWSRQFETLGLNPQ

SEQ ID NO: 2166 - protein, 565 aa, unidentified
  source 1..565: note = uncultivated organism
MPRADASRRRCAIYTRKSSEEGLEQEFNSLAAQREACEAYIRSQQHEGWLLARNRYDDGGFSGGNLERPAAQRLLTDIRAGRIDIVVVYKVDRLTRSLADFARLIELFDAQGVSFVSVTQQFNTTSSMGRLTLNVLLSFAQFEREVTGERIRDKIAASKKKGMWMGGNVPLGYDASERTLVINPAEAETVRRVFALYRELGCVRRVKEEADRLGLRTKSSTTTNGTERGGKPFSRGHLYTLLSNPIYTGHIAHKGELHPGQQAALIDDESWSTVRDQLAANTSNHRRRAKAAEPSLLAGLLVDARGERLTPSHAVKKGRRYRYYVSAALITDAGTDREGWRLAAREIEEAVIRILADALTSPASLVERFGAAGMPSDQVRKLLSRAARMAAALGGSPGERAKLVRELVEKIIVDEKTIIIKLRRGLLLGEDVASSASEAASDSAVELTATAAFTRRGAETKLVLPGLAPQKHSSRCDPALIKAIARGRAWFEELVSGRARSLQELAKRDGISRRYIRRLIGLAFLSPELIEAILQGRQPVALTATRLTELDLPLDWTEQHKLLAG

SEQ ID NO: 2167 - protein, 513 aa, unidentified
  source 1..513: note = uncultivated organism
MPTVTIIKPTIETESDRKIRAAAYCRVSSSSDDQINSYMAQMTYYTHKFENSETETLVDLYADEGISGTREDKRPEFQRLIKDCRKGKIDRIYTKSISRFARNTRDCLKNVRELKSLGISIFFEKENIDTANIADEMMITIMGGLAQEESVSISQNMQWSIHKRMQNGTYIASNQPYGYDKADGKLVVNESEAAIVRRIYQEYLNGRGLNAICDSLNADGLIMGKSQIVWKKKAVRYILTNEKYIGDCLWRKNFTENVFPFRKPRNRGQADQYYVTDDHEPIISRETFERVQELLKERGEFFGNTEFKTYPLTKKIKCGNCGKTFRKKNINGRFYWVCMQHDHAAESCPGKGIAQDVIYTAFIRLFNKLYQNYKVILIPMQTALQELKVRKFTGNVHVIDIHRNMAQLREQGHVIAGLRTKGFLSEEKYQEQTAELNRKINNLQKELKMLTKSNDEDETLEQINMLTEYFESREQLMIEFEEKTFEFLVDRIIANQNELEFYLPGGLKFTEKI

SEQ ID NO: 2168 - protein, 523 aa, unidentified
  source 1..523: note = uncultivated organism
MKKTALYCRLSQEERGAEGESMSIKNQRDILARFAAERGFGNTEFYVDDGISGTDFKNREALNKLRGEIYAGKIGVLICKDMSRLGRDVLEVGLIKRDCEDYSVRLIAPSDGYDSINGYDIVSTMRDAINEMYAADTSRKIRDVKRNSALQGKALGKPPYGYYVEKDRSIWLIDEPAAEIIREIFERFIEGVSASVICRELTARGVVPPKKHSGDKNGSDVWSIASVYQMLVDPVYIGKYVSHKNTTVSYKNKKRIERPEEEWVVIDNHHEHIIDIKVFEAVQRMRSKRKRYTKRGDRSVLSGLAHCNDCGATMAYAMQGQNYDYPNFICKTYRQADCLNRHKCTRHGIRVNDLEEYVFKHVKEYIDLANTNQKELERRVYKSTSANAEKQIKNKSVELVKIEREIEQVDSEIDTLFRDRTSGKLSEERFYNMLPRFETKQAKLKSTAETLRAEIENLTRKTADVSGFVELAKEYKGITEFTEKIARLFVEKVMVHEAVFATGTKRKKVSQEISITLALIGEL

SEQ ID NO: 2169 - protein, 530 aa, unidentified
  source 1..530: note = uncultivated organism
MRAGSQSHPGSRSEPESIIRCAIYTRKSTDEGLEQEFNSLDAQRESAEAYIESQKHEGWVCLPDHYDDGGFSGGSMERPALKRLLSDIESGKVGCIVVYKVDRLSRSLLDFARIMELLDQRHVSFVSVTQQFNTTNSMGRLTLNILLSFAQFEREIIAERTRDKMSAARRKGKWIGGMPVLGYDVDPGAKKLIVNENEAARVREIYEIYLEQRSLLAAVRELKRRGWTTKRWITKKGHEHGGRAFNKNNLFSLLTSVTYIGKVKYKGTIYEGEHEAIVDDGTWRKVQDVLRRNGKNGGKDVRNKHGALLKGLLYCVPCGNAMYHTYTLKNNKRYYYYVCTRAQKEGWDACPTKSLPAAEIERFVIDQIRCIGDDGDFVNKVVNQARRQNQKRIKDLKREYRTLEGESKQYNAEVRKIIGTLAEEDVADTARLADLQDRIRTIEKQATTMREEIIALSRETVSEQELAACLSLFDPVWESLSRLEQARILRLLFERIGYDGEKEAVSVTFRPNGIKTLGQEVDIRDSEVPE

SEQ ID NO: 2170 - protein, 565 aa, unidentified
  source 1..565: note = uncultivated organism
MQSNILSKTYHSGGYLRLSHSDIVASGDTNAAAQESMQSNSIENQREYIEEFLKTKPEIISTTFYVDDGYSGVNFERPSFQRMLQDIRENKINCVIVKDLSRFGRNYIEVGKYIEQLFPLLGVRFIAINDNYDSAEDRANNNIILPFKNLINDAYCRDISVKIRSHLDVKRRRGEFIGAFPVYGYKRGEEKNKLVIDPYAAEMVKEIFRMKMEGTSNQAIADELNSLGVLSPAEYKKEQGSGYKAMLQTHEKAKWSVPTVIRILSDEVYVGTLVQGKESTLNYKIKVRERKPREEWIRVEGTHEAIISLADFEIVADILKKDTRVPTGKKSVYLYSGYLYCADCGCSMTRKCVHSGQVPYTYYICSGNKKDKTTCSSHSISERTLDEAVTKTIRMHIKYLYGLRESMKSVREALNNSEKTKTLLLQSEKRQKEIEKYKKLQFACYEDYKNGLITQDEYKMFKASLESREEAAESAIRELEKKKQFLLQGGREKEAWMREFVENEKAQLSRSLLVRFVERIYVYENHRIEILFRYQDEMAKAAESLEDFRSCIRQKGGQNGKEIQK

SEQ ID NO: 2171 - protein, 539 aa, unidentified
  source 1..539: note = uncultivated organism
MRAALYIRVSTRKQAEQDLSIPDQQRQLRDYCRRKNYKVVREYIEPGASATTDDRPMFQRMISDAEDARHPYDIILVHSYSRFAREAIDAELYIRSLAKANVKLASITQEMGDDAGGHLARRMIALFDEHASREGAKHTLRAMKENAKQGYWNGSAPPFGYRVVDAERRGDKIKKTLEVYEPEAKIVRQFFTLYLAGDGKTGPMGIKNIVSYLNGRGRTQRNGKPFHIKFVHEALRNTAYIGKHYFNRKDSRTNKRKPMTEWVEMKCPAIVDHKTFSSVKKLLAERNPRKTPTRVTSNSILLSQIARCSYCNGAMTLRAGKSGRYRYYACSTWARVGASACKGNKLSMPTLDALVTDALLDRILTPERMRALIQEVRQSLRSGNGDTRRKLKQLHGQERAITLKINRLYEAIENGLVGDVEVFRGRLSTLHAELEETKNEIEATREASKGILPVSSADLSSIALAFGRLLREGDLQLRKAYFRLFIQEVEVGSRHINIVGSKEALAHATASMRGKRPNTVPVSMAGWRPRRDLNARPPD

SEQ ID NO: 2172 - protein, 561 aa, unidentified
  source 1..561: note = uncultivated organism
MIMKKIRMLLRVSSDQQLEADGDLSIQRKILMEYIQKHEDWILDEKEYFEGSKSAYKNTASQREVLQEILQDARNGEFDILVPYKDDRVGRLMWDTPLYIMSLKGLGVDVYTVKDGCISPEADDIMGQMMLTFRYANAQKSSADTGMRVKDTAQKLVEQGKFMGGKAPYGYELAYSGEVSKHGRALKHLVIVPEHAELVRLIYSLSLNKEYGSAKIAKTLNKNAEYKKSAPNGVWKSGTITSILTNPIYAGYTAYKRRERVNGKYHRLDAKDWITAREADESIRIIDAETWNRVQEKRTRRGKRYTEKLENQDITVIQKNNGTLPLIDVIYCGYCGCKLTNGSRYNYWTIKSTGEKRASKMPIYKCQNAWQGVPHEDVYQFRATDIEPPIFETIAAYIGRLQENEDVFEEIEKNHNREKSMLKKELQKLQEEADKIRKKIDVMEGNIPDAMSGEYPLSLDELVALIKKQKTALEHQESLVREKELAIQNLSVSVNDWEEIRKKIPTWQDVFLNADADAKRVLVNRLIKRIEVKKEEITIHFKVNLEEVLQPRITDSFGVQE

SEQ ID NO: 2173 - protein, 605 aa, unidentified
  source 1..605: note = uncultivated organism
MVQKDEHQIRAAIYIRVSSEEQKEKYGPDLQLASITALFQSKGKLNDGRDAVVLAGNQYIYRDEAVSGTVELAERSGFSQLIEDITISPEGQLPFDLVAVYKIDRFARRLKILLDVIDLFEQKGIQFISANESIDTSTPFGKAILAIVGVIAELEIETTKMRTQDGRKQAIENGVVMGSVAPYGYKKDAESKLQIFDKTPSGLDKEAEVVKKIFGCCAYQKMTPQMIAIELTKNEYLSPEASAVFHGKRKGEIKKKNDQYFWRAERVREILENRVYLGEYWTGKNKNGKALPQAEWKLSSYRHEPIIDLGTFEIVQESLRHSSMWDNLMNVKNRDHIYLLSGLLKCEHCRNLSSPPDFQMMGWTGGRKKLKPSSTKNENEYGYYYHCNRKNPLKHSKTCSTIPIPADPLENYIVNFVTDLLHNPKAVFEHQQRLPSTRKRIKQLKRDRQYFNDLQHGVPQRRKHLRDQQEIGAISTEQLKAKLRDLDINEKQYHQKIEEFDQQISQQAISEGYIQSFEVFRQKYGEVLGDIQKNRKQLYEVLHLLIDEVVIKSRPVNPEIDVVAGRKKVDQVIPDKLEIKLRLPQHLLHQLIKDQVGFEDKNPNL

SEQ ID NO: 2174 - protein, 545 aa, unidentified
  source 1..545: note = uncultivated organism
MSDSERRVVIIPARPQAMQEELKRQKRVAAYCRVSTEEEEQQSSYEAQCSYYTDKIMTNPEWTMAGIFADEGISGTSTRKREEFNRMIRKCRQKKIDLILTKSISRFARNTVDCLKYVRVLKELGIGIYFEKENINTLDMDTELILTFMGAFAQSESESISANVRWGKRQAMKEGKVSVKFEKLYGYCVDETGQPQIDPVKGEAVRVIYEQYLRGASLRMIKEHLEEKQYPSPSKGGTWNIGQIRYILSNEKYCGDVLMQKTFIKDCLSKKAVKNTGQLPMYLVQNNHPAIVSRADYQTVQAELARRNATKSPSTKGAPTGRASYASKYALSERLICGECGTLYRRCTWTYKGEKRVVWRCVSRLDYGTKYCHNSPTMREGTLQQAIMDAINSQMDAKENTVQLIAEAMEQELVTVPDSDVTLGAVKRRLQELEEEFADLLRSVSCGSGPDYRERFQAITEETARLKAQQEEISAQLRTNQSIRSKMQRITAAASQMEHQMTEWDEAMIRQLVHTVEVISADRIRVILTDGSIIMQEVHSESGTL

SEQ ID NO: 2175 - protein, 538 aa, unidentified
  source 1..538: note = uncultivated organism
MPKVNCAIYTRKSTEHGLDMEFNSLQNQEEACKAYILSQAFNNWEYYKTYSDGGISGGTMERPGLNTLLNDIRAGQIQVVVVYKVDRLSRSIIDFHKMMQEFDKYGCNFVSITQSFDTSNSMGKLTLNMLLSFAQFEREVSAERVRDKIAASKAKGLWMGGTPPIGYDAKERQLIVNEGEAQLVRLIFQKYIETENMFAVAAYLNSQCIYTKKWVARRSKREHGGGQFYKSNIQRILTNPLYIGKIAHYAQNKIYDGKHEGIISRDLWDKVQGLIRRRINDPNAFLHYKCHKTVLAGKLYADKGQSFRLTSSKKQGKQFLYYYNGVGGHYLPVEQLDRFVLNMLKQADFDDIEPLADMSAITDTQLGRWISKATCQTVGKKHYLTVFLDEKQVKTDLGNCPKMSGQVDVKPLKMARIEDTIYLRDSFMVDNISSVRLRNGSARNILTIRQLNESLVRGLARGWQLKKRVEQGIIIRELEKEMHMTKRTIMRYINLCYLSPRIVADILEYKNPANLTLRELMNLAEGKVDFERQEKIWM

SEQ ID NO: 2176 - protein, 549 aa, unidentified
  source 1..549: note = uncultivated organism
MNIFIYSRKSKWTGRGDSVENQVQMCRDYIERNIQGADKAEICVFEDEGYSGKNTKRPEFQNMMQEIRKGNCSYLVCYKLDRMGRNIIDIASMVEELNNLKVSFISIKENFDTSTPLGKTMLYIAGIFAQMEREQIAERVRDNMMMLARSGRWLGGNTPLGFVSEKEERVMIDDKVKSSFRLAENNQEMPVVHFIFQEFLEKQSLAKVVEYFLKNDIKTKRGKEYTTTTVRDILMNPVYCTADQAAYDYFENLGCQMCFSRNEADGIHGLIAFARTSSVVYSNKNNPPDEWIIALGKHRGQISGEDFIRVQKLIESNSSKSESYHKVRNEVALLSGILYCKCGHAMRPKYYNVKQVTKEGERKFSYICPYKDKTHGEKCDVVNVPGNDLDQMVCQELFRYAQPDSQVGQMLQQLKNAIGNDRKEVVDEQELIRRAVHEKEKSIENLIATVAQPGRSPEFIAHIDDEIAKLSRECLELQKKLGSYEKDKDSSENQIDQVDLLVSELKSFKKMFQKLSVPQKREYLRLLIDKVIWDGENAHIFICGSHSTG

SEQ ID NO: 2177 - protein, 513 aa, unidentified
  source 1..513: note = uncultivated organism
MSNAIKKETVRCAIYTRKSTEEGLEQEFNTLHAQRDAGEAYIKSQQHEGWECLPERYDDGGFTGANMERPALRRLIADIEAGKVDCVVVYKVDRLSRSLMDFARIMETFDRQKVSFVSVTQAFNTASSMGRLILNVLLSFAQFEREMISERTRDKIAAARRKGKWAGGMPVLGYNVRETKLIVDKAEAERVREIFEMYLQRKSLLDVARELNERGWRTKYWQTKKGTERGGRRFNKSSLYQLLTNVTYVGKVRYKDETHDGAHQGIVDEEIFAAVQSQLEHNGKSGGRGVRNKHNALLRGLLRCAACDCGMSHSYSKKGNRLYRYYVCQRAQKNGWATCPSPSLPAGEIEQFIVDQIKRIGSDPAVVRDTVAEISRQRDVKIKRLTGEKAALVRDVRAGYTEMGKLTGGVFDDARFADVHDRIRLDENRLREIDDELSGLRDAAAGETEILESLAQFDSVWTVLPPRDQARIIELLIERVTYDGRSSDLSITYRPTGVQSLADEVAGQTEEAA

SEQ ID NO: 2178 - protein, 513 aa, unidentified
  source 1..513: note = uncultivated organism
MSKPTPEVRCAIYTRKSHEEGLDQEFNSLDAQRQSAEAYIESQRHEGWKLIRKRYDDAAYSGGTLERPALQQLLADIRDGHIDCVVVYKVDRLSRSLLDFAKLINLFDEHGVSFVSVTQQFNTTTSMGRLTLNILLSFAQFEREIIGERIRDKKQATASQGKYVGGGPILGLDVVTKKYVVNREEAKLVRDIFDRFEKLESCRKVAVALNAEGFRTKVRPTTKSGKQRGGKPWRQRSVYEVLINRRYIGQIVHKGKAYPGEHEAVVPTEQFERVQKQLRANKTYTHKHQVRRFVLLRRMIRCGHCGGRVQPTWTRKDGREYRYYACTKKVKEGYGQCPLPNLPAGEIETAVVDQLRALLRHPDVIARTYREISKAGATGPDPATLAKLDELRMRRGQTQKSIRAALNVADQDEGFLADELKRLNGELRSLDKSIRDLEAKATQGAPVELDRVGEALRAIDPIWDVLFPEEQRRIAQLLVEDITVSTSGIDIRFRTNGIEQIVEELQPIEERHA

SEQ ID NO: 2179 - protein, 567 aa, unidentified
  source 1..567: note = uncultivated organism
MARKSRKNAAAEPIQMPVADRIYKAGLYARISVETERKREADTIGNQLQLLRDYVSEHSDLSVFDIYSDDDISGTDFIRPEFSRMMNDLRDGKIDCIIVKDLSRLGRNYLESGEYIEMVFPFFQCRFIAVTDRFDTKFQQADISIQIKNLANEMYAKDISRKICSSMRTIQEQGKFAGSRAPYGYRLDPKDKHHLVVDEETAPVVKRMFEMVADGNTLHYVATTLNSEGIPSPGRLLYDRGIASTDHFKNSKWYMQTIKRILIEEVYLGWMISGKFRSTYHSTGQKGSRPAPKEEWIVTKGTHEPIITKERFDQVQLYFQRLKEELGRAAVYDSKSKKASIFKGHLRCGECGQAMFLRNKKNHAGERVPWYYCSLHENYNSSYCIKKAVKKQDVEDIALKLIRTQIKLFTDARELLTALNKKESSKTKFRIYSDQIRGVKKQIERYVSLKASLYEEFANGTLSQNDYISMGQEYAAKADELRIFLAELEKECQKYNPSFAASGSWAELIEQYKDADTLTAEMVDAFIDEMILYNNGHVEVKFNFRNELDEVIHLAAIRQREVERYAM

SEQ ID NO: 2180 - protein, 526 aa, unidentified
  source 1..526: note = uncultivated organism
MKITEITAEKKETKVQRLAAYCRVSSNSEDQLHSFAAQLRYYTNYEKQHPDVKLVGIYADEGLTGTSMKKRSEMNRMIQDCEQGKIDRVITKSVSRFARNTHDLLQILRLLKSYGVTVFFEEQGIDTAQLNNELFLTFPGMIAQQESESISGNMRWSYKKRMESGEFNCCTPAYGFNLIDGELIINEDEAKIVRRIFDMYLKGIGKQRIADILNEESVPKKYGEKKWHHSMISYILSNERYIGDALLQKNYTTDTLPFRKLPNRGEKPQYYVENSHPAIIDKNVFESAQNFSKKRRSSRKGNADHILTQMLFCPKCGKAFRKIINSGKPYWIMSVAEKSNCDCQYNRLRESGVFDAFSLLTFKLKENRNQIIGKLITQLEQLQTRSRNCENAIGDIDKKIAQLSAQNHVLAKLKNNGILGAAEYAGQSADIENKIASLRTERRKKLSQSKDDEILDELKTLNQIIGEYQPSAVFDKTLFDVIVKRIEVTDNVTITFKLLGDIELSEKISEKARCKQREQKDNPVRV

SEQ ID NO: 2181 - protein, 579 aa, unidentified
  source 1..579: note = uncultivated organism
MRCAIYTRVSTDEQAMSEYSSLKRQEEICRNYVDIHSEKGWKVAAVYEDAGYSGKDFHRPGIQELMEDVRAGKVDAIVTYKIDRISRSLKDFYDLWEVLKAHNVTFVSATQHFDTSDSIGMLILNILLGFAQFERELTRERTTGKMAGRAEKGLWNGGHPPLGFDCAKETQTLEPNPQEVPIIGFIYRRVIETHSPCAVANEANARGYRTKLRTRTQRDGAQQEVGGGHFDEDMVTAIVRNPVYKGFVRYGGMLYTGKHEAIVDEETWEQANKAIGSGREDGTGLRYRDPHVHLLKGILRCGSCGLAMTPYRSGKKTKDGTPYLNYACVDYTKEGSLTTCPVKMLPTREFEALICQVLADLGSQPAILQACMDAANREAAESVAGLEATLARHREELGHLTAGIRRLIEVMKQQDLLAEDVKEEYRRRVREKERMQVRCEKLELDIERRRKRVLDVDLIRRGLQDFERLVGLLPLEDQKELFQLLLRQVVVWPFEPEREAFQEPPAEAARMAGARAFATKIRTRWYRVRIGLYQLPNVPNSLSVNRSGTSSGFDGIGSPSGCRTTRYYRGPSRRASTGA

SEQ ID NO: 2182 - protein, 529 aa, unidentified
  source 1..529: note = uncultivated organism
MRRLAATPAPEKRRCAIYTRKSTTHGLDQEFSSLDAQWDACAGYVRGQPGWELVDERYDDGGFTGANLERPGFQRLMADVEAGRIDVVVVYKIDRLSRSLLDFASLMERFRKAGAYFVSVTQPFLSADSDAMAQLLLNVLMAFAQFERQMIAERIRDKVVASRRKGLWTGGNVPYGYHVQDRKLRPRQEEAVVVRRMVELFLDTQSDSDVTRDLAAHGVLTRKERPWTPQSVARVLTNPVYAGFVTLGSELHDGEHEPLIDRETFEHLQSLRTMSASERQSKNAKRQRNLEYVLRGNVYCGCQGAEGKPCGFSMTPASTRKGRKSYRYYRCIARDKVSPKACPARPLAAPELEELVRAQVADVARQLDEQGRSTGVTVDGGVVRHAGRRIEELKTRRAGLRERLTTVEAELRAIAQATAEGGDRGAYHQRQHDKRAQERDRMQKELREVREALGNLERLVLNGPWLAEQLRGFDTVWDKLLPANRLRVMRLIVERVDANSVTGDISITLAPWVGAMLGGTTTEEATDAA

SEQ ID NO: 2183 - protein, 598 aa, unidentified
  source 1..598: note = uncultivated organism
MNKKNTIAVGYVRVSTSQQVETGSSVDDQKNRIKETSKVKNYKLSKIYSDEGISGKSTERPSLTQMLKDAKEGKFEVIIFTKLDRLARNLRDTINIYHEADLLGITMICIDNPTVSTEGPMGRVMLSIMATFAEFERDLIRSRTNAGRMHKWKSGESFMGTLPFGYKKSSDTKKIEIDEYKKNIISKIFHMYIIEQLSMVDIAQKLTKDGYKTPSMLLRDKYITPTWNMNAVREILLNKYYTGEKIILNQYIYTTNKNNNSLKTKEKKHESEWIEMSFPVIIDKETFYNAQKRIEFNRVKPKNTKKFFSDKMLTIHILKCGKCKAKISRQATGTGKYIYYTCPWRKCGAKKLEVNNKRKCDLPYYNHEIIDNKIFNKIIDLVSDPEEYCLLLNKTIDNNDISKKIEALNNKKKTIQTKLVKLIDIESSAKNKDLIKLYKEERITIETKYNEISNEINNHKNQLLLIDSKNKQIENLRSLYSTETIGKFIRSKNNIKKILQGLSFDEKKKLVDAVIGPEIGGCVYIRPLSEEDFCSDDFMHDSVIDNANTEPTELEQEETKKTTYEDDVVIELDFTLNPYKISLIIQDIYKKHFNIDGL

SEQ ID NO: 2184 - protein, 552 aa, unidentified
  source 1..552: note = uncultivated organism
MSAQQTGHVYKAALYLRLSKDDEGAGESQSIKTQRDILEAYAKREGFVIVDEYVDDGYSGTNFDRPAFQRMLTDIEAGRINCVLTKDFSRLGRNSARGLDYIDEYFPAHDVRYISVTDGYDSLYLTNGISMAAPMMMFVNEMYARDISNKIKSAFQIKMKKGEYVASFAAYGYKKDTEHGQKNKLVIDWNVAPIVQKIFTMAAEDYSPSEIARYLNEKGVATPAVYRCSTRPYLNVDDYSKRKEWTSSMICKMLRNEIYLGRTVQGKTKKISFKQKDSKPVPRKEWIRVEGTHEPLISEELYNAVRKRSVARRSLPTKGFENIFSGIAICADCGRNMTTAPSRKKGATYNLCCGGYKSYGSRECSNHFIDYDLLYNTVLDEIRKWLSLSEEEKENLLKELEEAEIQKQKKQMNHAESPSIIKLENRRLEIDTLLKSLYEDHAFGRISAFTYNRLVKEYEAELFSLEQSIGAIKHPLETDTAISDAYKDFFGLLNEVTECKKLTKPLLRNLIDRIEVEQGHYEKDAHGKKVKKQKIKIYYRFIGCISDREKTS

SEQ ID NO: 2185 - protein, 553 aa, unidentified
  source 1..553: note = uncultivated organism
MADNRIYKACIYARLSQEDGDKSESDSIVSQKALIREYISKQQDIRIVSEKADDGYSGVNFERPAFQEMMEEIRAGKVDCVVVKDLSRFGRNYIESGNYIEKVFPFLGIRFIAINDDYDSVERRHSDSLIVPFKNLINDAYCKDISVKIRSQLEIKRKKGQYIGPNAVYGYRKDEEDHNHLVPDTYAAEVVRTMFRWKQQGMSVSHIAEKLNVEGVLCPMEYKQASGIGVQTIFRSGQKAKWSASSVRRILTNEVYTGVLVQGKSSTPNYKVKKNFPKDKKEWIRVEDAHEPIIEKRVFSAIQELLKRDVRSAPGKKFVYPLSGYLFCADCGQNLTRMSTHSGGKRFDYYVCSSYRNGKRCSSHRIPVPLLNEAVLQTIQLRIEAVARMRVLLKQVEKDPVIWSDQMNLERYDRLIAERRQEIEHCMRFKQKLYENLVDGTLDRKDYSTFQKNYEIRIEEAEDVIRKAEKEREMVAAQEVGDQSWMEDFKKYKKIRELERSAVVALIDRIEIAEKRKIEVRFRDEEAYEMVEDFLNRVKQEEIHGAEEQEKTG

SEQ ID NO: 2186 - protein, 518 aa, unidentified
  source 1..518: note = uncultivated organism
MIAPAKAETQTVRCAVYTRKSVSEGLDMEFNTLDAQREACEAYITSHKGEGWVCLPTHYDDGGFTGGNLDRPALARLLDDIKAGEIDCVVVYKVDRLSRSLLDFSRLVEVFDKHHVSFVAVTQPINTADSTGRLMLNILLSFAQYERELIADRTSDKMSAARRRGQWCGGVPVLGYDIHPDGGKLVVNEDEAQMIRAIFDLYLQHRSLQKVAAELDRRGWTTKEWTSKKGRFHPGRPFSKSTLARYLTNPLYIGCVNHKGQVYPGEHRGIIRKEVFDRMQAILAENQRNNGAKTRNRHGALLKGILRCGACGTAMVPTTTRKKGRIYRYYTCSSAQKKGWKTCPHPNVPAQKLEAMVVDCIRVIGSDPALQAEVLKQAAKTQRAQRTALVAEQGQLKAKLARTQEETSGLLKALSGGLEFNGSAASRLRELETSAGKLQARLAEIEGQLSALKEATIDRGQLVKALSLFDPVWEVLYPAEKVRILELLVQKIVYNKPAHKPDIAFQPMGIRSLVGESK

SEQ ID NO: 2187 - protein, 521 aa, unidentified
  source 1..521: note = uncultivated organism
MSGKEKTNGSLAMAPKVITIPATSQESPRKLRVAAYARVSSNSEDQKHSFAAQNAYYSKFITDNPDWELVDVYADKGITGTSVEKREDFLRMMEDCRRGRIDRILVKSSSRFARNAKESLEAVRELKALGVSVYFEEQNIDTARTSGEILTAMFAALAQRESEAISERMRWSYRMRMQKGEFNTCQAPLGFRLNGRSLEVVPEEAQIIQRIFAEYLSGRNSREIARIFNEEHVLGLDWKYKLIDYILRNERYAGNALLQKRYTSDSFPYTKKRNHGEKTQYFVSGINNAIISQETFDKAQALRAKRKNAQGALHSKISHIMRCSCGSRVRAKQINARWYWVCCKHDEEKSCSLMPIPEEQLEQAFCCLYFKLKRHSAEILTQLIYDLRTARNGSLLWGEDIVELNKQISDIASQERLLTQLKQQGVVDPDIFISRSNLLAERRRELKLKKERILHAEEDHTIQRTRELIDVLESGPDWLEAFDEELFSELVEKIIVEDNETLRFRLINGLEVTEPIERTKR

SEQ ID NO: 2188 - protein, 537 aa, unidentified
  source 1..537: note = uncultivated organism
MAASERKTFRCAIYTRKSSEHGLEQDFNSLDAQREAAEAYIKSQAHEGWKLIKTHYDDGGLSGGTLERPALQSLLADIQARKIDIVVVYKVDRLTRSLADFAKLVELFEGHGVSFVSVTQQFNTTTSMGRLTLNVLLSFAQFEREIAGERIRDKFAASRRKGMWMGGTIPLGYDVHDRKLIVNEAEAETVRLIFARYLALGCVSKLRADLDRKGVRSKQRTLTSGRVLGVCSFARGVLYHLLRNRIYRGEVVHKGITYPGEQSAIVDEELWNAVQAKLTGNLTKRRQARIESGAVLGGLIFDDRGNRMSPTYTMRRGSRYRYYVSQAQLRGEQEGSRPRIGADDVERLIVEQLCRQQQRDDLAADITTGVWSAETRELILSRVDRVIVHHDEIEVAHKIKGEDGTAASIDGDQNESRNTVKLPLPAPRPRERKEIFVPGNSGTQPRRIDQALVLALARARSWMRTLRQVEFVDTAEIAQRFGLSDAHVRRLLRFAFLAPDVVEAIVEGRQPRILTVKLLLRGIPLDWADQRVAFGFY

SEQ ID NO: 2189 - protein, 534 aa, unidentified
  source 1..534: note = uncultivated organism
MNTAILNIPRSEAVWSNERSMTVIDPRLMEAIKTKVAAYARTSSDSADQQNSYISQVRYYTQIIRENDEWEYVDIYADEGLTGLSADKRPDFQRLMDDCRKRKINRILCKSVSRFARNFYECVMTIRELKMLGVSVLFEKENIDTANMGDELEITIQGLWAQRESISLSENLRRGNRMRMKNGTFLPSSIPYGYTLENRELKIDEEQANVVRRIYAAYLSGRGMQDIADEFNQKGAPKRFGHDRWHTSTVFYILTNISYTGDMIWQKKYTTDSLPFKQVINKGEKPRYYVQNDHPAIVSHEDFEKVRNLMAKRRERHRGAEPGDHILGKKVVCGLCGSIHRRKVTGGKVYWACRKHDYSKSLCEAPQVPEPELFAAFARMWNKLRGHRTEIIGPMLEQFRALADRQYKQNDRIAQVNNELEALSEQILVLKRLNTKGYMESASFYAQTQEINAQVRELRALKSSLIKQHQTGGSVASLEALDAALETGPEWLDGMDEDLFDEIVDKVTVLSPEQVKIKLACGLELTENIQRMVR

SEQ ID NO: 2190 - protein, 544 aa, unidentified
  source 1..544: note = uncultivated organism
MQHEGSRTLRCAIYTRKSTEEGLEQDFNSLDAQREACAAYVLSQRNEGWVQVPGSFDDGAFSGGSMNRPALQQLLAEVAAGKVDVIIVYKVDRLTRSLADFAKIVEVLDKRGASFVSVTQAFNTTTSMGRLTLNVLLSFAQFEREVTGERIRDKIAASKAKGMWMGGPVPIGYAVQNRKLVIVENEAATVSTIFQTYLDLGSVRDLTEHLKTLGIRTKVNLRRDGSTRGGVFFSRGGLHQLLRNRIYRGEMVHNGKAYPGEHQAIIDGGLWQAVQRKLDEQKADRKIGRNVREVSLLAGLVVDEHQRPMSASHANKGARRYRYYITHVDHARHKQAWRVPARDLEKMVVERVRAYLDDPGSNLDRLFGEALGTQLLEAGRLSEQLASSSSSDLRHALLALVKQVEVGETRIRIEVKSGDEEAGTAMLESETVKIRSGKEVKLVIPGSEDEISARRDGKLLALLARAQRVRDRLIAGESVADIARNEDSSASRIGRLARLGLLAPEIVSASVEGKQPQSFTRSALWEATMIPLEWTVQRAAFGFS

SEQ ID NO: 2191 - protein, 531 aa, unidentified
  source 1..531: note = uncultivated organism
MTFFIYGRKSVLTGKGESVENQIEMCRQYIGRRFSEEADRRILIYEDEGFSAKNMDRPQFQIMLRDLRRIRPEYLVCYRLDRISRSVSDFSALIENLNKNGISFICIKEEFDTSKPMGKAMMYIASVFAQLERETIAERVRDNMLMLARGGRWLGGTPPTGYFSGKTHEILLDGKIKNYCILQEDPAEADIVRKIFAEYLKIPSLTGVCNFLTSCCILARSGKPYTPAVIRQILKNPVYCTADEASFSYFTQKGADVCFGEKDFANGCGLIAYNKRDYKKEHVPRRPVSEWIVAAGKHPGLLPGAQWVSVQQILGEAGGKPHNSYSFLSGILFCGSCGAPMYAKARKETFGNPVPFDYICRSKLKGGATACTCRNLNGPATDQIVLESLLQSSGNIQMLQKHLERLLCNRKKAKNMENPYRKEIDQAEKEIDALLLLLQGREKESAFVTHVEHRVNMLEDEISKLKQENHVNSTDEIAAEFRETANRKAREFLNPARYLLRLPLQEQRRLARVFYQKAVWDGNHRLHLYYK

SEQ ID NO: 2192 - protein, 522 aa, unidentified
  source 1..522: note = uncultivated organism
MGKKLKVAAYCRVSTEQDSQINSLESQKQYFASYIAENPDWELAEVYYDEGISGTQSSRRPSFNRMLRDAYQGNIDLILTKEVSRFARNTVDALSFTRKLKEHHVGVIFTLDNIDTRDTDGELRLTIMASLAQEESRKTSERVKWGQKRRMEQGVVFGRDLIGYRVQNGKLLINEKEVPIVHAVFHKYTTEGKGTHVIARELLEEGFYPKYGDHWSNVTILRMLRNEKYVGDLCQKKTYTPDYLTHKKKENNGQEEKIYLRNHHEPIIDRDLWNRTQMELKCRRPDSKQKTKYSNRYWARGKLLCSVCGRHYVPRINHRKDGTSQLSWRCSCHTPSVNEQTLLTCMRYCLQQSNPNLDQIKTRALRDLKKIQSFSANTDENREIIELQKEHSRLEENYRKLIDLWIGKCIEEKEFTDQKQWYQKQFHRLNQERAKYNEKLEVHYQSLSNQSNFPKSMDEILESSDNSKKFFHQILDYIMIHPNHTMDIYFKELTFGFHLIYQNHGRGNSFHTDVTFSSYVCR

SEQ ID NO: 2193 - protein, 571 aa, unidentified
  source 1..571: note = uncultivated organism
MSEDIIKSIKCAIYTRKSTDEGLEKEFNTLEAQREAGLNYVKSQVHQGWEALSEHYDDGGYSGGNMNRPALKRLFEDIRAGKVDMIVVYKIDRLTRSLTDFSKMMELFDEYKVSFVSVTQNFNTYDSMGRLTLNVLLSFAQFEREVSGERIRDKISASKKKGMWMGGPLPLGYDLKDKKLVVNPDEAEVVRLMFEKYLVCKSPQYLADWLNNSGYRTKMKVTKSGKTIGGKLFDRAHLYRILDNRLYLGKIYYKGELYDGQHEAIISQNLWDKVHKLKDKPFAEKASINKTFEFKTLKGLLFCGCCGYAMVPTKAVKRGREYYYYTSLKAIKKSYRFCEVKSVPALTLENYVINKLKDLLTDPLVVHSLSNEVTKRLPDKSEYDVIKVVQGNKFINALGAETRQQLFNLAISRITIWPDKIRIQLKPWLNELVQKSLLDDKIWIYNPDTTAYETTENITFLKRRQQTEIYVGDEAEERHQDKQMIVALVRAFGWQHKLERGNLNIQELAQLEQMDRSYMGKIIRLTCLAPDIVESILAGLQPRDLTLKDLIRNTIPVDWNEQRKMFGFRQE

SEQ ID NO: 2194 - protein, 517 aa, unidentified
  source 1..517: note = uncultivated organism
MSRASASTSNTRRCAVYTRVSTDHRLEQDFNSLDAQREAAEAYVRSQAGEGWKLIRNGVFSDGGFSGGSMERPALQRLLDLVRSRSVDVIVVYKVDRMTRSLADFAKLVELFDAYCVSFVSVTQSFNTTTSMGRLTLNMLLSFAQFEREVTGERIRDKIAASKKRGIWVGGVVPLGYRVEAKKLVIAEDQAATVRLIFERYLALGSLSALQRELRERGVVTRARSLASGRTIGGVPLTNGPLAHLLANRVYLGEINHKGLSYPAEHPAIVSAELFAAVAARLAENRNNARTQRASLSALLLGRLFDDRRNPMTPSVTNKKGIRYRYYVSCVVAQGRGADAGSVKRISAPAIDSAVIAALRARSTSGADDRTLVDEHLSRASLSSDAIELQLTDGDVIRIASPKRSSGRGIMGLTDAAARPMKAEARAVLLRCIARGRKCIVELARGLSVDLDQLAAKHGCSRRHVERMIDYAFLAPDLVKAIADGCLPRGVTAKALADAPMLWSAQWRMIGLEQPSA

SEQ ID NO: 2195 - protein, 635 aa, unidentified
  source 1..635: note = uncultivated organism
MNEEKKIAGIYIRVSTEDQAREGFSLPEQEKRLRAMCEYKGYSVYKVYEDAGISAKTGNKRPSFDKLLQDIKDKKVNTIVVLKLDRLTRSVADWEKILTFLEENDAYLDCANDDINTTNANGKMISRILTSVSQQEIERTSERTKIGLAGAIKAGHIPHHAPLGYKHEDKKLVINYSSKDVVVRIFNMYHDGLSYKKISNILNDEKVLGKTNWRDSTILNLLENPIYKGDFLHGKRTKHPTYYENVVEPIVTKEYWEECQIQQKKNSRSYKRTLNYLFLQKLKCPKCGRILGGKATTKKNGNSYYYYYCNDCKINIKENLISSSVDEFMDSMVEYDSIVNQYFLPMIKQKIENPKEEIEKELKSQKDKFNRIREAYINQVFTLNEYNDERKKVETIIDNLETKLNETEVCEQLKFTPNDILVKRDIDFINSIKYPEKYKNNTKFWKDYTRNEKADLIMKYIDEIELKEKGKSIEVNFIKFRESIANTCNELYYKGYYDRYVPSLFGNIYGEIRFSEYLPEKEMTEQILRLRQFYDVGYYEATYNVKNKVFYFNFTEDDKAIVRVFPLEDYRKIDPDMKLDNYNLGILYVKEDNGTLLEDKDDVFKYIPAECDSNVVYSKEPILVESKPVPYYEEE

SEQ ID NO: 2196 - protein, 548 aa, unidentified
  source 1..548: note = uncultivated organism
MINTVYANPKNEKVRAALYCRLSKDDANEGPSASIQNQRELLRRVCDEQGWTVTEIFEDDGYSGLSMNRPAFQRMLSEIEQGRFDVVLTKDLSRLGRNHLDTDGLIEKTFPRYHVRYIAVNDAVDTSCDSDIFLPLRNLMNEMYSSDVSKKVHSSYLTKAQSGKYTGVVPPFGYRKDLQDKNHLLIDDDTAWIIREIFEMAVNGKGPSHIRRRLEDMKIPCPAWWSREKGYRNHVTKFEKEDPENGRFMWDFTTIQTILTNPVYVGAICSQKTVYRFKTGWITDKKPEDWIIVEGMHEPLVDRETFDLVQEKIKNRKRPDAWGNYSLFVGLVKCGQCGSAMNLRRGNQKDRPRSYTCSKYNRYGVAHCSQHKILYDTLYNIVLTEIRACARRALSDAQEAADELRENWDERSEREAVEKSVAEDTERIRALERVIERLYSDVTAGRISEENFTRILERSQSEQEALKKRVTLNRERLERQAKEQADNARFVEIIKDYADIQELDAVTLNRLIQKIVVHEDRDGETVRQTVEIFFNFNTYEDKTSLIPE

SEQ ID NO: 2197 - protein, 573 aa, unidentified
  source 1..573: note = uncultivated organism
MGQVMEKVFAIYSRKSRFTGKGESVENQIEMCREYLRIHFGEDEAEKAVVYEDEGFSGKNLDRPQFKAMLDDIKSGKISAVVCYRLDRISRNIGDFANLITELTSMGVSFISIKEQFDTNSPMGRAMMYIASVFSQLERETIAERIRDNLHELAKTGRWLGGVTPTGYTSVGETTMNINGKTKKAFHLSVKEDEAELVKRIFSLFLEHNSLTACESDLLAHHCKTKNGRDFTRFSIRGILTNPVYMIADKDAYEYFKNANADLYSDEEEFDGEHGMMVYNRTLQEQGKVTKIKPIEEWIVSVGKHEGFISGRDWIKVQTMLERNRSKSYRKPKSHTALLSGLLKCRCGEYMRPHMTTRLNKDGEYTYYYSCTMKLRSKGKRCNNKNVNGNELDREVISAVKALAENGDDYFESLKSALSENKIKAENISNEQTRLEEEIEKKEKEIETLVNNLATASGTGAEKYILDKINTLSDEVEKIKAQQNTLNKENENELNLTESVDLMRDMLKSFSAAVDNMTIEQKRQTIRAFVKEVIWDGENAHIVFFGSDYEYPFKKDEMLAEGDELYLLGDHSK

SEQ ID NO: 2198 - protein, 563 aa, unidentified
  source 1..563: note = uncultivated organism
MRAAVYMRVSTEEQRERQTIETQKAFALRYCEQAGITIADWYADEGVSGTVALESRTQGARLLADAIAGRFEIVLVYRVDRLGRDTWIIEDAVRRLRAASVRFASITEMFDAATPHGKLLQSILGATATYERDVIVARSIEATRRLAQEGAWMGGIVPYGYKVVGDGRNRRLAVSEDALPGLEMSEADVIRLIFKLSAEDGKSCSLIADHLNALGVPPSYAKDERKVLRGKRKQATAGIWRQGRVGNLIRSSTYKGVHVYGKRTRGGAEPIERLCAPIVSEAVWDAAQATLRKNFLFCVRNSRRQYLLRALIRCGTCGRSFTGVPAKDYADGRFRSYYRCSGRNHYRAVYGADKCDAPNVNGEDLEREIVSDILGFLTHPQTVIKQLTRRMEKEIGADGSRAKAAERWRRRLAGLNTERDRILVLFRKDLITEEELQQQLDDIRAASDLASKELAKLSAGADRETQLADYLNRAEQILHKLKGLAAGDLSYSVKRALVEALVGGIKIKATEMPDGRKAARVLVTYLFAPVRTGIDNHTDIHADINPGLERSFTLIARTRGAKQ

SEQ ID NO: 2199 - protein, 544 aa, unidentified
  source 1..544: note = uncultivated organism
MNNNRKDSIRVAVYSRVSSQEQASEGTSLDFQAGQLTGYCQLQGWTIMNSYVDPGFTGKDGERPGLQRLLTDAKLGLFDKMVVFKLDRLARSLSLLLEIEKTLKEHGITLISMKESVDTSSGTGKMIFQLFGMVAEWDRSNIVERCKNGRLQRYKEGSWAAGKAPYGYSRNKETRKLVINESEARVVRRMYAEYVDGKSLFAISQGLNQDHIPPRAKRSQGWWQTAVRQVLLNPVYKGTEVVNRHAHISLINSMDLSNAIMMSVPALVSEHKWQIAQARMLGNKHIKPNKQGTHLLQGMITCAICGYHFASKRHYYTCRGRMKYVHPDGLSRCKAPYIRKDWLESEVWKRIEEIMNDPNKLLPLIKESIENLRRAEADLSERIRPIDERLAEIAAQKNRLADDWIVKYMDVERFKELRESLDGEEARMKSLRAAVDPTQIAELEQTRKALDYWEYQARGMVNWNLENEDGTMYRLVFQTHEEAIKLVERDDPGQSKAEGFPTSKRQMLDKLQVRLSVFDDRVEVKSLFPVEPIGIQPCTSARRD

SEQ ID NO: 2200 - protein, 501 aa, unidentified
  source 1..501: note = uncultivated organism
MGIKLRSAGYARVSVAHAESTSIAQQIDAIAKKCKQEGWKYNPKKDLYKDEGLSGSKKSVRRPEFERMIANASNYDRIVIYRFDRLSRRMSEMASTLETLNELRVAVISATEGFGTDTDHGRTMANIMGSLAAGEADAIRQRVKSTQARMFSEGKWKGGARPYGWQQKKLPGGGVRLVLKKDEAAVLRQAVKLITSGKSIGGTARALTSAGHRTYKGTEFSPQMISHVLRSELLLGRHVVNKRLAYGADGKPLTPHERLINLKEWSNLQAALGRLRVVRPKKGGALLAGVIYCNECGGKMTGSSTETNPHANYRCRNKYALLNGKCKTGSSVRAVAIDELVSLAVFGVLKMKKNTQSAGKRMKETHADSVRLRKNLERDAEDKRRIHRNLQDHYLKGLYNYDGGEADYQNGFALATTNLTKVNDALNELEDFDEQPADLYPWTTVAAIEQKWARATNSEKNKVIRALVDKVVIKPRSAAWKHRGLDPHRMEIAWRYTAPKR

SEQ ID NO: 2201 - protein, 531 aa, unidentified
  source 1..531: note = uncultivated organism
MPKVTMIPATINPLTRLPSVAARKRLVAGYARVSTDSDEQFTSYEAQVDYYTRFIQSKPEWEFVKVYTDEGISATNTKHRDGFNQMVQDALDGKIDLIVTKSVSRFARNTVDSLTTVRKLKEHGTEIFFEKENIFTFDSKGELLITIMSSLAQEESRSISENVTWGQRKRMSDGKVSLPYKQFLGYRKGEDGLPEIVPEEAEIVRLIYRLFMEGRTFSAIAKHLEQSGIASPAGKEKWQVAVVRSILQNEKYKGHALLQKTYCIDFLSKKMVKNEGQVQQYYVENSHPAIIEPDEWDMVQLEIERRKKLGRPTSSTSIFASRLICADCGGFFGKKVWGSYKDDKSRRREVWRCNDKYKRQNKPGTGCHTPHVTEDEIKRSFLKAINLLLPDRENLIEDCHLAKGLLCDTTAIDIELAELQNEIEVVTELSRKAIFENARTAVNQAEWNEKNNNYLERHKKATERMDALESAKRERIGKGKIIEGFIRDIKSCPLAVPEFDEKLWLATIEHVNVRRDGSMVFSFKNGTEVTV

SEQ ID NO: 2202 - protein, 573 aa, unidentified
  source 1..573: note = uncultivated organism
MNGNEISADMETRQKVAIYIRVSTAYQVDKDSLPMQRKDLTAYSELILGISDYVIFEDAGYSGKNTDRPAFQEMMSRIKQREFSHLLVWKIDRISRNLLDFSEMYSELKRLKVVFVSKNEKFDTSTAMGEAMLKIILVFAELERNMTAERVTATMISRANQGQWNGGRVPFGYDYKDGVFTIREDEAIVCRMIADDYIKNKSLIHTARLVCSNGYKTRAGMDFSARAVWFILSSPFYAGIYRYNRYKGTEHRTINDESEWVMVENHHPAIFTMEQYEKIHAILENNKRYNNTSDQKHMTKNVYVFGQICYCAKCGVKMTSTSGRVQADGYKTSIYHCPTRRTKGCSNSSVNDLIIGEFVINYVSNIINAKKTFSTIISPEALQSVLLRGQTFKQVQNIDKTGLNALFDILGRFKGDASFVMTSNNRRKRVKFDSEIVALKKDKERHERALKRLNDLFLYSDKPMSEKDYITQKAEITERIDEIIRKLGIKTASEDEMLSDDDFIRKASHLLISSRLQDKQYIYYKNLARDVSPDILKEYINSIIDNIHLNDGHVSSITFKNGITHEFEYKKEG

SEQ ID NO: 2203 - protein, 561 aa, unidentified
  source 1..561: note = uncultivated organism
MEEKIVRCAVYTRKSTDEGLEKEFNSLEAQREAGESYIKSQKHQGWILLPDHYDDGGFSGGNMNRPALTRLLDDVKNNKIDMIVVYKIDRLTRALTDFSKLVEVFDAHNCSFVSVTQNFNTSDSMGRLTLNMLLSFAQFEREVGAERIRDKVAASRKKGMWMGGAVPFGYHVENKKLIVSPDEAKIVQMIYDLYCTTKSELEVCAFIKDQGWQTEKHKFRHAQVSYLLRNPIYTGKVVHKGNVYEGQQEAIIDQTQWNLVQKIKAGNKVKRFTPSKVVVHSLLQGLLECGCGCHSTMTPTHTSKNHRTYEYYVSYRAIKEGRKNCATSAIPAGELDKFVTSKIQNIFYSPKLVDEIARQIMPTCPDLNIKEIFDKLKNTDNLIDKLPVNVVRLILKHVISKVVVSHNKVIIHLKPLGATLLKSAHCLDLIEDENTQTHRLEYDVDFVKKKGQLKIYPPTENKPFLDETLLNAVVKAYTWRYKLEKNKISLRELARMEKIDHGYIAKIIKLTCLAPDIIESIMIGNQPPSLKITDFIKDVIPLSWVEQRQKYGFQSGKIINL

SEQ ID NO: 2204 - protein, 728 aa, unidentified
  source 1..728: note = uncultivated organism
MKIAIYSRKSKFTGKGESIENQIIKCKQFIQFKFDADPENAEIFIDEGFSGKNENRPRYQEMISKVKNKEIDCIIIYQLNRLGRNARDIHNTMQMCEDLGAVIYSATEGFDSSTSFGRAIIGILASLAQLEREQLAERVKDNMYTLAKMGRWLGGQSPLGFDGTREYYVDESGKERSVTRLKPNNEELKIVKLIYKKYLEEKSISQVSKWTLTNNFKGKNGGNIDKSAINIILKNPVYAKSDKNIFDYLESSGYDVYGEPNGNGLLRYGQDNKNTDDYIGITAVAKHKGIIDSEDWIAVQEILKENTEKAPSLGKSQTALLTGLLQCECGSNMQVRYSKPRKDGTRQHYYVCTMKTNSGGTRCNSKNINGQLFEKQLIEHLKSYSKEMLINQLESTLNKSKDLEKNLNIDSIDSDIEKANKSTKALLNTLKESPDKNVVTVVLAEMSELQKTIQSLKEKKEKLLEDQSEIVLSQSEILSIINTFNDFLDSYDTLTFTEKQKKLKILIKKIIYNGTKIHVEFSIKKKLDSIFNILSSLSLKSKVCQIVPPYRSMLCEFDINLNKLLYSDLPEDTFANRITKAKLMADISQEKLYKAVGLSRATINELEAGYRDTPTKDTLLKLLTVLDRNILCDDYCKFILDQENIINQLISTYGIKELSNRINVHRSTIERWRDGKNQIKRNYYNLLKECFPIGKVTKVTKKIKMLLFCYRLKSSPILIYIYINNIVT

SEQ ID NO: 2205 - protein, 548 aa, unidentified
  source 1..548: note = uncultivated organism
MQRIRCAIYTRKSSEDGLEQEFNSLDAQREACAAYITSQKAEGWEMLLDHYDDGGISGGTMDRPALQQLLSDIDEGKVDRIVVYKIDRLTRSLADFAKIVDRLDAAEASFVSVTQSFNTATSMGRLTLNMLLSFAQFEREVTAERIRDKLAASKRKGLWMGGNVPIGYQANGRSLTIDPSESEIIVKLYDLYAKHRTIWKVRDRTNRLGLKSRIRIKPDGSYTGGKPFDRGHIHHILTNPIYAGRIRHKDKVYEGQHDAIIAPEQWEAIQKMLTEVSVKTRGSKSAAYPSLLAGKLFDETGDRLTPSHSRKNVKRLRYYISHRLVTDKSKKHPDAWRLPAPQLEQAVIRAIRIEFAETTFVTKLIKDIEASEIEFVNTKVAKLASMSPEADASILSLIDQTHIVPGQLNVTISAKKLANYLGIDETRVVSDTLQISTAFCLRRKGVENRIILGDAPPEFDQTLISNIVKAGNWYADIRKGTGFAEIAERDGTSPRRVQAIINLAFLSPTTLDQIVQGTQPIGLTTEYLVRSGFPANWKEQEKLFATLG

SEQ ID NO: 2206 - protein, 565 aa, unidentified
  source 1..565: note = uncultivated organism
MADKNTIPCVIYTRKSSDEGLDQTFNSLVAQYEACKAYVESQKHEGWKLSRTRYDDGGISGATLSRPGLERLLSDVDKGLVKMIVVYKIDRLTRSLADFARLVERMDNAGCSFVSVTQAFNTSNSMGRLTLNVLLSFAQFEREVTAERIRDKIAASKAKGMWMGGYPPIGYDRDPDPNVQSLVVNEQEARHVSMIFDLYERHGNLSIVERKARELGIRSKLHVFANGSQRGGSLMSCGQIQALLSNPVYAGKIRHKDKIHNGLHHAIIDPERWQQVQVRLARNARKPRKPELSNGKENPCSGTNKPLLRGVLFDGDGNRLTPSWSKKGTRHYRYYVSRAGNDSDTHPGSQTRVRLPALPLEQIVVDAIIEQLTQPDRFAPWLVTSEIASVSAMIDKASALATAISDGKQSVRELISDVSIGKDRVEITLDGESLASLIAVSRSALVSGELRFTVPFTRRRRGNETRLVIANQHNKVDPVLARTLAKSHEWLRMLKSGKSLNEIAASEGHSNSYVRTRLPMALLSPAIQKAIINGRQPAELTADTIARKTLPICWAEQEKMLGFDR

SEQ ID NO: 2207 - protein, 561 aa, unidentified
  source 1..561: note = uncultivated organism
MTKIAVMPCAIYTRKSSEDGLEQGFNSLDAQRESCEAFILSQKTQGWKALGAYEDGGFSGGNVERPGLRRLLADVALGRVRIVLVYKIDRLTRSLADFAKMVELFDAHDVSFVSVTQQFNTTSSMGRLTLNVLLSFAQFEREVTGERIRDKIAASKRKGLWMGGLAPVGYVPNDRTLAIDEPRAELVRGLYRLYLELGCVSALVAEVARRGWVTPARITRREGAAGGRPFGRGHLYRILSNPVYIGQIVHKAQVFAGQHPAIVERDLWDAVQAQMKSNQQGHRTRANSSQPSLLTGLVFDESGHRLTPSHAQKGARRYRYYIDQVAAEDEGSTAALRVPAKDLETAVIEAVTAFLKDRSRVMQLMGSVDANVAHSRLKVAAAAGALLETAMASQQIEVLMRLVRRITVRKDSIGIEFRVASIWSAEVVPGDEDEEVHLIEVPVQLKRCGMAVRLIVRPAGESATRGVDAKLVALISKAHDWFERLSSGRCDSVQAIAQEEQIASSSYVTRVIYLAFLAPDIVQRIVRGEQPVDLTADRLIRMGPLPVAWEDQRVLLGMAGA

SEQ ID NO: 2208 - protein, 550 aa, unidentified
  source 1..550: note = uncultivated organism
MGKNESTIYNAAVYVRLSKEDALASQGKKAESSSIANQKQLILDYVRDKPDIHIVSIREDDGYTGTDYDRPNFQRMMDDIKAGIVNCVIVKDLSRFGREYINAGKYIDRLFPYYGVRLIAINDGIDTISRNNSDDFSIMLKNLMNDNYCRDISIKIRSQLQVKRKNGEFIGAFAPYGYRKSKEDKNLLLVDAYPAGIVQDIFRWKLEGMSQDAIAKRLTEQGILSPMEYKRSQGISFKTVFKTNQQAKWSPVAVRRILTNPVYIGTLVQGVRTRPNYKIKTVVVKEKDEWVVVEHAHEAIIDPKIFSLVQRLLELDTRTSPNEEKVFPLAGLIYCGDCGGTMVRKTTTSGGKKFAYYVCGTHKKTRSCSNHQISEKKLEESVLKLLQEHIQMVVELDSCLQAWKNEPRKPIGTKKLEDRLVAIDADIDRYRRLKTSAYEDLKDGILSKNDYTDICSQYDERIADAVLAQNQIKKELSLYFNVSSAVPQWIREFKEHRNIQALTRSVVVQCIETVQIYEGKRIEITFTHAQDYQMLLEQMDAHNAEQKGVG

SEQ ID NO: 2209 - protein, 507 aa, unidentified
  source 1..507: note = uncultivated organism
MIAIYARQSVFKDDSISIESQIEQCKHEVIDGNYIVYDDKGYSGKNIERPKFREMLNDIRAGKISKVVCYKLDRISRSILDFAEIMEVFSEHNVEFVSVNEKFDTSTPVGRAMLNICIVFAQLERETIQQRVIDAYVSRSRAGFYMGGRVPYGFKRVPITLNGKKTSQYEPIPEEVRQLKIIFEMYSQPNTSLADIVRYFNEKGIKKTRGVEWSTSRLTEILRNPIYVKADMDIYNFYQSRGTEIVNDASNFIGINGCYLYTKNVANNAGSGKNMSQYENMVLVLAPHKGIIDSDTFIRCRLKAEQNVQIPNGRRSHTTWVSGKLKCIKCGYAMRYNKWTGKSTYNEYYICSAASAKKCDGVGAVHKDKIESIVLSAMEEKIKSLRIEQQQQDNPHQAQINKLKAEIAEKNKQIDNILKNFAFASQAVIKRMNVEVDKLTEEIANLNRQIYKLEAVKNNQKQLDTDAIETIFKMWDKVSKEDKQKIVDILITKVLVSKEKIEIIWKI

SEQ ID NO: 2210 - protein, 538 aa, unidentified
  source 1..538: note = uncultivated organism
MPKFAIYSRKSKFTGKGDSVENQVEMCTNYIKTHFQEQDIEISVYEDEGFSGKSLNRPHFITMMNQEKSEPFDYIVVYRLDRISRNVGDFASLIEKLNKYGTSFICVKEQFDTSTPMGRAMMNIAAVFAQLERETIAERIKDNMYLQAKSGKWTGGTTPYGYKSVECVSQDKDGKSRSYYTLTFDEEQIKYAKLCFSKFVELQSINAVTKFFNEHGYYTQKGNKWAKTNMKRILTNPVYCIADKDSLNYFKNLGCVICFDESDCDGISGILPYNRCTGSGRNESPTDKWLITISNHQGILSGSEFVRVQNLLKEASKNSFTGKTNTRRATNPNSILSGVLRCKCGAYMRPKKYKSGKLVYICENKLDNGINACSNNNVDLVVMDNLVKELLLNFEADDNYINKKIKGIKDKISNLNNEVAEQIKSLQKRKDENNENINKLIEVFSKDVSITLIDLIDKKVNKLKEENDLISQQISELSNKESVRAKLQESYESKIDTLKYLKENFDKLSIASKREFVKKIIDKVVWDGETADIFINGE

SEQ ID NO: 2211 - protein, 500 aa, unidentified
  source 1..500: note = uncultivated organism
MSNIAIYARKSVYREDSISVESQIEMCRYEARGEEALIYQDNGFSGKNTDRPDFQRMMRDIRAKKISKVIVYKLDRISRSILDFSEMMDEFQKYKVDFVSATEKFDTSSPMGRAMLNICIVFAQLERETIQQRVADAYDSRSRRGFYMGGKIPYGYSKKPTFIDGIKTSMYEINPIEANDVKAIYELYSRPSSTLGDVLREITKDGNLNSRGKYWNTARISELMRNPIYVMADADVYMFYKQQKANLCNQIEDFDGEHGCYLFTGDNTNRKTWDLEGQNLVIAPHKGFISSEIWLTCRKKLLSNHQVRTCKPKNSWLAGKVKCGCCGYAMVIKKSKTKAGRYFICSGRTNKVCDKSMPTVYADEFEDSIAQKISEKLNSLTIKPKMQPLIHNDEIEKLKTSILNIENSIESLVDRIVEADSTTVSYINQKIKKLDLEKTAMLQRISKLEEAENSLPDFKVLHNVMSVWDRLSFDDKRDVIELIIDKIVVYPERVEIVWKF

SEQ ID NO: 2212 - protein, 577 aa, unidentified
  source 1..577: note = uncultivated organism
MIAAIYARKSNEQDVADEQKSVAAQQDRATAFVVSQGWTVGPECVFVDDGISGAEFAARPGLARLLNALRPRPRFDVLIIRDVDRIGREQIETSAVLKQITDAGVKVIEYTSGKEVKLDSAMDKVMLGLKGFAAEVEREQGSVRAIDSGVRKFLRGEATGPAPFGYRAVSILKDGTRVAGSVAKELRSHVVHEIDPDEAATVRSIFEWTRDGLGRERIAKRLNAEGIKSATGKTWDSAVVRHVLNRELYRGFATYGERKRGYRAGSAMTTERAEPLATLARSDLQIVSDELWSAAQSARQSREANQLRDRDGKLSGHPSASPHLLTKFSRCGHCGASLYLKEGPKRKDGTRSAGYYCTAARSGRCQNTNGLDRDATDRDVLALFERDVLAFDTVEKTLDAEAADAGQIAAERERVTVELQGVQAELDRLVTALAAGVAVDSITAGLKERESAKQTLQAKAEHLDGRSRAAQVDRAALRATLTDWRKKLSENPVVARQVLSRLLTERLSFYPDGDGGGSFTGQCSYGAILVVNLIAQGTVPEGFTEGKGICLIPGRKTGANGSPSVQPRSKKSSTACS

SEQ ID NO: 2213 - protein, 504 aa, unidentified
  source 1..504: note = uncultivated organism
MKRLVVYARVSTEGQAREGVSLDAQVAMAREYCQRHGYEYAGDYTDVASGRKDARPMLAQLLKDAKAHRFEMVAVYRLDRLGRSLVKTLQVVGDLSDTGVSLVSMTQPFEISGAMGKLLLAIYASFAEMESEAIGARIRDARRRLVVTKGRHYATPPFGYRREEKGGPLLVDEEKAEHVRWMFRQAAEGVGMPSICMGLNGQGVRTNTGGSWSVPAVRVVLMNPAYLGRITHGRKISQRTSQGEIKRRFVADYLLAEGEHEAIVDEKTWQAVQALFEARKGRPSRTIAGERKHPWLAVGRCGECGARLSVHTGGKGRKYPSYECHRHFQQAHIDRCGVGIISERILTGLVIRGAAKILAQDLGKAKGRAKPKQRAIEDRAKQIARIDAAIDVEKRLARSFAQSPEEAARNIAELTRQKEALAGPPPDQPPGPPPVIPDLVSTWRDLEPHQRAGLVRTLFSAVRITREAVVVEWTPDLAWHFGDSMTLPRPASPTGRESRALTIV

SEQ ID NO: 2214 - protein, 526 aa, unidentified
  source 1..526: note = uncultivated organism
MAKRSAARVPAKGSNGSGEGKILRCAIYTRKSTEEGLQQEFNSLDAQREASESFIESQRQEGWQVIADHFDDGGYTGGNMDRPALKRLLAAVEAKTVDCIVVYKVDRLSRSLLDFAQIIEILDRNGVSFVAVTQQFNTTSSLGRLTLNILLSFAQFEREIISERTRDKMSAARRKGKWVGGHPVLGYDIDSKGGRIVVNPAEADQVRTIFGLYIAKGSTLPVLQEAQRIGLVTKQWTTEAGKVRGGKPFTRGSLHATLTNVVYTGMVDHKGVLYTGEQERIIDQDTWDRVHDILQRNGNDKGASVRNKLGALLRGLLFCVPCGTPMMHTYTMRKSKRYRYYVCYNAQQQGWQNCQTKSVSAQAIETAVLDSIRRIGTDPNLAEAVAAEAIEQVSRQRAALDKELDTQRGSLRRLNKSIAREAADTSVDSGGRFDRIVALQREIEAAECRMAELAAERKSCDQDRINADDLRTTLAEFDSVWSSLTTREQEQLIQLLVAKVGYDGRTGKVTVNFRSTGAKEICQTNG

SEQ ID NO: 2215 - protein, 530 aa, unidentified
  source 1..530: note = uncultivated organism
MSGAQRRRTDRGDAAPGKPRVRCAIYTRKSSDEGLDQEFNSLDAQREGAEAYIASQKAEGWVCVPDRYDDGGYSGGSMERPALARLLRDIDAGKVDCVVVYKVDRLSRSLMDFSRIMETFEKRGVSFVSVTQQFNTTHSMGRLTLNILLSFAQFEREIIGERIRDKIAAQKRKGKWAGGAPVLGYDVDRSNGSPRLVVNAKEAARVREIFQMYLDKGSLLPVASELARKTWVTKRRVTAKGQRLGGRPFNKASLYSLLTNPIYTGKLTHKGALYDGEHEAIVEQDLFDKVQALLRLNGRTGGIEVRNKYGALLRGLLRCKGCDCAMTHTFTKGRRGQFYRYYRCTAAIKSGAEACPATTLPAAEIERLVVDEVRGLATDRSLLDLVLSEAHAAIADELAALTREREELRREASRYHREVRRLAAEGAATRDVAARLADLHERIAVAEERLPTIEARIAELEAETVTRPEAQAVLADFDAVWSNLIPREQARLLNLLLSTVEYDALAGSVSVTFRPNGIRALVERRLEEAA

SEQ ID NO: 2216 - protein, 525 aa, unidentified
  source 1..525: note = uncultivated organism
MKVAIYSRKSKFTGKGESIENQIIKCKKFIEFKFDVNPEEAEIFIDEGFSGKNEDRPRYQDMLKKIKNKEIDSIIIYQLNRLGRNARDIHNTMQLCEDLGCVIYSATEGFDSSTSFGRALIGILASLAQLEREQLAERVKDNMYTLAKMGRWLGGQSPLGFQGVKEYYIDENGKQRSITKLKENKEELKLVKVIYNKYLELRSLSQVSKWALESGLKGKNGGYMDKSIVNSILQNPVYVKSDENVMKYLENKGYEVCGAANGNGLLRYGGKDEQIAAVAKHNGIIEANTWIKIQEILKENTEKGPKTGKTHNALLTGILRCGKCGSTMGVIHGASYKGIKTHYYKCNLKIKSPKLCDSKNLNVLEFEEKFFSFLKNYSKEELINNLQKSMQESKQIENMLNVKSIDQEIEKINKTIKQLLNRLKMIDDDEVAKIIITEITSEKNRLNELEDKKAKSLNEQSKLTMAEAEILKTINELDDFNNSFDDLSHEQKQIRLKDLLESITYVNDSFNIKFKVKKNYLKAWT

SEQ ID NO: 2217 - protein, 512 aa, unidentified
  source 1..512: note = uncultivated organism
MAAISNSVAVPKSVRCAIYTRKSTDDGLSQDFNSLDAQREAAEAYIASQRQEGWTLVPTEYSDGGYTGANIERPGVRKLLADIEAGKVDCVVVYKVDRLSRSLIDFARMMGLFEKHGVCFVSVTQQFNTNAPLGRLTLNILLSFAQFEREIISERTRDKQVAARKKGKWTGGHILLGYDLDSRAGKLAVNPEEAERIREMFRLYLEGTPVLEIVQRFDKLGWRNKQWTTKDGKLYGGSPLRRCHIYKLLGNILYTGQVKVGDAIFAGEHEAIVDERTFELAQAKLKDNTWKSGNPHRVKMDALLRGMIYCSCCGSGMYSTYSANKKRRYRYYVCYRSQQKLEGYCTSRAVSAPSVEDAVVESIRRVGVQPDVLAETARAARHHLAEIVAGLDKELSATNGRVKNLKSQIARFRNPEAVRLAEIRDRLTAGEARAEELRKDILRREKERIDEKELRRTMGSFEEIWKAMSIEEQRTLLGQLVEKVGYDGRTGKVTVSFKSVGVKELVQKEAIR

SEQ ID NO: 2218 - protein, 530 aa, unidentified
  source 1..530: note = uncultivated organism
MRLRVGIYVRLSQEDIDKINKEDESESIQNQKRMLLEYALKNDWDVVDIYIDEDYSGAGVYRPEFERMLKDCENGKLDIVLCKSQSRFSRDMEIIERYINNRFKEWNVRFISLVDNIDTVNKSNKKSIQILGLTNEWYLEDLSDNIKRTIRNKKESGQFTGSFAPYGYLRSEEDKHKLVIDPIASIIVKKIFEMYKQGNGYTKIATYLNDTNVPSPYEHKKASGSKFVCGNVGKEKSYWYSDTIAKILKDEVYIGNLVQGKTRHISYKNKKSVPVPKEDWIIVKNTHEPIIDEDTWNIVSAKFKGRTKPSKSGEIHIFTKKVYCDRCKKIFYNGYSKSENGNKHYYLTCKSRKSGVFCENNLSIRVDKLKDFILNEINEYIKVYYNSKTLNEKYQKLNTNNKNEIQEQIKTLEKQQTELEKSQSKKNSYLRKLYEDRIEGFITDEQYKAFSKDYDDELNELQNRIQLIKDEITLLNQRHNDMIDRDKIFNKYKSIKELDRSILDDFIEKIYIGAVDKETNEREINIVWAI

SEQ ID NO: 2219 - protein, 540 aa, unidentified
  source 1..540: note = uncultivated organism
MIRAETTPAVAYDRMSSKKQDKSIPAQRVEVEKYAAAKGFSIIRWQPYVDEGISGSESEKREGFQRLMRDASERGDFRVILCWDQDRFSRFDPLEANHYWYLLRNAGVRIVTVRQGELDLSELGGWLVASVTQHGKAQYLKDLSANVLHGRLRKAEKGLWAGSRAPYGYILTKEGRLELGDPEHIKTVRLIFATYAARDVSLREIANLLNDSDIDSPAGGDWTGTKVQAILRREAYLGRATQFRQSKGKFFTISGASVTQASGPTLKPRDEWFVVECPPIVDQQLWDRCAAKLVRRRVRTTPRKDVLGLLNGLLCCGHCGKRMFASAQAMDSSGDPVYCCSTYNSVGGRGCNRNLIHQGQLLPFLIQKIQELVLAPANFGRLQAEVKRQIGKRADGPADGKGALRAKIAKLDKEIKAAAAELKRTPDDLYDLAVEDLRGLRVKRDRAATGLEALEARVLRPQADVEQRAKRAIGDIQGLSENLKSADPATVRETLNQICEKIELWFDHTKSAKQTRSFFRKGMVHFRKPTDLYGPASRPR

SEQ ID NO: 2220 - protein, 516 aa, unidentified
  source 1..516: note = uncultivated organism
MPTIRTILPQQKNNEVPILRVAAYCRVSSDSDDQMHSFGVQTEYYKKLIGENPLWTLADIYADEGITGTSMKKRDEFNRMIADCKRGKIDRILTKSVSRFARNTVDCLETVRLLSGLGVSILFEKEQIDTAKMSSEVILGMMSTQAQDESASISGNMLWSYEKRMKNGTFLGCRAPYGYRLVNGSLEINEAEAETVRWIFRQYLSGRGARAIADELNSRDLAGGSKSAVWRVFTVQHILKNERYMGDALLQKFITVGGVAHKKTSNRGEKTQYYVENSHPGIIPREDFLAVQGALEKYRQGRRKANRSYTGLIKCASCGCAFTRLNTGYWVCGNRKRLGYNCPSISVDERSLDLAVERAFRTIDEHPALIGETIRQLDRLQQSTSGSRHKISAIDRSIAETNAQLMVLTSLQAQGILDAADFADQNRGLSERISRLRSERRAILQSGEDEAINRMEELQEAASDVREDLLAGEYDMLKTVIDRILVTGPSSLEIHLHGGLVLPESMPNIKRRCQRV

SEQ ID NO: 2221 - protein, 543 aa, unidentified
  source 1..543: note = uncultivated organism
MLNTQKKIWNATLYLRLSRDDGDKEESNSITGQRELLRDYISQRPELREYAVRVDDGFSGSTFERPSFQKMIEDVKAGRTDCIIVKDLSRFGRNYLDAGEYIEKIFPFLGVRFIAVNDNYDSLGDKKSSDDLIIPFKNLINEAYCRDISVKIRSQLEIKRKNGQFLGSFATFGYLKDEQNKNKLVVDQYAADIVRDIFKWKLEGVSPQDIADALNRLGVLSPMEYKRSLGMRFTTSFKTNAKAEWSAGTVLRILKNPIYTGVLVQGKETTPSYKVHKRITKDESEWTVINDSHEAIISKIDFDSVQKVLKCDTRRSPDGKAVGLFSGMIFCGDCGASMVRKVIPAGGKKYVYYVCSAHKQDKSCSPHRMRDTVLEEIVLDSVRQHIREVVDMSELLEITDTAPLRTAQAQKVQRQLDKKREEYEKLQKLLMSLYENLTDGIIDREEYTKLKASFTARADEAEKQMDALRESLEEIQHHGAENAWMDEFTKRQGLTSLDRAVVVALIDKILIHSDDVVEIIYRWQDEFAWQLDILRNARLQEAV

SEQ ID NO: 2222 - protein, 541 aa, unidentified
  source 1..541: note = uncultivated organism
MAERIWNVAAYTRLSHEDGDKEESNSIGSQREMIREFIRNRPDMVITHEYVDDGFSGVNFERPGFKQMMEDLQAKRVDCIVCKDLSRFARNYIDSGRYLEKVFPTMGVRFIAINDNYDSCGERSQSDSLIIPFKNLINDAYCKDISMKIRSQLDIKRKMGDFIGAFCTYGYKKSPDNKNRLIVDEEAAKVVELIFRLRLQGMSNTGIGDKLNGMGILSPMAYKVSKGMDYRSGFRTNERVLWSAETVRRVLSNPVYVGTLIQHKRGTPNYKVKREIQYEESDWIVIPRNHQPIIEQTDFDTVQSLLGRDVRVAPKQESVYLFSGFVYCGDCGHAMVRKTVSRGGKKYQYLVCSTNKAGHGCTSHCFSEKKLDKIVFTLVRDHIDQICEIDRVMDYIASLPENQREIFNYDAQINRLEAEIQRYQDLKLGLYSDMADGIISKEEYLEFRAGYDRKIAAGQRSLARIQEERAQAVRDHEEEIPWIQMFRQYENITELHRTVLVNLVERVVIYDASHVEVFFRYQDKYESALDYISRFEGVKEA

SEQ ID NO: 2223 - protein, 529 aa, unidentified
  source 1..529: note = uncultivated organism
MKTGMAKPVRCAIYTRVSTDQGLDKDFNSLDAQYDASQAYIRSQMHAGWTLLRSKYDDGGFSGGNTDRPALQRLLEDVRAGKIDVIVVYKVDRLTRSLADFAKLVELFDKQNVSFVSVTQQFNTTTSMGRLTLNVLLSFAQFEREVTSERIRDKIAASKRKGLWVGGMAPLGYDTKDRKISINEAEADRVRTIFRSYLKLGSLNLLMTELRKRGIVTKVRTLKTGKTVGGIPFTRGSLAHLLRNRFYIGEVAFKGEVLAGEQPAIVDRNLFDSVQAKLNEQNNNHTTTRMKSEALLAGRIFDDRGNRMSPSHASKRGIKYRYYLSSALHQGLAAQAGSIARVPAADIEELVTKSVRAHLKPAVPTDNRDLINTYVARVEVEPEQLIIQLAQAQKANRQSKRSDGALRVPWHKMPSTRRREILMPETASIQGGRPIRSETRATLVASIARGRRWLDELITNLSATTESIAERERCSARKINMTISLAFLAPDLVKAAVEGRLPHGMGVVRLCDLPAEWSRQHQVLGLTSQ

SEQ ID NO: 2224 - protein, 542 aa, unidentified
  source 1..542: note = uncultivated organism
MLKSVYRTGIYARLSRDDGDKAESNSIVSQKSICEEYIAQHTELELCDTFVDDGYSGVSFDRPNFRRMEQAVRDGKIDCIVCKDLSRFTRNYIEGGRYLEKIFPQLGVRFIAINDTYDTATGNPQSDSFIIPFKNLINDTYCKDISVKIRSNLDVKRRKGEYVGAFTPYGYVKAPDDKSRLIVDEYAGEIVRSIYTMYKDGLSIGRIADRLNSMGVLSPMEYKLSQGSKYETLFKSHEVALWSYMAVRRILTSETYIGVLVQGKRGTPNYKVRKIQDKDESEWVKVESAHEPLVSYSDFTAVKEMLGRDRRSASDEESASLFSGFLYCGDCGQSMVRKTVPSGTKKYLYYICAASKRRECSSHSISEKELERVVFHALHDQIEIVLRLDEALAYIDRLPSADRRVFNYEAQIAKIEEEIERCQGLKLRLYEDLSDGIIDKAEYMEFRDTYTKTIAQKKEALTRVQREYKDTLATGIAERNWVTLFRQYENIDELNRRVLMALVDKIIVHENHVVEIFYKYRDEYEQAAAYAASFDDERKNVG

SEQ ID NO: 2225 - protein, 510 aa, unidentified
  source 1..510: note = uncultivated organism
MKAVIYARYSSDNQREESIEGQLRECMEYADKNDMVIVKNYTDRALSAKTDNRPEFQRMIKDSAKGLFDVVLVWKLDRFARNRYDSAYYKSILRKSGVKVVSAKETISDGPEGIILESMLEGYAEYYSAELAQKVTRGMTENALKARYNGGVMPLGYMVDKDKHYTINPDTAPIVEEIFTRYAKGDVIKDIVDSLNSRGLKSTKGANFNKSSLHTMLKNRKYIGEYKYKDIIVPNGIPPIISEELFEKVQKRMESNKHAPAKEKAKINYLLSTKLFCGKCGAPMVGESGYGSKNVMYHYYKCANAKKHKTCDKKTVKKDYIENLVVSFTRQTALKDEVIERIAERVYNLQSAENTIVKALKQNLKEVESGINNMLNAIQMGVVTSSTKQRLEDLEKRKSEIEIAILNEEIEHPILTKEQIIFWISQFKDGNIDDEEYKRRIIDTFINSVYLYDDKIVITYNFKDGTRTISLEEVENSDLAQNASPENRLNIRLSGFFICFFMNVIFILFE

SEQ ID NO: 2226 - protein, 557 aa, unidentified
  source 1..557: note = uncultivated organism
MENINSKTYRAAVYLRLSREDGDVAEGSKFESNSISNQKDLIMDYVGKHPEIRVHSVWVDDGYSGVDFNRPQFQLMLSEIKKGNVDCVIVKDLSRFGRNYIESGRYIEKIFPMMGVRFIAVTDSYDSLAKDDGNEIIIPFKNLINDAYSRDISIKIRSNLEIKRKRGEYIGAFLVYGYLKSKENKNQIVIDGYAAEVVRDIFKMKMSGMSQQAIADRLNEQGIPSPLAYKSSIGIQLKTSFDMGNGAKWNYVSVTRILKNEIYTGVLVQGKQTTPNYKVKTRIKKSESEWVRVENNHDAIISRKDFNLVQELLKADTRCSPEKEKVYPLAGVLFCGDCMESMVRKTVPAGGKQYVYYVCSANKKQKKCCSPHRISESELMDAVLESIRFQIREMLGIENAVKVLDEAEWKQTGVEKYGERIRREKEKKAKTESRKLNLYEDFKDGILTQKEYIQMKQEYDRQIEVSEQALQSYEHELELLKSNKGSRQEWIKEFKKYENITVLNRSVVTALIKQVRVFEDKRIEVVFNFEEEMGRYGILAVSGKSECAAGCAEGMVV

SEQ ID NO: 2227 - protein, 600 aa, unidentified
  source 1..600: note = uncultivated organism
MKTKDIQQFVIYSRKSKFTGKGESIENQIEMCRQYIATHYSQEEADAALVYEDEGFSGGTLERPKFKKMMSDSQKIKFAAIVVYRLDRISRNIGDFAKLIEDLADREIGFISIREQFDTSSPMGRAMMYIASVFSQLERETIAERIRDNMHELSKTGRWLGGTTPTGYESESISNVTVDGKTRKACKLKIIPEEINLVKLIFDKFIETGSLTKTDQFLMKGRYKTKRGKTFTRFAIKGILSNPVYMIADEDAYNYLVENDVDLFSDKEAFDGKHGIMAYNRTLQRPGKATQEKPMNEWIVSVGMHKGVIPGAVWVKVQNLLELNKSKSYRKPRSNVALLSGILYCGKCGDYMRPKLSDRLTATGDPIYTYLCTTKERSRSHVCDMKNANGNMLDAKIIATVKSFGKQSSDMAKQIAQTKKRINGNREGYDAEVAKVKSQIEDNEKDIKALVISLGKTEGTNAEKYILEQIDELHEKGEGLKKRLAELESIMQQHDLAEIEFDLIRQLLSTMGENIEEYSVEQKRAAIRTFIRKIVWDGENAHVYLFHNDGDYEFPNPPDGGNTPKNDKNPNGDSSEYDEPLGEDSERNPYEFSCSEKISR

SEQ ID NO: 2228 - protein, 534 aa, unidentified
  source 1..534: note = uncultivated organism
MEERDFEKSGDRLRVAAYCRVSTDKEDQRSSLAAQQAFFQSYIQTRPGWVLVEVFADEGLSGTSAKRRPQFTRMVRQAMEGEIDLILTKEVSRFARNTVDTLQITRQLKARSVGVCFLNDNIDTRDNDGEFRLTIMASVAQEESRKISERTRWGQLQAMRRGVVFGNNSIYGYTLQGGQLTVEREQAAIVRRIYHTFLTARKGAHTIAKELTHAHIPPPLRPDGPWSSAMVLRILRNEKYCGDLLQKKYRTTDHLTHRKIVNDGTEEQICLRDHHEAIVSRAEFQAVQAELDRRAKLFAGQERFSARYWYSGKVRCGSCGRTFTCKQTRRSDGTQYTRFVCRGHLDGACAMGAVPGKVLSAVARHVLDQLGLDGPEIIRQVLQELRTMESGGADKAGTGARLRQALRRQLDRKDRALEAYLDGALSRAELSRIVSRCEEEIAGLRAQLEQGKETIRQEAERLQEIQSFLERELESGELLLEELMERITVFQDGFLVEVAGLPVGFRVCAQTKRAGRRCQVEITEWRPVPLGETR

SEQ ID NO: 2229 - protein, 532 aa, unidentified
  source 1..532: note = uncultivated organism
MRCAIYTRKSSEEGLEQSFNSLDAQREACEAYVLSQKHEGWELVPNRYDDGGYSGGDMERPGLKALLMDVEAARVDIVVVYKIDRLTRSLSDFSRIADRFEKDNVSFVAVTQAFNTSTSMGRLMLNVLLSFAQFEREITAERIRDKHAASKAKGLWMGGHVPFGYDAVNNRLVVNEPEARVVRHLFERFLSLKDLQPLADECAEQRIYKRYRGHVRGCAPPDTPFARADLRTLLTQPIYVGRVRHKDLIYPAVHEAIIDVPTFDQAARVLSELSAEWRKRRPRPLPYLLQGLLQSPQGEPFTAEHAKHHASGPRFYRFPTTTVGTVRVAEGSADQAVLTALCDFLLNVHRAHEFGTASSRDSTVPRLVAKLRSGSREQAKAILHELVGAVYMDHASMRIRVRAAGTGGLLREDTDVNVCLRTKGARSHMRVLTETGTRRPDPSLVRLIGCASAWLDDLVTGRSKSLMAIARREGLSLSHVSNTIELAFLAPDLKQAILEGRQPLGLTVTSLQRAVPLPLSWPAQRRRFTRLA

SEQ ID NO: 2230 - protein, 581 aa, unidentified
  source 1..581: note = uncultivated organism
MARKKKSNTFPATKDKAALYIRVSTVYQIDKDSLKVQERELIHYTQLVLNMNDYEIFRDAGYSAKNTDRPDYQKMMQKLRTGEFSHLVVWKIDRISRNLLDFAEMYAELKDLGVTFVSKNEQFDTSSAIGEAMLKIILVFAELERQMTSERVTAVMISRAESGSWNGGKVPLGYTYDKETKSFGIHPEQAEVVKLIYDSYERMQSSTAVAKFLNEKGITTKAGNKWNPSTVCLILRNPVYKGTMVYNKRHISVTGKLKPEDEWVTVEEHHAAIISAEQFERCHTLLKKNMIGSDRSTYFRGNCHVLAGLLFCDYCGSMMAAQIGKPLKSKGGIIPSNYSCYNKRHGLCENPFTSDSTLGPFILNYVANMYRIQRTFGKTTSIETLEKKLLRGEAFKEVDHIEAKGLTQLYQALKAHVFADNSVFYEPNLPEHEATPNQRAIYLSEKASHERALHRLHQLFMYSDSDMSETDYFTGKNKLEAKINDIAQKLAQLESEKNSDVSSEYFSALVSNFILENNLNEERYIDYFALKKKIDPMELKLFLNAVLSKCFIRQGRVASIIFQNGYEHRFIYKDKEAKKNA

SEQ ID NO: 2231 - protein, 550 aa, unidentified
  source 1..550: note = uncultivated organism
MAKQTENKVGIYLRLSQEDLREGDSVSIDNQRMILTKFVKEKGWTLVDTYADDGWTGTDFNRPEVQRLLDDAKSGRINIIVVKDLSRFGRNYIQVGQYIDYIFPLNNIRFIALNDGVDTADRNSTALEMMPIINLFNEWHASSTSKKIRAVVEANAKAGKYGCKQAAYGYIKGDDEKHTPIINPETAPVVLSIFQMRAQGISPRHIADKLNEDGILNPTDYHYSLLGKDAPIPMRHLWSGATVKNILKNRIYLGQLAQLRRTTVSHKNHKIVYKDESDWVIIENNHEPIVTQELWDKVREVEASVSRGKPTKRGYVDPLCGLMFCADCGFKMRLGTTWRGIKKSPDAVPYRSYNCTSYRLFGNNACESHYITDRCISKLILDNIRLMAKLVIEDETGARKKFLAIKNQGEAEKESLSRKKLTANAKRITELQGLIQSVYEDKYLGKITETACGVLLDKYETELKALQEEQARLTVKLDAEKQNAEDVDKFIERVKKYADVQTLTREMCLELIKYITIDKHPSDRKAERDIHIYYKFLDKSAEHSLHNLYE

SEQ ID NO: 2232 - protein, 871 aa, unidentified
  source 1..871: note = uncultivated organism
MDRAGKKCILYSRVSTEMQVDGFSLAGQKTCLTSFAKREEMKIIGEYEDAGKSGKSIEGRPAFKRMLNDIKEGLQVDYIIVYKLSRFGRNAADVLNSLEIIQDYGVNLICTDEGIDSSQASGRLLISVLSAVAQIERENILEQTMNGRREKARQGLWNGGQAPYGYDLKDGKLVINEEEAKIVRMIYDMYVHTPISMRQLAIYLNNQKVEKKLVGNRKDTTWIDSSMRKIIGNPVYNGKIEWGHRKNMKQKGSKEMKRVYTHDNIIVSQGAHEAIIDDETWEKALTKKKQAALKFNNKVSHKIIHPLTGLIVCPECGRTMGIGLNKKTNLDGETIRQYYYHCNNAYRKDFSKTTCNHKRVYNAECCEKLVRKAISKIVVNEQYIESLKKEFTGVDTSSRLSLELENYEKKLKSLNTNKNSLESEIDNLDADAPNYEKKRETLNIRLNKVYDNVFEVEDKIEDVKKKIKSIESQMISADLIINALKSFDEMYDMMTEEERKIFLKSMIKKIEFTERTDEFTDIQLKSISFNFPVFKDVRVVERLQDADMDETIKELPAQVKISSIEQKVEFGSNENQIELESLSPYKERIIKEKFLRERVPRPKKNRDDSHHQNNVIMEYVWEKYNLKVYAQIIRFVKTELGMYVRRLKTTSLDEYKYHISHEKWDAVVDALTYFELIPDEILANLDELNKQAYEKLDILNSKIRAKKGDELDRFVAEIRKETGLKITARNVIIVKDMLGIEKHIVYSTSGNALSIRIPVYEKSKAILEKLIRENNYPNAFELRTKLEQSYEELKKAYIKRNPNNNDIIDYVKEKYDLVVNSSMISYVRDKLGICVKRKDNRYDPTQKNKRIPTPDKYDAIVEAMNVYGMIA

SEQ ID NO: 2233 - protein, 562 aa, unidentified
  source 1..562: note = uncultivated organism
MARKSRKNIPQDPAPAVSTVKYKCALYARISVENEQKREADTIGNQIALLRDHVSQYPDLVEYDLYCDDDISGVSFSRPEFARMMNDIRSGRVNCVIVKDLSRLGRNMLESGEYIEQIFPRLNTRFIAVTDRFDTLKGDADISIQLKNFANEAYARDISKKIRAVKSSQQLAGQWTSGTPPYGYMIDPDDKYHLIPDPNTAPIVLAIFRMVSEDNSLHCVAKTMNEQGVPSPGKYLYNMGLRKADKFKNSIWYMTTLRKILKDQVYLGWIVSGKTRSQLCVTGEKKAIEVPQEEWIIKKGMHEPIVPKALFDSVQETMKQRKEAMGQSTTYDSQSKRRSMFKGILRCGECGRGMYLRRKSNGKHYYFCSLHEHYGSATCTKKAVRQEDVESLALRLIQNQIALFTDAQKLIADLNATKSSQTRYQIYSSQIDDAKRKIEKFTQLKASLYGDMADGLLSQEEYSDLSDEYSQRADELRIFIAELEKERQKFDADYGKKTQWAELIEKYGNQTELNEEMVAAFLENLTLYNDGHVEVTFKHRMEFDQILYIAATKAKEAERVAG

SEQ ID NO: 2234 - protein, 624 aa, unidentified
  source 1..624: note = uncultivated organism
MKGNIRRVAIYSRKSKFTGKGESIGNQVELCREFVRMHYPDVKEKDVAVYEDEGFSGGNLERPDFKKMMKAARAHEFDAIVVYRLDRISRNISDFAALIEELGRLNVAFISIREQFDTESPMGRAMMYIASVFSQLERETIAERIRDNMHELAKTGRWLGGITPTGYVSESVKSVTVDGKTKKACKLKLVEEEAQIVRLVYDLFLETHSLTATEAELMKRGVTTKNGCQFTRFSIKAILQNPVYVVADGAVYDYFVEKEADLFSERSEFDGQHGVMCYNRTDQNKGKSTVYLPIEEWIIAVGAHVGLIPSKEWLQVQHLLDQNKSKAFRRPRSHEGLLTGILCCACGNRMYPKVSKRPDPDGGFQYTYVCNMKDRSKKALCNRKNVRGNWLDSAIIEEIKQLGEDKEGFLSQLEESKKFYTGKREDVDKSLANLLDERAQLDKKMAALVDSLADMTEGVARKQVSGRIEALGREREALEIRISEMEALATQQELSDSEFDILRDMLTSFAGSIDGLGLEQQRAAVKTLVRKVVWDGEKAHMILFGAEGDIDFDSLTPLDEEEDLKEVSEHSPCEGNVIEPPRSVSESGLRPPLQRCGDRKRDPHVPARKPEAQGRCVPAGADWR

SEQ ID NO: 2235 - protein, 590 aa, unidentified
  source 1..590: note = uncultivated organism
MTATSTLARKRPRRVTGTALGPPVGPRRVAIYLRRSTDDEHQPFSIHAQETALTSYVKSQPGWTLTATYSDDASGATTGRPDLQRALRAAQAGRFDVLLVYRVDRFSRRLSDLLDLLADLDDAGVAFASATEPFDTSTSIGRMLVQLLGVFAEFERETIIDRVTSGMNTKAAKGKWAGGKRPYGYQLDPDAHKLVPNETEALYLRDIFTCYTRDRIGTRAIAARLNTRGISSGTGKPWSGHQIARILVNPAYAGDIARGTVYVPDAHPPLIDRNTFARAGDIAAARAAPHLQRSASPSDYQLTSLMTCPGCGCKYVGTAAHGRSGTYRYYTCFTRARYGTKTCPAPRIPADQADTAVLTALAAFYAQETALLTAAISRAQAHQADGHAGQRAEADAVTAHITAKEAAIARYRTAFENGTMDDTTAGPRLKELQQELTLLRARYGELTDAINAQPAPPPAAALDHLRGYLPQLVNSEGSATERKAAVEALIHEIRITEQGLIPVYRIPAPDSPVPGHDDTPPVRTMVGSVGRLGLEPTTGGLRGTAPSTLPALMSGNTPGRHTPHTKFVSSWSHETFHGSGTSQRELRHGT

SEQ ID NO: 2236 - protein, 730 aa, unidentified
  source 1..730: note = uncultivated organism
MGKTITELTAGKQEQRILRLAPYTRVSSNSEDQLHSFAAQVKHYTEYVAEHPEYELVDIYADEGITGTRMDKRDDFNRLIRDCKKGKIDRIITKSVSRFARNTAEFLAATRALKKMGVSIYFEEQGIDTETVDLELMMTFPGIAAQRESETISENMRWSYQKRMESGDFNCCRAAYGYDLIDGELRINEAEAQVVRRIFHLYLQGCGKQAIANQLNAEGVPKRYGQKTWHLFTINYILNHYTERIHREPGWKLVGIYADKGITGTSMKKRDEFNKLIRQCKRGRVDMIIVKSISRFARNTLDCIKITRMLREIKVDVYFEEQNLHSIDPASEFYISIYGSIAQSESENISHNVAWGKAQSAKEGNVSFAYKSFLGYRQGADGKPEIDPAQAITVRRIYTEFLSGNSLQQIADGLTADSIPTPMGKAVWQPGVIQSILSNVKYKGDALLGKTYVKDCISKKVRINGGERPQYYVENNHPAIIDADTFAQVQEELARRASKRKVKQIGTTTEQGKYCGKYALTELLICGECGTPYRRCTWTAGGQKRIVWRCINRLDYGKKYCHHSPTIEESPLQKAIMNAILKTAKSNPDILQTLKMHIQIALGAEAGEDESVDIQIRIAQIDKEFNDILNTVTAENPESLLTDPRIEAMMSEKRMLENRLAEYIAAEQHRKSTKSRLEQIFTILDGMKNHPLTFDNEIIRKILQCVIVESKDKIKVVFIGGLEMESEVEQ

SEQ ID NO: 2237 - protein, 531 aa, unidentified
  source 1..531: note = uncultivated organism
MTRRGGSSSLVQVAAVRCAVYTRKSTDEGLDQDFNSLDAQREAGEAYIASQRGQGWTLLEDRYDDGGFTGGNLDRPALARLLGDIEAGRIDCVVVYKIDRLSRSLLDFARLVETFDRHGTSLVSVTQPINTADSTGRLMLNILLSFAQFEREVIADRTRDKIHAARRRGKYTGGMPVLGYRVAPSENGGSGKLAVDPGEAEMVREIFRLYLKQQSLSDVVLELERRQWTTKEHRTKTGRQLGGKPFSKSSLHHLLSNPTYIGKTKLKAAVYDGEHPAIIDEVTWRRAQDLLRQNGNGRGGPNGNRHGYLLKGLVRCAACRAAMTPSTARKGSKVYRYYVCSGAQKRGYKTCPCPSVSASRLEGVIIQQIRRVGQDRALQREVLRQVQEAGQAKRPALVAGQKRLGRKLAKTRDQIRGLLDALADGHGGASVTGRIAELEDKAGALDRRLGEIAQDIAGLDHETIDEKDLRTALSLFDPIWEVLYPSEQARVIQLLVQGIEHDGRSGTLAIEFAASGIRALAGEIDVAKETA

SEQ ID NO: 2238 - protein, 514 aa, unidentified
  source 1..514: note = uncultivated organism
MENTVVTISPSAVPEKRIRVAAYCRVSSDSSDQLHSFSAQVQYYNRLIRENQTMELVDIYADEGITGLKTAKRDDFNRLVNDCCKGRIDRVLTKSVSRFARNTADALMYARMLREHGVTILFEKENIDTAFLSSELLLALSGAQAQEESVSISRNMRWSVERRMKNGTYLASSVPYGYELRNGALQICESEAETVRFIFLSFLSGIGKKDIADALNSSNTPKRFASDTWRINTIHYILTNERYIGDALLQKSYTTDTLPFTRRRNTGEKAQYYVENMNLPIIAKEDFEAVQRIIHGRTSSRSKQAEYVLGKKIRCKCGAAYTPIRVNGKQYWGCLRHNLDAGLCDSPRIPEEELFEAFVTMVNKLHHLRASVILPAISQMERLQMKADGKFARIREIDREIAELSNKNLVLARLNSKGILRAAEYAEQSTALNQKMNLLRAERRRALQERSNDALTGLHRLNDALMAMRSPLCQFDKSLFDQIVEEMSVPDAQSVCFRVIGGLTLRETVNRKGR

SEQ ID NO: 2239 - protein, 563 aa, unidentified
  source 1..563: note = uncultivated organism
MKAALYVRVSTMHQIDKDSLPFQRQELVNYAKYLLGIDDYEIFEDAGYSGKNTDRPKFQEMMSRIRAGEFTHMLVWKIDRISRNLLDFTKMYDELKKHNVIFISKNEQFDTSSAMGEAMLKIILIFAELERKLTGERVYSIMLSRAEKGLWNGAPMPLGYTWVEEGETKFPVVCPDEARTVQFIYDSYEELRSTMSVKHRLEANGISTKKGRTWTTKTIADILRNPFYVGTYRYNYREAGRGNKKPEDEWIVVEDNHESIISKEQYEKVCSILDAQKRGRNVTRTSHIHVFSHLIHCENCGKKHIASIDRPRDGGYRPSVYRCFNYVHSNKAHRACGCAIGEVKLGPFMLNYLANLVRAHDDAKLTGKTEHTEKLLLQGKLFKEIAGIHPEDLQNIHRVFTGSTQDILFDKIEDEGKNIEKDFTLDTLKEEKKKCERAMQRLEDLFLFSDDAMSEKDYLVRKQDLKTKIDNINKKIKDRSVEYSKNLPGHDLSFIKKATQYLLAQNLLESKHIDYNKLVMTMDKQLLKDLMLSVISRITVRENKQIASIEFTNGMNHRFVYRD

SEQ ID NO: 2240 - protein, 561 aa, unidentified
  source 1..561: note = uncultivated organism
MQRPNAPIRRCAIYTRKSSEEGLEQDFNSLQAQREACEAFIKSQAGEGWRLVKTAYDDGGLSGGTMERPALQRLLADINQGLVDVVVVYKVDRLTRSLADFAKMVEVFDARGVSFVAVTQQFNTTTSMGRLTLNVLLSFAQFEREVTGERIRDKIAASKQKGMWMGGLVPLGYDVHERRLVANQSEAETVRKIFRRYGELGSVRLLMEDLNRRGIRSKVRVAKNGRKSGGNPFFRGALYQLLSNPIYVGEVRHKGIRHLGLHGPIVDRELWEKTQLMLRSHEVRHTLRATKSVASPLTGKLFDESGLSLTPSHAVKGERRYRYYVSRSLINATSDSTGRGWRLPAPEIERSVTAAACKMLSDQTAIATAAQAIGLAENRLPSVFTLAQTWRQRLQSEVEAGATLTTLVLRVDLSDSGIRLALKVPIVDGGVQPVVNATELIIRCDVPMQIRRRGVEMRLVIEGNSAPTPRADSALLKVVARALHWSDELLSGRAPSTAKVAEREGVSARYVRRLMRLAFLAPKIVEMIAAGGQPPELTAEALAERIDLPLLWTAQEEAVGV

SEQ ID NO: 2241 - protein, 543 aa, unidentified
  source 1..543: note = uncultivated organism
MSTKVYRTAIYARLSKDDGDKVESNSIVSQKALCEEYIRNHKDLELVETFVDDGYSGVNFDRPAFRNMEQALRSGKVEAVLCKDLSRFSRNYIDGGRYLERIFPQLGVRFIAINDAYDSLNGNPQSDSFIIPFKNLINDTYCKDISVKIRTNLDMKRRKGEYVGAYTPYGYQKDPENHNHLIVDEYAADIVRQIFSMYKDGLSICKITDRLNELGVLSPMEYKRSCGIHFETVFKIEETAKWSYKAVQRILSNEMYIGVMVQGKQSSPNYKVHILQAKDESEWIRVENTHEPLITYDDFMAVKTMLGRDMRSTSDSTEDNIFSGFVFCGDCGQPMTRKVVPSHGKKYYYYVCSTNKRKEGCSQHSISMKEVDTAVFNAIHEHVSHVLDIDDAMAFIERLPSADRTVFNYEAQITKIEEEIEKYKKLKLRLYEDLSDGVITKKEYMEFRNQYTDLIDDREAVLERVRRESQSAQVNGKAERAWAAMFREYENLQELNRRVLMALVDKILIFENHVIEVVFKYGDEIRSAFNYVKKYEDILPKAV

SEQ ID NO: 2242 - protein, 540 aa, unidentified
  source 1..540: note = uncultivated organism
MRLPPTQLSAPTEEGLAQEFNSLDAQRECAQAYILSQRQQGWSMLPAHYDDGGFTGAHLDRPALQRLLADIQAGRIDCVVIYKVDRLSRSLFDFARLMQIFDKHSVSFVSVTQQLNSSTPMGRLTLHILLSFAQFEREIISERTRDKQSAARRKGKWTGGCPVLGYDPDPQGGRLVVNQIEAERVRQIFALFLGHRSLMATLEEIHSRDWTMKSWTTRKGQQHVGRGFDRPALVRLLRNVIYRGEVSHQGKIYAGEQAPIVERDVWKKAQELLWNQAKGSGRRECHQGALLRDLLQCGVCGSRMVPGYTAKSGRRYPYYVCLTAQKRGAHSCPGQRIQAQRIEPAVIGALEGLASKALGVEQKGWSEWARSEPGQALATVVSGIQYDGGTKEVVLRLRAEVVGAGEGDEVRIRVEKEPVVKQERPGIERPAAAQIGGRLPRITRLLALAVRFEDLLRKGTVKDYADLARLGRVSRARMTQIMQLRNLAPAIQERILLHAPVSAAGDDVHERVLRRVAACLSWRQQMRMVAKLWPAAGDTE

SEQ ID NO: 2243 - protein, 508 aa, unidentified
  source 1..508: note = uncultivated organism
MRTTPPTVPVTKAATRTVAIYCRKSTEEGLDREFNSLDAQRQACEQFAASQRHEGWVVSPDRYDDGGFSGGNTERPALQRLMDDVDAGKIQVIAVYKLDRMSRSLTDFVGLLQRLDAKQVAFVSVTQHFNTATPMGRLMLNILICFAQFERENTIERIRDKVAATKRMGRWCGGNPILGYDVAPGGRKLVVNEAEAERVRAIFDLYRERRSLMATLEEVVRRDWHNKEWTNGAGRQSGGSPFRKSTLAHLLGNITYTGRIRYRDAIYAAEHPAIVDLAVYDEVQRQLASQSRSGGAETRTKHVVLLRGLLMCVPCGCKMTYCYSRRGTKVYGYYTCATSREKGAHSCPMPSLPAAEIERMVISEIAAICRDPILADRVIAEAGARHDAAVAEAKARLADAEDLAAKAAATAQKRTDDGAHRGILRQAEAQVATLRSALVAAQASDPRTPAARAVLVSFDPVWTELNPTERINLLRSLVERIAVDGHAGKLAVTFRASGIADLAKRGVA

SEQ ID NO: 2244 - protein, 528 aa, unidentified
  source 1..528: note = uncultivated organism
MENKTLRIAIYARKSAQSDTSDSISNQVKIIKNYLEMTIPGNYDVFEYIEAEGHTGATTNKRPEFNRMVEDIKNGFLDAVACYKLDRLNRNVRDFSQLFQLLQDNNVEFLSARDKIDTTTAVGRAMMYMTSVFSQMERETTVERETDAMIQLAANGNWAGGVAPLGYKLEKILVNNKHHTILVKDEETAPFVKMVFDAFNGRSLNGVATYFKKNGVKAPKGGYFSSSQIHTILKNPHYCPATQEVYDYFKALGCIMRMPKEAFTGRYGIIVYGRTSDGKGKKHTSNPPEKWSVSVGQHKAILDSETWLRAQSCFGQNKLNKARRHECGLLHGIMKCKCGRRMRVKYKNDRHYNKEYKHYVCDKRAAEGMEGCDTPFIEMDTIDDKLLSILREIRLNRKNINKYIEKDPKPIGMQDKAGLQKKIKRVEVKINNLTMTLQENNSSTAVKYIISNIEELDNELSVLRKELREINISLLQKSQYEKRADYAFEQICILLDNFDTLSYRDRQSLLKSVFTEYIFCDGKLQIII

SEQ ID NO: 2245 - protein, 591 aa, unidentified
  source 1..591: note = uncultivated organism
MPKSDRVKGNGRVQCAIYTRKSSEEGLEQEFNSLDAQREACEAYIKSQKHAEWYGLPDMYDDGGISGGTLERPALQRLLADVRVGKVNVIVVYKVDRLTRSLADFAKIVETLDACGASFVSVTQQFNTTTSMGRLTLNVLLSFAQFEREIAGERIRDKIAASKKKGMWMGGTVPLGYDAIDRKLVINTKEADTVLLVFKRYIDLGTMSLLQHDLDRLGIVSKQRTDKNGHCTGGKRFSRGALYLLLKNRLYLGEIVHRETAYPGLHDPIVDRELWHGVQEKLNINRVERKLRKGAKQPSLLVGLIVDSLGKPMTPTHSSKKGKRYRYYISRHLNNPDRKGNESGQRIPAGDIEGLILDRLKTLISSENELGNTLAPFHLDAVGYRSMFFYARKLTKHWHTLSADEIRTLVKTAIQKVYIGEDNVQLSIDRSGLFKFLKAEGLDNQYPADPDTSESESEFEDGPLILEINTHFARAGKGIRLVIGNGQAEEISPELVNLISEAFAIKDQFLNGCDESIEAMSRRLEVSKGYISSRIRITYLAPDIVRTILEGQHPVGLSPTKLLATSKELPHCWADQCDHLGFPKPANYSAH

SEQ ID NO: 2246 - protein, 512 aa, unidentified
  source 1..512: note = uncultivated organism
MREVRIIQPITAQAADKLRVAAYARVSSDSADQRNSFAAQVKYYTQFIQAHADWQFVDIYADQGITGTRADKREEFLRLLADCRAGKIDKILVKSVSRFARNAQDCIRAVRELKDLGVTVAFEKERINTAVMGNEMFLSMMSAFAQEESISISKNMRKGAVMRMQNGTFRLSQPPYGYRLDENGMLVIQPQEAEIVRRIFESFLTGKGIQQIGKELEDQNIPKFRGEAVWSKNVVRYILTNERYAGDELFQKTYRDNNIPFTRYLNDGAEPQYYAENTHPAIIPSGIFQKAQQLFQKKQKEYGEQMEYPFTQKLSCSECGSVLYRRVTARGTRWVCSRHLHHPEQCGQKGIAEDVAQESFCILLHKLSQNQDAILGEYLKQLQELKDREFLIHSDVMELNRQIAVLSEQNHALHSLRAKECIDSAFFIAQTNELGQKMDRLRKDLQRCREGNDYMEMMKQTKQLISLLSAPSGEFDPEIFQRVVQKVAVSDLALVFHLKNGLKLEERQGQNE

SEQ ID NO: 2247 - protein, 510 aa, unidentified
  source 1..510: note = uncultivated organism
MKTGTINEKKKFRCAIYTRKSIVEGLGTDFNTLDAQREAGMNYIASQKNEGWVALEKHYDDGGFTGGNMERPALQELFDDIRNDKIDIVVVYKVDRLSRSIMDFAKIVELFEKHKVSFVSVTQHFNTKDSMGRLTLNILLSFAQFEREIISERIRDKIAASKKRGKWVGGIPLLGYDIIAGGRGITVNEVEAQLVRDIFSRYLECRSVSQTVAYLNENGIRNKKWTTYKGAQRGGKEFAKTSLWKILRNPTYISQIVYKGEKYKAEWEAIIDNETFDAVQKLLKENGCDNSAKVRNKYNAILSGKVYCANCNVPMTHSYTKKSGNKIYRYYICSKASKLGWDKCPYPSLPAAELENFVLEEIAKISEDVELRDEVLKSFDDGNVKELTEISKHEGALRKAISQLKLKSEDAANKNGDPNALTDLKRRELELSNALVDAQARRKIVVKRMEYSKKRLEELFGDFYVIWANLNFKEQYELIDLLIERVTFDGKLGEIFITFRSSEIDQPKEC

SEQ ID NO: 2248 - protein, 525 aa, unidentified
  source 1..525: note = uncultivated organism
MKHMAPKRQRCAIYTRKSTEHNLDLAFNSLDAQREACEAYIKSQAHEGWTLIRDHFDDGGLSGASLDRPALQDLLNRVRARQVDIIVVYKVDRLTRSLADFAKLVEEFDEHDVSFVSVTQSFNTTSSMGRLTLNVLLSFAQFEREVIGERVRDKIAASKRKGIWVGGPVPLGYRSRDKKLEVVPEEAGLVLKIFADYLALGSIGALAAKLNAEGPKPKPRQLANGKSVQAECWRVGPLAHLLKNRFYIGEVVYRGEVHRGEHAPILDRDLFEAVQARLSDQSVVRKLARRQSPHLLTGKLFDDRGNLMSPTHANKAGARYRYYTSQALLQGRKTDAGSVARVSAEEVEQAILNAVRADRAFEPGYADRDLLDRHVGRADLRRDCIAISLTATTPTEDDAEAEVDARPTLIVPFAPMAPLRKGLRHTPDHAGSLNDAERTSLLTTIARSKSWIDELLRDPLLDFAAIGHRENLAERHVRFLAPLAYLSPRIVEAIAEGRAPAGLAVRRIARDLSVAWAEQEGALRV

SEQ ID NO: 2249 - protein, 630 aa, unidentified
  source 1..630: note = uncultivated organism
MGENYLQTSEEKRIAGIYIRVSTEDQAREGFSLGEQEEKLRQLCKYKDYDIFKVYKDAGISAKDMQHRPAFQQMLEDMKAGRINYIVAYKLDRVTRSVRDLETLISTLEKYHCFLICERDDVNTSTANGRFFVRMLTVLSQLEIEIVSERTKFGLNGAIKAGHLSGHCPLGYYRGKDKSLKVDNTTKDIIIRIFEMYLEGKSYQTISNIFNEEKVLYPEKKCWKDSTIEKIINNRIYVGDFEKYKKDKDKETKLFMDVVPPIISRAMWDEVQMQKEKNQRAFCRDRVYIFFQKLRCPTCNSIMTCKGSGGQKKKYIYYHCSNCKLYYREDLIEDCLIDYLLELVEYDYNVKKYFYPILAEKKNDETNQIQEEINKLKAQKDRLKKAYMNGILEMEDFSADYNLIESKLSDLENKQIDALEYDKESFNPQNIMAERDIEKLTLTEHEMYKSVLLKIWTMKTKDEKQEFISKFIDTATLEKKEDGTFEIKKIDFRSSFVEQLDKLYDIGLVDIPYFLDREGKREDVRISVNINKKQIDDYLTEIKKSLHINYLELGEYNFHDGEYDKFDENYDNKSKVATVRNKAIEFKLKKNEKPIRLFAVKEMKNFLAKPDGKITFSLVTKTPVSKKRKK

SEQ ID NO: 2250 - protein, 586 aa, unidentified
  source 1..586: note = uncultivated organism
MANSTVQVRKATKQAVNRRKGIHMSTLRVAAYARVSTDSEEQLESYQSQVKYYTELISNNPEWQFAGVYADEAITGTQTAKRDDFNRMINDCMNGDIDLIIVKSISRFARNTVDTLQYVRALKEKGVAVMFEEENINTLTMDGELLLTILSSVAQQEVQNISEHVKLGLSMKMQRGEMVGFNGCLGYDYHKEDKTITINEKEAEAVRYIFNRYVEGAGGKVIARELRNLGYKTKRGDSNFSEHGVIGIIKNEKYKGDLLMGKTFTTDPITKRRLGNMGEADQYYTENHHEAIVSRELWDRANEILNKRKGSHSRGNGKREKYSREYSFSCMLKCAFCGGNLTRRTWNSRTDYKKTIWQCVTATKHGKKECPYCKGIPEALIEEAFVRAYNALCTYDGEFINGFLEHVRAGLQDNDTDRELKNINKKIVRLKERKSSLVDMRLDDSIDEEIYQAKVAEVNEKLDGLFSKKQSLNGRKKDQQDINKRLTDFQKVISSNEVLKKFDRHVFESVVDRVIVGEKSGNGEINPYKLKFIFKTGHEKDEVASEQPFSFANSCSDTNNDCDIISLQGDNDTCGDGCSVVPTKAG

SEQ ID NO: 2251 - protein, 503 aa, unidentified
  source 1..503: note = uncultivated organism
MFDAIYTRQSVDKMDSISIESQLEYCKYETRGSPYKSYSDKGYSGKNTNRPAFEEMLEDIKQGKISRVIVYKLDRISRSILDFANMMEVFAEHNVEFVSSTERFDTSTPIGRAMLNICIVFAQLERETIQKRVADAYYSRSKRGFYMGGRIPYGFEKVKTEIDGIKTSKYVPIPDEAEQIRIMYSLYADEDNSLGDIIAYFNKNGIKHLRGGMWSAGRISEILRNPIYVMADADVYDFFKSQGANIINPVSDYTGYNACYLYQGTVSKTRKQLDLTDKEIVLAPHQGIIPSGDWLKCRIRCLNNRQSTKTCKATTSWLAGKVKCGKCGYGLTIVKANTKWHRYFVCAAALATKKETCQGTGGTIYADVLEDYMLNAIRNKLSEFKTLSQKKKKQINPKINKNKIRISEIENEINDLLSKVVGANAVLMQYVNERVEGLDTERKKLQEENISLTCNQDKQNFDVISSHVQDWDNIGFKDKQSVVNALIKVIHIADGKIEIMWNI

SEQ ID NO: 2252 - protein, 547 aa, unidentified
  source 1..547: note = uncultivated organism
MSYYRTAEQSPRVIRTYRAALYIRLSKEDGDKTESDSVVNQKRLLTGFVDRQPDIDVHDCYIDDGCSGATFNRPDFLRMMADVYAGRVNCVIVKDSSRFGRNASESGRYIGEIFPKLQVRYIAVNDAIDSGRSQGAAIDFLNNSMRGMINEYYVAANSESIRSTLDMERRKGDFIGSFAKYGYKKDPADRHKLVIDEEAAAIVRLIYRMYLSGTGIRAIVRHLNDSAVVNPSTYKRQQGMNFKSRSIGGSALWSDKTVRRTLRDEMYIGNMVQGKFRKISYKDKAIRACSEDDWIRVCGTHEPIISAEDFARVQRMLDRRAKASPVTGEVDLFSGLLRCADCGHALIKKTSHNPDKTYVYYRCSTYNKCKGACTAHTLRYERLYQCVLGCIQRMVDIAVNADEVMKQLKEKQTADTNGSLKIQLEKQKAELNRVMQRMADLYPDFKDGVINAEQYRMNKEKYEQEQKRLQASIAKLNASLGSGELSDRTNDFVEHFKRHGSIDRLTRPLLTELIDQITVCADGTLDITFNFCDAFARAQQLTNDAPA

SEQ ID NO: 2253 - protein, 507 aa, unidentified
  source 1..507: note = uncultivated organism
MIARATTTTVRVAIYTRKSVDKGNGGEFGSIEAQREAVEGYITSQREQGWVPLPTTYDDLGESGANTRRPAFQRLLTAIEAGLVDLVAVYRLDRLSRSQRDFLELMDFLEQHGVTFVSVTERFDTTTPMGRFALGISIQVAQLERETTALRVRDKVIASRRKGMWTGGVPLLGYDSFDSKLIVNEPEAARVRETFRLYLDLGSLRETAAELSRRGLVTKSWTTKAGKLRVGTAFTKNSLATILRSPLYVGKIHAEGELHTGQHEAIVDEATWTAVQTQLAAHRHPLRPPSKTDALLQGVLRCGVCGAAMGPHTTRRHERVYVSYVCQTVQKQGARACPGSRAAAHEIDGFVVQQIQALGSDPDLQRATVEAAKGARKTRLAELRDQAKDAKADAHRLTAERTALSSHHGPGVAQRLADIDAAHQRASESLQAAQSETQALSGATLRKADLRAALEAFVPVWDVLFPTERRRVIRLLIERVVYDAKAGELTIDYRPGGIRTLAQEAEA

SEQ ID NO: 2254 - protein, 519 aa, unidentified
  source 1..519: note = uncultivated organism
MSNKHNRKPEAKKSYRCAIYTRKSTEEGLEQEFNSLDAQREAGELYIRAQKHEGWECLDTKYDDGGFTGANMERPGLRRLLADIAAGKVDCVVVYKVDRLSRSLLDFARIIEIFDRHQVTFVSVTQSFNTASSMGRLTLNVLLSFAQFERDMISERTRDKMRAARRKGRWIGGKPILGYNVINTKLVIEPLESLRVQEIFKLYLEMKSTLQVARVLNERGWRMKEWTTKKSKTIGGGEFNKNKVTAILTNATYIGMIEYEGQLLPGLQDAIIKRDVFDRTQELLKENSRTKKDMNQCRHNALLQGLIRCGACDCGMSHSYSKKGSKLYRYYVCHKAQKQGWASCPSPSLPAAEIENFVIDQIRRVGQDPGVVRDTLAQSRVQTQTTVEQLKKEKNALERAILGHYERLNQANADGANESAFADIQDQIRAKEQRVSEIVDEMTVVSSLLIDESDVRDALGRFDEVWKAMSPAERAKAINQIVDSIRYDGHSQELSISYHPIGIRTFNQEQQSKESAATC

SEQ ID NO: 2255 - protein, 1019 aa, unidentified
  source 1..1019: note = uncultivated organism
MLGKINAPSISGSKENGMIRVAAYCRTSTSHDEMTRSLENQVRHYTRLIQEQKNYKLVGIYYDRGKSGMTKEKRPGFQRLLRHCEEQRIDLVLTKSVSRFSRNSKDLLEIVDHLKELGIAIYFEREKINTLELKNKFFLTALAAIAQEESRTISEITKWGFEKRFEKGIPLFQQQFGYTLHKNTNGSVLTINEREAAVVREVFELFNSGMTKLQIARLLIDKGIKTARGSDVWTDTKVHRILTNHNYTGDKLTREKVSDFIHDVYRKNNGLEKQYLIENSHPAIISRETFQQAQSIMEKRRAKNKPQTKKEKKKEKAMSKRVICGLCNNIYHKHTTAKWACRRKLASEILCTSEDVAEAGLLEMMLAAFQERYDFTNSKVIKMMLHDIKHMNKNDHFEYQRLLFFSELEMVKEYQFNKSINLPIRKREEIEEELQVFEEWATKIEADRNYRNQAIQWMDNVTSVEQFLNEVTIDYMRAWIISIKIFSQDAYIIRWLDQEETQIGNCVVPPMPQEIKEEHDEQSIPSKTPEVPEQTDKGASKLNEQITVIEKDPLRFYQNVKKEIEFYPVKHLEKQKPNQPKIRTAAYARISTEIAHQLGSLETQIAYYTYHILKDSNQSLVKVYADKGVSGTNTEHRKEFQRLIDDCKKGKIDRIITKSISRFGRNTVDVLETVRMLKALKPPVEVVFQKEDIRTLDEDGEVMLTIYSGLAQEESRNLAESVAWGKRRLAERGKFNTKYERYGYKYDEEGNWLIHPKEGDVIRRIYKEFLTGKSTNQIAKELSEDGIVTARGKNKWHHRSIDCMITNPIYAGDLVFQRFYVEDTLTGKNLKNNGELPQYVTQNHHPAIVSREDWEAAQRIMDNRSNKKGKSTKPHTRQEFFNLFTCSECGAPIIHIRCSSDGSHYWRCRTAEKKYTEVTCDVRGFREESIEHRFMVLLQEMKMTEGYKDKIKQAFRNTVSDKNERKRIEQVKDDMQQLYQQLYDEVDEGELHGGDPNKIKAITDQIVELQTQVYDFEDK

SEQ ID NO: 2256 - protein, 557 aa, unidentified
  source 1..557: note = uncultivated organism
MSKTLFRCAIYTRKSTEEGLDQAFNSLDAQREACAVYIRSQGGLGWKLISKRYDDGGVSGGTMDRPALRALLEDIKQKSIDTVVVYKIDRLTRSLMDFSKIVEVFDSHEVSFVSVTQQFNTTTSMGRLTLNVLLSFAQFEREVTSERIRDKIAASRKKGMWMGGPVPIGYRTEDKRLLIETSEASTVQQLFALYLEINSVPRLKERLDELGWVTPRRERRDGRSGGKSFSIGHLYWILSNPLYAGDVHHGGQSWPGQHEPIVTRELWDAVQQRLADNEVKAKRTGRTTLLTGILFDETGDRLSPSHAMKAGRRYRYYVSRRLVQARRKDETGWRLPAEQLEKTVLAFLTDLLGDERQLAKLIGRRDPVAIRQAFTGAAELAASGPDTLADRREFITSILTKIIVAPQTLSLAISHAGLCGALGIPALNTAETADTVISLPCTLRRRGIESRLVIAGDKQSNTTDAKLVKTIAKAHDWMDRLVSGKETSVVFIARKEQLEDGEVSRVLPLAFLAPDVVEGILLGRQPVELTSRSLKRLKPLPLSWSDQRRLLGFPSLR

SEQ ID NO: 2257 - protein, 551 aa, unidentified
  source 1..551: note = uncultivated organism
MKPSRCAVYTRKSSEEGLEQSFNSLHAQREACEAYILSQKHEGWHALSANYDDGGFSGGNMERPGLKKLLEDIAEGKIDTVVVYKVDRLTRSLADFAKIVETFDGKGVSFVSVTQQFNTTTSMGRLTLNVLLSFAQFEREVTGERIRDKVAASKKKGMWMGGIVPLGYDHKDRQLHINEVEAEQVGHIFEQYIRLGSVFDLHDYLKDNGYRSKRRTTTAGRNIGGAVLSRGTLYHLLSNPVYIGKTRHGDKLYEGRHEAIIDVKTWEQAAELLASNRVRRRTSHNIASGRLLLGVLFDEQGNRFTPTHSSKRGRRYSYYTSKAANRSSATVQRLPAIEFEQLVAGRIRELLSNQLDLAKRFNSLSIKETRLLVAAGQHRAELLSDVTSKESAKLIRQIVSRVVVRETEIDVEMRGDLLQCELLGDRSNVGVTSETFRLAVPLTIKRRGSEVRLVLENGEPNQAKVISSLTKAVAWSRHWADQIVRGKLVTMEDLAKSAGVSKIHARRMLRCAALSPALTEQILEGRQPVDLTFDRLTRNLPLEWGKQNLAS

SEQ ID NO: 2258 - protein, 548 aa, unidentified
  source 1..548: note = uncultivated organism
MLHIYRRVSTDVQGEEGFGLELQYDTGLKVAEQLGFETRLWDEGSQSSTKNDLSNRPVLTELLNEVGEGNVKHLYVYNQNRLSRNRTTWYSIGSKLVDNDIKLYEGLNPVPRDLSKSEDAFVFDLMRSISVLEQEQRMSRLNAGKFQRVKRGMWQGGPTPFGYDVDDKGYLKRNRYEAKWINLIFEKYVEGMSVTNISKELFKEGVRTRRGNLMWSTASLRNIISSNNHYQGWYEYKHGETGDVERVECDRIVGQRLFNKARKLFGDRSYNAKGRISDTNLKHPTLLKDHLSCGYCGTAYGQKVYRIQYRNNYYCRSKEKNYKIIDPSEKIVCKDRLQSIKIDVADKIVWDAVVDTISQSHLFKEQTKKEVLGSNTFKLSSDQIKKIKRDVKKKQKDLKEVRDLIVREKAMKSIGSKANPERKQIRQVWEEQQEIVVEQLSQLENRLLNAEANKKWVDWVGEFDNRIERLKNGEISFDEKKVFLNQFIDRIEVTNDEIGKHQLKIKFKLPYVNDGFEYKDQNNKSKGYDILNGDKDLLVVGVSESKKK

SEQ ID NO: 2259 - protein, 526 aa, unidentified
  source 1..526: note = uncultivated organism
MGKRDDTTPTLRCAIYTRKSTEDGLEQEFNSLDAQREAGEAYIKSQQHEGWVCLPTRYDDGGFTGGNMERPALKRLLADIEAGKVDCIVVYKVDRLSRSLIDFSKIMDVLERHRVSFVSVTQQFNTSTSMGRLMLNVLLSFAQFEREMISERTRDKIAATRRKGKWSGGMPMLGYDVVTSAGGSRLQVNDDEAARVREIFQLYLERLSLIDVVRELDARGWTTKRWITRKGHERGGKPFNKNSLYKLLTNRIYLGKITYKDEVHEGEHAAIVDADLFERVQRLLKRNGRSGAPYVRNRFGAVLKGLVRCVPCECGMVPTHSTRTTASGGCRRYRYYVCQNAQSRGWHNCPSPSVPAPELERFVVEQIKAIGKDTNLLDETLEESRRQREVAIDKLEVEKRTLERELHRHNAELRVLAAKGKSNGVTTDRMADIQDRIMITEQRATEVREQIVALSRELVDAREVGEVCSLFDPIWDTLTTREQARILHLLIERIDYDGTNSTVSITFHPSGIKTLADEFAMQEATA

SEQ ID NO: 2260 - protein, 507 aa, unidentified
  source 1..507: note = uncultivated organism
MERYLMYLRKSRMDTDFDEVSVEETLNRHRRILESFCKERRLNVVEVLEEVVSGESLSSRPKMLRLLELVNTGMYAGVICIDIERLSRGSSLESGYIMQVLQTNNCKIITPSKIYDLQNESDEQFTDMKFMFSRYELKTITKRLVRGRNQSASEGKFLGSVAPYGYRIYKLAGVKGNSLKIESSEAKIVQMIFDMYGKQGIGYNTIAYQLNEMHIPSQTGTWGQTSITNILNNEVYLGMIRWKHEPTKRIVKDGMLAKKRVVSKDYELYEGLHEPIISQEQWDMVKSKQQERNHSSVNSNRQLTNPFATILFCEKCGAVMKRNVSSKKQKTSPWYRCPTRGCDCRAIKCDFAEESILKAMKAWLAEYTVNIETEKTIQVDPVETALKVVREQFAETQLRQDKICEYLEKGVYTVEMFTKRNDTLTREMRKLQASEADLLKKQSSQSDIKNAEAEIIPTTQRILDSYSRLSVPEKNSLWKIVMEKITMYRTPDGEFSMHIYPKLPMKN

SEQ ID NO: 2261 - protein, 509 aa, unidentified
  source 1..509: note = uncultivated organism
MAIVFYARKSVERINSISLETQIEYCKSALKPEERNEKTVTIIDNGFSGGNVDRDGFQKMMKLVRQNKVSKVVVYKLDRISRSLSDFVNILQEFKEHNVEFVSSQEAFDTSSPYGELIVKILMVFAEFERTSTINRVTQAYAHRSEMGFYMGGRKPYGFELEPTVIHNIKTKKLNPIPSEAEQIKYIFEVYAQENVSLRRLLDILVAEDKKPLDGSNWSTSKLSSILRNPIYVKADSDVYDYYERHGVQMITDVSMFTGEYGAQLYGRSKHNPDSADWSDMKLVLLSHFGVVDSLIWLKCQRKLEKNKQIGNSASNRTSWLSGKVVCEKCGHTMTTIKGKINKEGEIRRYFNCTGKSHQRICTGTKVTIYAEDLENMVYDCISEKLADLKNTRHTVVKTNAAELNDLKLKIRAIEKSEKQLMDTILTGGFNDDLLKIANQKATQLKNDKQILYKQMEEINDNGEDTDIVINLAHSWRSADYNCKKSVAMIMIHKIIISEDGNAQIIWNI

SEQ ID NO: 2262 - protein, 541 aa, unidentified
  source 1..541: note = uncultivated organism
MAVTTRRVVREIPRAAILHIDAKEVLRMVVVAYARVSTEKEEQEDSFERQVSYYTTLINSKKEWKFGGIYADPGITGTRAEKRPDFLRMIADCRAGKINKILVKSISRFARNTVDALNYIRELKELGISIFFENENIDTLTPGGEVLITILAAMAEQESRTMSTNIKWSYQKKFKNGEVTLNTSQMWGYIKTGRKDEEGKEIYEINEEEAAIVRRIYREYLSGLTAARICRGLEDDGILTKTGKKKWQTSVIRSILSNEKYTGNAILGKTFKPDVLSKKRQKNMGQVPMYYAEGTHPAIIDQETFELVKAELERRKDEKAEAVGSSRYSSKYPFSGLLVCGECGHKLRRHVRRVGSGKMVPAWGCSNRISNGRAACDSHHVNEETLQRTYTAAVQEMITDAEEVIQLVRDSAGLVMEPENKAELAQVEQAIIDLQAAVMELHKAKQKRGISASEYAEKIREYSLRMEELETQQEELQTTENRHNQIKVWLDNFARHIQSGEIMNTDDSQIMKQLVEQIIVGADSMEIQFKCGVIVKQKYVK

SEQ ID NO: 2263 - protein, 566 aa, unidentified
  source 1..566: note = uncultivated organism
MKKVRMLLRVSSNQQLEADGDLSVQRELVKDYVKEHNDWELDSKEYFEGSNSGYKNSVADRNVLQEALQDAQAKEYDILVAYKDDRIGRRMWEIGAYVMTLKNAGVDIYTVKDGCISPETNDMMGQMMLALRYGNAQKQSADTGMRVKDTAQKLVQQGKFMGGKAPFGYRLELSGNISKHGRALHHLVIVPEEAEIVRYIYDLSLNKEYGSTKIAKVLNKHKIYKNHAPNDVWKSGTITSILTNPIYAGHTAYKRRERINGQYHRLDSEEWITSFEPNENITIIDGDTWNKTQERRKRRGDKYIKTLEHKNVNVIRKNDGMLALIDVLYCGYCGSKMTNGSKYNYWTIKDTGEKRASKIAVYKCQTAWQGVPHDKTKQIRADIIEPIVFESIAKYIGKLQENEDVFNEIENNQNQEKKRKHAELKKEQQSLENIQKKIKIMESKIPDAMTGDYPLSLEELVSIIKNHKEQAQQQQEVITEKELELKNTSVSLNEWEDIRNKIPTWQEVFLNADVATKRVLVNKLVERIDVKKTEVVIRFKINLNDFIPQPRICGDSPTIQYRRGLV

SEQ ID NO: 2264 - protein, 582 aa, unidentified
  source 1..582: note = uncultivated organism
MTAAIYSRKSKFTGKGESVENQIQLCKEHGMKYLGIAEKDFIIYEDEGFSGRNINRPQFQKLLRDAKTNKFNILICYRLDRISRNVSDFSQLIKDLNKYSVNFVSIREQFDTTTPMGRAMMYIASVFSQLERETIAERIKDNMMQLAKTGRWLGGITPTGYKSEAVTSIDANGKERKMFKLASIPEELNLVKLIYDKYVSLKSITQVEKYVIENNISTKNGLDFHRYSIRFILSNPVYAIADKVLYNYLVENGYDVCSDSEEFNGINGLTGYNKTKQDSENHSDRYRDSSEWILAVGLHTGIITSAMWIETQGLLAQNKSKAYRKVKSSQSLLSGTLRCSCCGSYMRPKLVQRNNADGEQVFYYMCEMKEKSRKSRCNIANINGNTIDNSVLKELKNIAAKNSPVFEEIFNKKVLVESTKDVLQSEIDTLQTKIAELDFAIQNLVNAIAKGQKDDVLTIIFNSMEELTREKENIKRRLSKLQNVEKIAEFNGLNLELVAQTLGTLNDSAWDLMDVDAKRRMIKSVVDKIVWDGKKLDMMLFGSKCIEMPEMELSTLPESLNEGDMFPQCEDSKRDIDDHPFF

SEQ ID NO: 2265 - protein, 563 aa, unidentified
  source 1..563: note = uncultivated organism
MEHAKSRTRRCAIYTRKSSEEGLEQDFNSLHAQREACEAFIKSQTGEGWRFVKTAYDDGGLSGGTMERPALQRLLEDIRRRLVDVVVVYKVDRLTRSLADFAKMVEVFDAHGVSFVSITQQFNTTTSMGRLTLNVLLSFAQFEREVTGERIRDKIAASKRKGMWMGGVTPLGYDIRERRLVVNRAEATTVKHIYERYLELGSVRLLRGDLERRRIISKVRVSKNGVRSGGRQFSRGALYELLSNPIYLGEIRHKKERHPGQHKPIVGRELWEKVQRHLRDQAATHRKRPTKAPPSPLAGKLFDENSEPLYVQGAVKGARHYRYYVSRDLVRGSAEYTDRRGWRVAAPELERAVGAATRQILGDRVAIAGAIEELNIDASQLPSIFKAAEAWIQSLRSEAEAASVLTRLIEGVGLKQDGIQVSIKLPIPSDEGRDVATPKELALARFVPMRMKRRGVEMRLIIDGDAGPAARIDLPLLKATARAYRWSNDLISGQVRSIGEIAKRERLTGRYVRRVMRLAFLAPRIVEAIAEGRQPADLTTLAMTQRIDLPPLWSAQERALDVR

SEQ ID NO: 2266 - protein, 547 aa, unidentified
  source 1..547: note = uncultivated organism
MKTTEENIKRVALYLRVSTVEQSKKFGIPAQKKDLLREVKHRAETQGWKTRPEWIYVDEGISGSHLDRPEFKRMMEDVKQRKFDVVAVWRIDRLSRTLTNLLEIFERLDENKVEFFSYKENFDMSGPIGKLVFQIFGALAEFERKNIFMRTSEGKKTAASLGYYPGSGIPYGYRSLKKENERGSKLVIVPKEAKMVRQIFDWFIAERKYYAQIARDLNDLKIRKGVAGKKSNKNTEWDGDAVKRILQNRSYTGIYLYGGKDEDEKPIEVEIPRIISDFKYEQAQRKIEEVYTQKKNRGRKGKEYLLSKKIFDVSTGFPLKPYYVTKTKKLSYKRQKWTNPKTGEEFLHIEIPGKALEEFVWEHVKLAIQKPKRFFKLYQKQTSKFRKLESLKKRRELYLENIEEQQSIMVKVDYDMYTDHIDEKERDRRTQQASEVIRAANKNLEAIEKEIDQLVEVQMAKKALESFAQNFEENVDKLTFKQKKVLVDMLIKRIEVEKTSDSTNVTVIFEFDHPSESEDIELFELKKNLNKPKKAPNRGDSLVDGGR

SEQ ID NO: 2267 - protein, 641 aa, unidentified
  source 1..641: note = uncultivated organism
MEEEKKKICGLYMRVSTDDQVREGFSLPEQRKRLEGFCDYKGYEIKDYYEDAGISAKTGNKRPEFDRLMEDLKQGRINTIIALKLDRISRSIYDWENIMKTLEKYNGDLICVNDDINTVTANGKMISRIMMSVSQNEIERTSERTKIGMAGAIKQGHIPNQAPLGYKHENKKLVIDYTTKDIVIRIFNLYHSGYSYKKISNLFNSEKILNRTNWRDSTIYTILQNEIYKGDFVHGKRTKHPTYYNDVVEPIISKELWEECQVQKKKNSRSFQRTLTYIYMQKVKCPKCKRILGGKATTKKNGNSYFYYYCNDCKISIKESIIENHLCNFIDEIIEYDSVVNQFFLPMIKNKFENPKEELQKQLNEQRIKFDRIKKAYINGTFTLDEYEQERKVIENNIKDLEIKIDESDVCDSLKFSPEDILVKRDIDYINKIYYPDKYEEYNKPWKDYTREEKAKIIMSYVDEITLKQNDKDIEVDFIKFRETLFKPFDELFENGYVDRTQPALFGNTLGRIRYSEYLPDDKLSEHILRLRQFYDVHYSEATYNTKNKIFYFNLLDEDTTIVRIFPLKDYKNIDPNVELEEYELGIIYVYTDDKSLIKNKDDIFKYIPDKCEQNIVYTKNPKPIEIKVKPAMYEKGEQND

SEQ ID NO: 2268 - protein, 508 aa, unidentified
  source 1..508: note = uncultivated organism
MQRTVLKGADIIVAIYARQSVDRADSISIEQQIELCQYEARGETFRTYIDRGYSGKDTNRPEFAQMMNDIRLGEINTVIVYKLDRISRSILDFSAMIEMFGKYGVQFVSATEKFDTSSPMGNAMLNICIVFAQLERETIQKRVADAYFSRSRKSFYMGGAIPYGFRKVPTVIDGVHTSMYEPIPDEEKVVRMIFEMYSQPHISYGDIIDRMNELGIKKRGKDWVRQRIRELVLNPIYVKADHDVYDFFKERGAELADPPSDYMGVNGCYCYKKRSDKKKKLSDIEGQQIVLAPHKGIVDSGVWLKCRKKCMGREQIIPLQKARNSWLCGKIKCGACGYALTAKQFDNGRRRYLICSNRLGTKCCKGAGTLYTDAVEKLVGDEINERLAKFGKLSPTEKCTSDSELAILENELAETEKEINGLLGKVSSADNVFFQYINDRIALLDSRKNEINQRVKKLGVKRCSPDCSIDCHQIMWDELSFDDKRQVADILIRVVYATSEKIIIQWRI

SEQ ID NO: 2269 - protein, 564 aa, unidentified
  source 1..564: note = uncultivated organism
MRRNEGAIAIYSRKSKFTGKGESIGNQVELCKQYVRDVFGQSDVDRCVVFEDEGFSGGNLQRPDFKRMMDEVRKQKYKAIVVYRLDRISRNINDFTGLIDELTRLDVSFVSIKEQFDTSTPMGRAMMFIISVFSQLERETIAERIRDNMHELAKSGRWLGGNTPTGFKSGSVSKITIDGKERKSYKLIPMPEEIEIPKMIFDLYMETDSLTAVEAELLRQRIKTKKGKDFTRFAIKAILQNPVYMVADEDAYNYFAQREAEVCFPREAFDGSCGIMAYNRTNQEKGRTTQLLPVSQWIIAIGRHPGVVPSKQWIKVQESLDRNKSKAYRKPRSNEALLTGLAYCSCGERMYPKLSQRTAASGEIIYTYVCKMKERSKRELCNRRNANGNILDAAIIEQIKSLTDHDRSFISQLAKSRELYTGKCEQYEHQLENLRAEYEAKEKTINGLIDSLGMVGDSIAKPRVLKRIEELSNVNRDVKTRIHELEGLINVNALTDAEFDLLRQMLSVFCTGIEDMSIEEKRTAIRTVVRKVIWDGVNAHVVLFGAEEPLEAFADVDYEDFGEK

SEQ ID NO: 2270 - protein, 520 aa, unidentified
  source 1..520: note = uncultivated organism
MKKVTKIAESPSSLKNKKKIRVAAYCRVSTSSDAQLESLDAQKIHYENYINNRDDWKFAGIYYDEGITGTKKEKRPELLRLVDDCKAGKIDFIVTKSISRFSRNTTDCLEIVRDLLALRIPIYFEKENINTGSMESELFLSLLSTLAENESVSIAENIKWSIQKRFETGTFKVCSPPYGYDWDGKQMIVNQGQAAVVKEIFAMLLSGKSTQAIANALNERNVPSKRSRHWTSTTIRNMITNEKYVGDCLFQKTYSDSHFQRHNNRGEMTQYLVKDHHLAIIQREDFEKSQQTIYQRPSARNQGPGSEKYQNHYAFSGKVICGECGGTFKRRIHSSSGHKYVAWCCSTHLLNKDKCHMLFMRDKTLKDAFIIMMNKLICFHQTILAPYLQALKRAPDDDSLKRIQKLHTLITQNSEKRETLAKLLSQGVIGPVIYNKGLNELLSQYDTYQKEMNALKHSISDSMNHVSETTRLLRFAEKSSPLTAFNETLFEQFVDSILIRSRDEICYVLKCGLTLTERRQ

SEQ ID NO: 2271 - protein, 561 aa, unidentified
  source 1..561: note = uncultivated organism
MTDNRKYAIYSRKSKFTGKGESIENQIEICKRALKAQYGVSDDDIVVFEDEGFSGGNTRRPQFQEMMKRCREGEFRLVICYRLDRISRNTADFVKTYDELKENGVGFKSVSDNLDDTSPMGKAMMMISSVFAQLERDIITERITDNMRELAKSGRWLGGNPPTGYKSVKTVGSVTVDGRVHKAQMLEQIPEEIELVRLIFDKFAELGSLTKVETYLLNNSYKTKTGGNFSRFSIKSILQNPVYAKNDADMYRYLSEQGMRIFSPEESFDGKQGIIAYNKTDQQPGKASKNKAPGEWIIAVGKHKGIISGSDFASAQYALQRNKDKSYRKPKSNTALLSGLLFCGDCGSFMRPKLSSRKNKKGERVYDYLCELKEKSRCRKCDMKRINGNDLDEQVIDEIKKLGADSSELMKLLRSSRKDLTESFTDFQSEIDKRLALKKKTEGECANLVNALTLAGESGAADDIIKKLNSLHEHIDRLDMEIAEYSRLIDNGKITDESFESLADMLSSLAKTVDNLNVAQKRDLIRCLVKRIEWDGENVHMFITESDEDMRLLKPLRKDSK

SEQ ID NO: 2272 - protein, 518 aa, unidentified
  source 1..518: note = uncultivated organism
MVIGIYPRKSVYRDNSDSVQVQVQMCQEYAGIVFKGKNLEFRIYDKDEGFSGKNMNRPGFQEMMADVKADILDAIIVYKLDRISRNVREFSEMYEIFQAHNVAFVSVKESFDTSTPMGRTVMYILAAFAQLERENTSERVGDNMRSLGAAGKWTGGLLPAGMSSVRKKIGDKEHSYLIVNENEIGNVKLLFRLMLDGYSITGVERYCRDHGIHSRYGKFLGSSQLYSILTNPVYCQNSMEAYEYFSDRGCHLPDASLFDGKHGLISYGKTRTLKDSQKRQSTDSWTIAVGIHDYVLTSAEWIGVQKRLGVNKMFHTTAKYDVGILKGVLRCRCGSRMDIRTHIKNGIRFSYYYCAAMAQKGKGHCNSKYVRIEKVEEAFLQELKKIRLNPNSIHIRIESDAGGPDMRSLQAELDSVEKSISNLTNALTQAMDSPAAAYIIAQIEKLDQQRRTLYSNLRAAQRRQVEAEACQDTEKIIYDNICYLLDNFDRISYSGKNELIRKTVKKCILDENNLHIIF

SEQ ID NO: 2273 - protein, 549 aa, unidentified
  source 1..549: note = uncultivated organism
MGQLRCAIYTRKSSEDGLEQAFNSLHAQREACAAYVASQKAEGWELLPTQYDDGGISGGTLERPAMQQLLADVDAGQVDQIVVYKIDRLTRSLADFAKIVERLDRAGAAFVSVTQSFNTATSMGRLTLNMLLSFAQFEREVTAERIRDKIAASKRKGLWMGGNEPMGYRANGRTLVTDEAEARVIRKIYSLYRAEGSILAVRARAAELGLHTRSRTARDGRVSGGGPFGRAHLHHILTNPIYAGRIRHRTAIHDGQHPAIIPPAEWEAVQSLLKDGAARPRGKAPTAFAAPLAGKIFDETGDRLTPSHSRKNGHRLRYYISSRLVNDRRSKHPEAWRLPAPELEAGIAGRLRAWLTAPGQASRLVRAPLAGEMARIGTCIDSLVAELDGRHADALLRALIASVRIALGRMVIAVAAEVLAERLQIAPERLDTECLVLEAPFRIRRRGVETRVVLGERPAEIDRVLVRNLMKARGWLTALTRGEAYAEIAARESISKQRVQQLLPLAFLAPDIVQMIAEGRQPLGLTTEWLINADLPIGWDEQRARIARL

SEQ ID NO: 2274 - protein, 543 aa, unidentified
  source 1..543: note = uncultivated organism
MSRTSPPPVRCAIYTRKSTEEGLEQAFNSLDAQREACAAYVMSQQHEGWTLLPDHYDDGGISGGTMDRPAMQRLLDGVREGRVDVIVVYKVDRLTRRLVDFAKIVEVLDEAGASFVSVTQAFNTTNSMGRLTLNVLLSFAQFEREVTGERIRDKIAASKRKGMWMGGPVPIGYDVIDRKLAISPSEAEMVRLIFARYLTSPSIEILAGDLAKLGFRSKQRVTRNGRPFGGTPFRPGGLRHILGNRIYLGEVNHKGQIYPGEHEAIIDRTLWEEVQSRLSGAVKRPRTGNINALAGRIFDADGQRLYSTHGKKAGKRYSYYVSSTRDNRNGWRLPAGDIEALVQQSLANFLSEPDRLNAELGAPGLTDANVSRAAMLAPPSDDSKGLWEALQQLDVRVSVETHELRIELDRSLLAEAMLVATTDALLRDPVTLITPVSLKRRGIELRLVYASPDARPANRDPHLIDLIRRGWAAWKKLSTEQRPANPVERSHLVRMARLRFLAPDITLAIVEGRQPVELTARSLLRCGELPLDWNDQRKALGFA

SEQ ID NO: 2275 - protein, 540 aa, unidentified
  source 1..540: note = uncultivated organism
MDGFRAAAYVRVSRDKSQGGRKGEIISPAQQMVAIQRVLDETGWELSHEEKDIDYSGYRIHYTKRPGLMRLLEAAKNREFQALIVYKIDRIGRTAAEQLEIISTFEGHGCRVISATERFDTRTPSGRLARNLQAPISQFYSEQLSENIRDAKLTMVAEKRRSPGGQPPYGYRWENKRLVPDPGSAPVIKQMFEIALSVGKIQTCQRIWEYLDREGVRPKSGRPWSLDSIRYVLRNPIYIGKQRYLGELYEVDVEPLVSKETWNAVQAIVGKGKSRSTFKRHLLSGFIHCTWEGHLEEGWSPSTAFVYEHQSGHGDNPRYVCRMGRRYPQGRGRCPRPILAREGLEKALVQELMKWVRRQGQKDFSGDIAVKAEIEETTKALEKLGAELSQVSGMINALFEDYHKYRVITREQFAERNAIYLEEQAQIKTEYERLEYRLGLLEANMEAQADAKIALEDSWYHLDFDEKRQVLVLLIKRILVYDDRLTVETYGEPFDIHPTLIYRHCLYFAGQEPRANVGMFTSERNPSKNPELRIKRRKKK

SEQ ID NO: 2276 - protein, 570 aa, unidentified
  source 1..570: note = uncultivated organism
MSSEKINTSSNRVAIYIRVSTSYQVDKDSLPMQRNDLINYCKFILNTEDYVLFEDAGYSGKNTDRPKYQEMMAQVRLGLFSHVLVWKIDRISRNLLDFASMYSELKSLGVIFMSKNEQFDTSTAMGEAMLKIILVFAELERNMTSERVTATMISRANSGQWNGGRVPYGYDYDSKTKTFTLNAEADTVRLIHNKYEELRSLIQLARYLNEMNLRTRAGNLWNPVSLDIILRNVFYSGDYRYNMLKEGDRQKPKDESEWITIKDHHPAIVSHEQKERVINILSSQKRLHIQRGSYTSKNIHVFGGVLVCGQCGSFLNSSTSNSGRKWQYSKYSCPIKRKSRDKCNQPSTSDAYIGEFVFNFILNIMNLHKKWSSKMTLEDIENSLLDGNVFSDIENIYPEDLTAFQEILSNSVENTIIYKDMPARNVDNTSTLASLRSEKQKTERALTRLTDLYLYSADSMSESEFISRKESISDKIEDINNQIGLLSSDSWEQSLSDEQFMSVASEFIISQKLTNRNYVSYKALATTVDASVIKDFVSRVIDNATFFDGCITKLVFKNGLSFHFQPKKDA

SEQ ID NO: 2277 - protein, 542 aa, unidentified
  source 1..542: note = uncultivated organism
MNKTTDTTKITVALYGRVSTDEQVKTGMSLKDQNDTLHKWADLEGWKVAGTYIDEGISGGTDKRPQLQNLMLDARAGRFNLVAVTKLDRFFRNTRLLLNCIEELKQDGVSFVAKSEGIDTRKSGIGDVILALLGAIAEWERERIGERITNARAYRKNMNQWSAGRTVYGYRFNKVNKTLEICEPEAESIRYAFNEFTKSKPIGVNKLAEIMNKSNHMPPRAFRKNQKCICWTYGTALHVIKHPAYMGGPNDKYPYTAPAIITPEIWQAAQSRIASNAHFHPSNGGKTQYQNKLICGICGRRLTIGRNAGEVKVYECRGRKAEQHPDGSPRCTLPRFDAITLDNRISREIAKIKGDPELMIAYLEKYARRMKQDKAEWETRIKPLTAEADTIKENMTILDARVEHKRITVDVYKKRMTELEAKLADIENRTSNLDPVLKESAFVAIEGLKNSIFMAEELAKIWRDLWQILQDNNAPNPDEKRELNELTESLNSEVDKIAPDVSGVLDDAFKDIIIMPDGKIQLKGNITIHNLKVLSAHRQARL

SEQ ID NO: 2278 - protein, 547 aa, unidentified
  source 1..547: note = uncultivated organism
MTETKENKKRIYCAVYCRKSVEERAEETFGSIENQHESILNFIASHKHEGWVPLSERYDDNGFTGSNTNRPSLQKLINDIKEGTVNMVVVYKLDRLSRSLVDFVQILKFFEEHNVAFASITQPIDTSTSTGKLMLHILSSFAEFERELISERTRDKMAAARKRGQWMGGRPPLGYDVAKDSKKLVVNQEDAKLIHEIFDLYLKGNSLLKVAQIINEKGYRSKQAIAKNGRKFGGIRFGITHIRSIIANVLYLGKVCYADQIYDGQQEAIIDEETFKKAQEKMKENSIERKTTKNTDCTGLLSHILHCKTCNKFMFHTYTLKHKTHKYRYYVCTSAQKRGYNSCPTKSVNAQAIEDATIDCLKRTFIDNRKKGNHPNKQEVEAILSPIWDTLYPEEKRRILKSLVKEVDYDSNNKKLGVMLNGSDTRLEFEVDLKQVRPLNKWHKEKEIEKEPKIRCNLILAHQLQKLIDEDKVTGPKQAAEWLNMIEVRINQIMNMLFLSPVIQEEILCSDNKALSLIPEYKLRPVTNEADWKKQNQMWQSLLKIPA

SEQ ID NO: 2279 - protein, 538 aa, unidentified
  source 1..538: note = uncultivated organism
MKCACYLRVSTDEQAQEGYSLEVQEENLKKFAENSGWEVVKIYSDDKSGYSINRPALNQLFADAKLSKFDMVLVYKTDRFSRKLKDLLNLVDDLDSYNIAFKSVTEPFDTTTSSGKLMFQQLGSFAEFERNRIVERVLPGMRKSAEKGNWQGGKPPYGYQYNKEKKMLEIHKEEAKLVQRIYKMYLENKSITCIAGYFYEHGYKTRCGGKFYPSLVCDILKNKIYLGKIEWARYTFDEVERKKTGKRKVIKNDPANILIFEGKHEALISEEDYDFVQKKLAANRRGQLHRNRNAGYPLTGLLYCGKCNHRFRGASQLSSRKTKEKKRYYRCCGKVEHDIDCKNFSFKAEYIEPQIFAIIRMIVEHPKLQNARVEGLTRFNEYSNNTDLEVEAKNLKDKLRKNLKKQKQLWRSHSEGCMTYEVYKNESIDVRAEEQRINSDLAKLDMKTIEKERSEEYELRLKKVVSEFKRTCDKMDLMLTKEFLQLIFKRIVVKDRRIVELVVYEPFDTFLGEMNFKASSFFSEEQESHADRSDGRTV

SEQ ID NO: 2280 - protein, 505 aa, unidentified
  source 1..505: note = uncultivated organism
MAEQKIGLYLRLSRDDERVGESMSIENQRSYLTQYIRNRGWRVTDIYSDDGYSGTNFDRPNFQRLLRDIEAEQIDTVITKDLSRLGRDQIGTAYYYQIYFPQHQVRYIAVAEGFDTSEPGATSALFPFLTAANDFYTADISRKVRTALSTRKKEGKFIGSSPPLGYQKDPAEKGHLIVEEQGAEIVQRIFQMYLSIGSIMGVAKALTEQGVPTPSQSKMGGIMQNRFPGVWSDTMVRRILTNPTYAGHLTQNRRQKLNYKLDQRINLPREAWIVVRDTHEPLVTQAEFDRVQEMVAVRSYTSDDDTSGHLLTGLAYCADCGSPMTYVKESETRTYMVCQGYRKGGRLHLCTSHSIREDAVIGTLQKELQNLARQLDKETLQNAVCSQTISRSPERQLKTAQQKLEQRNTALDQLYQDRSSGILTEEEFRTLLNQNRAEREKWKKLCEQIENVDRQKRAQQNLAAQLRYFLSFDTIDRVTAVSLIERVLIHEDKTIELIFRFRKPD

SEQ ID NO: 2281 - protein, 522 aa, unidentified
  source 1..522: note = uncultivated organism
MDYRHFPYDKLHTLTIDEILIYLRKSRQDDPNETVEEVLHRHEGDLQRYAERVWGARIPEENIYREVVSGETIDDRPEMQKLLGRVQDNKTRAVLVIEPQRLTRGDMLDCGTVVHALRYTNTLCVTPTRFYDLDDKYSRREFEEELKRGGDFLEYISEILDRGRRISASMGYWVSPQYPYGYNRIKLENKRYTLEPNENAAHVRMIFEDYAAGEGVFRIAEKLSDMGVPTPSGKGKYWADKTVRQILKNDAYIGIVTYGEVKTIKTYKDGRLQKVRIKAPEDQIIKAKGLHDPIIPVDLWERVQALLGKTSRAKADVNRIDPLAGLLYCQKCGYAMGRHVTTDATRKKRVRYLCRQRKRCAVKSIYEDELFGAIIEVLRGNVAEIREKVSSGAHSGREIKEAQLTALLEKMEALEEKEDYLYDLLEKKEYTPEVFNRRRAKLVKDMDATRAAIEKAREEMPEAIDYRDAIIRLHDAIDALDNEEITVTERNIVLKSIISKIVYDRDKGGMNNPFKLEVHLKL

SEQ ID NO: 2282 - protein, 568 aa, unidentified
  source 1..568: note = uncultivated organism
MTGRRVRCAIYTRKSHEEGLDQDFNSLDAQREACEAYIASQAREGWRLVRTRYDDGGYSGGTMERPALTRLLADLKAGKVDVVVVYKVDRLTRALADFVRIVERFDAHGVSFVSITQQFNTTTSMGRLTLNMLLSFAQFEREVTGERIRDKIAASKRKGLWMGGVVPLGYDVIDRKLVVNAAEAKTVRTLLRLYLEEGTVDRVQQAAHRLGLRTKARRPNNGARPGGAAFTRGHLHKLLANPLYVGDITHKGQRYAGAHEAIVDRETWEAVQAQLARHAAQRHHPWNERGARLLTGLLYDGRGRPMKPAHATKAGRRYRYYITRPADDAETCTEAAWRLPAPALEQAVVRGLGEILQDQRRLSDPFDFAGASPERLKAVLSNAARLAERLVRGAPVEQAGIVRELIERIDLGSGLMRIALRAKVLGTPIGVAPDGLAGQGHEPGDAIVPFDVAIQLRRRGVETRLVIARDPSPARKPDPRLVAAVARGHNWFADLRDRKVASVLGLAERHRMHHRDVSRILPLGLLAPDIVEAILAGSQPTDLTVSRLKRLSDLPVSWDQQRRLLGFD

SEQ ID NO: 2283 - protein, 549 aa, unidentified
  source 1..549: note = uncultivated organism
MRQPGRRTIRCAVYTRKSSDEGLDQAFNSLDAQREACESYISSQRHEGWKLIPAYYDDGGLSGGNLDRPALQRLLEDIADGKVDLVVVYKIDRLTRSLADFARLVDRFDAANCSFVSVTQSFNTSTSMGRLTLNVLLSFAQFEREVTAERIRDKITASKKKGYWMGGLLPLGYDRHPDPKMQTLVINKAEAETVREIFRLYDQHGCLRQVEQEVIRRGYRSKRRTLSDGKVTGSKPLSRGQINFILRNPVYIGRIRHKQESHEGLHEAIVNQDLWERVQEQLDRKSPGKCRSRSRSGALLTGRIFDETGDFLTPTHSQKGSRRYRYYVSGRLLAGSPTDASGWRLPAKQLEDAVRETVFRYIDNDVSRVLSCPTPPLLESLKNSLGKLSRNTAADLVERVQVSVGQLDITLSANAIAEWFGVAEEEIDRSHLQLEAPFEVRRRGKESRLVFGAIHAAPDPKLIRMIALAHSWLEEIKSGTLMKDIAARYGWQTLMVRQRIQLAFLSPAIVGAILEGKQPEGLTLTQLVTSDIPLEWDEQWTALGFKAAP

SEQ ID NO: 2284 - protein, 513 aa, unidentified
  source 1..513: note = uncultivated organism
MREVIVINPNAAPLHDKIRTAAYCRVSSDSDEQLASFSAQVSEYTARIQKNPDWVMVDIYADEGISGVSAAKRPEFQRMMTDCRRKKVDRILTKSISRFARNVKECIEYIRELQSLGVTIEFEKEGIDTAFLSGEMMIAVFGSLAQEESKSISSNMSQSYEMRMKKGEFVTCHAPFGYRLDRCSLIIDDNKADIVRFIFNSYINGMSTRDIADSLNTQQISNHGNIWRSRTISIILQNEKYIGDAHNRKSQDRINNDAFGLRPTKTEYYIENSHPAIIDRSTFEKAAAIIERRTTSAIGQRKKNPSVLAGRMQCGVCKSTMRRKITRSGHVSWSCQKHDQKKENCELLPISDAIVITAAHNMITLLAATYNNILLPMETQLSQLRNIKLSHDISISEQNNGIANIAGQLHVLSRLKSKDLIDDESYFNQISELKRKLVSLQEQRQLTIQERQADDSIEQTQTIIETLQNMPDDPANIEDGGIFESIVEKVIIGQDRSITFRLINGLELGGFHG

SEQ ID NO: 2285 - protein, 551 aa, unidentified
  source 1..551: note = uncultivated organism
MKTLHIYTRVSTDQQVVDGFGLENQKQVGLRLSEKLGFEPVVHNEGSKSSHNDDITTRPVLTEIMDQIEQGKIKNLYVFNTDRLSRNQQVWNFIRLKLTSNKVTLYVSEGTKYQLDDPMDDFILGIMSEVSRYDNSLRTSRLRLGKLSHVKTGGWKGGSPPFGYKLVKGELVPETKEKRWVKNIYEDYANGKSIYNIRKRLMTNGVTSRRGNVLWNDQSIKKILQNTHYEGYWFYNDRDKDDKNKILETVRVECPRILSSKVVKTVRDRLNNLKQTGNRTKTETLLRGYLFCLHCGSPHGTRINPKQSHKNYYCRGNEIHKSRDNLSKERFCKIEDGRVRSLDIDSTDNLVWETILDVIGNSVLFKETFKKDLFKKSSFELSTQEITKLKNQIKTIEKKIKEAIDGKNSLVVAGIIDKSELKPILIKFEDETRKLRVQKEELLDKIEMKTRNRKWVDWVKEFGDEIDDLKKSDSTMDKKRRFLEGVLDNIIVETTSKQTHQLHIRFTNRYVDDNIIFNSDRKSDGYKIVKGNNETSVTFESVDRRKKKQTM

SEQ ID NO: 2286 - protein, 557 aa, unidentified
  source 1..557: note = uncultivated organism
MAEKLLRCAVYTRKSTEDGLEQEFNSLDAQYEACATYALSQRHEGWTLVPDRFDDGGFSGGNMQRPGMQRLMAAVAAGQVDIILVYKIDRLTRSLADFAKIVEVLDKAGASFVSITQSFNTTTSMGRLTLNMLLSFAQFEREVTGERIRDKIAASKRKGMWMGGPVPLGYLVENRKLVVEEQEAELVRHIYSRYLDLSSVVELADELNRQGYRTKIQQRASGPHRGGCEFRRGTLYHLLSNRIYRGQMVHKGEHFAGEHPAIVPQDLWDRVQDKLKGNASGTSRRLRGQQPSLLVGMVWDGEARAMTPSHATKVGRRYRYYVTRPDQLDGSPAWRVSAHDLEKLVCERLSMLLTDRQALCDMAAGQPTDVIHQVLARADVMAATLRSAPARERALILPAIIQRIDLREDCIELTMDQAGLGAALGQELSHQHAPMVLLVAATKVRHGHQLRLVIPGPQSLTIAPTGRDEKLVALLADAHQARKLILAHPGQSIAATASLHSRCRTRLGKLAGLACLAPDIVTAIVEGRQPATLTARTLQDIALPLVWDQQRALLGFS

SEQ ID NO: 2287 - protein, 525 aa, unidentified
  source 1..525: note = uncultivated organism
MDTGVIYARFSSQSQNEQSIEAQVRICKEFAENKGINIVNVYSDKARTGTNDARPAFQRMIKDAKSGAFQFIVVYMFDRFARNRRDSIMYKEMLKDEGIKVLSALEPIADDEGGEFYEMFLEWNAKKYSKRLSKRVKDGIDTSIANGHFCGGTVIYGYKLVNEPIPGKPNKFIKKVVIDEEEAKVIRLVFDYYKTGYTKKEIAQMLNEQGYRMRGKKIANRTFDKYIVNPKYTGEFTFGGRVCNNMYPAIIDKETFNAVQEKLLKNKHYLGGQETAKVPYLLTGKLFCGHCGAEMVADGGTSETGVQHHYYTCKRRRKKECDKKRENKDKLELYVTTCVRDFLSNPQNVDIAVDDVLAYYDQRTDEQNLKSVNAKIAQVHKEVVQLADAFVKAKNALLQNSIEEKMSEYEVLLNDLEMQKAQLELERGYRLTKQDLLTFIQEILKGDINDKDYQKQIIDHLVSQVFVSDDDTVVYFNIRGGKDIETLTIDDTKEAVKKVQTQSPIASQTKRTGFCLFFLFYLRSG

SEQ ID NO: 2288 - protein, 708 aa, unidentified
  source 1..708: note = uncultivated organism
MDDIQELFSYRKKRQGKVNSETKINTKKKKDVYGVLIRVSTDRQAEEGDSIQMQQERAMEIIKQNNGVLHKYYIEEGISASKNRIEDRPQLQALLEDVEAGIVNKIIAYKRDRLTRITQDWLRILETCAKNQCDIIFSSSGEAQLFNDPVYGKVFESILASIAEMESANTSMRVRDTMASVAAKGEWTGGVLPYGYKKNEHGQIELIKECVPIIKEIEDLYLAGYGIYSIAKWLNGGEVNNLGKRPEGAAPKITFYKNNVSHWTPTVVETILFNPFYAGIIEYSIEGLRYKQKDDDKIIRVKGDFEPCRTIERQKQIYQMRERKSMSPPRAYNTTFLLTGLVYCGICGSPYQSRNSTKNGKRYSYYVCASKHNKDRNVVYRYCNNVTYKKEILEACLIDEIKKRLNNLDMLQIEEKIKNGLLKGKDNIKNQLVIIEKELQELEKEESSLLKLMKRLDENNPNYDLLLQRYEEDYAEILKKINDLKKAKFELEQKNNEHIEEYEMRKKIIERISSFSKTINRSPDYLKKSLLSEIIERIDIYPDGKTEVTFAINIETSELDTSKSETLEDTNNDSSDDEFIIYDIRGERSKAKIIKTIEFKLTMPTIITINIYEWKQKINEQFKRYFPLWLKKVMGEGRFKALCFEEDTGLTNSHFYHFIKGIHIPTEKTFDRIAEAYNTSYEDFAKFAKLEDIKKEVLFDRTLRHEKT

SEQ ID NO: 2289 - protein, 527 aa, unidentified
  source 1..527: note = uncultivated organism
MDKAAKKLLRCAIYTRKSTEHNLDLEFNSLDAQREACEAYVTSQAHEGWRLVHGRYDDGAFSGASLDRPALQNLLSEIKASKIDVIVVYKVDRLTRSLTDFAKLVELFDQHSISFVSVTQSFNTTSSMGRLTLNVLLSFAQFEREVIGERVRDKIAASKAKGIWVGGSVPLGYASVNKKLVVVPKEAETVRLIFRRYLELGSIRDLAENLDLEEIRTRRQSLASGQTRGGIRFGVGPLAYLLRNRFYVGEVIYRGTIHLGEQEPILDRPLFDAVQSKLAASATDRQLKLRSSLSLLTGRIFDDRGNRMTPTHTNKQGARYRYYVSHAVLQKRSNEAGAVTRVSAPDVETLVVRATREHLQSHDSDSRPAPGDRELIEQNVAQVVIMRRVIEIHLVCDRRRPADGVSVEMIEVPFVSTPNTAAKGVVYSPSTVQLKNNGSRDALLIAIAKARAWIDDIVESRVSSFAEIAKREGKVERHIRLLAPLAFISPKLIESIIKGTVSSFQVTALARKMPLSWAGQSNPLSQR

SEQ ID NO: 2290 - protein, 509 aa, unidentified
  source 1..509: note = uncultivated organism
MTRVCLYTRISTDEENQPTSLASQHERLETFCKVQEDWRIIAHHEDRATGTKLDRPGLQAALDLARQGRIDQLLVYRIDRLSRKVRQLASIAEELDTLNVILRSATEPFDTGSAAGRMMLQMLGVFAEFEHATIVDRVTSGIERRAREGRWPNGRIPFGYARNENKELIPDERTAPVIRRVFTWYAGGRMGAAAIARRLADEHAPAPPRGWQPAVVLWILANEAYVGRVHWRDQTFPGLHEPLIDQATFDLAQALLKERGRDWTHRAARAEFLLSGLLRCGRCRRAYVGMSAKGNGGTYHYYACSGRQKLGRKGCDGERLSKDKLETAILDQLTSLYRHGGLIRDAIQQAAASNETDRDALTEQRASLAKEISRIERAIERYQDAFEAGNLNPTRFTERLSSLDTRLDSLRGQDQTLARDLAADTPTTPDTAALNAVADQLGHVIETGDPDRAKALLRILIAELRVNSRNEILPTYRVGAPVVCAQTSSVELVGLEPTTSCMPCRRSSS

SEQ ID NO: 2291 - protein, 711 aa, unidentified
  source 1..711: note = uncultivated organism
MRNISTASSTFSVEEQSQIIKPKRAAIYIRCSSDEAKKEGYSPETQREKVQQNINENGWQIDNNHIYSDIGFSGSTDNRPGLQQLLQDARNKEFDVIVVYRMDRFFRNLRLLLNTVGELRDLGIEFKSVTEPFDTSTPTGRAMFANVGVFAEWMREIGLESRDEGMIKAMKAGKWLGGTPPYGYKFNKNTQKLEIDKEEVPVIKMIYKWQVDDKLSEYKIQKKINSMGIPTKFDRLGRRKKTGSKNWWNRRAIGRILRNEIYTGTLYYRKQKHPARVKSENNLRPKEEWIKVEDKNLQIISPKIFEKAQQQLIKNKELSSRNTKQVYVLQHKIICGLDGYHYQCATRYYHSKKTGDSRETKYYFCTGNRSYFSPKKCPAPTISESRILPPVWDKLKEILTNPEVIMKELEDYFKQKGKKNQIQQKLNSIENALNSFKIKRERYAELYAEGSITKDFYDKKIQECEREIQGLQKENEKLSYLLLTEEERRKKIKSVKELYLQLKESLESAAYEVKVEVLQRLVEKIVKTDNKLDIELNIPFDESYLKPTSKSLTDNRRIYCRHNNTKTFKIFVSTLIPPQEEIHRKAKIYRNFYDKNGNPKSKSRHKIEGRYTLTYHRNKIIDDEVKKKFDAIKKHLKNANPSIQEEHTKRRISYWVLNRCLYTLEPHRKSLWVGITGRKKLQGYRKYFDHNKTYIRITRNTNIESILGLCS

SEQ ID NO: 2292 - protein, 503 aa, unidentified
  source 1..503: note = uncultivated organism
MNKIRCAIYTRKSTEDGLDQAFNSLDAQREACEAYIASQKHEGWKLLKAHYDDGGRSGGNLERPALKQLLSEIEAGRVDMVVVYKIDRLTRSLTDFAKLVERFDQVGASFVSVTQQFNTSTSMGRLTLNVLLSFAQFEREVTAERIRDKIAASKKKGMWMGGFPPYGYDKTDDGLRINQREADVIRDLFESYVRLGCVRKLLTYAEGKNYRTRVLVFKSGNTRGGGWFNRGGMYHLLSNPLYIGKIKHHEQVFEGLHDPLIDEELWAQVQATLSSNRIKRKRRSNAKSRSPLAGKLYDTNGRKLTPSHACKGNTRYRYYVSKDPSAGCRLPAAELELVIESAIKSDPNYRTAKAQNKIGSGDVFDLVESASVHDGQIDIQVRLSDDQARIIRVPFTARRRGVETKLVIPNEQCRIPDQVMIRRVSRALNWTDRIKAGESVRAIAESENVSSDFITHNIDLAFLSPEILRAILEGKQRPDLSTARLSRRRWSKSWAEQHPDFIS

SEQ ID NO: 2293 - protein, 504 aa, unidentified
  source 1..504: note = uncultivated organism
MIRQDAIYARQSVDRMDSISIESQIEYCKYEIHGDPYRVYQDKGYSGKNTDRPAFQEMLSAIRKGEIKRVICYKLDRCSRSLLDFANMMEEFQQCSVEFVSCTEKFDTSTPMGRAMLSICIVFAQLERETIQQRVTDAYHSRSQKGFYMGGRLPYAFKLEPYTILGKKTSRYTPAPEEAEILHKIFLYYSDPQISIGDVVTYLAANGIVNSRSRDGRWTKSYITSIIKNPVYVKADIEIYQFFKSQGAIILNAPEDFTGTNGCYLFSDPHERRKALRFEGHSLVIAPHMGLIPSALWLKCRQKCMNNKQVAKPVKAKNTWLAGKLKCPHCGYGLIIRKWKDNRYYMCSHRLSSKGACEGVGGLVAEDMEQIIHDALDKRIRELGSLHDQSAACDDPQSHDLKMKIAQAQHQIDSYISSMAQASEAVLRYVNEKINALDGRIKVWRQELQMLEKNRRRAAHGTDRIDHCMNDWQILSIPDKLKIVDAFIVSIHASKEQVSIRWKL

SEQ ID NO: 2294 - protein, 526 aa, unidentified
  source 1..526: note = uncultivated organism
MKRAVIYARVSTERQREKHTIDSQLSVLPEILKQKGFIQTLEPYIDDGISGETIDERPGIISLLEDAEQRLFDAVFVVDIDRLTRARKSIDWEIIKESFVKGKVIVITPGQEFNFEDEDQELMSDIFSRISAHEKKKIMRRMLRGKKEKAKQGKFFGGKAPYGYSYDEETKEYEIVEEESKVVKLIFDLYLQGFGVKQIPEQLDKLSIPTPSLAKGYKTKTNSTNKWVSSTITKILKNKAYAGEFIRWVNKRSERKSMTIRPDDEWIVTDIPQIISIETFEHTQETLKNRRVLSKRNSKRQYLLSGLIHCETCDCKMVGECSRGSKELLYYVCHNGRRKTLDIKCPIRSVRTEEIEHAVWEEIKKLLKTPELLKKAILKSKSINDSDQMLEELNELMHKKENEEERLIDLYQHGSIDREKLNTRIEKLNLDKTNIRKKIGSLIEANKVDTRLKTINELKFELEADIDSFDFEQKRKVLTLLLTGSKEVGIFLNSDYSVEIRGLINFSIFNNNSELEECSGIKNTSY

SEQ ID NO: 2295 - protein, 517 aa, unidentified
  source 1..517: note = uncultivated organism
MSKNITIIPPSEDRPAILRVAAYCRVSTDMEEQASSYASQIRSYTEVISQHEGWELVDIYADEAVSGTKMDRREDFNRLMADCRKGRIDRVLVKSMSRFSRNTKDCLAALRELTRLGVTVQFEKENIDTGTLTTELMVSVSGSLAQQESISISQNSHQSYRRRMERGEFITTKAPYGYRLVNRRDLEIVPEEAEIIRWVFDAYLGGKSAKDIANELIRRGIRDRKGNVHWTTREIYYWLSNEKYVGDTLCQKTYKTGFPFVQKINQGEVDQFYVEGTHPAIVSREVFDKAQALRAMKKKKIYGPDGVYPLSRKMCCGICGFTLYRHVTRKGSATWSCGRHQRKASNCATGPIPEEAIYAAFLRMYNKLRLHEGVILRPALSQMDSLETALQRGNPAMLEVNQAIAQATERGYKISKLRANGLLDADACAAQMAVNNAQLTQLRAKRRRLLKNDDIGEAAEALRQTADTIRQGPERLEKFDEALFAELVEQIVASPTALRFRLYGGIEVTEQIGEDER

SEQ ID NO: 2296 - protein, 616 aa, unidentified
  source 1..616: note = uncultivated organism
MKKKCVGYIRVSSISSAEDGSSLKSQREHIEQRAKAEGWNLIKIYEDAGISGKDIEGRPAFKEMLADAAKGEFEIFLFAKLDRIARSLRDMLNVFHDLKEERGIDLVCTDDPVINSTGPFGEALIQIVGVFAELERKMIAIRTGEGKMKQWRAGKAVMGSVPYGMRRKLGGEGEKKYAAGVIEKDPEKSKIYLRAVSLYLDARKSLYDIALLFNEEHIAKPYERGSQGWSAATLSNILRNPAYMGKKILNQIDRKKEKPKKINKANPPKHRSDVEMQARPKKGQGDWIERAYPKLIEPERWQQLQARLKKNRRKSKHNYKEAGQHFLCDGFAFCACGARMKPRPRIAKDGSMRFSYLCRHQAESTKMRKLSGHKKCNLKSVDADAADAQAFEQVVRVMVNPFEYAQSYFRDVPLESLVAAIAALKEEKGKIEKQLDAGFDYMRKHADSKNIGKYEEAQARDEIKLEKIKKQLEAKEREYETIAHKKESLQKFGKAVEDIGWKNQGEFAAFLRALPFNEKRRILEAMISPEKESLRPGGNRVEFAYATPKDYLDDAALNEMSFAESVEQKKSMALIVEAHFDIDIDKIHAIIESLPRGELIKQMAKSGNAKGCIASV

SEQ ID NO: 2297 - protein, 591 aa, unidentified
  source 1..591: note = uncultivated organism
MNKNVEVIAPTKCLNKLNNNELIRACAYCRVSTDNEDQKTSYGSQRIHYQNYIEENPNYEFVGIYADEGITGTQTRKREQFNSMMSNALNGKIDLIIAKSISRFARNTVDTLNCVRTLREHNVDVFFEKENIHTLGLSNELFLTLYSAFAQAESESISENVKAGVRMKMKRGELVGKYAPYGYLYDKKLNKLVIDESKKDTIVYIFEEYSKGVGFRTIAINLNDNNIPSPTGVKWCHASVRRVITNEKYVGDLRTGKYYSDSVMSHKRKINYGEKEQFFTANHHEAIISRELWDKCQTILQKRSKIVKLDGNRDKFSRKYPFSSKIYCGICGERFIRRSYRIRSNNKEVAYWICRSHRNKIECSNLLHYKQEELEDMFVKVYNKLTINKEQYINSFIKKVNNTLLNNENYNNIDKIKLEISKLQDRLSNLIDLKLDNKISKEILEIKELEITNKINELESKLVSNKDLELTKKQKLEQINTISKTLNQYSGLTKFNEEIFNNLVDRIMVGEVLDNGKEDLYKVKFILKTGEMIKDNLPNNTLKIGIDMGHYGFKVNKQALEIKEDNVTAYVLRKNSYINSTSHKFPPFFKF

SEQ ID NO: 2298 - protein, 568 aa, unidentified
  source 1..568: note = uncultivated organism
MTTPSRIRCAIYTRKSSEEGLEQSFNSLDAQREACEAYIVSQRHEGWQLITTQYDDGGFSGGNMERPALKKLLDDIAAKRVDTVVVYKVDRLTRSLADFAKIVEQFDKQGISFVSVTQQFNTTTSMGRLTLNVLLSFAQFEREVTGERIRDKIAASKRKGMWMGGSVPVGYDLEDRHLVVNPAGAEHVREIYRLYLKLGCVTKLKEYLKRAGILSKKRISRAGRTSGGANYSRGALYLILHNRIYLGEITHKKASYPGQHIAIIDQKMWDQVQAQFLANLQAPRRRPRTTEQSLLMGLLYDEKGNRFTPSHATKKGRRYRYYVSQAVIKNARNRQRGPVRIPASEIEELVISQLTMLLKSPQRLMDILAYVNRSQEDIETWAEASRTWSTVTSDKVQTELPSIVKRVIVHNERIGIEIIRSALRQAVLGVSDDPELEINNPDEAVVIETAAQLKRCGGEIRLVLPPDSPGAPPHAVPSLIRAISRAHDWVDRILRGEVVNQRSIAKETGLDERYVSRLIPLAFLAPDLIEQILDGKQAAHLSLDACLANTPNDWNQQRTQLLGLAMHS

SEQ ID NO: 2299 - protein, 536 aa, unidentified
  source 1..536: note = uncultivated organism
MNTCQNIINGALAKKPTLEVPHVIVIDPIQQNKSKKLRVAAYARVSSDSDDQENSFAAQVKAYTALIREHEDWEMVDMYADEGITGLRMDKREDFLRLLRDCRRGKIDRILTKSVSRFSRNTRDCLATIRELKALGVSVYFEKENIDTAAMTDELLFTFFAGNAQHESMSISGNMRWSYEHRMKSGKFITCKAPFGYRLLEGRLEIHEQEAEIVRYVFDSYLNGKSKDEIARDITARGYPTRDGKEKWQCTTIDYMLKNERYMGDALLQKKYTTADLPFRKKRNNGERDKYYFKNSHPPIIPPEVFEKAQQLNQSRVLPTMSKRSEYPLSRRIRCGACGSVFKRKTCNRKTYWVCRSHNNSKSCCPITQIPEAEIYEAFLRLYNKLKIHYPTILTPMLQQLQALKRNRNINNTQVADINQKIAELTEQNHVLNGLKSKGIIDSALFLSQTNELNRQIRVLKTEKNKLMEQNEDDGAITETRCLSAMLEDGPELLTAFDETLFGSMVELVIAESGERLKFRLTNGLELAERVERPVR

SEQ ID NO: 2300 - protein, 548 aa, unidentified
  source 1..548: note = uncultivated organism
MQNKTFQAAAYLRLSREDGDVTEGGKQVSNSIANQNELVMDYLKSHPEISVISTYTDDGYTGVNFDRPEFQRMLSDIREGKIDCVIVKDLSRFGRNYIESGRYIEKIFPMLGIRFIAITDGYDSINEDMGTDMIVPFKNLINDAYCRDISIKIRSHMDIKRRNGEYIGAFAAYGYLKDEDNKNHLVIDEYAADVVRDIFSMKLCGMSQQAIADKLNADGILSPIQYKKSIGVGLYSSFQKSVKPKWSYNAVLRILKNEVYTGTVVQGKCTTPNYKIKKRIHKDEAEWIRIEDMHDAIIPKSDFDIVQEILLRDTRVAPDQNEVFPLAGMVYCADCGEPMVRKTVPAGGKRYVYYVCSGNKRDKNRCSTHCISEKKLMSGILDVVQNHIGRVMAAAFAVELINNTPEAKPSIVKYEDRILKLREEAESCNTRKKNLYEDFKDGVLSREEYSMLKEQYQNQLAGIEGSIASIEAERDGILANGSGKQEWIEKLKKYDGMKELDRELVTFLIEKILVINADAIQVNYRFEKALKDMEQMVELYSAGFKEAM

SEQ ID NO: 2301 - protein, 541 aa, unidentified
  source 1..541: note = uncultivated organism
MSNTTPTVICIPAKPEVVRASKRQLRVAAYCRVSTDDEEQLTSYEAQKNYYTDKIMTNKEWTMAGIFADEGITGTSARKRPEFLRMIRQCKQGKIDIVLTKSISRFARNTVDCLNYVRALKELGIAVIFEKENMNTLEIDSEILITMLGAFAQSESESISANVRWGIRQAMKEGKATIQYKYLYGYRKGDDGKPEIIPDQAEVVRKIYDLFLSGTPVRGIQEYLNANSVPNINGEPKWARSAIYSILTNEKYCGDVLLQKTYIDDCINKKVKKNTGQLPMYLVQNHHEGIISRETFDAAQAELARRSAGKSPSKKNAPTGRSRYSSKYALSDRLYCGECGTRYQRYTWRNRDGSKRIVWRCVSRVDYGNKYCHNSQTLDEEPLHRAILAAINSTVKGKDSIIYNLKSAMEKELAPVAGQQLSLSEIDSQLEQLNTEFSKALAEVSESGDQAAYSDRFREIMQKQTALKVQRDEIQGMLAESGKAAAHIEQCRQAAETTPSAITEWDEALIRQVVESVTVETGNEIIVALKSGASIHQELLY

SEQ ID NO: 2302 - protein, 570 aa, unidentified
  source 1..570: note = uncultivated organism
MSGRGNKKISKQNSNNKKWYLGLYTRRSFDDGETQESYTITNQKALIESFLENKPNIIIEDYYIDDGYTGTNFERPDFKRMMRDVINGKINGIVVKDLSRLGRNHKEVGKYIEEIFPIYDLRIISVNDNVDSFLDPESISSLIVPVKNLMNENYSRDISKKVSSAYETMARKGKFVAGTPPYGYMLDPEDKHHLIPDESEVEIVKKIFDMALSGKGRIKICKYLNDNGILCRKELQRRIRRELTLEPFAIISKYLWSTSTIGRMLSSETYIGNLVQLKTKKASFGTGKVITKTKEECIRCENTHEAIISNEDFNKVQLIIKQNEKPKKSSSTENYSIFRGILKCADCGRAMTKQEDFRGTRQLSNYYCMSYLHISKTCSPHKIKTTDLENSVLEAIQLQIKLVIELEKSLTKLYFKNNQSSIENEYKNNVKVAEIKISNLKEQKRKSYEEWKFGKIEKNDYMKISEDIDLKISKLNQDIELYETTYKENIKKIRRNDYWIGHFKRNRKIKKVSKEVLKELIEVIYVSKDGILDIKFKYQDEYISLVKYLESEGVRINEKVEVRNLSQAFI

SEQ ID NO: 2303 - protein, 537 aa, unidentified
  source 1..537: note = uncultivated organism
MPTRQEVPYRAAAYLRLSREDGDKAESDSIQSQRALITRFVQSMPDILLCAEHVDDGFSGVNFNRPAFQQMMEDVKAGKINCIIVKDLSRFGRNYIEAGRYLERIFPFLGVRFIAVNDGYDSAKEKTPADEILIPFKNLINDAYSRDISLKIRSQLEIKRQKGEFIGSFPPYGYLKSQDNKNQLVVDPYASQIVRSIFTWKLEGLSHHAIAHRLNDVGEPSPLEYKRLLGWRFATGFQTHPKARWTAVAVGRILKNPVYTGHLVQGRESTPNHKIKRRLRKPEHQWIRVENTHEPIISQEMFDTVNRLLVQDTRIPPVAETVYPFSGLLFCADCKSGMVRKTIPAGGKQYVYYYCSQNKTGGGCTTHCISEQALEKAVLKVLQQHVALLDWERVLSYLDRLPLRQEELRKLDRQLRLKQEEIQKYQSLLASLYEDWKNGILDDEEYLEFQTIYRQKCRETKEATQKLQQERSLLLADNGKDSDWVETFRQHQAFTKLSRKAAVSLLERIEVHSGGRVEIYLRYRDEWGPTVPKEEAM

SEQ ID NO: 2304 - protein, 699 aa, unidentified
  source 1..699: note = uncultivated organism
MLDSDRLETGTVVAIYSRVSTDMQVQSESLAIQEKVLREYCAFHHLKIHDHYSDAGLSGGNTENRPAFKRMMADATAKKFGAVVVTKIDRISRNLRDLLRLLDTLEDHSVAFISISQRFDTSNPMGRLTLNVLGSFSQFEREMIAERVREHMLVRAREGKWNGGVVPYGYQEQEGKLVIREDEAEHVRKMFDLYIERRSIRFVTHYLNAQQSKPRYADHWSGTSVSRTLSNPTYYGALTYNKRKGTSSSSTPRPKKDWIIVEDVWPPIISKETWTQANDIMTNKTGLHHRNKRSTYLLSGLIKCGLCGGSMAGYNHPKKGRGGGNWSYYRCSWRLQKGPDVCSGLTFDRWRTEQKVIEALAQWATDPTPVVQQALKFIANKEFIRQHLDDQARSLHRQLAEVEKALKRIMDAYQDGLLDHEELSARAKPLNSEKQILVNEIERLQKEAGIDGDHTHVDLGKLRLAFVNFASVFGGLHIGEQKEMLAAVVNKIVAMPEGRLDVHLDFNVIREAFGLNGLLPTLPKNGDMVVTVNTSEEIHMVKKFAEMSTFGERVEWLRTRHRLTKKELARNIGVDECTIANWERRGMRPHIHATRRRVAEFFGVSVAELLGVEPVPSDARPKYKLLKVRECLGMSQREMGKLLGMTEEQYHWTEFEGKKGTRLGQDDLQNLLERIPEKHRPAFEGIIEANEMDRDAVHQ

SEQ ID NO: 2305 - protein, 549 aa, unidentified
  source 1..549: note = uncultivated organism
MARTKRKTNPVIPAAEAPAQAQKQYRAAAYARLSVEDSGKPGADTIEGQKNLLLRFIEDDPSLTLYGLFCDNGRTGTDFDRPQFEKMMEEVRKGHIDCIVVKDLSRFGRNYLDAGEYIEKIFPFLGVRFISVNDGFDSSNPLDIDSLDTSFRTLIYDLYSRDLSRRVKSAKKARAERGAFLSPYAPYGYVKDPEDKNHLLVDAEAADVIRRIFQMAADGAKTWGIAAALNGEGVSSPKNYKVETGCTRTPWRSIQEENFWTANLVAKFLRDERYIGKTVYGKRSRDIVGSTHTVKISRNDWVIVPDRHEAIVPEALFEKAQACMREYREREVMTGGGNPLKRKVICGVCGHAMQRDNKKNGSYRCVMKRLNTGFDCSEDRIPEPDILEAVIDTIQVYAQYAVSIDRLLQTRQEQRQLDRKQAQRQLQTLQSRKARLDKRLQDLYEGLVEGGISRESFAAQKKALTAQAEEISRTVLELEHKISGSDDGSNAVIEHFKSYAGITALTKEISTDLLHSVTIYPDGRMDIRLNLVDEIKALMETLRRESCTA

SEQ ID NO: 2306 - protein, 545 aa, unidentified
  source 1..545: note = uncultivated organism
MPQITQLNARQRLDRGFYVRGQSPTPRPSPAPLKEHPKEEKTAPEEKRVRKIEAAAPEEKKKLKVAAYCRVSTMNEAQEGSIYAQRRHYEDLIRGNPEWELAGIYFEQGLSGTKAETRPELQRLLADCREGKVDLILTKSISRFSRNTSDTLAMVRGLTNLGVTIRFEKENIDTGTMRSEFMLSLLSCMAENESHSISNNGKWAIRKRFESGSYKPASAPYGYRKEGTDFIPVPEEADVVRGIFAAVLSGCGIGQIAADLNQRGIPTRNGGPWRDGTVYDILHNPTYTGDLLLQKTFVDETFTQRDNKGELDQYLHEEHHEPIIKRETFELAAQNMQQRGKEKNVGSGHHHYAFSGRLLCGNCGRVMKRVKRRGYFSYECSGCGAEPENNVKTAFMNCLNKLAFSQKQMPERRVLDVFINSISAAEKAGNKKRLEEIDAELEENQLKADVLTAVAMVNHFTPEQHAEKLSLLTRSETLRREKALMQTCATNTMKAESLRAFLLHWDSAEFPEEAFEEFVADATVSPGESVTFRFTCGLELREDLT

SEQ ID NO: 2307 - protein, 589 aa, unidentified
  source 1..589: note = uncultivated organism
MDKPKVEIRQATKQVRSRRQGIHIDTLRVAAYARVSTDSKEQLESYQSQVKYYTELINNNPAWQFAGMYADEAITGTQTAKRTDFNRMINDCMNGKIDLIIVKSISRFARNTVDTLQYVRTLKDKQVAVMFEEENINTLTMDGELLLTILSSVAQQEVQNISEHVKYGLSMKMERGEMVGFNGCLGYDYNKEDKSISVNEREAEIIKYIFERYVQGAGGKVIARELMNLGYKNKSGKNYMTEHGVIGIIKNEKYKGDLLMGKTFTVDPISKRRLENMGESNQYYSKNHHEAIISEELWDKANAILEKRKGSHPRGDGKRDKYSRQYAFSCMLKCGFCGGNLTRRTWNSRTDYKKTIWQCVAATKHGKKECPYCKGIPEKLIEDAFVRTYNALCTYDGDFINGFLEHVKTGIQDDNSEKNLKNINRNISRLKERKSKIVDLHIDGKIDEETYQIKLDELKEKQIELESQKVQASATQKNQQDINKRLASFQKIINKKQILTEFDRHVFEAVIQRVVVGEKDEDGNINPYKLKFIFKSGYEGDELAKVNSSPFKNPCSHTNSECDILSLQGVNDTCGDGCSFVPTTCRSSY

SEQ ID NO: 2308 - protein, 518 aa, unidentified
  source 1..518: note = uncultivated organism
MAEVIMIQGNQAVQQEKLKLRVCAYARVSSKSDEQQYSFFGQVQHYTKLINENPEWEYVDIYADEGLTGTRKDKRDEFNRMLDDCREGKIDKILTKAVFRFARNISECVEVVKELKELGVTVYFEEQQLDSGRPSDFTAICVYATIAQEESISIAHNLRMGCAARMKLGTYKQTNAPYGYYIENDEFKINEEQAQVVRVIFRAYVEGKSQGKIAEELNQAGIPNRYGKIAWNRRTIQYIISNVRYKGDALFQKSYTEGFPYKEKINNGQRDKYYQYNTNEPIVSKALFDKAEKLLIKRRKQHYSGKDMKSYTFSKMIICKECGDTYRRKVNNRTEKISWTCREHDIRADKCSSKPISEEHLKKAYILMYNRLKENQEYILHPMLSQIEMIRTNSAEKNLIGDINIQIAQTTEQVLSINRLKAKGLIEPVSYIEESNRLNEQIIKLRKQKKKFQQKNEFDKVIDNTRKLLKEFEITGAIADFDREQFRRVVQKIYADSDVLTFKLVNNLELDIRIEEVL

SEQ ID NO: 2309 - protein, 523 aa, unidentified
  source 1..523: note = uncultivated organism
MKNAVIYARFSSHRQDEQSIEGQLHVCCDYAAREGLTVVGEYIDRAISGRSDDRPDFQRMIADSKKRAFDYVIVYKLDRFARNRYDSAVYKHKLKQNGVKVLSAMEAIGDNPESIILEAVLEASAEYYSVELGQKIRRGRRESAAKGRFLGGGIPTGYKSVDGRLVLDPEKAPHIAWAFHAYADGMPKGKVIAELNRRGLRSRNGTPLGPSALQLALRSEKYVGVLEQDGVRIEDGCPALIDRDTFDRVQARLDLMRRAGAKNKAEVEYLLTGKLYCGHCGSAMVGVSGTGKGGTTWYYYQCKGRRAHSCTKRHERRDLLERYICEQTLAWVLAPDRIRGIAEAVAAEYDREFGDSPVQELERRIAWLKKEIEKLAFAAVDTPKAMRQPLYDKAEQYDAERQDLEIDLAKLRIAHGIRISADDIEVWLRSFAGGDLDDEDFRRRLIDAFVLKVYVFDDRIAIYYNVRGAEDVTYTDMLFSLPDAPEPDTRVCISDGASHHPHPYSNTAMIYVRHTFGLLVWRG

SEQ ID NO: 2310 - protein, 522 aa, unidentified
  source 1..522: note = uncultivated organism
MSRRSKKTENAIIRCAIYTRKSSEEGLDQEFNSLDAQRESAEAYIASQKAEGWTALPDRYDDGGFTGGNMDRPALDRMLRDIDRGKIDCVVVYKVDRLSRSLMDFSRIVETFEKHNVSFVSVTQQFNTTHSMGRLTLNILLSFAQFEREIIGERIRDKLAAQARKGKWTGGAPVLGYDVDRTGPSPRLVINAKEAARVREMFRMYLQEASLLPVVKELKRRGWVNKRRITRKGKKLGGRPFDKATLYQLLTNPIYTGKMRYKDELHPGEHEPIIKQDLFDKVHKQLKYNGRTGGAEVRNKYGALLRGLLRCKSCGTAMTHTFCGKNKRNFYRYYRCTNAIKNGHEVCPAGTLPAGEIERVVIDEIRGLANDEALLAQVLADAHSAIDTELAVVRLDRDNLRKERKRHHEELQQLATSGKTTNDVTARIADLHERLSTADQRLPDLESRIAELECQTVSQAEARAAFADFDSLWESLIPREQARLLNLLISTVEYDGDAGTVSVTFRPTSIRSLINRKMEDAA

SEQ ID NO: 2311 - protein, 556 aa, unidentified
  source 1..556: note = uncultivated organism
MTKPVIRCAIYTRKSSDEGLDQAFNSLDAQHEACAAYIASQRHEGWKMLPARYDDGGVSGGTLARPALQRLLADIHAGRIDMVVVYKIDRLTRSLADFAKLVDRLDAASCSFVSVTQAFNTSTSMGRLTLNVLLSFAQFEREVTAERIRDKIAASKEKGLWMGGLPPLGYDPHPDRQRRELVVNEDEAPIVRRLFALYAEHRNLRGTAEAALRDDLRSKHHHFASGRRQGGGALSRGQIHKILTNPVYRGLIRHRDKCWPGTHPAIVGEDQWNAVQDLLQAASAKRRGAPSGASTDLDAPLKGKVRDETGDGLTPTHTIRRGRKLRYYVSNRLISGGPDPSGWRLPATGFEAAVVRIVAAHLSTRADRHAVLGEPDAAEVGPASEAVTALAQAIRKRGCHAAAALIDRVDLARGQIGIDLGRGALAEATGLPAGRLDPALLRIGAPFTCRRRGVETRIIAGDREPAPDTTLIRALRNAHRWADALKGGAPLGKIAAAENVAERYLARIVHLAGLSPRIQMAILAGSQPPELTLDRLVKAPLPLDWAAQERLLGVAR

SEQ ID NO: 2312 - protein, 521 aa, unidentified
  source 1..521: note = uncultivated organism
MSRKAKKPAESRIRCAIYTRKSSEEGLEQEFNSLDAQRASAEAFIASQQHEGWVCLPEMYDDGGFSGGSMDRPALKRLMDDIAAGKVDCVVVYKVDRLSRSLLDFTRIMETFDKNGVSFVSVTQQFNTTHSMGRLTLNILLSFAQFEREIIGERIRDKIAAQRRRGKWAGGVPVLGYDVDRSGPSPKLVINAEEALRVRRIFSLYLELGSLLPVVEELAKRGWANKTWSTKKGAMRGGRTFDRCSVYGLLTNPIYIGKIKHKTDIFDGEHEPIIDATVFDKVQTTLRKHGAGGGAYLINKYGALLKGLLRCHACDKAMAHTFTNRGSKRYRYYACVKAIKNGRKACRSRSLPAAEIEAAVVDQIRCIARDQGLRDDVLRQACAAVDNDLAELATQRQQMERQLSRDHAEVARLAVAANPTSATTSRMADVHQRIAKAEAELGRVRNRVEEIERKRIGRADVAAAFEDFDNVWAALSSREQAQVLSLLVSRVEFDPDDSSLAISFHPSAIATLAEGNIGDAA

SEQ ID NO: 2313 - protein, 544 aa, unidentified
  source 1..544: note = uncultivated organism
MQTTKTTKLWRATLYLRLSREDGDKEESNSIAGQRNLLRDFLKQHPDIQEYAVQVDDGWSGSTFERPAFKKMIEDVKAGKTDCIIVKDLSRFGRNYLDAGEYIEKIFPFMGVRFIAVNDNYDSFQEKNTSDDLIVPFKNLINEAYCRDISVKIRSQLEIKRKNGQFLGSFAAYGYFKDPQDKNRLVVDEYAASIVRQIFAWKVEGISPQDIADRLNGGGILSPVEYKRSLGMKCATPLQTNVKASWSAASVIRLLKNPIYIGTLTQGRATTPSYKVHKRVQKSESEWSVIENNHEAIVSRKDYDTVQKVLALDTRRSPDASSVSLFSGMVFCGDCGASMVKKPVSAGGRKYHYYVCSANKQDKSCSPHRIRESALEEIVLDLVREHIAAVVELASVLAVADTAPLRTAEAVKVQRQLDEKKADYERLQKLLMSLYENLTDGIIDKAEYLRLKQSFSQRAEEAEKQMEALQKRLSTIKTHTADTSWTENFKRYRNLTELDRTAVVTLIDRIMVYEDNAVEIVYRWQNEFAWQMDIVRQAQLREAV

SEQ ID NO: 2314 - protein, 526 aa, unidentified
  source 1..526: note = uncultivated organism
MKKAEVSQPLQKIRCAIYTRKSTDEGLDMEFNSLDAQRESAESYIQSQRHEGWVILEDHYDDGGFSGGSMDRPALQKLLVDIKNNKVDCVVVYKVDRISRSLTDFCKIMDTFESHNVSFVSVTQSFNTTTSMGRLTLNILLSFAQFEREVIGERIRDKVAAMKRKGKYTGGMPVLGYDSSEKTKKLEINEKETELVRLIFRKFIKLRSTLLVAKELNQKGYKTKQWVTKRGVVYGGNKWNKAHVYRLVTNHLYIGEVIHKGQYYPAEHQPIIPKVIWDETQEIFKEGRKSRGAKTRSKTPAILKDVIRCGHCDCSMGMYYTKRRGKLYRYYLCSHASKHGYDTCKVKTVSAGMIEEIVINQLKRIFQSPELIASTYRSVMEKIDDESACLRLKKYRFEEELEKLKDKVKNIVYSKGNNQNSFFLNQELKKIDNEIVGKEENLQKIKEKLMALELNTQTEQETFQYLKNIDKIWDELFPAEQSRIIRLLVDKVVIYPDSIDLLINSLGINSLINELHNDNNQISEAV

SEQ ID NO: 2315 - protein, 555 aa, unidentified
  source 1..555: note = uncultivated organism
MSLGSSPTAPEAPKRAALYLRVSTGRQAAGEVSLPSQRELTRRYCEAQGWLVTEEYVEPGASATDDKRPVFQRMLEDARSPERRFDIICVHSFSRFYRNGAEMELTIRQLRKHGVEVVSTTQPTGHDPSQELMRQIIGIFDEYTSRENGKNVVRVMRESAKQGFWNGASPPLGYRIVEAERRGSKIKKKLDVDPVEAELVRLIFQLYLEGDGSSGPMGVKAVTTWLNENGYRTRKGATFGIGPLHRILKNPCYATGKWPYGRRDSRTGGMHDPSNIIEIPIPPIISMELFEQVQARLAMCNPRVTPPRVVNGPTLLTGLAVCASCGSGMSRTGTRRGDKAYSYYSCAGCHQKGKSVCKGRHIRLEKLDEIVLEGVANKLLSPKRLEKILGELIERASAKDLAVAERRHKLEGEVTKVKDKLSRLYLAIEEGVIELDGDLKDRIERLKQERDLALASVERLVEQTAVQKNVTPDKVTAFSKLMREKIRSGDTQTRKAWLGSVISRIEVDDDAIRVIGEKPVLAAALAAQNMPSANVSGFVRKWRARNDSNVRPSDS

SEQ ID NO: 2316 - protein, 534 aa, unidentified
  source 1..534: note = uncultivated organism
MNRNQQPSQQSAQDSNKVIRCAIYTRKSTDEGLDRDFNSLDAQRESAEAYIASQKNEGWVCLPDRFDDGGFTGGNTQRPALKRLLAAVDEGQLDCIVVYKVDRLSRSLMDFSRIIEKLEKHQVSFVSVTQQFNTTHSMGRLILNILLSFAQFEREIISERTRDKMTAARKKGKWIGGIPVLGYDIDGDSRRLIINEEKAFKVRTIYELYLKRQSLLTTVRELRSRGWTNKRRTTKKGLKCGGRPFEANSLYRLLTNVLYLGKIDFRGEIIEGEHQGILDETVWQSTQEILKRNGRNHGQLLRNKYGALLKGLLYCIPCKAAMVHVCSVSNKTLKNRRYVCSQAQKAGWKSCVTKFLPAVDIERFVVDHIRSFGQNSDLIAETLNAARRQAQQNIERLEDAHQSVQLELKRLADEVTKLVASTNRSFREQEIVSEGLADLEDQMRAARHRADTLRAQITKKSGELVNPEELALAMQQFDPIWDTLSSLEQTRLLALLIERIGYDGGTGTLSITFRPIGPNTTVQESASTDSPRES

SEQ ID NO: 2317 - protein, 555 aa, unidentified
  source 1..555: note = uncultivated organism
MNNNISYSAAVYLRLSKEDADMSGSMDKIESESIANQKALIFKYLESMPDVHVHDIYVDDGFSGTQFTSRPDFIRMQEDIYNEKINMVIVKDLSRFGRDHVDADRFIQKVFPALGVRFVAVVDHYDSLTATHSDRNLVVPFKNFINDNYSRDTGNKIRSSQEALRNTGKYIGAYVSYGYVKSNTEKGKILVDDYAAEIVRKIFSMKMNGKSAGAIAIRLNELGILAPSEYKKTLGINYKSGFKTKTTVLWSAVTVKRILTNRIYTGVLEQGKRSRISYKVRKVIERPQDEWAVVENNHEAIISSSDFEVVQKLLAADTRISPSESSAYLFSGILYCGDCGKGMTRRKVGEKITYICSSYNKGKECSRHTVAETDLQENVLKALQMHIELLAQMDEVLNHIDMNSIDYESVIANDGEISVKYQELERISRLTTKLYTDRLAGIISEEEFLQFKAAYEEKSELIAKSIENMKTSMKNIFANGIKTGEWMQHFLKYRNLEELDRIALVTMVDRIEVFEDKRMEITFSYADEYVTLTRFLDKLSDSEEMPLEDLSERVV

SEQ ID NO: 2318 - protein, 544 aa, unidentified
  source 1..544: note = uncultivated organism
MGKTSLYNAAIYLRLSKEDGDIAEGGKLISNSIANQEELVRDYLKSHADIRVYAVYKDDGYSGVNFDRPNFQKMIEDIRSGAVNCVIVKDLSRFGRNYIESGRYIEKIFPLLGVRFIAVTDHFDSLEDDAGSEMIIPFKNLINDAYCRDISIKVRSHLDMKRKNGEYIGAFVVYGYKKAPDDKNKLIVDDYAAGVVKDIFEMKIKGMSQHAIAAKLNEDGIASPLEYMRGQGINLDTPFRKKTRAKWSHSSVLHILKNEMYTGTLVQGKTGTPNYKIKKRTEKDEAQWVRVEDSFEAVIPKEEFSLVQELLMMDTRTSPVRERIYPLSGMVFCADCGAPMTRKVIRSGGRKYTYYICSENKRDKRMCSAHRISESVLNDTVLKAIKEHIDNVLILEEALAMADEAPRDSVDVKKYKDRISEKIDEVEKIKKRKLRLYEDLKDGILSKEEYDKLRVQYGERISDGEDAIRNYEEELQKILDNRTDLHMWIDEFKKHKGISELSRSDVIHMIERIEVSDAKHIEVRFRFIEEYDGLISGLNGKGAV

SEQ ID NO: 2319 - protein, 552 aa, unidentified
  source 1..552: note = uncultivated organism
MKAKEFYNVAIYLRLSRDDEDIDGSKAESNSISSQRDMIRSFIRKQDNMEIYDIYVDDGWSGANFDRPEFKRMMKDIEAGHVDCVIVKDLSRLGRDYIEAGRLIQKTFPAFSVRFIALTDHFDSLTADYNETSLVVPVKNFVNDSYSRDISGKVRSHQKVKRENGDFIGAFAVYGYKKSADNRNLLVPDDYAADIVRKIFTWKMEGYSNLCIARKLDDAGILSPMEYKKMQGEKLCTGFVTGVKSKWSAVAVKRILTNENYTGTLVQGREEKVNYKVNKSVMKPEDEWIKVNDAHEAIISKEDFEIVQDLLRIDTRAYSGEEKAHIYSGLLFCGDCMEPMLRRVSRYNGKETVSFICSTKNKGGDCTRHTISEEDLRHLVLTGLRQQVSLFMDKARVLEHIEQMEINFEEVVSFDREIEKLHKEQDKYLSLRAGLYEDLKKNIITEEDFKNFRAIYEKRYQELEEAISNQEETIKKLFKSGVTAGRWLERMKSVMQITELDRMTLLSFVKHILVYEDKRVYLELRHKELFSKVIMLADYAVTKGQIYRGEAV

SEQ ID NO: 2320 - protein, 507 aa, unidentified
  source 1..507: note = uncultivated organism
MAEITIIPAKNRSDEIIRTAAYARVSSDSEDQLNSFAAQIRYYTEMFQNSTNTVFVDMYADEGITGTSTEKRTEFQRLINDCRKGKIDRVLTKSISRFARNTKDSLRAARELKTLGISVYFEKENIDTGEISSEMLLAIYSQFAQEESMSISRNCRLGIKKRMMDGTYKNPSTPFGYDYVNGKLQINPEKAKIVKQIFNWYVSGIGMSEIAARLNSLGVRDEVWRHGTIRHILTNERYIGDSLLQKRFTTDTLPFKTVRNHGEKEQYYVSGTHEPIIEKSIFDNAQKILAERDKPSGFAKENSPFSKKIFCGNCGNTFRRKYGKSHVNWVCRKHDRSADSCDIRQIKETEFQTAFVRLWNKLQEHGKAILIPMLKQLETLSEREKSDNIQLAGFRKEISEIKQQTHLLTVLNSQGTLDEAYFKARSQELDRKLLTAQKQLHACLDDKDSERLDNLRKLIKILERAETVTKFDEIIFGQIVDKITVLSETEIRYDLIGGIGFTERIER

SEQ ID NO: 2321 - protein, 552 aa, unidentified
  source 1..552: note = uncultivated organism
MKKHIYYVAIYLRLSRDDEDIDGSTKSESNSISSQRELVRSYVKEHDDMELFDIYVDDGYSGVNFDRPEFKRMMADIEAGNVNCVIVKDLSRLGRDYIEAGRLIQKTFPAFHVRFIAVTDNFDSQTADNNTKSLVLPVKNFINDSYCRDISQKVKSQQKSKWEQGKFIGAFAVYGYRRSAEDKYKLCPDVYAAEIVRKIFAWKREGMSNQAIAQRLNDLGVLSPMEYKKSLGVNYTSGFRKNITAKWSSVAVKRILTNEVYTGVMVQGKQEKVNYKVKKTIAKPKEEWVRVEGTHEAIISCEDFEIVQNLLKVDIQPRAGSVCSHLFSGLLFCGDCKEAMYRRVNRYKDSENVYFICPTRNKGMGCTRHSILEDELKEIVFRTLQVHVSLFLDVCSQLEHIQDMEVDFEEVVKFDKEIERLRKEQDKYLELRVGLYEDLKSGLITETDFKNFRAIYEKQYEEVKTALQSQEAMIKQLFRNGVASGVRLERFKEVMKLTTLDRDTLLCFISRIEVFEEKKVYVEFRAKEEFQKMLVLQEYLASKTESGEEGRV

SEQ ID NO: 2322 - protein, 596 aa, unidentified
  source 1..596: note = uncultivated organism
MKQVRCAIYTRKSSEEGLEQNFNSLHAQREACAAYVMSQASEGWTLLPDVYDDGGLSGGTLDRPALKRLLFEVEAGHIDIIVVYKVDRLTRSLLDFARLVETFDRCGTSFVSITQSFNTTNSMGRLTLNMLLSFAQFEREVTAERIRDKLAASKAKGMWMGGIAPLGYRPSGRTLVVVEDHAALVREIFARYRTLGNVRLVTEALRQESVVAPRRKTVSGRSHGGVPFSRGQIYALLRNPIYIGCIGHRGVLHKGLHTPIIERETWDAVQRQLAGNVRGTRGGGAYADPSIRRGAQEAATPGRGGKAARASSANSASHHSNTAASTRATASPLAGRIVDEAGLPLIATHARKGEVRYRYYVSKALQTGIASPHEGLRIPAREIEQAVMQELAHLLADPLALATQAGIALAPSALRPLVARCKTLAQDLQQGNATLLAQALHQVRVLSDRIEISLDVPALAEALALEPPEAALPILTLSRQVRLTRTGRAVRLVHDSGAAVTADGVDLTLVKLIHKARAWWQRMATGKLDVTGLAQQENVSTTYVVRVLRLAFLSPAVVEAVLDGRLRAGIDANALFDARAIRPEWDRQEKSFVLAG

SEQ ID NO: 2323 - protein, 567 aa, unidentified
  source 1..567: note = uncultivated organism
METKIKRCAIYTRKSHEDGLEQEYNSLDAQRDAAMNYIASQRSNGWQAIAPSYDDGGWSGGNTNRPALQRLMSDIRAGLVDIVVVYKIDRLSRSLTDFAELQTEFDKHGVAFCAVTQEINTSTSSGRMMLNILMTFAQFEREVIAERIRDKLSASKMKGKYVGGLLPLGYDGDSETMRIVVNPAEAETVKLIYHEYLRSGSPKAVQRMLAEKGLKTKQWTSKKGIRHGGKPITLAMIHEILRNPIYIGKLRYRDKVYEGEHDGFIDPDLWRKVQESLDGNRRGSPQRASREVKPFAGLIYCGHCNAPMFTGVAVKPNGRRYAYYICLRDDKKPNVECPVHRVPAEPLEKLLLGQIGKMFHTPTMLAKICDERLSQVLTAPQVGQALEGIATVWAQMFPVERYKLLHAIIKRVLVFENEVRIIFAAEGLSSLLREAGMDFSIAPADGQLEMDCTLSIPCHLRRSAGQLEISLPEEISETASTPIRKALVQAHQGMEQLVTGKASTMREIADALKMDRSFVARTLQLANLAPDLIKMIWNGTAPDSLTLDKLRRGIPESWEEQRKLFLA

SEQ ID NO: 2324 - protein, 502 aa, unidentified
  source 1..502: note = uncultivated organism
MTAIYCRKSVERADSTSIETQIEFCKRLLLPDERFEVYSDRGYSGGNTNRPDFQRLMSDVEQGAVSRVIVYRIDRISRSVLDFANIYGKLEENNVEFVSATEQFDTSTPMGKAMLQIIMVFAELERKTIQLRINDNFYERAKKGLFLAGSAPIGYKKIPFEIAGVKSHILDEDIETSGIVKFIYKKYLEDGVSMGQIVKYLNSPECEFKHSQNFTNTSIMRILSNPVYVRADADVYRYFQSKGAILHDNIERFDGVHGCTIYGRRKGKKRSKFKDMEGENVQLNLHKGLISSEEWLRVQKKMEINKSIKNSGRGKNSWLSGLIKCGYCGLAITVVNGQRNGKRYVYCNGRKNGICFERKSHAAFDELEQSVEGVLLPHIRNFKYELAEKSDENNIRLNELKIRQAKIDEEINSIVERFVKANDTVLEYLNNKVKELENRKNGITEEILALTAQKPLEVDFNRIKEVINNWKNLDLEIKKQTARLFIKQITYTDEELNIEFIL

SEQ ID NO: 2325 - protein, 541 aa, unidentified
  source 1..541: note = uncultivated organism
MSDLKEYRACIYTRLSRDDGDKAESDSIGNQRALIRDFLSGHPEIEAVSEQSDDGFTGVNFERPGFKRMMEEIRSGKVNCVVVKDLSRFGRNYIEAGNYIEKVFPFMGVRFIAVNDSYDSRDRGQADSLIIPFKNLINDAYCKDISVKIRSQLEIKRKKGEFIGAFAPYGYQKDPEDHNRLIADAYASEVVRSIFRWKRQGMSQNSIAARLNSLGVLCPMEYKISQGMKIQTNFRVRRQAEWSAVTVLRILTNEVYTGVLLQGRTTTPNYKVKKRIDKPEKEWIRAEDAHEAVIDRETFDSVQALLQKDTRISPKRDSLYVLSGYVFCADCRQSMVRKSVSRKKKKYAYYVCGTHKSGRGCSAHSIPEDKLNAAVLAALQEQIRLAADMERLLRLADSLPEERRDVKDYDVQMVRLQEDMERNREFRLKLYESLQEGVIDRDEYFAFKKNYEEKIRKAQEALDMLEKERQEALEGGRKDLAWLERLRAYGTIEKLDREAVTDLVEAVYVHDDRTLEIVFSFADRWSEAEKYIRRITAERSA

SEQ ID NO: 2326 - protein, 550 aa, unidentified
  source 1..550: note = uncultivated organism
MKRVLCLYRVSTKGQVDRITDDIPMQRRECLDFISRMEDWVFYDERVEKGVSGYKVSAENRDAILDIRALAEKKKFDVLLVFMFDRLGRREDETPFLVEWFVEHGIEVWSTREGQQKIESRSDKLINYIRFWQAGGESEKTSMRVKAAHKQMTADGLWRGGNAPYGYKLVLNGRIGKKNRQLYDLQIDEVQGPIVKEVFELIVNQGFGTLRAANYLNEKHPDPGKVWTPQTIRNMIRNPMYTGRFHMNDTLSEPVESLRIISDDTAQFAQYALQSHIPRKYYEHRQAENDAMPEDVPTKTSVYGASLLSGLLYCAHCGCRLVGTYCTKQRKNGAYHRPIYRCYNGSVKAKKCDGQSVYSAAKIEAAVLEVVHRYFKNTARTMDSVWHEQVKLQLRSKNAVQLKLAKAELEKLHQQDTRLRQEVMRSLMGESAFEADMLKEMLERNKADITEAEARVEALEAEKDAEVSRLKYLSAQYQLIRDWAAEFDDADNDTKKMILARLIEKITVDRHYHLNITFYVAEDAFRECIAAEEPLIHIDEAERCIPAIAV

SEQ ID NO: 2327 - protein, 546 aa, unidentified
  source 1..546: note = uncultivated organism
MIKKKFRCAIYTRKSTEEGLEQDFNSLDAQREACEAYIKSQQHEGWTLIEKQYNDGGFSGGNLERPALKELFKDIENNKVDIVVVYKVDRLTRSLLDFAKIVELFDSHEASFVSVTQNFNTTTSMGRLTLNILLSFAQFEREVTGERIRDKIAASKKKGMWMGGRVPIGYLKKDKKLFVDENNAKKVLNIFQKYLELKSVPKLKDYLVENNIKSNTNRFFEKGQLYHILQNKIYTGKVVHKGNVYKGEHLGIIDEDIFNSVQKLLLENSTENKDKESSNSLLAGKLFDDNGNRMSPSHSKTRNKKYRYYVSQAITKFNKEKAGTISKLPADEIEKFVIEEINTYFENITKIQQYISDLPIEMQNKILAKLKTKSIFYDNSIQNIISKVTISKDFIEIILSSNKIKEFLHKIANLDIIPTENSDNYIEIKKNIKISTGNTKGCKVLIIRKGEKSENKINETLVKVIVRSFYWHKLLITGKAQNTKDIQKLEKLKDNSYIKQVLNLRFLSPKIIDAILTGKQKEDLTITKLFSIKTLNWQEQEQILLV

SEQ ID NO: 2328 - protein, 532 aa, unidentified
  source 1..532: note = uncultivated organism
MSYIESSKYTAACYCRLSRDDENDGTSVSIETQKKVLEDYCRSNGYDVFNFYCDDGFTGTNFDRPSFKQMMSDAGDGTVNMIVVKDLSRFGRNYIEVGKYVEEIFPDMGIRFIAIGDDVDTNRDNLDLDLMLPMKNIFNQYYPADCSRKTRQAFVTKAKRGEFIGSQAPYGYKKSPEDKHVLIIDEETAPTVKWIFEMAAYQGYGYNKIARVLTERRVMTPAALQAKRAGRGYDKDPYDWNLATVYRMMENTAYLGTLTSGKRRKISFKSKRIKRMPEEKWIVNENMHEPLISEQLWEDAHYRLGTRKRTSESGFVNIFAGLLKCDKCGYALGIANASGKDNYYTCNTYKKKGKDKCSSHYIHYDELYNKILFDLNEMLRMVRNDKEAFVETVKAKIGGSSDEERQIISKTAEELEKRLGELDKKFDMLYNDRLDGLISDKKFKEMSARCESEQEELSERLEELQAKLESSGEKSLNLERFVDLISEYEKIETLDKELLNLLIDKIVVSDRVKEGKAFTQTITIYYRFVGCM

SEQ ID NO: 2329 - protein, 606 aa, unidentified
  source 1..606: note = uncultivated organism
MGTNGTTAALYLRISSDPEGERAGVTRQREDCEQLAARLGLDVVAIHEDNDISAYSGKARPAFESMLTAAQAGEFDVLVVWAADRLYRRMADLVRITSELAPHVRILTVVGGEIDLTTADGIMNAQIHGSVAEYESRHKADRIARRAKQRAKDGVMTASTRPFGWTWADPCDAGSECRHGNPHAPGERARVGTRAGLVIEPTEAAILADCYRRIVAGDTVRSAYRYATAAGLAVSGPDVLRTVLLNPRNAGRVAHRGAIVAEAANGLHIIDAATYDRAVAILSDPTRRTSPGKPAGTRLGGGIAVCPRCGGNLAGTMIREDHGRVANYICSKHRHYRRVRATVDPLVLDLVGDTLAALAESGRLSVTATEDTAAAAIREEIATTEARLTELAALAAAGDLTPADYALVSKNLRARMDDLAGRLSRRTGRPALASLAGDTEGLRAAWGRLAAAEDPEPLRAVLRELLVRVVPDNDGSILLEWQEWTDLPPETVRYVKPRPAPPAGVAARRAKVAEAHGRGLHTAGIAAALGLRWNLVAADLAALGLEPHRDTGAGGPQAARRDAIAARRAKVAELRAAGESQAAIARHLGVGVATVARDLDALGCAA

SEQ ID NO: 2330 - protein, 521 aa, unidentified
  source 1..521: note = uncultivated organism
MAVVRMIPAIPRGGCRKSENEVHKIRVAAYCRVSTDTDEQATSYEAQIEHYTDYIEKHPGWELAGIYADDGISGTNTKKRGEFNRLIEDCMAGKVDMVVTKSISRFARNTLDCLKYIRQLKDKNIPVFFEKEAINTMDAKGEVLLTIMASLAQQESQSLSQNVRLGLQYRYQQGKVQVCTNRFLGYDKDEDDNLVINPEEAEVVKRIYREYLSGKSYYAIGQGLTADGIRTAAGKDYWLASTLKKILTNEKYIGDALLQKTITTDFLNKKRVANKGIVPQYYVEGSHEAIIPRELFMQVQEEMVRRARLETGSRNRRIYSGKYALSSTIYCAHCGDIFQRTQWIIRNEKHTVWRCACRLNRKKSKIDCPSRTLYESDLHAAVIQAINQLIAQKDDLLPGLKIAIEKALDSGNRTRVAEIDAQLENLEKELLKRANTKQDYTDILEQLDAMRDAKQELLLEDANNAGIQRQLNAIEAFLESQQTAIEEYDEALVRKLLERVMVYDDHLTFEFKSGIEIGITM

SEQ ID NO: 2331 - protein, 541 aa, unidentified
  source 1..541: note = uncultivated organism
MLTKAQTDMRVTMIPAKPKEEISGGIDTIKRVAAYCRVSTDQDDQINSYEAQCSFFTECIDSHEGWKKVKVFADEGITGTQAKKRPEFMKMLRYCRQGRIDIILAKSFSRFARNTVESLQYVRELKSLGIAVIFDKENINTLEQTDEMLITLFSWFAQAESESISKNVTWGIRRSFEQGYFSMHYSTTLGYEKGEDGEPKIVPEEAETIRMIYSMFLDGSSYRDIAKALTEQSRKKASGKTDWTHANVMSILKNEKYAGDALLQKTYVTDCISKKTKKNTGELPMYLVTDHHAAIIDRNTFKRAQVEISRRSCIKKASGKNVVYDQGKYSAKYALTNLMFCEECGAAYRRTTWTAKGYKEIMWRCVSRLESGKKKCKHSPTLHEESLHRAIVDAINDFCDVREKVKTVLKESVQRTIAPEGKTLAQLEKLKKEMNDEVSRLLDLTLRENDYTKYDSEFKRLSDEIERINEQIRTEQEKLTERSVSADTMQTILDRIENTNFQLTEYDDVMTRGFIERITVIDKHTIKIQFKGGYETVQTLD

SEQ ID NO: 2332 - protein, 565 aa, unidentified
  source 1..565: note = uncultivated organism
MGRRNQTRNSLPNGKRIWKIALYIRLSREDGNDVSNSVKHQKERLLAYLSTFEDEYELVDVYIDDGYTGTDTNRDNFQRMCQHIREHRVNCVIVKDLSRLSRNVTDATYHIENFFIEYDVRFISLELPALDSYKYPEQMNSILVPMQNVINDDFCRQTSIKVRGVFNQKRRQGQFIGAFAPYGFLKNPEDKHNLIIDEEAAQIVRDIFRWYVKDGISKGGIVRKLNEMGVPNPAAYKKQKGMKYANPSSSMNDSLWNPRTVRDILSNQMYLGHMVQGKYRVKSYKVHTQITTPKEEWYIVEDTHDPIIEQEVFDMAQKLQEKDTRTPPGHKTIHTLSGFVRCPDCGKAMVRSQGGSKVKTTYYQCRTYREKSKDACSIHSIRAEILEDAVFNAIRVQVELVSSLQDIIDEINRAPNVRNESQRLSTMQNAREKELAKITAIKDSLYEDWKNGDITKDDYRRLKAKYDEQAESLKSAIASLKEEQRVMSEGISTENPYLHSFLKYQSVITLDRSAVVDLIDTIYVHEGGEVEILFNFQDQHKLIMDFIESNTHDLQVIEGGKASSY

SEQ ID NO: 2333 - protein, 571 aa, unidentified
  source 1..571: note = uncultivated organism
MNNNYIEDSGLQVGFYARVGNASQLTEGTLWKAALYARLSREDGDKEESDSISNQKDLLNSYVKGKQDIEVVSVYEDDGYTGVNFQRPDFQKMMNEIQVGNINCVIVKDLSRLGRNHIEMGKLLERFFPFMGVRFIAVNEGYDSLTPNQTDGLIIPFKNLVNDAYCADTSRKIRSQFEVKRKNGEYIGPFVAYGYTKDPKDHHRLLIDEDAAQIVQNIFAWKIGGMSLQGIANRLNEKGVPSPLEHKKQNGSKYKTKFQANPRAVWTPVAVGRILKNELYAGVLTQGATTTPNYKVKRRIMRAVQERVRVEQSEYAIISAEDFALVNTLLRKDTRVAPGSNTVYLFSGMLYCGDCGQNLVRKNVPSSKQKNVYHICSTYKKGKGCKSHSISEKALYEAVFHMVTLHIRECAKIGEVLAFIGDMPMQQINAQGIQRQIEAKKAEVAKLGRRQVRLFEDYDDGLMNRDEYTNMKAIFSAQADEAEKALELLMQELDNIIHNRTENSRWIEHFKKYHNLQSLTRSAVVELIERIIVYEGGKIEVVPRYKADFEDALRYIESLSADSLSSERRAM

SEQ ID NO: 2334 - protein, 683 aa, unidentified
  source 1..683: note = uncultivated organism
MNTMAVAIYCRVSTEEQRERQSILTQREFGERYVELHKLHVHALYADDGISGTVALENRPEGARVLKDARAGKFDQLLIYKLDRLGRETRLILNVVAELEKLGVRVRSMTEEFDTASATGRLMLTMLSGFATHEREVIRERSVAGTRRVAEAGHWLGGIVPYGYRRVGEKRDARIVVSEEPIPNLAMSEADVVREIFHLSAVEKKSARQIAVRLNALRAPCAYTRDDKQFVRGKRRHRTLGVWRGPRVRCILSNKTYMGIHEFGKRTTSNRPVVSRPVPAIVTEDTWKKAQANLKAHFLFSARSAKHKYLLRGLIKCKLCGLTYIGIKANGNRAKKEQFYYKCNGANTPELLQVRCTAKSVRGDDLERQVWADVEAFLRNPGPVLAQIQAKLEIEVQSTGKVRERLKRIEGVLAQKAAERSRVLALYRRGRLSDAALDDQMEEIKKEESALEAQIEELRNQIRSADSVSQTVSSAEALLSRLRKRLDQPVSWEQKRQLIEILVAGIQVETFEAYGVKQTRTTVTYRFSLPEESSRVLLPTLYDSARCVRIPIEPKTIGDHLRRKRLSMKLRQKDVAERLGVTGACVYNWEANDSEPRLQYMPAVIEFLGYNPLPPASSWAERLVRHRTSLGLNQEQAARWIGVDASTLARWERGECEPARALAKRAERFLDAADSVAAMPRAG

SEQ ID NO: 2335 - protein, 545 aa, unidentified
  source 1..545: note = uncultivated organism
MNIFIYSRKSVYTGKGESVENQVEMCKVYISDKLPNAKQAEISIYEDEGFSAKNTNRPQFQQMLKDLKRIRPQYVICYRLDRISRNVSDFSSLIEELNHQNISFICIREEFDTSKPMGKAMMYIASVFAQLERETIAERVRDNMLLLARTGRWLGGTTPLGYTSEKLQEVVLDGKLKTACKLKENPGELSIVSSIYEKFLELRSVSGVSKYLIREGIGTRNGNMFSLPGIKEILQNPVYCIADEEAWDFFRKYHADICFERPDCSNRYGLLSYNKRDYRKKSAPRQEMDQWIVAMGKHKGVVSGKKWVTVQEILKSNIPTGIKPSIMHNSYSLLSGTIYCSQCNSRMFAKQRRSKERISKERSQKPYDYICNSKLRGGTDLCNCFNLNGRQADSMVFESLLPYMNENKNIFLLLDKLKRELQKQIGKDPCKLIEDKIKKNTGEINNLISTLSHDNLGEAFISRVNEKISELEGEITSLLEEQSRLKNKAGSYEESSLKINQASHDLISVRRVYKIMTLEEKRTLIKLMVQKIFWDGKKLHVYIDQ

SEQ ID NO: 2336 - protein, 555 aa, unidentified
  source 1..555: note = uncultivated organism
MTTRPTLRCAIYTRKSSDEGLEQDFNSLDAQYEACAAYVASQRHEGWKLVSERFDDGGISGGTLERPALQRLLAEVDAGRIGLIVVYKIDRLTRSLADFAKLVERLEAKGASFVSVTQSFNTSTSMGRLTLNVLLSFAQFEREVTAERIRDKIAASKKKGLWMGGTVPLGYDRHPDPQRRELVVNEAEAETVRTLFNLYAELGCLRRVEDEANRRGLQSKLHRYASGRTLGGGPFSRGQLHYMLTNPVYLGHIRHHDKLWPGQHPAIIAQTLWDKVQAALQARSKKPRRRGAGIADSAPLTGRFVDPSGDRLTPSHTIRKGRRYHYYVSNRLIAGGTDPTGWRLPARSFEATVAGVIADHLEQAAEQHTALALPIAADADALSERLRAAAADLRSPRPSELSAAIVQGKLTAETIRIELDPAWLSARLQVAAADLASDVMTIDSPIGRRRRGVETRIVTGRAVPLPDRTLVRALGRAHHWGSELRKGKPLHEIARADGVTEALIRTRAPLAFLSPRLQERVIAGTLPPHLTLERILRIGIPLDWSEQERALGITE

SEQ ID NO: 2337 - protein, 551 aa, unidentified
  source 1..551: note = uncultivated organism
MANSLQQTERVWNVCGYVRLSREDGDKEESNSVTGQKDLIRDYLSRHPDLRERGMKVDDGFTGSNFDRPGFQSMMEDVKAGRINCIVVKDLSRFGREHLDAGKYIENIFPFFGARFIAINDHYDSLHRNPESDEIILPFRNMLNEAYCRDTSVKVRSLFAVKRDRGDFIGSSAPFGYMKSPDDRHKLIADDFASGVVRDIFHWKIQGLGIGDIADALNEKGVPTPMDYKKSRGVRYDTPFRTKKESVWGATMVLRILQNPVYIGTLEQGRVTTPSYKVKRIIQKPREEWAVVENCHEAIIDRLDFEIVQKALSMDTRTGVVGRPVDIFGGVLRCRECGAPMVRKTVPSGRKKFVYYVCSAHKSAKTCSSHNIRDTVLEGIVLQALQVRIQTVAEVADLLEMTDSDRIHEAKMRTLRTELDEKRDEIERQQKYLNSLYESLTDGIIDRSEYKKFKKKYAERREEAEKQAEAIQVEMSKELTNDTEGRAWMERFRENLNFTSLDRAIVITLIDRIWVSRDRTVEIVFNWDDEFRRLLESVPADGTDRTEKGAF

SEQ ID NO: 2338 - protein, 512 aa, unidentified
  source 1..512: note = uncultivated organism
MKPPVRYCAVYTRKSTDERLDMEFNSLDAQRESCLAYIASQKAEGWVPVKKSYDDGGFSGGNMDRPALNQLLEDIKAGLIHIIVVYKIDRLTRSLMDFAKLVQVFDEYGVTFVSITQSFNTTTSMGRLTLNVLLSFAQFEREVASERIRDKIAASKKKGMWMGGKTPLGYIAAGRSLTIHPEEARLVRHIFDRYLTLSSVGALTLDLRQDGHVSKLHNFESGVIYGGKPFARGALYTILSNPVYIGRIRHKDSSYDGQHEAIIPVELWQAVQNRLQAQASCAAGSRKSRDVNLLKGLLFDIDGTPYSPTYTTKGKQQYRYYISQNLVQYRNHPKGIMARLPAQDLEHTIEQAVRSQLQNVEKLSVFLEEKQNHDALEHITLHQNEISSAALVAAVIKRVTVGEQMLKLELRCRELKNLLNEKLQLSLLDPEIESVLLNIPFEPRRGRKGALVIEAQGIKKDMFDLPPEALKKLVQGFIWRDEHFGGMTIQDIAAREGLTAPYLGQHIFRTFE

SEQ ID NO: 2339 - protein, 548 aa, unidentified
  source 1..548: note = uncultivated organism
MLNVAIYCRVSSEDQQERGTIETQIEFATKYCDLHQLNIVKWYKDDGISGTIPFESRPEASIMLQDAQEKKFDTLLFYRLDRFGRSARTILNGVHTLEQYGIKIKSMTEPFDTGDPAGRFLLTILAGVADLERSNILDRLWHGANRAARNGKWLGGICPYGYQVDDEGFLAVATTPLPGFEMSESDVVQLIYGLTTEQHMSTIKIADYLNALSIPPKYAIEGRKITKGKRKENTAGVWTPGRVRNMIVQPTYKGIHHYGKRSKKVREIIEREVPEIVPEDVWESAQLVLKDNQLEAVRCAKHKYLLRSLVKCSLCGLNFSGTPYRGSKGESKTYYVCNGKTTYRGKYMGKCLAKNMSADWVDEKVWDDCVDFINNPGQLLDGLSAEEASNHLSTEHELQLIASSLSQKDSEKQSILDLYRKQLINSKDVEDQLSKIINERAALEDRQKELKNALNTTTNEVNRKKDVIMLLDDLKQKISGEITWETKRSIIKQLVRQVFVHTVHSEDRDEPEVKLSVKFVFAQDVPRTDVRVDSVVISGKNVLVLPVK

SEQ ID NO: 2340 - protein, 563 aa, unidentified
  source 1..563: note = uncultivated organism
MSRVRCAIYTRKSTEQGLEQDFNSLHAQYAACSAYIASQSSEGWTLLPNRYDDGGISGGTLERPGLQALLADIAAGNIDIVVVYKVDRLTRSLLDFSKLVEAFDAAGVSFVSITQSFNTTTSMGRLTLNMLLSFAQFEREVTAERIKDKIAASKQRGMWMGGRPPLGYAARNRTLVIVEEEAELARCLFQRYLELGSVRQLLDALNRDGIQMPDRTAANGRLLPGGPFTKTKLFTLLRNPIYAGLIPHGAKRYPGHHPRLIDHELWQAVQARLDANRDGEQQAPTEKRVSPLAGLVFAADDEPLIASHANKGKVRYRYYVSRHLTGPLEDRAHRATSLRVPARELEGLVQRALAERIADPFRLMQDCGAEGLLSTVSADLDAKARVVAEELRSSRAAAQALMRIATAKLVIHLDRVEMEIRAEELLRKLGTNPGPDTPPISVTIPVRVKRSGRAVRLITHGGQSASATADPSILLGIARGRDWWATLTADPTLSVRTLAQREGLDPGYVGRMLKLAFLDPKLVQQFVNGIAPPHITQRKLLRDGMIVPRWSQQRVALESTASN

SEQ ID NO: 2341 - protein, 505 aa, unidentified
  source 1..505: note = uncultivated organism
MYAIYARQSVYRDDSISIKTQIERCQYETNGEPSKVYSDEGFSGKNTDRPHFKEMINDIKQGKITHVVVYKLDRISRSIIDFVNITDTFNKYNVEFISCNEKFDTSTPMGRAMLNICITFAQLERETIQMRVIDAYRSRSKRGFYMGGKVPYGFKREDTVIDGIKTAMYIEEPTESTHVKLMYQLYADSSNSLGDIIRYFNKNGIVHNRGKLWSTPRISEILRNPVYVKANADIYTFFAGKGTEIATPVECFNGECGCYLYSNIGSEKKVHKRSSVLNDKLLVLAPHKGFISSEEWLKCRTRCMNNKQSTKTNKPRNSWLLGKVKCGNCGGSLSLTKSNTKMGRYFQCGTELATKKIGCNGTGGTIYADLLEDNILTNIKEKLKEFNSLTYNDVNTNQIEINKIKVQIAQIEKDITEWVDKVQFTDGSLIERIAVKIEKLENQKRTLNEQIAKLTQSVSPKTISNISSLAKNWNKISFEDKQTIVDTLIEVITIANTNINIKWRI

SEQ ID NO: 2342 - protein, 504 aa, unidentified
  source 1..504: note = uncultivated organism
MTRAAIYLRISRDLTGQRLGVDRQREAAEKYARTNDYEVAEVFTDNDISAAGGKRRPGFESLLDALTDGRVSVVIAWNWDRLTRNRPDTVRLIETCQRTKAKVALVRGSDLDMSTPSGRMTAGILAEVAQNEIETKGERQSLAQRQRASMGRAPKGMRPLGYSVNGEVLDDEAEAVRRIYASFNAGASLRAVALALSGGEREDLPDVPTMQKHSRTVAIERNAKRATAGLDPRPVPSDGPWSPSTVLGILRNPRYAGYSTYTPKETLKDGNRRRSWRAQILRNDDGEPVRGQWTPIVLPDVWESVQDRLDDVARVTNKKGTDRKHLGSGLYLCGVCGQKVRGHSTRYRCAGHVMRSREQVDAFVVEIVRRRLALPDLRDLLPSEDDDRLQEIKQEISTHRARITRAERDYDSDDEYERITARMLNKITAEREAKIAALEAERLTLSSGSALGPVLGAEDPREAFDRADLGLRRSVIDVLCEVRLQPHPRGVKKFDPESVKVVWR

SEQ ID NO: 2343 - protein, 520 aa, unidentified
  source 1..520: note = uncultivated organism
MRQGGEGRTLCALYVRLSREDEDRQQPESESIQNQKALLMDYAEERGWDVYEIYSDEDYSGVDRLRPAFNRMLQAAEEGAFQILLCKSQSRFTRDLELVEKYIHGMFPLWGVRFIAVADNADTEVKGNKKARQINGLVNEWYLEDLSENVRMVLDMKRREGQYIGGVPLYGYRKDPADKNKLVIDPEAAETVRRIFRWALEGCGRQRIAHMLNDEGVPGPARYKAAGTGPHSGGDGLWSKTAVWRILHNEMYTGVMVQGRRKKASYKSKKLVSVPENQWYRVEGTHGAIVCRETFDAVQRNLRLRSKTGGAGEPHLLSGLVKCMDCGSTLSKVTNGKPGGAAYLRCRLYADSGGEKRCTRHSVRLDRLIDLVSERIRQDVRSCCAAEPLKIRPAPRDLRGEALERERKMLAGQMEKRSYALRELYLDKVSGLLGPEEFKELTRLFQEEKTCMERRLEKIGEELASRIGNSPQADPADRIQALLKLERVPRELVTALVEKIEVGERDLDTGEQKVRITWRL

SEQ ID NO: 2344 - protein, 507 aa, unidentified
  source 1..507: note = uncultivated organism
MKAALYCRLSEEDRDKRRAGDDSASIQNQKAMLRQYAAQQGWEVFQIYSDDDYAGADRNRPAFRQLLADAEQRKFDVVLCKTQSRFTRELELVETYLHDRFPRWGIRFVSIVDNADTDNKGNKKARQINGLVNEWYLEDLSENIRSVLTSRRQNGYHIGSFAPYGYEKDPEQRGRLRVDAEAAAVVREIFGLYAGGCGKTAIARQLNIRGIPNPTAYKQQHGLRYRPPPQKTGSLWTYATVANILRNEVYIGNLVQGRYGSVSYKTKENRPKPPDQWLRVTGTHEAIIDHDLWERVQAQLAQRARPFSSGELGLFAKKARCAGCGAVLRSSKSRGRHYLQCATHHVAPDDCPGAFIAVEKLEQLVLQELGRLADRYLDRKLLEQALPPPSPPQKAPLLRAQADNAKQQAEVTAAMRALYLDRGRGILPEADFSRLQADFSAQLRQLEQTAAALQKQLEHADCVPLSPPTSLPDHLTREAVDLLVERVVVAKRLPGTRIVPVTIYWRF

SEQ ID NO: 2345 - protein, 553 aa, unidentified
  source 1..553: note = uncultivated organism
MARTSRRFEERKEITNNRTQYRAGIYTRLSNERTESWRDKSSSIETQTLSCKEYALKENIQVVEVYTDYEYSGTNFNRPEFQNMMQAIRERKINCIIIKDLSRLGREYLEMGRLIDKVFPFLGVRFISVNDNLDTIKEMDSKKSFEVTIKNIINDMYAKDISVKIKSTKISRAKNGYFIGSVPPYGYKVIKEEGGQRLEVDKNVRFIVEEIFALTLEGKSQLEVAKHINEKRYATPMTYYRTGRIYRIDDDPQWHVGSLGKMLSNQSYAGDMVQGIKSQFLAEGKKQKRAEKKDYIVVQNTHEAIISRENFEKIQTQRKQRKAESVFSSKAHNLKREPKNRFQGLVFSCDGEELYRRYRFSSHKIRQLQYLYRNERFNGSIGEKESLFIMEADLDKRIATDISKAIHTITNKTSFSNRIRAKYDEAIVEGNRKLSQYDNLIQKEEITLQKSYENYSLGKIDRNTYLLERDITQGRIETIEREKQAQEIKISNLKKDKRKALRWIKDIFSAKGLEKLPAQLIASLVENVIVYDKHEFEVVYKFNMESLKEESNE

SEQ ID NO: 2346 - protein, 531 aa, unidentified
  source 1..531: note = uncultivated organism
MERMTPPRVTKIEAARKPKEPEKSRLKVAAYCRVSTSQDAQLESLEAQKEHYGKVIRRHEGWENAGIYYDEGITGTKKEKRPELMRLLEDCRAGRVDLVLTKSISRFARNTVDCLEMVRMLSSYKVGIFFEKENLNTLEMEDEFILTILGSLAENESLSISENEKWSVRRRFQKGTYRQAVAPYGYRLEDGKLIPDKGTAPVVQFIFSEACRGDGAHRIAKELNGRGIPAPKSGLWKSCTVDEILRNERYTGDAVYQKTFTDSSFVRHKNKGECGKFLHRNHHEAIISREQYEKVQIIRQQHRAERGTVDGSSTYAFTGKLVCAECGSGLKRAIIRGRSSGAYIAWVCQGHVRDKESCSLKSVEEESVKAAFTTLANKLVFSRKELLEPFAEALREADGGEESARIREIDRELDENAGKLHRLLSLAGENLLEPAVFNNAQAALSAERKDLNSRKAVLAERIRDGSMDRTEAERMLKRVREMEASEEFDEGFFRESVRKVHIYSRHEFGFELSCGLLLKEKTVWEKTESEA

SEQ ID NO: 2347 - protein, 559 aa, unidentified
  source 1..559: note = uncultivated organism
MRVALYTRVSTEDQAREGFSLEVQRTYLLQYAKNFGWDVFCSMSGRDVYMDDGYSGGSMDRPALQRLLFDARNKQFDLILVYKQDRLSRRLKDLLGLLEEIDSLGIGYKSATEPFDTTSSAGKMAIQMLGSCAEFERNRLVERVFPGMVVGVKRGHWQGARYAPYGYRYNKEIKKLEIYPEEAKIVKEIYAMYISGTSTSRIAGHYYNLGIPSRQGGRFYNKFISNILQSKVYLGMLVWNRRRYNTKEKTKNGEGKGYKYVNNDPSKIIEVPNTHEPIITQRDFDEARALLKRNRTNGVVRFRNNVYQLSGILKCNECGGNYRGITATVNHRTKMRRPWYRCSSKGIPHIKCNNKSVTADAINKQVWDIVEVIRQNLHVLEELGDMIKLNASEPEQLYVEQLEERDALLKKNLEKQKGIYELFSEDKINLALYKDRAELLSNEEKKLKQDIKAIQLKILDKRNSVNLVKATQDFLLRLRSTPDDRQLDYLVKTFMRIIFKSIHIQNQEIVKFDLNEPWKTCYEEGMKWLKTSEKTTIQAIPEAKARRSYVCFCAPSDVR

SEQ ID NO: 2348 - protein, 571 aa, unidentified
  source 1..571: note = uncultivated organism
MLNYELLNELRKGTENKKRVAAYCRVSTDKEDQANSFESQQRYFKAYIEREPDWELVEVYADEGITGTNTKKRKAFNRMIEACKNGEIDLIVTKEISRFARNTLDSVGYTRELKKLGVGVIFMNDGINTLDPDAELRLTIMSSIAQEESRKTSERVKWGQKQRMEQGVVFGRDLLGYKVQGGKLFVEPEGAKIVRLIFDKFTNENKGTHVIARELREAGIHPMNVKDWSATVILRVIRNEKYCGDLIQKKTYTPDYLSHDKKYNRGQEEFVILRDHHEPIISREQFDLAQSILNSRSGSLQGKDKHSNRYCFSGKIKCGKCGRSYVARYKKRKDGTQYKTWRCFEASRNGSPKEDAQGNAIGCSNDSIRNEDALHIMYLATQQLELDFVGIVAKLQAAIEEVLRQDIGWFDFDGMQERIAEAEKKKSRLIELYTENLINMEEFVSERKKCDEEIGKYRQMIESAEAQQEVNEKKSALLKNIGDAIGEIVNGLHDDDEFYREILDRMVVHDREHIDVYLKCLPQKLSFLGKSAALLAEKNGQSGQETAVLPTCDTSVPMSVSVARMRSSGME

SEQ ID NO: 2349 - protein, 518 aa, unidentified
  source 1..518: note = uncultivated organism
MKKVTKIKGTVVKKVRKIRVAAYIRVSTSTDAQMESFEAQEAHYQKLFQDHKEWTSVGIYADEGISGTSMVNRDGLQRLLDDCRQGMIDLIITKSISRFARNLTECLETVRELSSLDVAIHFDKEGLNTQQMDSELLLSMLSALTESESKSISENNKWSFKKRIENGSYKHSVAPFGYDISDGQLVVNEEKASIVKSIFTWYLSGDGTYVIAKRLNDLGIKPDRGKEWRDNSVMYILKNERYIGDALFQKTYTDDNFKRHWNDFEVEMMYVEGMHAPLISREIFDQVQILIEERREQILNKDTKVYNNRYSLSGKIQCNQCGANFVRRTHYISGERSYIAWACSNQLKNPELCGIKFIKESHLRVAFITMLNKLIFGRKEILEQTIRKLSQLDPKAASKRDNLSDELKEVQDKLYELTKLVEADIIYQAFFYEEENHLLKEKKRIYAKLRRIDSKEHQYSYQLQELKELYYALDRREYFTRYEDDLMERYVKKIHVVSRDQVVFELTSGLKLAERVMV

SEQ ID NO: 2350 - protein, 581 aa, unidentified
  source 1..581: note = uncultivated organism
MNREGKKCVLYSRVSTEMQVDGFSLEGQITRMKTFAEREEMDIVKRYEDAGKSGKSIAGRPAFQLMLADIQEGKQIDYILVYKLSRFGRNAADILNSLQKVQDYGVNLISVEEGIDSSQASGKLLISVLSAVAEIERENILEQTMNGRKEKARQGLWNGGPAPYGYSLKDDTLIINEQEAEVVRLIYDKFANTDMGYNGVAKYLNLQGIAKNKHKESDITAWSARSVQCVLDNPVYAGKIAYGRRIKEKVKGSRDDYRTVRTSDYLVYDGKHDALVDQKTWERVREKRNITGFKSPSRVGRERIHLLTGLLKCPKCGSPMYCNRHSWQKKDGTYKDVYYYYCGHNGNPRGYVCNYKAKLRTTDIEPYVVEAIKELIRGESFAKEIESRIGQKANTEAIDTELKNYKKKLIETETNKANLEETIDNLPLDIKYRERKLKDMSARLDSLYDTINELEECIKDASLRRAAMEEEVLTLDNVYKLLLSFDKIYDIMSDKEKKDLISYLIKDIQIYSNEEQVEMPLKSITLNFPIYSDSGEVNKLLWENQDGVETLVVLSHKKPDSHLEVKIDFDNTSLDKTAIAE

SEQ ID NO: 2351 - protein, 525 aa, unidentified
  source 1..525: note = uncultivated organism
MTRRSGRFGKAENPINRCAIYTRKSTDEGLEQEFNSLDAQRESGEAYIASMKHEGWVCLPARYDDGGFTGGNMDRPAVQRLMEDIEAGKVDCVIVYKVDRLSRSLLDFTRMMETFERHQVSFVSVTQQFNTTSSMGRLTLNILLSFAQFEREIISERTRDKMAAARRKGKYVGGAPILGYDIDRDRSCLVVNEQEAARVRQIFEFYLEQQSLIPTIAELDRRGWVTKRWTTKKGKQRGGRPFNKNNLYGLLTNATYIGKICYKDEIYEGQHQAIVDPEIFDRVQRLLRLNHRTGGTRVRNQFGALLKGLLHCAPCECGMTHSHTTKDGSKRYRYYVCVNAQKRGWQNCPSRSIPAAEIERFVVDQIKAVACDPGLIAETLAQTRHHVEESLRTLEAERQSIDRDLVATNKEISKVAIEAAVTADDSPTTRRLADLQERVQSGERRLTEIREEALRLRAELVGEQDVARALHEFDPLWESLSPREQARVLHLLIERVDYDGEGGTVSVTFRPSGIRELATLEEEAA

SEQ ID NO: 2352 - protein, 631 aa, unidentified
  source 1..631: note = uncultivated organism
MAPEDGVVLGALRKSVVRRRRPGQAEDLLATRLDLQQAKITAHFPEGTRFIWAMDPGVSGVVSPFKRPVLGPKLLDLDSWSVLAVARFDRVSRSVRDFSDLIEWLKEHDKLLVCLDPPIDLSTPGGRAFAQMLAVFAEYERELIRERVADSWHDLKDEGKWPGGVVPFGRVPVLDASGGWRLAPDPQYAPVVFQMVRKYLAGDAYGPIADWLNAEGIPQSRDVQRIRRALLHAKESGQEPPAPAQIIKGKGWTVNGVRQVLTSPTIGGLLPDSDGGLRRDADNLVVRIDPLIPAEDYERLRLALRDRAYASRVNTSNLSSVAYCFLCSAPMHITAYDSSEGKRYRYYICDGARAGKCRSLRVPASLLEDLAEQEFLATVGEQYILEPVYIAAVDHSTELADVIEAIGHLEAGYQSGKVYKGAGGFERFATMMNNLEERRDRLAAIEPTPARVEYRKTNTTFTQKWQATDQAGRRHLMAESGFRIYYARTPVPAAEIDAQARELGITKTAAGLKLRADHIRYELKKTRNAATAARLETELEEITRLRELRKSIPRYKDYHAAPVSEQLARAAGLVASSQPVDLPSASDTEAAWENLLAAPRAILNLPRRPESQSIGLPHRRRKLRQPVPGGS

SEQ ID NO: 2353 - protein, 515 aa, unidentified
  source 1..515: note = uncultivated organism
MPQVHVIEPVHSCEPAKLRVCAYARVSSDSADQLNSFASQVRYYTNLIAGNEDWTLVDIYADKGSTGTSTAKRSEFRRMMEDCRKGKIDRILVKSLSRFARNTQDCIAALRELRQLGVTVVFEKEHINTSTMANEMLISMMSAFAQEESVSISKNMRKGAVMRMQNGTFRISMPPYGYRYDASGVLAVEPFEAAVVQEIFAAFLNGKNIGKIAEEMQARGVPKLRGECKWSKHGIRYILTNERYVGDQCFRKSFRTDTLPYKKVDNRGQLPQFYMVGSHPAIIGQDVFQKVQALLAQHGQQFGHDPVKHDSPWAGILSCSVCGAMLYHRKRNGRDCWACSRHLKDSQSCSLPVIAEADLAICFYTMLEKLQQDSCNILENHLERLEQIKERLLESAPDRTRLQQQMADLLSQSHTLSRLLANGCVDSAFFIAQNNGIQKKLTEIKERMQQQQCKTDLEEKICRTRDLIAYIRGVQLSREDRPAWKLVIKKAVVKDSGVIFTLVDDLEFEEGWAKR

SEQ ID NO: 2354 - protein, 521 aa, unidentified
  source 1..521: note = uncultivated organism
MRVAFYGRVSTEEQADRGNIAGQAEFARKYFELHGADENVDSYELYLDEGVSGAIPLEERPEGSRLLADARAGRIAAIYFYRLDRLARSTQVVLNTYNQLEGLKVSIKSMTEAFDTGTPVGKFFMTLLASIAALERDTILERTQLGKERKAREGCWTSGPPPFGYRIGPDKRLVVHLPEAETVRLIFRLYSEGMSMVPLAQYLNARGIATPTASKGSKRASTGLWHAAHISIILRNTAYMGEYRTMRRSRRGKEQVIIEVPAIVSVGRFKQAGRLLTQNGDAARGSRGRSYLLRGIIFCGHCGLAMVGNRSGRGGRCYYRCTGTVDHGPGKTCSNRQVPAGEIETEVWEDIREYLKNPGSVMEAVKTRLTRDRVDLDPVKAELAKLDQSINDKKIARSRLITLVARCLVTDREAEADLGVLAADLRLLERRREILLSQVMDHQDSRGRAAGLSLVLERLSSLIDGLEPMPEVVRLLVERVEVSAGLQEGKTISRAEVYYRFQPSFSSPRAGGFELSIPGDA

SEQ ID NO: 2355 - protein, 554 aa, unidentified
  source 1..554: note = uncultivated organism
MNHKSSPKKVAIYARVSTEEQAEHGYSIDAQLETLRKYCELYSNEVVDEYVDRGVSGKSIKGRYELQRLLKDAEESKFNEVIVWKFNRMARKNIDLLHIVDLLEKNSITFRSFSENFDTNSSMGRFALQMMGAVGELERNTIVDNVKMGHRQRAKMGLHNGKVPLGYTVVEGNGNSRETKSEIIIVEDEASIVRYIFEQYATGHGLKTIANDLNHRGRKTQKGNPFSTTAIRDLLDNPMFVGKIRYNQYENWAEKRRKGKSSEVILVDGHHPPIINKALWEKVQLLREKKATLPKKRFEGEYLLTGLIRCPECSAAMTASRTVNRSKDGEKITRMYYSCGRFRSQGSAVCHANSVRKVEAEQAVTDRIRQAVVNPEILQRVVRSVNERRSGRIKPLRDELAAVQARITSLEDKKRKYLELYEIDDIDRDMFSERLSILNKELDTELTRKSKLELELRDDQADPASYELVRSLITKFDALLRHSPFQQRKTLMHLIVKKITLDDKKRVSSVELAFNEQTEKHFLSVAPSAEPIAEGAFPLSGKAPHIKQTLRIII

SEQ ID NO: 2356 - protein, 562 aa, unidentified
  source 1..562: note = uncultivated organism
MQRKKVRILLRVSSNQQLEADGDLSIQRQLVTEYIACHREWELDTKEYFEGSNSGYKNTVSDRDILWEIYKDAEAKDFDILVVYKDDRLGRRMWEIGGYVMSLKSLGIDIYTVKDGCISPESDDIMGQIVLALRYGNAQKSSSDTGQRVKDTAQKLVQKGKFMGGSAPFGYTLEYSGEISKHGRALKHLVIAPEQAAIVKHIYHLSYDKEYGSAKIAKTLNEDEKYKSFAPNDVWKGGTITSILTNPIYAGHTAYKRREKKNGKTKRLDSTEWQLSIKPNENITIIDSDTWNKVQEKRKMRSYKYIRKSANKEVTVIRRNDGVLALVDVLHCGYCGCKMVNGSSYNYWTIKATGERRAKQIPIYKCQTAWQGVPHDKTIQHRADKIEPIIFETLAQYIERLLKNENVFEQIQANQSTEKKALEKTVFKEKNKLKKIQQKIDVLENNVPNAMLEEYPLSLEELVAIINKHKEQLKTQQEVIKQKEADLNCVAVNAADRQELRQYIPSWKDIFMHTDTAAKRVLIDKLIERIDITKDDIVIRFKININDFFQHPQISDGFVVPK

SEQ ID NO: 2357 - protein, 541 aa, unidentified
  source 1..541: note = uncultivated organism
MPKTTLPRSARRYRAAAYARLSVDDNTLGTSNSIINQLALIKDFAEGRDDLDIVGEYSDDGYSGSNFVDRPEWNRLIGDIEEGRIDCIVVKDLSRLGRDHLGVQRYLDQIFPAIGVRFIAVNDDYDSSAPKTNADGLMLPIKNLFNSMYCRDASLKTKASLAAKRKRGEFVGSFAPYGYKKGEGRDRGRLVVDPEPAGIVRRIFDCRIGGMSAAGIAEMLNEAFVPCPLEYFRVEGQVRSANFQRREKAAWSARIVLRILANDVYAGTLVQGKTRKPDFRSKAIVRVDESEWDVCRDAHEPIVDAETFELAQNLAARDMRNAPGSKTALPLSGYLFCADCGATMARHSSFRSGGKRHYYYSCESHRKDKDSCTRHKIGEEELFRAVVDAVTRFARAGVDDNAALEGSNPFRHDRRGELTRRGSEVDARIERSRNLRLRMYSDYSEGVISKEQYTELAKGNDRRIRDLESERARIDQELAFLSSGKAQTWEDALARHRDNREIDRVMVVELLDKVLVGEDGEITVDFRCGDPLSASVAKEVV

SEQ ID NO: 2358 - protein, 607 aa, unidentified
  source 1..607: note = uncultivated organism
MYTTLKPDRNRQRTVVFYGRVSTEHEAQISALENQLQWYDDQAKKHNNWNVIDKYIDEGITGTQAKKRPSFLQMIEDARQGKFDLIVTREVCRFARNTVDTLTFTRELKNLGIEVYFVEDNIWTMDGDGELRLTLMATLAQDESRKISERVRAGQYISRENGVLYGNGNILGYDRVGSTYVINPEQAETVTIIYDYYLHGYGIKKIVNELYRLERRDSSGNVKWDVSKVNRILKNATYKGYIGYNKSSTNNYLEQKRKNNYDTSTYVYHKGDFEPIISEAQWDECTRIMKSRCQVLKNSMGKDKKFGHNPSTDPWLNKLKCHCGSGFKKYKWRTNKKDGKEVYGYSCYRRSQSVSPRYLSNHGIEADGVCDIKGICQWKLEMMADKILGEVLADRYEIIERVLDLINKHCMDGTDSLQKNAYIIKSKIEKLEAKIRKLVDMYAEGDIEKDEYRTVRADSENELECLKAELKRNDTADTVSGNCIDTDRIRRTLDEILSADNGHINDEIISKLVSRITPVDNTNFEWIINLGEEKSEKIRCTLTGRKNSAELTIGDGESCHFTYWLINLLGLNGEIVIKARAGELLHRLQSRTSNFFQFFQFQSNQYE

SEQ ID NO: 2359 - protein, 549 aa, unidentified
  source 1..549: note = uncultivated organism
MPKIMRYVNYGRVSSIKQKDEETIEMQQDALRAFAAGNRLTVVDEYYDEAQSGTLPFADRPEGRRLLADAKANKFDAVLFYRTDRLGRSAFEGLRICQQLSDLGIAIRSISENYDTSTPTGKLVFTMLLALAENELSTIKKRMNDGKQRKLRRGLSAVVGHPPYGYIRTPDQKLAIDNTLVWGNKTKADVVRYIFETTVVKNTGAVVMANHLNSLKIPACGAKLWSQGTVLRMLKNPKYKGVAHYNCDSKLYDDIIEIEIPPIVSAELWQAANDGFLHRKTFNRQKMSRNHYLLGQGLIRCAHCGLSYVGIYYNNRPPTQTKRFYHCNGKARKAFYLTHHPEQVCLTALPIPADWIEGVVWDECCKLLTNTKYANETIQAYYADKPQHENNIDITDIARTIQEIKKQRDELISMRLKNIISEDDIAARLPKLDKQITELKKQLEKLQQNAPVDIDTEMQNTKETLRKLKKALPAAGDFETKRAIVQALVQAVTVTTNNDRTISIDVTLNFGPQGLGRKAVEKIRELGIDTRDKLAKTAAEISTSYATCP

SEQ ID NO: 2360 - protein, 553 aa, unidentified
  source 1..553: note = uncultivated organism
MSAPPKLVRCAIYTRKSTEEGLDQAFNSLDAQREACEAYIQSQRHEGWRAVSKAYDDGGYSGGSLERPALATLLGDIKAGQVGMVVVYKIDRLTRSLADFSKLIETLDAAGCSFVSVTQAFNTSSSMGRLTLNVLLSFAQFEREVTAERIRDKITASKKKGMWMGGMVPLGYDRDGNNDQRRLTINAAEAKSVEFLFSAYDETPCLSAVCDAAREAGILSKPRQFKSGATYGGKPLRRGQVHFILTNPIYAGKVRHRDKVYPGQHEAVIDPDLFDRVQDKLVINGRKPRGTVSASGRTRSPLSGRVVDTNGSRLTPTHTRGKSGKAHRYYVSTTSREATAHGSGWRLPASALEEAVGQATKSHLTTAGARLTLLQDAASTTQDQAADIGASLASLSTAELCLLVDKVTIASGHLDILLDKAALAERFNLPLDQVNEEALTMTKPFATRRRGVETRIVAGNMMPSPDATLISTLAKAHRWIAQMKTGVSAATIAKSEKTSDAFIRVRANLAFLSPRIQEQILAGTQPADLSLERLVRSEIPLDWDQQERKFGFR

SEQ ID NO: 2361 - protein, 503 aa, unidentified
  source 1..503: note = uncultivated organism
MERSVGVYGRQSKDKKDSISIEDQVNRAIQTLEPDEHYVTYIDKGFSAKNTNRPGFIKMMQDINDGKISKIVIYKLDRLNRNLYDFCKLWRLLEEKNVEFVSVKESFNTSTPIGRAMVYISMIWAQMERETTAERVTDNYYSRIKTGRWPGGPAPYGFHNVKITGNDGKRIPTLEPNTEIETVKRIFNIYSEDNSSLGDIAKTLNIEGIPCRDRKSWDTVAVSRLLHSPVYVKATAEIYNYYKSIGVKNFSNEIEEYTGEMAAHIVNKRPSSNGRKYLEVSQWVISITNFPGTIDADIWLMCQYKLEKNRQIGNSGAGKYTWLSGLIKCGYCKYSISIAIYRGKKLFKCSGRYNHHICNQKKYKITIEEVESAVEQEIKAILNMHNQKPVYADIEEEASNKKKLSNELLILENKIEKLISSISEASSISMKYINAQIEKYDKRCHVIQKQLIDPTEDKRVKFNGIIFEELEFENKKLVAKSFLEKVLIFDEDIELCWKDNILD

SEQ ID NO: 2362 - protein, 525 aa, unidentified
  source 1..525: note = uncultivated organism
MNAVIYARYSSSNQTEQSIEGQLRDNYAWAKQHDITVIDEYIDRALTGTKDNRPDFQRMIADAAEKRFEIVIVWKLDRFARNRYDSAVYKARLKKYGVKVVSVMENITDSPEGIILEGLLESMAEYYSANLSENTKRGLRESALKGYWIGGHIPFGYKLVDRKLVADEKTAPVVRYMFEQYAAGVAKADLISELAAKGVRTYYGKPLNYSSFNSVLRNRLYTGYYAYDGQEIEGVVERIIDDDVYWKTQEQIKARSRAPATRKAKVKYLLSGKAYCGICGEPMVGVGGTSRSKKLYHYYRCSQRKYPVHCPKKNERKDIVERFVVEQTLQHILTPDQMKHIAKAVVIEYKKEFSGSRVSELKAGISKIETELEKLVDTLIDAPKLAHKRIYERMETLELQKADMQESYAKLNVASKIELTEEEVEAWLEQFRHGSVEDVEFCRKIIDTFVNSVYMYDDRTIIFYNIRGGKKLSFDEVKTAPDTVSRAEEECSYLNTHASVRVTKYEHYYVFVSGVLGLVVMKPDA

SEQ ID NO: 2363 - protein, 550 aa, unidentified
  source 1..550: note = uncultivated organism
MEENKKIVKCAIYTRKSSEEGLELEFNSLQAQREACEAYIKSQKHEGWILVEKQYDDGGFSGGTLDRPALKELLRDIENDLVNIIVVYKIDRLTRSLMDFSKIVEVFDKKQASFVSITQQFNTTTSMGRLTLNMLLSFAQFEREVTGERIRDKYAASKKKGMWMGGKPPMGYYRKEKKIYPSEHAKSIRVIFNKYLELKSVAGVKHWLENNNITSQNGKTLSVGNVGSILLNRAYIGEVGHNGIWYKGEHQGIIDIEVFNKAQEIMTENKVERTNYKPTHSLLSGKIFDDKGNYMSPARSTGHKRQKYKYYVSQAVIRHEKKKVGEITKISAIEIEKFVDDWFVEIFNDKTEILKLFDNLGVDEQKVLLASLKRFVITRGIEKVLIKRVQIFKNEINLTVSRVQLKELLRSIYEEDAMKVLTPEYLKEEITFTRKYKVAVIDNGSKIILGSFYNQNAARNETLINAIITSHKWNKEVLYENKSVREIMTREKLTKRFVARMLNLSFLSPKIVSAILQGKQPPDLTVRKLLGINTTDWKEQETSMNIYSLS

SEQ ID NO: 2364 - protein, 527 aa, unidentified
  source 1..527: note = uncultivated organism
MTTFRCAIYTRKSSEEGLEQGFNSLHAQREACEAYVLSQAGEGWKALSTIYDDGGFSGGNMERPAMRQLLADIDRGLIDIVVVYKVDRLTRSLSDFSKIVDRFDAKSVSFVSVTQAFNTTSSMGRLTLNMLLSFAQFEREVTGERIRDKIAASKAKGMWMGGRPPLGYDCADHRLQINSAEADQVRSIFRRYLELGSVVALARELAATGVRSKSWIGKQEQALGGHVLSRGAVYHLLANPVYRGAIRHGKLLYAGSHPPIIDEVTWDAVQARLAQNAPKSPVAPKIGEGALLKGLLVDDLGNGMQPIHTRRGDRRYHYYVTAARVHGDDREVGSLPRIGAGTLDAVVLDRVGGLLRSSWRPGAPVEARVREALSKVTLGAAKIGLTLHAESCRPNVEGSVLLAGLVEVEIPIRLKHRQGATLITPDDRRMARTPTLDRALVRALSQTRDWRRRLEAGDVASTRELASREGLCNRHAGRILPLAYLAPDLVTMVLEGLQPRAMTLQALTAKPLPRSWADQRRLVASFS

SEQ ID NO: 2365 - protein, 588 aa, unidentified
  source 1..588: note = uncultivated organism
MDKTAVKPVGIWIRVSTEDQAQGESPEHHEKRARFYADSKGWKVREVYHLEAVSGKSVMDHPETQRMLQDLKSGRITALIFSKLARLARNTKELLDFADIFESSDADLVSLQESIDTTTPAGRLFYTMIAAMAQWEREEIASRVAASVPIRAKLGKSLGGAAPFGYRWVDKKLIPDPQESPVRRQMYNLFLENQRLKTVARLLNEGGHRTRNGSKFSDTTVGRLLLDPSAKGLRRANYTHSRGNGKAWKMKPKEDWVFTEIEPIVSEDLWNQCAGLLEDRRAKGKLVAKKATQLFAGVTFCHCGGKMYVPSNTPKYVCYKCRNKMGVQDLEAIFQEQLKGFFFSSDEIANYLAGADSTIKEKEELLATLEKEEGEVKAEMDKVYRLYIDDVITPEGFGSRYKPLEARAKQIAEQIPTLQGEIDFLKIRYQSSDQILNEARDLYSRWASLSQEEKRRIVENLAEKITVGQNEVAIDLCYLPPSSEIVAKGQRSDIPALPFCHLRLKAPKPRNLAYPKTLDSLGAKIRERRLNLGLLQRQVAEILGVSESTVWNWETGRAKPARRYMPKILEFVGFKDLEAAGTLAGCQE

SEQ ID NO: 2366 - protein, 526 aa, unidentified
  source 1..526: note = uncultivated organism
MKKKIRCAIYTRKSTEEGLEQDFNSLDAQREACEAYIKSQMHEGWILLDRQYDDGGYSGGTMERPAFKQLLKDIEDDEVDIVVVYKVDRLTRSLMDFAKIIDVFDKHNASFVSITQHFNTTTSMGRLTLNILLSFAQFEREVTGERIRDKFEASRKKGLWLSGTIPYGYIKDDHHMLHPDPIYVDNVRIIFESYLNIKNVLKLKKYLADQKILTRSGKELSKGSLYHILSNKVYLGKIVHKNKEYEGLHDAIISEELFNDVQNILKVNAVERKHSTNAKTGSLLAGLLYDDKGNKMSPSYSNASNKLYRYYVSQAVKNPTDYEKGQITKISAGEIEKFVQEDLEKLLQNTHKMQGFIENYSVEQQRSILNNIQTFEPDKIFLRTVVKRVDLRVDRISISYDIGYIVKYFATMAFNAEFKYSEDDEQIIINQLDVQISLTPQRQNKIIIPGKQNYDMKLIQAIVKSFWYNKLGAERKLPPEARNGNNKRLRKLRFLPPEIIESIMNGTQDPELNVKKLIEMAETCCQ

SEQ ID NO: 2367 - protein, 549 aa, unidentified
  source 1..549: note = uncultivated organism
MSDCQKIYKAAVYVRLSKEDGDVADARKAESNSISNQKSLILNYLKDKKDIKVVSIREDDGYSGATFNRPAFQLMMEDVKDGKVDCIVVKDLSRFGREYIDAGRYIERIFPAMGVRFIAINDNYDSASFHDQANEIVIPFKNLINDAYCRDISIKIRSHLEVKRQNGDFVNNFCVYGYQKAENDHNRLVPDEYAGLVVQDIFAWIKSGMSLDSISRKLNEQGIKSPMEYKRSRGERYRSAFKKNECAAWSPLAVRRIATNPIYTGTLIQGKRTTPNHKIKVEIWKDPEKWAVVKNNHEALVSERDFQIVQRLLDKDMRTAPGQEEIYLLSGIAVCADCGALMARKVSISGGKKYAYYMCSENKKHKKCSPHRIRQDVLEEQTAEAIRETIGQLIQADEVIRKAGDIMNSRVDKKKQLERIKVCEEDISHYDEMLVSLYEDYRDGIVSKEDFGKIRTSFEAKRKHSEQAAARLREEAEKEDTGRDRVASLIKEFGQYCNISKLTRSIAVSVLESVRVHENGRLEVVMDCDDEIREVIERAQMASVERQEV

SEQ ID NO: 2368 - protein, 521 aa, unidentified
  source 1..521: note = uncultivated organism
MSRKRKTSTAQAIRCAIYTRKSCEEGLELEFNSLDAQRESGEAFIASQQHEGWVCLPDHYDDGGFSGGSMDRPALNRLLADIAAGKVDCVVVYKVDRLSRSLLDFARIMETFDKNGVSFVSVTQQFNTTHSMGRLTLNILLSFAQFEREIIGERIRDKIAAQRRKGKWAGGVPVLGYDVDRSNPSPKLVVNAEEAVRVRRIFSLYLELGSLLPVVEELNRRGWRHKTWKTKKGLPRGGRAFDKCSVYAMLTNPIYIGKIKHKADIYDGEHEPLVDPLVFEQVQSTLQKHGRGRGNYLLNKYGALLKGLMFCSACGQTMVHNFTGKGSKRYRYYTCGKAIKSGWKSCPTKSLPAGEIEAAVVDQMRCIAHDPGLRDEVLRQACSAATDTLAELATQQRQLESQLARDHTEIARLAVTPEPSSATTARIADLHERVARAEQRLSQVRDRVGEVQRRQIDAGDVAAAFADFDNVWNELSTREQTQVISLLVSRVEFDPSDSTISISFHPSAIKALAEGTIEDAA

SEQ ID NO: 2369 - protein, 539 aa, unidentified
  source 1..539: note = uncultivated organism
MANANGHDDRPMSAALYARVSTDDQRDRHTIGGQIEALRGFAPHWNMNIVEEYLDDGISGTVPLDKRPAGSRLTEDAKAHKFDVVIFYRLDRLARSLRTFLDIVDFFEEVGIGLRSMTETFDTTNPMGRFAIQMIAAVAELERGTIIERTSMGRARVATMGKWTGGVVPYGYLVDVDGYLTPDWTPRNGCAFSEAEIVQRIFRMIADERNSAMATAKQLNDEGIPMWRKYHRRGQTEAQYKAKPGASWWPTNVTRIIRSETYKGTHVWDAKGRKIEREVPTLVDGEIWERAQRQLDSNKRLSKREEDHLYLLRGLVQCSNCGRMYVGSLNTAKGGDWRRYYYRCGSQLGDKAGRERCDAKVIGTDWLENLVWEDIESFVMNPGGVIDKLQERIETELQAAPSEGRKRELQQAIASKETEKDRLLDAYRRGLIDIDALDAHVQRSRLELEPLQKELASMAAADAERGVNIGKLANAESLLKTLRDTIQGTLDWKTKRQVVEALVWGISVHTTGEGRKKKATVEVTYAFEPIFHAVESGTA

SEQ ID NO: 2370 - protein, 506 aa, unidentified
  source 1..506: note = uncultivated organism
MIRKADNLPPKPPSVRCGIYTRVSTPDQANGDFTSLDNQREMAEAYIRSQAGQGWVALKDRFDDAGFSAGSIDRPALTRMLADIAAGQIDCVVVYKLDRLSRSLSDFVALLDRFRAAKVDFVSVTENFSTTTSVGRFTLNLLASFAEFERATIGDRTRDKIAGAKRRGRWCGGFPVLGYDVHPDGGKLLVNEEEAETVRQIFLTYLDLRSLQATAAELNRRGWRTKSWATKEGTFHEGVAFNKAHLSRLLGNPLYIGKVSHHGQVYDGEHPAIVDEAVYERVQAALAGNNVSGGARAKNRYGHLLRGLLHCTACGCAMSPSVTRRGAKVFKYYVCGNATRRGWASCPHPSLPATEIEAAVIDRIKIVGRDPDLLRDTLAEIRSIQKTRTPALTAERRRLDRELLRLKDRGDAGDQIGVIEARLVEVGEELAVLQGASVDRRDLARALALFDEVWACLFPREQERVIGLLVERIDFDAARETVAITFRPTGIRSLAEEIEQAAEVTA

SEQ ID NO: 2371 - protein, 518 aa, unidentified
  source 1..518: note = uncultivated organism
MTRAAIYCRVSTDKQEDNTSLGSQEAACRAYCDQHGLTVADVYRDTLSGGTMERPALWKVRDAVRTGVVSDVVFYKVDRLSRDMTDALVLVQELERHGATPHCVTEPLEKGIMGDLMLAVRGAMARVERENIKQRTMLGKRTRVESGKVHNHGSEFYGFRRDKVAGVRLIRDDEASIVRAVYGWIATEGIGLREVARRLNDDGVPPPSAGKLTYDDPARVPVWGKGQLVRMLRNPAYKGVGVAYRWTVGGVERPENEWVHLPEGVTPAIVDMPTWEKAQARLDTNKGQSARNEQRPYLLRGLCACSVCGKPLRCETEHSKRIYRCSSRETPSGACGASRVPAWSIENWVWEFIVDARRDPARLIREWEKEREAGPDPHITAALESARHTLTKASARQRRLLALYGETEDETLLPMVKRDLDAAGKIVAGLTADVAALEAALAEARNQAIQLDTLRAYILAVETDLDAMDFSRRRQAVEAFGIKVVAQGRYVRGWKLTGSISLTEHFGVNTGVASHSSS

SEQ ID NO: 2372 - protein, 524 aa, unidentified
  source 1..524: note = uncultivated organism
MPKQTRSTEPNTPQRIRCAIYTRKSTDEGLDQEFNTLDAQRESAEAYIASQRHEGWIALPDLYDDGGFTGGNMERPALKRLLDDVEKDKVDCIVVYKVDRLSRSLVDFARIMETLEKNNAKFVSVTQQFNTTHSMGRLTLNILLSFAQFEREIIAERTRDKMSAARKKGRWVGGSPVLGYDIDPAGGRILVNETEAEQVRDIFACYLEHQGLVRTAQELNRRGYTTKHWTSKRRKEHGGRDFNKTNLFKLLTNVIYIGKVNYKGTIYDGQQPALVSEDIWNRVHTLLKQNGTDGGARVRNKYGALLKGLLVCESCNAAMVHAYTSRGNRRYRYYVCSHAQKYGWETCPSRSVPAHDIEEFVVEQIRHIGNDDALVAEAVSSARAENEERLHELQREQDVLRRELHSLSGQERELVKIMADVGEMSGAETRQLADVQDQIEQIRRRSTELREEVVAVSSELVTEQEMAAALSLFSPVWDHLTPREQCRVMNLVVERIGYDGEAGKIALTFQPNGIHALALNATPP

SEQ ID NO: 2373 - protein, 572 aa, unidentified
  source 1..572: note = uncultivated organism
MTASARSRVRCAIYTRKSSEEGLEQSFNSLQAQREACEAYVASQRHEGWQTIAQKYDDGGFSGGNMKRPALKQLLEDIAARLVDTVVVYKVDRLTRSLTDFAKIIEVFDKQGVSFVSVTQQFNTTSSMGRLTLNVLLSFAQFEREVTGERIRDKIAASKKKGMWMGGVAPLGYDVKDRQLIVNPQEAKLVGEIFTHYLSLGSVAALKQYLDQKKLRTKLRTSANGHAFGGKPYSRGGLYKLLNNQVYTGRIAHRGESYGGEHEAILEPETWEKVKALLAANNQGHRQPGRRVAPSILAGLVFDAEGNRYTPTHAVKKGRRYRYYTSQAVIQRRKGLSSLGRIPARELEQLVSSRIQALLASPQELAASCMESSELVNDLGRVIEAAQQMAERWAELSSQQWAELVREVVRRIVLRGAELEIEIDVEALVAGLLDKEWNASNEESRPQSRGRHLLTLKCSFALARRRGELRLVLPGSSISGAQPTSPLLKAIVMAQGWKERIIAGQIYSVQQLASEAKLNSRYATRILRLAALSPEIVEGMVHDGSMADYSLSSFITGLPLNWHDQGSLLRQG

SEQ ID NO: 2374 - protein, 510 aa, unidentified
  source 1..510: note = uncultivated organism
MKSSQLQTHGKPFAKEEIKRVGIWIRVSTDDQAKGESPANHERRAREYAAFYGWEVVELYDLSGVSGKTVMEHAEARRMLADIRSGHINALLFSKLARLARNTRELLDLADIFRDCKADMVSIQERIDTSTPAGRLFYTLIAALSQWEREEIADRVKSAMRMRAKRGLNLGGAAPFGYMWKSEKLVLNPIEAPVRKLMYELFAKEQRRKSVARMLNQKGYRTRKGANFTDTTVVRLLQDPTAKGWYRSNHTFRDEKGKLKSKEKSDWVMTPVEAIVSEELWNQCNALLDQRRNGRPLGPKPTQLFGGLTYCGCGERMYVFSRSPKYVCPKCRTKIPTDDMENIFREELKNFFISKEKVKARLDRADVELNAKRDRIESHRRQIEKLKTEMSKVYQLYQADQVSLDRFGKLYRPLEEQERMLSEELPKLEGELAASETRRTSVESVVLEAANLYKRWPNFSREEKRSVISSILEKVIVTKNNITLTIYYTTSSEPLTKRQRNLSGSSRPRA

SEQ ID NO: 2375 - protein, 522 aa, unidentified
  source 1..522: note = uncultivated organism
MRFATYVRKSVYSDRSDSVGNQERMCREYADLKFAGKIKSFEVYQDEGFTGANTDRPGLERLIADVKNGLLDSLIVYQLDRISRDVRDFSNIYALLEEHRVMFISIKENIDTATPIGKAMMYVTMVFAQMERETIAARVTDNMIGLAKKGFWAGGNPPYGYVRKRILVDGKKHVIIDPDPDAARYVEWIFDTFLRNGYSLQGMETAFKHQGIRTVNGGFFSTTQLHKILTMPFCAPATQQVRDYYISQGCRVEGSPEEWNGERGVMIYGRSTQKNKKHQLQPRDQWIVCVGAHKPFLPEEKWLAVQEQFRKNTFDKAQKYDIPLLKGTLRCAKCGSLMQVSRKKKKEGVTSHYYCRKRMRQGAEACDLSAIKCNLLDQEAISIFRRIQADPSIVRKYAAIDQPEEPAADVLSITRKISSQTAKIDRLAASLADAENSSARRYIVAEIERQDLNLDALKRELELAKAEKRKADAEGKSLEAKAQEIGNLVRGFDSLSAADRNGIVREVVKECTWDGETLFLRL

SEQ ID NO: 2376 - protein, 588 aa, unidentified
  source 1..588: note = uncultivated organism
MTTRIRCAIYTRKSSEEGLEQSFNSLDAQREACEAYILSQRHEGWQAIGSHYDDGGFSGGSMERPALQQLMTDISAGKINTVVVYKVDRLTRSLTDFAKIIELFDSKQVSFVSVTQQFNTTTSMGRLTLNVLLSFAQFEREVTGERIRDKIAASKKKGMWMGGFVPLGYDLDNRKLIINQQEAATVREIYQQYLRLGCVSALKEHLDRSPTRSKVRVDPAGNRSGGCGFSRGALYQLLRNHIYVGEIEHKGNVYVGQHQAIIDRNLWDNVQQSLTEHRQGNRKKTRAAKQSLLTGLLFDEQGNRYTPTHAIKNGRRYRYYTSQAVIRKTKESDVVSRFPAYELECAITERVAKFVANTEELLAAARELELTEGAMSSIVESARRWSSTWETSAGHERANFLRTTLQRVAVQKDSLRIELFRHALFREICDTAPRSATAIGIGNSAGRVQTITIHCPLLRTHRGKELKLIIGDQASGSTSAPALIKAIARARSWYERIVSGQAISITDLAAQEGIAPHYVSLILPCALLSPHLVEEILYGRGNPNLILTKLTTQLPLDWQRQTCGPEVGPCLRPGDLASDGNKKVRFFT

SEQ ID NO: 2377 - protein, 595 aa, unidentified
  source 1..595: note = uncultivated organism
MATNQKKAIRAAIYCRCSTDEQWQGKDFSTLESQAAICKHAIAMKEHEDGWSLGQIFEDGGYSGGSIERPALQELIDEIEAGNIHAVVVYRLDRLTRSIADFYELWKIFEMHGVIFVSATEAFSTDTPTGELFLNLLLSLAQWERQLTKQRVADKIAERSKRGYWNGGNPPFGYDYCKDKKLLIPNEQEAQIVTNVFELAAQYGTPTEIAKQLNKDGIKTKSFSATKKDGKTKMMGGKRWVGQNVTRLVRNTIYKGVILHGDNQYEGRHKALVDAKLWEKANKKLVEKKPAQSLTRRSNRHEMLLKGILKCDHCNKQLVPKPAGKKDSDGNPYLYYTCGDINKHGKKNDCVLRNIPARAFEDFIIKLLAELGKHPDVVKATAEAAKREHQEAVKPFEAKLRKVAKELDEVSKEVASLIDMAKRPEMRNLSGEFMAEADALGKRKSDLQVERQKLQMEIDYRSSLVVDETILCKNLTDFAALFEKLTFEERAELVSLLFKEIRVSRFDPEKDEHSCEPDVFVTQMRTTWYRIDLRMFSKSFSMKDLLEKCETEPEVRNKKQSGGERGIRTPGAFRLNGFQDHRIRPLCHLSSIRGL

SEQ ID NO: 2378 - protein, 546 aa, unidentified
  source 1..546: note = uncultivated organism
MTKAQTITKEIYVAIYLRLSRDDQNGNTESMSISNQRDMLMSYCNERGWKIYDIYVDDGFTGTNFERPGFQRMIGDIEEGYISVVLTKDLSRLGRNYVMTGQYTDFFFPEHGVRYVAVNDSYDSAKEDNDIAPFKNILNEMYAKDISKKIRSARQISAKQGKFMGSKPPFGYVKSPEDRHLLVIDPPAAEIVKRLFREFAAGESGRNMATQLNAEDVDTPAEYYFKQTGKRATRSNTLQQWGSCTILQLLRNQVYIGDMVQCKRKVSSFKTKKRLATNPDAWVIVEGTHEPIIDRFTWECVQRRLDKTKRQSVCNSIRATRSGDINVFSGIIRCADCGAAMAFNERVNKNGTKYRFYRCSRYANSGSKSCSMHFMDADTLESIILSDIQFYAKTAVADEKKLMDRLLSFSEQARQNEKDAQGKALRDATNRISFIEDASKRLFEEKIAGNVPESLFRKMLSDYESELSGLEAKAEDIRQNVQEKVNSESDVKTWIKLIKECVSINSLDRATAFQLIDHVDVHEQTDENGHKSQSIQVKYNFVGVLS

SEQ ID NO: 2379 - protein, 503 aa, unidentified
  source 1..503: note = uncultivated organism
MTKQKATTGPGNKKRKSIAKSAAGTKTKLSQLASMLRRKTAYDDGGLSGGSMERPALQRLLAEVAAGRINVIVVYKVDRLTRSLADFARIVETLDSQGASFVSITQQFNTTTSMGRLTLNVLLSFAQFEREVTGERIRDKIAASKRKGMWMGGSLPLGYDVKDRELVVNAAEAKTVGEIFEAYARVGTASEVQDELRQRGILSKRWTSATGRTWGGVPFSRGALYWLLRNPVYVGQVAHKGQVYQGRQQAIVDRALWDRVQELLAAKNSARERRRIVPGGRPLAGRLFDDRGNAMSPTYTVGRHGRRYPYYVSQALLQNEKERAGSIARVPAEEIERLVYKALGPDSAEADSPEEALRKRVERVIVHTDRVEIIRAVADNATTDAEEIQVSRSIFVMAKLAHRNRARILDDGSAGPNPALVRALGRAHRWRSWMEQGEAMSYRAIAKKAGVTSSYVQTVLPLAFLAPSLTRELLDGRRQLRGPLMVRMRQGIPADWTQQIDRL

SEQ ID NO: 2380 - protein, 523 aa, unidentified
  source 1..523: note = uncultivated organism
MKKITKIETASNNIFIRRKLRVAAYCRVSTDSDEQLSSLENQTTHYERIIKSNSDWEFAGLYYDEGMSGTKKEKRTAFLKLLRDCENRKIDFIITKSISRFARNTKDCLEIVRRLTDLGISILFEKENINTSTMDSELILSILSSLAAEESVSISKNSKWSIKKRFQNGTYKLANPPYGYDYKDGTLIPNQEQAQIVKRIFAEVLAGSGTQAVAVGLNKDGVSPQRGKQWTSTTIRGILENEKFIGDVLFQKTYTDDNFTRHNNDGVEDKYYLKNHHEAIVSREDFEAAASILAQRGKEKGIHKGIGKYSNRYAFSGIITCGECGSTFKRRIHMPGKPGQYVAWCCNKHIDTGGKDCSMIFIRDEYIKAAFVTMMNRLYSGRVAILKPLVDTLKRTDSGQSYEELKQIEKLIQENSEQVQVLTGLMSKGYLEPALFNERNNVLQAETVRLKEKRAILQSGIDGEETTVFEAEELLKHLNRHGIIEEYSDEIFKRFVIGITVFSPTEIGFRLKCGLCLSERMAR

SEQ ID NO: 2381 - protein, 554 aa, unidentified
  source 1..554: note = uncultivated organism
MIKRVAVYTRVSTTEQAEEGYSSEEQEKIGVKYCADNGYEIYKIYSDKGISGKSINARPAMKEMLKDAEEKKFDMVITWKINRIARNMLDLLKIVDLLEKNNIYFKSYSENFETETPMGKFSLQMMGAVGELERGTIAQNVKMGMMARAREGRWNGGIVFGYDVKERENSTNKKRRDTELIINEKEAEVIRIIFTMYSQGSGYKAITNYINKFGHTTKKGKPFSIGSIKDILTNPIYIGKIRYNVRPNWSEKRRRNKNSNPLIVDGIHKPIIDQELWDKVQRQMESSKGKPSRIYDGEFPLTGILKCPVCGAGMVISRSTNTRKDGTKYRREYYCCGAWKNKGTTVCHSNSIRVNDANEYVFGKLSELLNNDKLIKDIVANMNSTRKAMVDPSKEEFDKIIKELEKVESKKKKVFEAYEDEIISKKDFSERMVEIKSREELLQREVNNLKTSILDDNLQDVSYELVRETLSSFDKMLSGLTTREQQKKLLHMLISKITINKARSIESIEININDNLIMYLSNGGEPSPDGGGSPFSFVSRRMLMINPVNIKICI

SEQ ID NO: 2382 - protein, 505 aa, unidentified
  source 1..505: note = uncultivated organism
MNRYLMYLRKSRMDTDYEEVSVAETLSRHRTTLEKLCRSKKLHVAEILEEVVSGESLSARPKMQRLLELVGTGTYAGIVCMDIERLSRGSSMESGYIMQVLQVNGCKIITPGKTYDLQNESDEQFTDMTFMFSRYELKTINSRLVRGRNHSASEGKYMGSMAPYGYRTFKLPGEKGNSLRIEPEEAKVVQMIFELYGQQGLGYNAIAYRLNDLNIPARKGQWSQTSVVNILNNEVYLGKIRWRHEPVKRVVKDGMMAKKRILNDDYEIYDGRHEPIITQEQWELVKAAQNRRGHHSTHKSKELQNTFVGILFCEKCGSKLKRNVPGKTQGTTPWYRCPGRHCNCRSIKCHTVEDAVLKAMDDWLDEYIIQLDSRKKPTIDPIIEALDTVRAQLAALQQQQDAICEYLEKGVYTIDMFTKRNAALTKEIRSLQATEADLIRKQESGAKTNQAAIEIIPTTQHILDNYDHLTTEEKNRLWKLVLQKVTVFRTPEGELSVHIYPKLPR

SEQ ID NO: 2383 - protein, 588 aa, unidentified
  source 1..588: note = uncultivated organism
MANSKVQVRKATRKVMNRNKGTHMSTLKVAAYVRVSTDNEEQLESYQSQLKHYTELIQDNPEWQMAGIYADEAITGTAVRKRDDFQRMINDCMNDDIDMIIVKSISRFARNTVDTLQYVRMLKEKHIAVLFEEENINTSTMDGELLLTILSSVAQQEVQNISEHVKQGLSMKMQRGEMIGFNGCLGYDYHKEDKTITVNPQEAEIVQYIFQRYVEGAGSKVIARELKNLGYKNKKGQSSWSDHGIVGIIKNEKYKGDLLMGKTFTVDPISKRRLENLGEADQYYIENHHEPIISRVLFEQAQQILQKRTVSHSRTNGNGKRDKYSRQFSFSCLLKCGFCGGNLTRRTWNSRKDYKKTIWQCVTATKHGKRECPYCKGIPETLIEESFIRSYNALCNHNGDFVDSFLERVKSTLQEEDNGKEMKSVNKEIFQLKERRSSLVDMRLDEKIDEETYQIKVAEITVKLDKFYQKKQELKHLQSEQQDINKRLSEFQKVLSNHEVLKEFDRHVFECIIDRVIVGERKENGEIDPYKLKFIYKTGMENEVALSQPFSFDNTCSYTVDECDTICLQGEDDTCGDSLFVGEKIIEC

SEQ ID NO: 2384 - protein, 569 aa, unidentified
  source 1..569: note = uncultivated organism
MEKVFAIYSRKSKFTGKGESVENQIEMCREYLRIHFGEDESNKAVIYEDEGFSGKNLDRPQFKVMFEDIKSGKISAVLCYRLDRISRNIGDFANLITELTSMGVAFISIKEQFDTNSPMGRAMMYIASVFSQLERETIAERIRDNLHELSKTGRWLGGVTPTGYNSVGETSMNINGKTKKAFHLAVKEDEMQIVKLIFNLFLEHNSLTACESYLLAHNYKTKNDKDFTRFSIRGILTNPVYMIADSNAYEYFKNSNVDLYSDEKEFNGTHGMMVYNRTLQEQGKATKIKPMEEWIVSVGKHQGFINGKDWIKVQSMLDRNKSKSYRKPKSHTALLSGILKCECGEFLRPHMTTRMNKDGEYTYYYSCTMKLRSKGSRCNNKNINGNEIDKEVITAVKALANNGDDYFESLKSALSETKIKAENISNEQTRLEEEIEKKEKEIEALVNNLATSSGTGAEKYILDKINILSDEVEKIKSQINTLSKESENELNLTESIDLMKDMLKSFSVTVDNMTIEQKRQTIRTFVKEVIWDGEDAHIIFFGSDYEYPFKKAEMLADDDTLYPLGEDRK

SEQ ID NO: 2385 - protein, 741 aa, unidentified
  source 1..741: note = uncultivated organism
MAFNKIKPVPVACQRNVVIYARYSSDKQTENSIDGQLRECRKYCDQHEYQIIGEYIDRAASGTTDNRPEFQRMIHDSAKQQFAYVIVYRFDRFARNRYDSAIYKKQLMLNGVKVISVSENVGVGDEGIILESIYEAMDEAYSRRLSAITKRGMREAARKGLWTGGVVPLGYRVENRQFVIDEREAGAVRLIFNRYEEGKTKKQIADELNAAGYRTKTGKPFTHANFTAVLRNKVYYGDYSFEDVERTCPAIITKEQFERVQKLQVENQRCFGRKVSETFFALGGKLFCGNCGAAMIGDSGTSRSGEKHYYYTCGKRKKAHSCNKKSERKDFIEWYICEQTLDLILSPKNIKTIAKNVAALAAAELNDGQLDALRKQKKQIDKELDEAVSALMKTNAETAIAKINERLERLDEQKKTVEIELAGLELRQEIVLTEEQVESYLTSFKHSDILDENVQRRVINTLINAVYLYDDKVVIYYNIKGLKQISYIDMISDTEKLSEPENSGSDSLKSGSPCWARTNDPTRKLEINLCILSHFSHLDLTVCLKIPDKSILDNDFLSLLILRVIAIPDKDSANQRIHQVSVQLRDVIVLLDDFYELGCGIIRGSFFARQPFELHKPILCGFLLRLAFLRHHSEASLGQQPRKSVLIQASEHLIAFGNLAFQLGYFFFRALFIRSGCRRHLFRHCVNKAFPILSDTPENIPQIIQHRRINLIVFDVVACTDILSFFLICVTHIISAVCNGA

SEQ ID NO: 2386 - protein, 587 aa, unidentified
  source 1..587: note = uncultivated organism
MNDDGQLVIYSRKSRFTGKGESIENQIELCRQYIRLHFGDEAAARALVYEDEGFSGGNLDRPQFQKMMADAETVKLRAIVVYRLDRISRNIGDFAKLIERLNGMNTGFISIKEQFDTSSPMGRAMMYISSVFSQLERETIAERIRDNMRELSKTGRWLGGVTPTGYASESVSHVTVDGRTRRACKLKLIREEAGLVKLIFEKFLETGSLTKTETYLLQNGCATKNGKPFTRFAIKGILSNPVYLIADESAYQYLTEARVDLFSEQRDFDGVHGIMAYNRTLQQPGRATQIKSREEWIVSVGKHPGLIEGTAWVKVQRLLARNQSKSYRKARSSTALLSGLLICGGCRSFMRPKASGRLNAQGEPVYTYLCSMKERSRGHVCNMRNCSGNQADAGVVEQLKALRENDSDFLRQLIRSRQVLAGGQQSHDGETARIEAALAANDGEIKGLVSSLGKASGTSAEAYILRQIDELHHRGEGFRQRLGQLRELTAYHRLADRELTLLAQALASFQDTVDGMTVEQKRAAVRAVFRQAIWDGSQVHLVLSGSNYEYPFPSAGTEDGAAEGGEPAAFQETAERENTEPLGEDSK

SEQ ID NO: 2387 - protein, 534 aa, unidentified
  source 1..534: note = uncultivated organism
MQSMTPLTLVSAADLMDVDYTRVSEDDRGGAEGVESQHSDNDEFGEEIGRPLSATYQDNHISAFTGRERPEYQRLLADVARGLIASVIIWHADRLARNVREGLNVIDLFRKHNVRLFSVQKGGEYLLNRASGRAEFISDLNQAEKESGHKGERIVLARKRQARNGQYGGGTRPFGWGVPSGRVRSKCVNPKAPLGERKYVDLPVLDMSKHRPDEAAEIQRWAEELLATRGNIAQLLVGIAERGLKTVSQADGRVLKRGGKEVKHGGWDSRTIRKILTAPRVSGHAVYRGEIVKAGAYKPILSEEKRQALITLFSDPARVTATGNTPKWLISNSSDAQCGQCDHGAMVTVRHSSKGPVYRCNVCHKGNQLAPLVDEWISLLAVERLARADLVELIQAPAPGVDVAALRDEITDLQRNKKEAARSYARRGIDLETLETVKADTDQQISQLRGAIAEATSSSPLAEFLEADTSEAAGVLWRAKSIGRRREIVRLLMNITLLKGATYELDPDTVRVVPREPAAEQSGPRQGATPAPTP

SEQ ID NO: 2388 - protein, 539 aa, unidentified
  source 1..539: note = uncultivated organism
MTAAGKAVRCAIYTRVSTDSGLDQEFNSLDAQYDAASAYIRSQAHAHWTLVRTRYDDGGFSGGSTHRPALQRLLTDVKARKVQVVVVYKVDRLTRSLADFAKLVELFDEHGVSFVSVTQQFNTTTSMGRLTLNVLLSFAQFEREVTAERIRDKIAASKRRGLWVGGTVPLGYELKDGKLLIVEDEAEQVRTIFKRYLALGSVNRLVIELRERKFRSKVRNLSTGETRGGVAFTQGPLFYMLRNRFYIGEVSYKNEIYPGPQPPLLDRKLFEAVQAKLTAQRSHQVTRRAKSAALLRNLLFDEADHRMIPTHSTKHGVRYRYYVSQPYLRGIAKPPVGAIIRVPATEIESIVTKALAKHLQSRKLSGIEQHDQKTVLMNIARVQVRKNQLAVWLKGLQEREARSDTAKSIDEEGIPSLLIPWCKPPSKKPREILLPSSVTRSNVRPIKIERRAALLRSIARGRAWLKAVVSSGATVEDIAVRQKCSVRYVNMTISMAFVAPSLVKAGIEGRLPRGIGIANLRDGPAEWSRQYERLGLTQP

SEQ ID NO: 2389 - protein, 582 aa, unidentified
  source 1..582: note = uncultivated organism
MVRTNFLRGQALMGKKVASLSHGASPSGYASSVPSLSCAIYTRKSSEEGLEQDFNSLHAQREACEAYVLSQKSLGWSLIPTAYDDGGYSGGNTERPALKRLMADIEAGNVKVIVVYKVDRLTRSLADFVKLVELFDSKGVSFVSVTQQFNTTTSMGRLTLNVLLSFAQFEREVTGERIRDKIAASKRKGLWMGGVAPVGYQAKGRTLEPDEPHASRIRQIYGLYLQLNCVRKVSEELQQRQWLTPERNNKRKGFGGNKPFSRGHLYRILSNPIYAGLVPHRGETHPGQHPPIVDETLWQEVQQRLEHNRQGTKTQSHAANPSLLAGKLTDEAGRRLIPSHTRKGNRRYRYYVTPVADPGEPIRLPAEEVEQLVIQSVLNWAASEQNVINAVGWHDAQLAGNALKQAQRLIHALQHNPRTVLPNCINEVVVAATQVRIRLNLVGAGLQQAGVSNAETVLEVLAERKRCGMAVRLVIGAQGDEQLRLRNPDPTLLQLMHKGKQWLHRLTFGGQGIGTIAKEEKVHAQYVSRVINVALLAPDIVQAIERGDHPINLNTTKLLTSVPFPMDWQTQREMLGMAKSQG

SEQ ID NO: 2390 - protein, 544 aa, unidentified
  source 1..544: note = uncultivated organism
MYLRVSTDEQAKEGYGLIYQNDKLRAFVQSQDYVLNEQNIYRDEGYSGSLPIVERPELQRLFQDAENKAFDVVLVYRLDRFFRKTRLILEAIERLNGCGVGFRSITESFDTTNITGRFMTTLLAAVAEMERDTIRERTTNGRIASAKVGRWVMGAPTYGYKLNKQTKKLEIEPEEAEHVKKFFHWIAYEKLSLRDIQRRTNKMGFRTPQHGKTRRVTLDYWHKRSIGRILTNETYTGIAYYRKYKRPFNNLTSLIDENLQRNKDEWIPMSVPPIVSREEFEAAKDQLVKNRVFAQRNLNPSYLFPKLVYCGECGFKMFGGFQPPREARHAGTKYYHGTYRTPNEKGETKRCKTCPQIAETRLRPIWERLRELLERPETALERLSKERDRMEGQQDTDKRISSIGKQLSGLETKRRRLAQIYSEDETMDLKTYKKELEEIRGKDIALREERARLLPTILNKDDLQERAAMIRKLYEKLKIKLEGATEAQIQQIARLFIDKIIVYPKSSQAELVLNLLPIDKPTSMSMMPNNDKLRDIRARRVSRV

SEQ ID NO: 2391 - protein, 546 aa, unidentified
  source 1..546: note = uncultivated organism
MIKNKLKCAIYTRKSTEEGLEQDFNSLDAQREACEAYIKSQQHEGWILVEKQYNDGGFSGGNLERPALKELFKDIENNKIDIVVVYKVDRLTRSLLDFAKIVELFDSHEASFVSVTQNFNTTTSMGRLTLNILLSFAQFEREVTGERIRDKIAASKKKGMWMGGRIPIGYLKKDKKLFIDENNAEKVQNIFKKYLELKSVPNLKEYLKDNNIKSNTDRFFEKGQLYHILKNNIYTGKIVHKGNIYDGEHTGIIEEKIFNEVQKLLLENATECKNNKSSNSILAGKIFDDKGNRMSPSHSKTRNKKYRYYVSQAITKFNKEKAGSISKLPTEEIEKFIIEEIKAYLSDMAKIQSYISGLSLEQQNQIIKILKEKIIFYDKVVPKILLKVTISEKWIEVILSHNKIKEFLYTLINKDFSKNENNDSNITIKRNIQITTGNTKGCKVLIIRKDGKADNYINETLIKVIVRSFYWHKLIITGQAKNSKDIQKFEKLKNDSYIKQVLNLRFLSPKIIESILNGNQPKNLTITKLFKIKTLNWQEQEQILLG

SEQ ID NO: 2392 - protein, 565 aa, unidentified
  source 1..565: note = uncultivated organism
MNDAALRVEDTPPVMATARAALYLRVSTGRQAESDLSIPDQRRQIEGYCLSRGWEVAADFVEPGNSATDDRRPAFQAMIDAAMQKPSPFNVILVHSFSRFFRDQFQFEFYVRKLAKNGVRLISITQDLGDDPMSVMMRQIMTLFDEYQSKENGKHTLRSMKENARQGFWNGARPPIGYRIVEAGQRGAKVKKKLEIDPIQAETVRRIYRMALNGVDDNGPMGLKAIATWLNDNNTRTRDGGRWGIAGVHQVLTRTTYIGRHKFNYRDYRTKAPKPESEHAIMEVPAIISEAEFEAVQRSLKARSPKMMPPMAVGGPTLLTGICFCACCGGAMTLRTGTSSVGREYRYYTCSTKARQGAKGCPGITVPMDRLNEAVVGHLEWRLLDPKRLEEMMDQILERRDEWVDRRRLHVADLERRATEAEAKLKRLYDAIENGVIDVSDPSLKDRIAELTATRDQARGDAERAVAHIEKIGPAITPESLRAFAMAARRKLRRGDGSFARDHIRAVAQRVEVVSKTEVRIRGLRSELLRTLTAASGVEAAVLGVRAFDPKWRARNDSNVRPSDS

SEQ ID NO: 2393 - protein, 570 aa, unidentified
  source 1..570: note = uncultivated organism
MNDNIKHRVANYGRVSTEEQAKEGVSIDTQLSILRKYADLMGWEIAGEYVDPGVSGATDDRPGFKHLMMDARKHRFDIIAVSKLDRFFRNLRLLLNYIHEFDELGIKFVSISENLDTSTPFGKFAVQIMGVIAEFERERIAERIRDGRRYRTSQGKWTAGSTPYGYKWLPKEQRWEIVEKEAEIVKYIYHLYLNEKMGIMQIPHRLYQEGYHAHRGGTFANSLVHRILSQPAYKGLHTLGIKMPVIIDEVTWNKAEKKRASARHVRGEIKGWLLQGLCSCGYCGRLLSCSQKKGKKFRYYVCRGKYAMYHADGSARCLLSNWKADDLEVLVWGKVQEAINQPEVMREYVSRALANLEVKKTQTGDEVQEIEKQLGGVKTKLERLALTFADGAIDESLYRVNLEKLKKQQLELTRRQQAIDPSTLMEILETQERIEAIKEILDHGSLRLNALGFFGLMGDKYIPVGFNPWLETDGKPEVGQLTNMSDVKIPGTDIMFKSMAPQGILESTPAQLTELLKKNWRGILQLFDIHVKVFNDRIEIHGLIPPQVIAIPEKKQPECALISCSVRRSG

SEQ ID NO: 2394 - protein, 506 aa, unidentified
  source 1..506: note = uncultivated organism
MRVAIYARVSTDEQAREGFSIPAQLRMLEAWATIKGATHISTYVDDGYSGKNLNRPQMQRMLEQCKNHAHDAVLVWRLDRLSRSLRDTVIMVEDIFSANGITLISSTENIDTSTPSGRLMLNILASFAQSEREATVERVRSVTMDMARGGIHMGGVPPYGYRVNANRHYEIEENEAPAIRMLFTLYATGYGYGAIIDRLAENGYCTRSGQPFTKAALHDMLINEKYTGVYIYNRAAAAQRDGKRNNHQKKPEDEIIRIPGGMPAIISEETFKQVKERMKMNQRHGATHRAKVDYMLAGLVYCGKCGKHMWIKYVGKNRNGTVQRSYACNDNCVKRIRVEKIDAAVRDYILQISDDETMLLRAAAIADEYAQADRADCSSELPGLKAEVESINAKLASMVEFISTAGAAAPSTLAQEMLALEDKRADLLAQIELAEAPAPAKIDTDEILERVRLLRAALESGTDSEKKWAAAQLIRRVIAYDDRIVIQLNVSPKRADNSANGGAEGS

SEQ ID NO: 2395 - protein, 670 aa, unidentified
  source 1..670: note = uncultivated organism
MKSLAPRAHNGPPGKSVGIWIRVSTEDQAQGESPAHHEHRAREYAEFNGWTVKEVYDLAGVSGKTVMEHPQAKRMIADVKRGHITGLIFSKLARLARNTRELLDFSEFFRAHHADMISLQEKIDTSSPAGRLFYTMIAAMAQWEREEIADRVRASIKVRAKLGKNLGGAAPFGYAWKDNKLIVNGTEAPVRRLMYELFSKHKRKKSVAKMLNNAGYRTRKGARFTDTTVVRLLQDPTAKGLYRANHTYRDGNGKLIIKPDSEWVLTPVEPIVSEALWNECNDTLKARRADKPLGPKPVHLFAGLLYCGCGQKMYVFSRSPKYICPKCRNKIPMEDIEAIFRDELQGFFVSKEKIQTHLARANEHLADKKERLAAHTKQIEQVRAEMRKVYQLYQSDQISPDGFGKLYRPLEDRERSLAAELPKLQGEVDALEIHQLAADEVVTEATNLHRLWPKLMPDDKRRVIESIVDKITVAGDKIDISLCYMPSSEELTKRQRNLCAMLPLCDRVVSVSRAKYLPSKNRGVPVPKAPTTIGGHLRRRRLELNIYQSEAARRLKISTVTLSRWETDKAYPPWSKQPTISAYLGYDPFSDPTLGRPTGNESPVVAPLSPDAPETLGQQIRNRRIQLKKTQKQYANELGISVKTLRGWEADRHAPTKRHQGRIVAVLGVG

SEQ ID NO: 2396 - protein, 742 aa, unidentified
  source 1..742: note = uncultivated organism
MMTKLKAALYARVSTEEQAKEGYSIAAQISEIKKYAEQHGYEIVDEYVDEGASGKSIEGRPQMKRLLKDASQQKFGVVIIYKIDRLARKLKDALEISEILEKNNVNLISLNEKFDTTTAFGRTAFQMICSFAELERNNIVERVKLGMEQRAKEGKFNGGKVLGYDSIDKNLVVNENEAVIVRKIFDYANQGLGYKAIARRLNEAGYRTKMNKPFNVFGIKTILHNPIYIGKIRYNQQKNWAEKRRKGRNPDYLLVDGSHEPIITTELWENVQQKLSQRSYKPSRSHQPYILSGLLKCPVCGHGMVPARSKGAGGKSYRYYVCGQFHNKGKAVCGSNMIRADVAEEQVLQELVKVASRPEILRQLVDKINEMRANSGSTIMKEKKAIIEELNKTSKHLQKIKQNILNDPELIAIFKDDLKEAHSRQEQLQKQLEALEAEMEKQNQKPVDYAALHNLLTQIQKALMQADADEQKALLRLMVESIHITKEAPRRVGRRITKINLHFDFTVDTLQKDSVILLSRIASIQQNDFIAPLEHTVLDSLNNITEEKLRDLMKSLNILPLAMIRFAPVDLHRPVNLLRQHQPHELVGQRHPPEAQLVLRAPQHRGREAGRPADDEHRVTAAVRGELIQPLCELLARPQLAVQRQCDHERLRLDQREQPLALALPRLRFLRRAQRFRHLLVRHLEDVELHIRPEPFRVLRDAVRQIPLLDLADRRDLNVHRPRPPILRTIPFLSLPRSIPQG

SEQ ID NO: 2397 - protein, 552 aa, unidentified
  source 1..552: note = uncultivated organism
MKERKLYKAAIYLRLSKGDDDLSVLEKQESNSITNQRLITKSYIDKHSDLKFIKEYLDDGYTGMNFDRPGLKQMMEDIDAGIIDCIVVKDLSRFGRERIEAGTYLLKTFKEKNVRFIAINDSYDSLTASNSETHVILPIKALTNDNYSRDISMKVRSSKAIKRERGDFVGGTAPYGYKKAPDNPNKLVIDEEAAAVVKSIFDKKINGKSANAIAKDLTNEGVLTPSEYRKSKGEKTTGFKRTNPGKWSARGVMRILRNEAYMGTLIQGRYRKISYKVKKCVEKPEEEWSIHENAMEPIISKIDFRTVQKLIERDTLQAPGTDTSYMYSGMLFCGDCGHPMFRRQYDGKNEKKVYYFCSKYEKGEGCSSHKIYEEDLDRILTFHLTDMMNKHGDYSRVMKRLDEAEISFEDAVEHDKKIVELVKEKSSIVMLIKTLETSLVEGLVDDSQYYEYKEIYLKKIDAINKAIDCQKKIISSIYDEGVEAAERLDDLRSGLKMGKLTRAGLVTFIDKINVCSDNTLEIVFRYQLMYEKLKELDRLSEQRITAVMHKEA

SEQ ID NO: 2398 - protein, 500 aa, unidentified
  source 1..500: note = uncultivated organism
MIAIYARQSLDKKDSISIETQIELCKKEIGGDEPYKEYVDRGYSGKNTNRPQFKAMMQDVENGVISKIIVYKLDRLSRSTLDFGELMDALSKHSVEFSSTREKFDTSTPIGKAMLNIIMVFAQLERETIQVRVQDNFRMRSARGAYDAKAPYGYAKTKVTVQGKAVSTLKPDKAYSLMVKKIFEQYAYTSTSLGYLARTLNQQGIKSANGAAWDSCKLSKLLCNPIYVKADAEVYKYYRAKGMEITNDIDDFRGQYGCVTYGQWDRAKNKFAQLSGLTLSIGLHEGIIDAKTFLACQYKLADNTQINNTGRGKHSWLTGLLKCGCCGKAMKVMTYKDTATFRCSGAMNTGLCSDSPSVGVREIEEAVEREIFAHVARHQELVVQKRKEEDNKAHNYKIAIAKLDDQISNLITALADGTELTMKYINGRISELQKQRDILAAELQQHKNATKQQDDIKQFHDIINLWPGMTIPQKHEIAMMLIKRVEIQEDTTRIYWKYDL

SEQ ID NO: 2399 - protein, 525 aa, unidentified
  source 1..525: note = uncultivated organism
MRGVIYARYSSDNQREESIEGQIRENTAYAEKNGITIVGHYIDRAFSAKTDDRPEFQRMIADSSKKMFDVIIVWKLDRFSRNRYDSARHKATLRKYGVKVVSATEAIADGPSGILMESVLEGMAEYYSAELSEKITRGMTENALKCKYNGSHVPFGFVIDENRNYQINETLAPIVVEIYERYASGEAIKPIIDDLNARGLKTSKGAKFGNNSIHSILTNRMYMGEYHFGEIIIPNGIPAMVSEELFNRVAERKKKNQHASAHNKGKERYILSTKLFCGKCMTMMVGESGQKKNGNIYRYYKCASAKRKKGCDKKAVRKEWIEDEVIKGLTIILNDDATLSAMADKLLELFEEDNVVLPALEAQLKEVQKSIANLIKAVEQGLVTRSTKSRLEELEAEEETLKESIFIEQNKVPRLSKEQILCVLERFRSLDLSIERNRERLVDALVKCIVLYDDKFIITVTFRDEPIVVMTSEEAADVARLGSDINSLAPPNKTDADRASVPLFLWRDSNGSVVNDLPMADQSRP

SEQ ID NO: 2400 - protein, 540 aa, unidentified
  source 1..540: note = uncultivated organism
MVVLSLPKVTDVTVTRHYCRKGGIGMPEIRVIEPIIFAPAEKLRVCAYARVSSDSTDQRNSFASQVNYYTKYIQAHEGWTFVDIYADQGITGTSALKRDEFLRLMRDCRQGKIDRILVKSVSRFARNAQDCIEAVRELRQLGVTVYFEKEHINTASMSNEMFLSMMSAFAQEESISISKNMRKGAVMRMKNGTFRLSQAPYGYYLDEKGILIVQQEEAKIVQRIFGDFLSGMGIQEIAAELQKEHIPKLNGEPIWSYTGILYILTNERYIGDELFQKRYTTDTLPFQKKINRGQKKQYYAEDTHDPIISREVFRKAQELLKRKSERHGHQNNGQYTFTSLIVCDECGTNFCRRIAKNQRVLWTCRKHFKGKHLCSMESLNETEIQQCFLTLYKKLAENRQEILGSYLRQLEELKDKDFMAHPDAMELNRQIAGLLEQNHTLHRLRAKECIDSAFFIAQSNELGQKISNLKAELKQYRDLNEYADFIDNTRLILTILDSPMPVFSASVFRNIVSRITVTHETLRFQLVNGLELEEERISGG

SEQ ID NO: 2401 - protein, 555 aa, unidentified
  source 1..555: note = uncultivated organism
MCMNTAIYIRVSTEDQAKEGYSLEVQREYLESFAKREGYEVFKVYCDDGISAYSTRRPALQKLLKDAKDKRFDLVLVYKIDRFSRRLKDLLNLVEELESYGVGFKSATEPFDTTTSAGKLMFQQLGSFAEFERNRIAERVFPGMVKGVLNGNWQGARYAPFGYTYNKEKKLLEINEREANIVRLIYTMYLAGKSTHEIAAYLNKKGYKTRTGKQFYTKFIGDILKNRIYTGKIVWNKKHYDKDQKTKKHYKYIKNDPSKIIIAQGRHKPIIDEQDFEEVQRRLADKKKTWRPRAKTKEYLLTGLLTCAKCNHRYAGVSSISNHRTKKKKRWYRCSGPYISHIGYTNRAVKAEDIEPEVTKIVAQLIQNERLQESRWMSVTLPKSQENPIFGENGKIDTSKLKDKLQENQKKQSKLTDAYLDNLIGEDVFRGKIEELRKEEDKLKKLLAGYELMEMERERSEGYINRVKEFLEGYNEGLTKVGFEQKRQMVGLLFKNIKIAPPIGGAAAAKRISFSLFEPFNSLFLETKNNSQCQKNQKLTKICLKKSTSVHSAVR

SEQ ID NO: 2402 - protein, 539 aa, unidentified
  source 1..539: note = uncultivated organism
MARRRTTATVEIPTALRQIRCAIYCRKSTNEGLEREFNSLDAQREAGEAYVLSQRHEGWTVLPQCYDDGGFTGGNTDRPALQRLLADIEAGEIDVVIVYKIDRLSRSLVDFLGLMQRFDEQNVALASVTQQIRTDTSMGRLMLNVLAAFGEYERELIAERTKDKMGAARRKGKFVGGGLPLGYDLDAGPTGSKLRVNPTEAAIVRELFRLYRVHQGLLPVVKEAAKRGWRTKTWVTREGKVKEGGALDRVNLHRLLTNVVYIGKVEYDDEVFDGEHDAIIDESLFNEVQEILQGQSRTRGVYGGNGHPDALLKSLLRCGHCGHAMIHGHTRKRQGDPYRYYACTTSQKQGEAACPTSTMPAAAIEQFVIDRIREMVTKPALIAQVVTEAEAVRATRVQALQQDITTLEAHLLQRQRAGQQLTRTLEAAEDTTPNTLILEQLRQIEHEIAETGQALAEVKHELAALTARKVSLSEFRAALELFDPVWEVLYPIERARILRLLIEQVDFNAGTGKIGITFRPTGVAALHDEMMAAQQLAAN

SEQ ID NO: 2403 - protein, 556 aa, unidentified
  source 1..556: note = uncultivated organism
MNKRAVIYARVSTDEQTKGYSLQTQVEACKQYAAERGYVLLHIFSEDYSGASLDRPELNNVRDFLANEDVDVVIVYDVDRLARKSIYQALIEEEFMRDGAVIEYVIGQYDDSDEGRLQKQIRGSIAEYEKAKILERSKRGKRGKAMSGFVLVGSRPPYGYSVVSEPHKAWFEINEEEAEIVRAVFSWYLHGDESGKPLSMNAIAIKLTNMGVPTRGDKQTHFFKKRDQGVWAAAMIRRILGNETYTGTWYYGKTKMMEDGKKRKPKPKCGFGKQVGRPRDEWIAVTVPVIIDEETFKRAALRIKTNAEQSDRSAKHKYLLGRRLRCAKCNYTYKGRTRRQNHYYYCGGKEQVPVSLCDAPAFRGKDVDFTMWNWLVSLIKNPSALIAGLQEQQTNSVAENQILLDRLAMIENQIAEQEVQLGKILDLYLTGDFERGMLTERKFRLETNITNLRKEHLEISSTIEKLTLTDDQIAEIQEFCDGIRDRVETANFDEKRQLLELFDVRGKLAIENNEKVIHATCLLQPRPVSLALTSHSLNTGAIVITPCDYPSTVPFR

SEQ ID NO: 2404 - protein, 509 aa, unidentified
  source 1..509: note = uncultivated organism
MNGAVRVALYTRISTDEVNQPYSLGAQRDRLEAYVKSQPDWTITDVYTDQASGKNLNRPALTAARAAAAAGKFDILLFYRIDRLSRVLGDLIAIVGELQGKGVGLRSATETFDTSNPAGWLLVQVLGSVAEFERSTMLDRIRAGMERKAARGEWTGGVPPYGYRKERGESLLLPDLETAPIVRSIFARYIQTRDGARSIADWLNGQGVRTRSGVQWSTSGVLSLLRNRAYIGEVSFRGVWGPSKHEPIVELGLFDAAQSILDQRAGSPGIRRTNPTDFLLSTLRIICNRCGHPMVGASARGRGGKLYSYYTCSTRVRRGPKGCDQDRLPKDELEQAVLKQMTEVYADTGLVSTALDDAQAETRAKNAERQAEHDRLEAHVADLHRKIDRYVTAFEAGELQASILQGRLGELQSELSAAETALAQEPAAGPAAVGVDTGLVSYGLSKALGDVLARRSPRLTKALLRVLIGEIRVISPMDIRPTYRVPAAEVRILEGLVGEGGFEPPTGAV

SEQ ID NO: 2405 - protein, 554 aa, unidentified
  source 1..554: note = uncultivated organism
MTIKKQIRCAIYTRKSTEEGLEQEFNSLDAQREAGEAYIASQRSEGWICGLDRYDDGGFSGGNLDRPALKSLLSDVEANKIDVVVVYKIDRLSRSLMDFARLVEIFDRKAVTFVSVTQSFNTTTSMGRLTLNILLSFAQFEREIIGERVKDKIAASKKKGMWMGGSVPLGYDVKDRKLVINEAEAGTIRMIFRRYVELGCVRALRDDLSAKNVTSKSWVSSTGRSHRGVPFQRGALYWLLRNRIYLGEITHKDKIYGGEHEAIVARELYDKVQKLLSLSAGRQRGHTSHTQEALLTGLIFDETGQAMTPTYSRKADGRQYHYYVSQAHLQGLPIPAGLLTRVPAAGLENLVRRTLAQLRLPTAANTDAIGARSFVKRVTVQNQSLVLSLDREACLGWWRSNIPGARGFTDADLIAHHQAYLDKGGKLNDKDDHFDLTLSVRAKFRGGEASMLDNPGAPATPKPDAALITALARAHQWKQLLLKGEVRSIHALAKKVGHERRHVGQTLALAFLNPALTKAILKGEQPTTLRLTQLLDAGIPWSWRKQQSTFQGCS

SEQ ID NO: 2406 - protein, 536 aa, unidentified
  source 1..536: note = uncultivated organism
MNTMVLNIERTDAAWETERTMIVIDPRLVEAPKLRVAAYARVSSDSADQLNSYISQVRHYTRVIRENDKWEYVDIYADEGLTGLSADKRPDFQRLLADCRAGKIDRILVKSVSRFSRNLMDCVSAIRELHALGVSVFFEKENIDTAKFGDELILSIQSLWAQRESISISGNMRHGVRMKMKTGDFLPSSTPYGYTLNTEARTLEIHGEQAAVVWRIYAAYLSGRGMTDIADELNNEGIPKRFGKDHWHPTTVFYILTNISYTGDAIWQKTYTTDTLPFMQVKNRGEKTRYHVQDDHPAIIGREDFERVQELIARRREKHAGAAPGEHILAGKVVCGQCGRIHRRKVTNGKVYWVCRRHDHGKGFCPAPQIPEPELYAAFARMWNKLRRHRQDILSPALEQFQAVADRRYKQNDRIIQVNSELQALSEQALVLNRLKNKGYTEPVLYFAQMRELNARVKELRSLKASLMEQDRLGATILAFESLAAALETGPEWLEGIDGELFGGVVDKITILSPEQIKIRLTCGLELTENIERTVR

SEQ ID NO: 2407 - protein, 565 aa, unidentified
  source 1..565: note = uncultivated organism
MKAAGYVRVSTSGQTGDAKLSLQVQRESIQQYCADNNLQLLPIYDEGAQSGADLDRPELQRLLADAPERKFQSVVVADLSRFGRDNIDALVNIRELKRLGIEFISIKEQFMPGPVGDMLRSIISGVNELERATIKLRTHGARNRLWKAKRRWIGLLPFGYTFDEKTEKVVQIKEEADVMRRIVTEYLDLNLSFNDICIRLNKDHVTTRRGRKWNTANLSAYLRQTIYCGYAITNRYIMNAKGEVAGEKPEDEWIIWDCDDIDAILTKARWDKVQAKAATGLSRSGRPSKFADTFLLHGLLKCGVCGATMVPYRADEKSHGGKRYYQCRWHKSGVKEREIAGRERCHLPTIPAEMLEDWIWDQLMVKFGREREKHFAPLLEDTRFDEQIAAQEAKIVSITKSAAQAERAARKLFLAFTTPDPETPEEDDPDDARMFKIEHRKLTQEAKHLRQELKSAQKYLVELTGMKADQQKFAELVGNEALLSSIWLKMDELPLRGKQQLLKGLLDGAVEVYPPTWLSVEEIKKMNARNHKGPLVDAVKSKPKFRFNEAILQKVLGVNKHLEKC

SEQ ID NO: 2408 - protein, 528 aa, unidentified
  source 1..528: note = uncultivated organism
MASDPKAIRCAVYTRKSTEEGVQQAFNSLDAQREACVAYVASQKHEGWQLIPDSYDDGGFSGGSMARPALKALLDDVEAGKVDVIVVYKVDRLTRSLADFARIIEILDAKGASFVSVTQSFNTTSSMGRLTLNVLLSFVQFEREVTGERIRDKVAASRARGMWMGGCVPTGYDVVERKLVVEPMAAALVRRIFARYLELGSVTLLAGELDAHGHRTPIRTSRSGRPHGGAMFSRGMLYQLLRNRTYIGAVTHKGSVYPGEHDAIIDRDVFEKAATLLATNASDRQMGTSFGNPSLLAGLIWSSKGHRLIPTQSSKRGKRYCYYAEDTVRLAKGDKAMRIAAGEIDGLITAQLDSRMIFAAHEAGFASVPTEVAIVGRQRMLMFIERIIVSPAHILIDFKPVYDQPAEAVTIPATLVRRGKEMKLALAPEHDGTDSQQDPALIQFIVRAHMARTALEQSSDMTIEQLASQQGYSRDYYVVLLRIAHLAPDIISAILDGRQPAALNRQRLARIASLPLDWQGQRAALGFA

SEQ ID NO: 2409 - protein, 552 aa, unidentified
  source 1..552: note = uncultivated organism
MAKRPHRSVSEGNREVRCAIYTRKSTEEGLDQAFNSLDAQREACAAYVASQRHEGWTLGPDAYDDGGFSGGSLERPGLKRLLADIASGLIDVIVVYKVDRLTRSLADFAKIVDVLDARGASFVSVTQAFNTTTSMGRLTLNVLLSFAQFEREVTGERIRDKIAASKKKGMWMGGPVPLGYDVSERKLIVNEPEAETVRLIFRRHQQLGTIQALVADLATRGVVSKRRIMRDGREVGGQPYRAGALAHLLRNVLYTGRVSHHGNIYPGEHDAIINQDVWSALQARLDCNAPRPRTGRIPLLGGMIQDASGRTMSSAHAIKGNRRYLYYVSRQQEGQIEDALRLPAGDLDTLVTSSILALLRDPLRLASELGDLAGNAQLPSACAALADRMGQPAALRVALQQLGATVVIHRERVEVTLRARELVNLIGVDGAGTSAEQQIELQLQTSLKRRGHELRLVYAAPEANPAMRDDRLIQLIVGGHAAYRQLLAGDGPPGTTERSHLVRLARLRFLAPDIVTAIVHGRQPVELTSRSLLRISELPLAWPDQRRMLGLG

SEQ ID NO: 2410 - protein, 544 aa, unidentified
  source 1..544: note = uncultivated organism
MKPAAKKPQRCAIYTRVSTDTGLEQEFNSLHAQREAAQAYIKSQAHEGWKLIRDHYDDGGFSGGSLDRPGLQKLLADIRERRIDIVVVYKVDRLTRSLTDFAKLVELFDAHGVAFVSVTQSFNTTTSMGRLTLNVLLSFAQFEREVTGERIRDKIAASKKKGLWVGGVVPMGYEVRDRKLIVNEEEAAKVRLIFSRYLDLGSLSALQRDLRERGIVTRRRTLSSGREIGGRALTNGPLAHMLRNRMYIGEINHRDKSYPGEHAPIIDPRLFEAVQTKLTENRRERRLQRQSSNALLMGKLFDDRGNPMTPSYAIKKGVRYRYYVSSVLNQGRKEEAGSLPRVAAEAVERIVLDAIGALPPAKQIETQPGSPSAELLSPGRDADAAEDAEILAAAVDKITIGSRSIEIRLLEASDRHSEVIAIPWSPQTFRRKREVILPSSESASGARPIRAEARRKLLSAIAKGRRWLDEMISGKVEGIEAIAAREGVSERSARMGLSLAHLAPDIVQAAVDGTLPRGLGVSRLMDMPPSWAEQRQALGIAPNH

SEQ ID NO: 2411 - protein, 524 aa, unidentified
  source 1..524: note = uncultivated organism
MLRIACYSRKSIYSDKSDSTGVQYALGSEYCKSHYTDYELYKYEDEGYTGANTNRPDYNRLIADIKNGMINVVICYKIDRISRDVLDFSNFFSLLSEYGVEFVSIKEQIDTSTPLGRAMMYICSVFAQMERETIAERVTDNMIALSKSGKWSGGKAPVGFELQRAVIDGKTHTILVENPSEVQFLNFVADTFLNGSYTLSGLETYFRKHGIKTLNGCYLSSTQLYNILKNPHYAPADSSTLAYFKSLGCTIGCEESKFDGSHGIMAYNRTSGGRRKKHVSNPPDKWIISVGLHHPIMDSVKWLAIQERFGNNVIDKTRKHKVGILKGILRCSCGYSMRVQHKVDKIYHKTYDNYFCQNRNRRGTDYCDRGFVPVAELDNAALGILREIALDKNAINNYIYEDKSMLPFSRAVSDVQKDIDRLELKINNLAAALGSNSSSTAAKYIISEMENLDKQITGYKFELMEIENNNRKQAKARKDTEDKYKMVCHIVDRLDTADYDELNALIKSIFRECIWDGITLRIKL

SEQ ID NO: 2412 - protein, 559 aa, unidentified
  source 1..559: note = uncultivated organism
MASRQNGQPECRLIRCAIYTRKSTEEGLDQEFNSLDAQREACAAYVLSQRHEGWLLVDEHYDDGGYSGGNMDRPGLKQLLADVQADKVDVIVVYKVDRLTRTLSDFAKIVEILDAQQASFVSITQSFNTTTSMGRLTLNVLLSFAQFEREVIGERVRDKIAASKRKGLWMGGPVPLGYDVVDRKLVVNRKEAGTVQHIMHRYLGLGSVRELIESLEHEGVRTKATASKRGEPRGGVPFRRGALYHLLANPIYIGKTSHRGETFEGCHEAIVPLKLWEQVQDRLKANAAARSMPTNAKCMSLLAGLIRDDRDRPMTPDHACKQSVRYRYYRSATDEHGRGRRVPAEKIETAIVAGLVQFLSEPAQLAESLKLRVTEDGIVSLANRAATLAARSADASPARRRTLMIDLGLRVVVHSGGANATIAAEALAQQLQCNYQGEPDLRLPLPIPPMDSRHSHGMRITLPSGATSPATIDGRLITLLIKARIARDTLFNGSTAFERTGLHHITRMARLAYLAPGIVAAILDGMQPPTLTARRLLRVSSLPLDWNEQRRLLGFAPAF

SEQ ID NO: 2413 - protein, 567 aa, unidentified
  source 1..567: note = uncultivated organism
MAKKPMAHHGSTGPKAIRCAVYTRKSTEEGLEQSFNSLDAQREACEAYILSQRHEGWTLVKDSYDDGGFSGGNMERPGLVRLLADVKAGRVNVIVVYKVDRLTRSLADFAKIVEVLDDQQASFVSVTQAFNTTTSMGRLTLNVLLSFAQFEREVTGERIRDKIAASKAKGMWMGGCPPLGYDVEDRRLVVNNNEAEQVRHMMERYVALKTGHALLDELRETGYRTKKSETRGGIVFTRGPLFHILNNRIYLGEIVHRGVGYPGQHQAIVSQGLWDAVQRTMAEQRVQRRNPTNVREASLLAGIITDGEGRRMAPSHANKGGRRYRYYITPASELEEGAPPAWRVPAHDLEAAVIRRIQKFLTEPRDVLTLLGGEIVNAASVSSVLILAKRISAELELTEHKRDALQTIVRSIQLNEDHIALEMDQTGLRKRLDIPEDAYSDQSTLILKAPAARVRRGKDVKLVISDGQGFADDARDEVLLDLLAEAWDAYCLVQARPDRTVRELAAEEGKCRTRFARLLRIATLAPEIIQACAEGCQPVSLTAKMLLQNEIPIGWEEQRVAFGFSCT

SEQ ID NO: 2414 - protein, 595 aa, unidentified
  source 1..595: note = uncultivated organism
MSIQEPKQKKKVALYIRVSTDEQAEMFGVDLQRSALMGLIQSKGGEYEFAGEDYVYIDEGVSGSDEPEERPEFKRLKEDILLSPEPPFDIVAVYKIDRFARRLKILLEILDFFENRETPIEFLSSQESIDTSTPFGRAMLGIIGVIAELELETIKERTAQGKERAAEQGVYMGSSPPVGYIKGPDKKILIHDEEADIVKKIFNLYVNNRYSLEYISKYMRDHKIYSPSEMKYRHDKEQSKKKRRVSKHGPYHWYPQAVKRILEDELYIGKQYYNKSKDGEKLPKEEWDYCWHDQRIIDDETFRKTQTLLNRTGRRAEQSKQHRIYLLQGLLKCANCFDPEKHEEPYTWHGIPQKVRSTGEMAYYYECSCKNTSKKRVRNTVCHTISLPAIPLEEHVINFLHDLIKDPKPIFDYQQKLQSSANKIKYKKKNLKEILKLINSYKASRRRVIELYTNGDIKKKEKDERLEKLDNDQKRYLKEKEELESDLDIYTKSDEYIKVFEIFEEKYEDVLKDLKENSTDEELYSLIHMMIDEIIIFSRPKRKTDSVSGPKKEGQMIPYKLKISLKIPSEMLKDLLFSLAPEEKLQAKKHGWWAM

SEQ ID NO: 2415 - protein, 507 aa, unidentified
  source 1..507: note = uncultivated organism
MAEITIIPAKERSGEIVRTAAYARVSSSSEDQLNSFAAQIRYYTELLQNSTDAVFVDMYADEGISGTSAAKRTEFQRMMNDCRKGKIDRILAKSISRFARNTKDSLEAVRKLKTLGISVYFEKENIDTGEISSEMMLAIYSQFAQEESMSISRNCRMGVHKRMMDGTYKTASTPFGYDYVNGELKINPEKAEIVKQIFSWYVSGIGLNEIAVRLNSLGVRKEVWRHGTIRCILTNERYIGDSLLQKRFTTDTLPFKAVRNRGEKEQYYVKGTHEPIIEKSVFDNAQRMLSGKDKPSGLAKERSPFSRKIICGNCGTAFRRKPRKGCVCWVCRKHDESADNCNIRQIRETEFQAAFIKLWNKLQAHGKAILAPMLRQFETLSEKEKSGNTQLAELCKEISDIKQQTYLLTMLNSQGTLDGAYFKERTQELDRKLITAQKQLHANLDDKDSERFDELRKLIGIFERAEQITDFDEIKFGQIVDKITVLSETEIRIDIIGGIGFTERIVR

SEQ ID NO: 2416 - protein, 587 aa, unidentified
  source 1..587: note = uncultivated organism
MARTKDRARQEIKTGKASVFRTATYARLSVDSAVSESDSITSQQMLMRDYIKGRDEFFLVREYQDDGISGTRFDRQAFDSLLGEVRKGNINCIIVKDFSRFGRDHIEVGNYLEKIFPFLGVRFISVNDGYDSFDRDSADKKLAVILKNLVNEYIAKDTSVKVASSYVTKQENGEYDGGRAPYGYAFADERKTRFVVDERPAGVIRDIFAWTMQGDSTLAIVKRLTEKNINPPKAYQDTGKFIRQEKERRYWNEFTVATILQNMAYAGHMALHKWKESKADGISPYRLDETEWKITRNTHEAIIAEHDFSLVQEILRARKERYKSLNTKDENVIRPENLLKGKVFCGDCHVPASRMGANYQRKIGKVRIYRYRCRTYREKGEKECSSKSISEKDLEKIVYQAVMAFIRQVECLDDMISRFHSEFFRKMQKSIEKEKCMVERAIRQGKNEKILLYKEYSSREHDTKHNSIEKVCKNGGTDSNKEWYLKEKQQKENEIRYHEERKAQLEEKTAFFGRLEKEQAGWIKDILSYKDTAADGEGLTAQMTSIFVDKIFLYDGKRVEVVLNFKDEYESLYSHMEQVWGTEEGRG

SEQ ID NO: 2417 - protein, 538 aa, unidentified
  source 1..538: note = uncultivated organism
MSDKKIRCAIYTRKSTEEGLEQEFNSLQAQREACEAYIKSQKHEHWQLLPSEYDDGGYSGGNMERPALKKLLLDIRSGLVDIIVVYKIDRLTRSLMDFSKIVEVLDKHNASFVSITQHFNTTTSMGRLTLNMLLSFAQFEREVTGERIRDKINASKKKGMWMGGKPPLGYYRKEKKIYPDEEKAELVNNIFKKYVELKSTTFLKEWLNKQGHNISVGNLNCILRNKAYIGLVGHKGTWYLGEHQGIISQELFEQAQEVMADNRINRQHYDPSKSLLAGKLYDDKDNAMSPSWSTGSGGKKYRYYVSQALIRKEPGMVGKISKVSLPKLEQFIDNWFSEFLKDKTKVYPYIQQFGVSKQKEIIKRLPSCPITRDVEKSLIKRVQLHSNKIEITLYQEQVTELLNAIYENREMCALKPEKLKNEITYTEMYRIGTVANGAKVIVGQFIQPTKQPNKELIKILNQAYAWHQDILDGETTQEIATREKVCVQYVRRILHLSFLSPKIVRSILDGTQPADCTLKKLLSIRTPDWQEQTQILAE

SEQ ID NO: 2418 - protein, 513 aa, unidentified
  source 1..513: note = uncultivated organism
MTSSSDAAIYVRISRDSEAQGLGVKRQEKDCRTLAEHLGWRVVEVFTDNDVSASKKKPRPAYERMMRAVETRRVQAVVVWDVDRLTRKPRELEDWIDHANKLGLNLASVGGEIDLATEQGRAMARMKGVFARLEAETIARRQRAKHKEMAEAGRYIGPRPFGYRFAVDQGGTTIRGSGQRLVTDPVEAAIIKECIRRVLDGESLWAITKDLNARGIKTAAGNSWQTQPLRRMLMRWTQAGYRKHQEFKDGHWVGQPQLFEAAWEPIIDRETHERVIAKLTDPSRITNKGDTELKYLLTWLVLCGACGRPMVGVKGYTYTVKGYQRADGTQSPSRERHYHAKYTCAHQGCHGITRRMDVVDEFVERHIVALLEAEGIQVLGGDQAVVDEAQQRIEEIKAKKALLSDLVMTPVSEGGMDEEQFRRQNARLSVQLEAEQARLRSARPADGFEEFTGDLAASAWATAPIEKKRLVLRALIEMAGLKITVDKVGPGAFSAAGANPHMGIRVEWDGASD

SEQ ID NO: 2419 - protein, 516 aa, unidentified
  source 1..516: note = uncultivated organism
MAKVTIIRPVSQEDSGQKIRVAAYCRVSSDSERQQNSCQVQFEYYSHKFENSETEILVDLYADSGISGLSADNRSEFQRMMQDCRKGRIDRIYTKSISRFARNTRDCLVYIRELKSLGITVCFEKENLDTAKNADEMMLTVMAGLAQEESVSISKNMKWAVRRRMQNGTYKSGRQPYGFAKINGKIEIIEQEAETVRQIFKWYLSGYGITTITNMLNQNSVFGNQGTWNHYHVLAILTNERYTGDMILQKNYMTDTVPFTEKKNKGELPMYYVTGVNETIVSKEDFENVQKLYQSRVQFRNNTGTPKRYPFSKKIVCGHCGVSYKRKMKSNGLYWICSEREKSIKRCPLKAISQEHICQMFIAMFNKLYFCRNEILSPLLASLHEIRLKRFSSHENVMNIQKKILETKEQLHVLTSLRTKGFLDDEKYHVQSAELHSRISYMQKELNRNLHDDDTASEQLEMLIDFFENRNGMMTEFEEEAFAFIVERMTAVSETEIEFCIMGGLKFTEHYPQNQD

SEQ ID NO: 2420 - protein, 574 aa, unidentified
  source 1..574: note = uncultivated organism
MSNLTKAALYARVSTEEQATEGFSIQAQIEDIETYAKRNNMEIVARYVDEGVSGKNISGRPEMKRLLRDIESDDFSTVIVYKIDRISRKSKDALEIAERCEQANVSLISLKENFDIATPIGKMIFQIMSNFSEFERNSIVDRAKMGMLQRAKQGLFNGGRVLGYESINKELIVNEEEAHVIRLIFDYAEQDLGYKAIVSRINTMGYKTKRGADFSTNTIKTILDNPIYVGKIRFDMYQNWAEKHRKGKNEDYILVDGKHEPIITQKQWEHVQQIRKKRSIRPAQSNQPYILNGLIRCPKCGYGMVSGSSKGAKGKKYRYYVCGLFHNKGSRACSAHSIRADLAEQQVFEQLKRIASEPYVLKRVIDKINQKRSQAKEPINNEINLLESKLKKVDIRINNITNQLMDDPSLVTIFKPKLKELTEEKAEIQSKLEALNIEIAECDTTPINDKALYHLLSNFEKVMKDASPDKQKALLRLIIKDIQISKEAPRGIGRKIERINLYFDFTIEGLEAQSMELLGAIKMDFIEPVEPWMLENKDGKGLSEMMDSLNILPLKDVRFATPNPKKFPSIPYAE

SEQ ID NO: 2421 - protein, 513 aa, unidentified
  source 1..513: note = uncultivated organism
MKKVTFIDSTQKEIKPRLRVAAYCRVSTDSDAQLESLETQKSHYEQYITSRDDWTFAGLYYDEGITGTKKEKRPELLRMISDCEAGKIDFIVTKSISRFSRNTTDCLELVRKLLDLNIPIYFEKENLNTGSMESELFLSILSSIAQGESVSISENSKWSVQKRFLNGTYKISSPPYGFRWDGQRMEIVPEQAEIVKWIFAQVLSGKGTQAIADELNDIRIPSKKSGQWTSTTICGLITNEKYVGDALFQKTYTDSQFNRHHNHGQENMYSMSEHHEPIISREEFETAGRLLEQHSREKGISKGDKKYQNRYCFSGKIICSECGSTFKRRTHQGYIAWCCKTHIKDKNRCPIKFIRDDELKAAFVTMINKLIFAHELILKPYAAAAGGTDKNTGLHRIKELQTLLMQNTEHKETLTKLMAQGYIDQALFNEEKNKLVSQAKQYHAEIKALQRAVSGKVTFADEALFLLHFTEKSAMLYEFDEELFEKTISRISVYSRHEIAFELKCGLILKERI

SEQ ID NO: 2422 - protein, 509 aa, unidentified
  source 1..509: note = uncultivated organism
MPKIAIYARKSVFREDSISIETQIELCAYETKGEDYTIYSDNGFSGKNTDRPDFQRMIEDIKSGCIKKVIVYKLDRISRSVLDFAEMIDLFQKYKVDFVSVTEKFDTGSPMGRAMLNICIVFAQLERETIQQRVTDAYASRSKKGFYMGGKIPFGYRKEPHTIDGIKTSMYVEEPEEADTIRLIYSLYSRPSATLGDVQRELEARHLNDNKRGHFWNTARISEIMRNPAYTSNDLTTYQFFKSQQSNIINSPEEFTGEQSLYLFKGENTNRKTWDLSGQNIVIAPHKGLVDSETWVYCRKKLLGNHQIKTCKVKNSFLSGKIRCGNCGYAIVVRFSQRKKGHIRYFIDTGRSAYHICNEKIPTIHSDDFEEMIVEKIREKINTLTIKSAENEKDELQEKIDNLQIEIDKINQSIEMLLDNIVTSNAESTTMKYINKKISDLDTQKQQLNLEIDKLIEEQSKKANADFNQLNDVMSNWDLLEFDDKRSVVELLINQILVFPDKVEIEWRV

SEQ ID NO: 2423 - protein, 552 aa, unidentified
  source 1..552: note = uncultivated organism
MESKNLYNAAVYLRLSKEDGDVTDGSKQFSDSISNQKDLIMNFLKFHKEIQVYKEYIDDGYSGVNFDRPQFQQMLEDIRSGAVNCVVVKDLSRFGRNYIEAGRYIEKIFPMLKVRFIAITDNYDSIEKQDDYGGEMIIPFKNLVNDMYCRDISVKVRSNLEIKRKSGQYIGAFVVYGYLKDEEDHNRIVPDEYAKEVVRDIFVMKMAGVSIQKIADKLNADGILSPYEYKKSIGIHLRTDFKKHAVSLWSYNAVQRILKNEIYTGVLIQGKQTTPNYKVKTRVMKDESEWIRIENSHEPIIERSEFELVKQLMERDTRVAPHSDGLYLFSGVVFCGDCGSPMVRKTIPSGKKKYIYYVCSGHNKDKRQCSPHRIAENVLADTVLKSVRNHIDNVIELSEAVKMIEKAPYMKADVVKYDERIKKKREELEKAEKRKLCLYDDYKDNLINRKEYEQLKQEYEKRVKEAEQAIESFEQDKKMILDGKSVLFEWTDHFLQNQHIAELDRRTVNILIDYVSVIDAKRIDIRYKFNDEYKTMEDYVAAYQQADKKEAV

SEQ ID NO: 2424 - protein, 548 aa, unidentified
  source 1..548: note = uncultivated organism
MKFAIYSRKSKTTDKGESIGNQVEMCKSYINANDSGEEHEFLIYEDEGFSGKNTKRPEFLRMMQDAKKKAFQQVVVYRLDRISRNIVDFMTITEKLQSSGIGFISINERFDTTTPMGRAMMQIAAVFAQLERETIAERVQDNMLMLSYTGRWLGGKTPFGFSGERIMQNKELGVEKSYSRLVPNDEMEIVRLVFEKYEEFGSFHAVQVYLHERRLLDKNASRTTDFFIRNLLSNPVYCAADEAARSYFEELGSKVAGEAALWDGRHGIMPYNRHSEKKEGTFQREVKEWVLAVGEHEGTIEGERFVRIQRRIAANKERYNSFTSATNDYALLSGLLYCAKCGKRMYTKPQNKKGRGASAASWFYVCETQKKYTSKACSCRAVMGQRLDDAVLKAFDDAFVPNTDLAAQIEKLRPNGIQKKEAGIEKIRWEKQKQEIDREQHTLYGMMGALMMEKGDGCPEIEVYRQQVFQLTAEHLEINEKPKALEEETSKAEDQERVYKTICEIWNGSFGNEFRKEPVPVQRDKIRQVLHRAEWDGEKIHLFLRGAQ

SEQ ID NO: 2425 - protein, 513 aa, unidentified
  source 1..513: note = uncultivated organism
MNPNITVINPIKIDEQEDKIRVAAYCRVSTDSEDQLNSYMAQLRYYENFLSESETETLASVYADEGITGTRMDKREDFQRMLKDCRRGKIDRIIVKSISRFARNTKDCLTVLRELKGLGISVMFEKENIDTAILSDEIMVTMMGGLAQEESTSISNNIKWSIRRKMQNGTVKFNSAPFGYDLKDGRLVINDAEAEIVRSIFDMFLNGMGYLAICRKLNESKILKDDKGTKWIPASVQYILTNEKYIGDSLWQKSYNISLPFRKVRNKGELEKFYCSKTHEPIISAEKYETVQKIIKERKCPNKDLIKNYPLSRNIYCSNCGSIFRRMVNNEKVYWVCRGHNYDTENCGIKQIPEQKFYDAFVVMYNKLKTNYDVIFPPMLQQLQELKNRKYSGNKQYIEINKETAQLKEQTHVLARLKTKGFLDESRYLEQVTEINAKIDKLYGEIRKIVKLDDEDEIIDQIREVALIIDNGHEIMTDFDEDIFESLVKKIIVKNQMDLEFNLYGGLKFTERI

SEQ ID NO: 2426 - protein, 550 aa, unidentified
  source 1..550: note = uncultivated organism
MSEVTVVQNKKIKAAIYIRVSTEDQAREGFSLGEQENANREYCVKKGYEIYKVYEDAGISAKDTNRPSFQSMMNDMKDGLFNIIIAYKLDRLTRSVYDQDEIIRDVLKYRCKIECCVEDVNTSNSMGMFTLRLYASLSQLEIERTSERTIFGLVGAVKAGHLNHTPFGYKKDGKKVVIDEVDSYYVKKMFEFYLQGYSQRKVADWINKNYTGKKKFHDRTVETILHNIVYTGRKYVTDPENKFNKILLEDVVEPIISIETWNLMEAQFGKNKRNYRRKQIYIFMQKLKCPRCAKIMTGTCGKSAHSDQKYNYYLCTCNNERLNISELRLEKEFIETLNPILDTFMITPIQYLPVKNSALPENEEMLLIKQRQKLEEKILRVNELYIEGTLNKEQQAEKIEEINKDLKKVDDGLELVRRQDVRIKEAFNITKYASHIQNNKLREISYAVKVERLWNELSSQSKQDLIMEFIDYVEIKVLPSANKFAPKPIEVTNISIRLDKIPAIAFDFRKRIMELANKEDIDINKYIDTKEYKDIQKGLESPFFDDYKIQ

SEQ ID NO: 2427 - protein, 566 aa, unidentified
  source 1..566: note = uncultivated organism
MRAIVYTRVSTDAQERDGTSLETQVRACLDYAAAAGWSVVATVRDAASGFLLERPGMRRVRDGMRLGEFDVVLAYAVDRLSRHQNHIGVLFDEAEGWGVKFEFVTERFEDTAIGRFILAARAFTAEVEREKIAERTMRGKAERARSGKIPQATGKGIYGYRYDPATGRREVDAVQAAVVRRVFESFCAGAGCSRIAGELNRDAIPAMGGGFWHPLTVRRVLMNETYTGRTVYRRTKVTSVRDPRTGKKRRRVTTRDEADWIEVEDATPAIIGRPTWESAQALLQAAERQLRGQPTHDYRLRGHVRCMSCGTPMVGQSMQQGRYRYYRCRRSFSGGFEGKCDSTYVRGEALEDAVREEIARVLADPDIILRQASAQRSAEAIVDLDGEAERQLAEVIEQQKRLARLFVSGGLPEEVLQSESARLAEERNRLEGLLRLGRAVTPAAQPAAPSLTDVFAAVAVLRQWLATAEETDYRLMLQALSVTVTPGRDHAVIAGVIPGLTGAPGPGQSPVFNSIERTSASPRARSPAPPPRSRPPAGRRPGSKGSSSPAPPTPSARSAHLADTGC

SEQ ID NO: 2428 - protein, 521 aa, unidentified
  source 1..521: note = uncultivated organism
MAGDPKPLRCAIYTRKSTEHGLEQEFNSLDAQRDACEAYIKSQASQGWKALPQHYDDPAYSGGNLERPALKKLLADIEAGRINVVVVYKIDRLTRSLADFAKLVEAFDARSISFVAVTQQFNTTTSMGRLTLNVLLSFAQFERELSSERVRDKIAASRRKGKWTGGTVPLGYDGKDKKLVVNKNEAETVRTIFQLYLELKSFSKLVGELDRRGIVTKRRSTKVAKYNGAIPFTYGPLAYFLKNRVYLGEVHHGGKWFEGEHKAIIDRATFDRVQELLKSKTQGRKVKRSASGALLQGKLFDDKGNRMSPSFSSKNGVRYRFYVSSAVLRGRKGAAGSVARIAAEVIEQAIVKALRARSLDREVDDSELIGRHLLRAEFGKSEIQLSLRLDEPQETAQPTLGWKSASVDPAVTIPWDPPAHSAEPPQQNGSRPSEQPDQKLIQALVRAHRWAESLTRGEFGSVEELAGSVNLHPKVVRSEIRLAFLAPEITDSVLTASWSCGLADLRKISALSWQKQLDELH

SEQ ID NO: 2429 - protein, 538 aa, unidentified
  source 1..538: note = uncultivated organism
MNDKKIRCAIYTRKSTEEGLEQEFNSLQAQREACEAYIKSQKHEHWQLLPTEYDDGGYSGGNMERPALKRLLSDIRSGLVDIIVVYKIDRLTRSLMDFSKIVEVLDKHNASFVSITQHFNTTTSMGRLTLNMLLSFAQFEREVTGERIRDKISASKKKGMWMGGKPPLGYYRKDKKIYPDEEKAKLVTSIFQKYVVLKSTTLLKDWLAEQGHNISVGNLNCILRNKAYIGLVGHKGTWYPGEHQGIIPIELFEQVQAVMADNHINRQHYEPKKSLLSGKLYDDKGNAMSPSWSTGSSGKKYRYYVSQAIIRKEPSKLGKIGKVSLPQLENFIDSWFDRFLREKQKIHSYIQHFEVAKQKKTLKLLSSYTITRSIEKALIKRVQLNPNEVEITLHTEQVVELFNAIYENREMRLLKPEELKTENTYTELYRIGTIANGEKIIVGQFIEPKKHPNTELIKILNQAYTWHQDILDGKTTQEIANRDKVCVQYVRRILNLSFLSPKIVRAILNGTQPADCTLKKLLSIKSSNWQEQEQIFYK

SEQ ID NO: 2430 - protein, 587 aa, unidentified
  source 1..587: note = uncultivated organism
MNTNLNTDVYDADIYLRLSKEDGDKKESDSITNQRELILEFLKSREDIRIHAVRVDDGYSGVDFERPAFQQMLEDIKAGKVNCVVTKDLSRFGRNHIEVGKYIEKIFPYLGVRYIAVNDNYDSITNDAQTNNIIIPFKNLINDAYCRDISIKIRSNLEVKRKRGDFVGPFAPYGYQKSEEDKNKLEIDEEAAQVVRSIFRMYLQGSNAYKIAEKLNKKNILTPMDYKKENGSAFYTGFKKNLKSQWTHMHVLRILGNPVYTGTLVQGKETTPNYKVKKKVKRDQSKWSQVENTHEAIITSVDFQNAREQLQMDTRTGTAKEKVYYLSGVVKCGDCGANMVRKTVPSGKRKFIYYVCGSHKGNKNICSSHSINSEALEESVLKLLNYQIKNVTDLGRILDKLEDAQIRKGELETLKDTSMPFGRKEEKRNRQITKKKEEIQKYNHLRLDLYEDYKDGLITKEEYLELKEIYEKRAKAAEQSLEAMEVEMAFFADGQRGTCGWINEFKKYGYLECLSREVVVSLIEQILVYKKKEGERYPRIEIHFKYEDEFQASLNLLEELHEETFTGHTGSLSVNGGEREGTYGKNE

SEQ ID NO: 2431 - protein, 503 aa, unidentified
  source 1..503: note = uncultivated organism
MEKVKPVGIWIRVSTEDQARGDSPEHHEKRARFYAESKGWQVKEVYHLEAVSGKSLMNHPETQRMLNDIRSARITGLIFSKLARLARNTKELLEFAEIFREHNADLISLQESIDTSTPAGRLFYTMIAAMAQWEREEIAERVAASVPIRAKLGKPLGGQASFGYRWVDHKLVPDSNEAPVRKLIYELFLEHRRKKTVAHLLSEMGYRTRDGSKFSDTTIERLLRDPTAKGIHRANYTRSLGENKKWVLKPKEEWIETRVEPIVSEESWNQCNAILDEQEKKNKRPARKAVHLFSGVVYCHCGNKMYVPSNSPKYICYKCRNKIGEADLEEVFHHQLKSFFFSPSEISGYLKKADQVIREKEELLRALVEEERKVKQEMDKTYKLYIEDEITSEGFGQRYKPLEQRLKQIGDQIPELQGEIDFLKIQYVSRDEILSEAKDLYSRWQQLSAEEKRKIVENITEKVIVGTEDVTIKLCYLPSTPPSSLKVMASSQRNFMGSWRPPA

SEQ ID NO: 2432 - protein, 560 aa, unidentified
  source 1..560: note = uncultivated organism
MKAGIYVRVSTTQQIDRDSLRTQEERLRQYCKAQDFEIYRDKPYKDEGISAKDTKRPAFEELMNDIEAGRIQVVIVTRLDRITRSLKDLIDLMELFQKHDVKLVSLTESIDTTGPMGRFVINLLGSIAQLEREIDSERVSADMHHRASAGKWTGGVVPLGYVTKGKLVRKFLEKGLKDDEALTEANKIAPEKGRLYLVKKDAELVRKIYELYLECRSLRRVTHELNKREIKTPEGLAWAATSIRRILTNPTYAGRVWYGKRKTELATGKLKNVKPELWKIVKGEQEGIIPEETFERVQQLLRQKYMKPSKAKKSYLLAGLARCGSCKGGMFGYLYFKKKYDKKYFYYRCQNSIQKGRSVCKGLVVPGKVLEEQVVDTLLKLSQNEKFLHDKEMMLKAARQQAKPVKSEVDEEKKRLVQEEKKLVEVRNTLLEKLENKVIDDVVFVERFDENKKQLDAVRNRIAELASKGREINMQEIALQASFEELCGLPNIWSKLTDEERQGKLRKIINQIIVDYDRKLRKFHLQVQLFLDADLPKKRDRFHFVVIPYRRDRGSWRRLT

SEQ ID NO: 2433 - protein, 557 aa, unidentified
  source 1..557: note = uncultivated organism
MTANGNDLAPAPTRAVLYPRVSTGRQAEHDLSIPDQRRQALAYCEGKGWKVVSEYVEPGATATDDRRPEFQRMMDAAATRPPLFHVILVHSFSRFFRDQFQLEFYVRRLAKNGIRLVSITQDLGDDPMSVMMRQIMALFDEYQSKENAKHTLRAMRENARQGYWNGSRSPFGYRIVAAEQCGTRTKKKIDIDPLQAEHVRLMFRLARVGDGDDGPFGVRQIAHYLNDHGIRTATGGRWGLGMVYEVLTRTSYIGTHRFNVYSWRKKQRKPDDEIVEMAVPAIIDPAEFDEVQEMLHARSPQLKAPRFVSGPTLLGGICFCADCGGAMTLRSSGKAEHYRYYTCCTRNRQGRSGCTGRTVPMAKLDRLVTDHLETTLLAPERVNDLLSALLERRHAHQDRQQERIAALKRQAAEADAKLTRLYAAIEDGVADARDENLKGRLTELRAIRDSARADVERAESKGRAQPIEITPEALAKFTGEAKRKLRTEDGGYRRHVVQAIAQRVDVGDSEVRITGSKVRLLRTLMASGGVAGTVEREVRAFVPNWLPGPDSNQRPSG

SEQ ID NO: 2434 - protein, 652 aa, unidentified
  source 1..652: note = uncultivated organism
MESRKGKKCILYSRVSTEMQIDGYSLEAQTHGLKRYADREEMIVVDTYEDAGKSGKSIEGRPAFKRMLNDISQGLEIDYILVYKLSRFGRNAADILSSLEYVQSYGVNLICIEEGIDSSMTAGRLLISVLSAVAEIERENIIEQTMNGRREKARQGGWNGGFAPYGYKLENNKLLIAEDEADAIRIIFDKFINTDMGYNGVAKYLNLQGIKKKVRQNGTLTEWSSKTVKELIDNPIYCGKLAYGRRIREKVKGTKNEYKQVRTDNYILVDGEHEAIVSVEDWNKAKVKRDATGIKAPSKVGRDRAHLLTGILKCPVCGSPMYTNKNAWTNKDGKYNERFYYVCSRKRQQRGKSCSYSAQLMKESIEPDVVKAIKQLVTNEEFAKEIKSRIGTKIDTTEIDKEIKNYETNLRQVENNKRRLESEIDSLPEDAKYRDRKLQDMNRRLDSLYDTIYELEDKIEESRAKRKSIEMSAITIDNVYKVLLNFDKVYDRLNDEEKRTMIQGFIKEIQIYPKEEQEKYEHPIRNITFNFPVVVNGEEVDTISWEKGNTVETVCLLSKLNAKQHIEINLDMDELDLTDAEKKATYQEIKDYVMEHSGLKVSSLYIAQVKQKCGIIERENYNKPKSEDAKQPQCPPDKEKAIKEALKHFGMI

SEQ ID NO: 2435 - protein, 539 aa, unidentified
  source 1..539: note = uncultivated organism
MKAPAVKAVRCAIYTRVSTEHGLDQEFNSLDAQYEAASAYIKSQAHAGWTLIRSRYDDGGYSGGSTDRPDLQRLLEDIRARRIDVIVVYKVDRLTRSLAVFAKLVELFDAHGVSFVSVTQQFNTTTSMGRLTLNVLLSFAQFEREVTSERIRDKIAASKRKGLWVGGNLPLGYIMKDGKIAIIEEEAELVRSIYQRYLELGSVNELLRDLKERNIRTKSRLLSTGVTRGGIPFGRGALYYLLSNHFYIGEVKYKGEILPGEQPPIMDRTLFEAVRQKSLAQWSHRTTVRNKADHLLTGLLFDVAGHRMIPTHATKASVRYRYYASTSVLHGEARTAPAGTVSRIPAADIEDTIVKSLKEYLAANRGKMTTSAENFGDRETIAELVTGIVVHRDRLIITLKSGDADEESDSSDTRSLTILWQKPPSRRSRQILLPHNASRSDVRPEQFERRARLVSTIARGRLWLDDVVSGRVTTVAELCVREKCSVRQVNMTISLAFLAPNLVKAAVEGRLPRGVGIERLRDPQTEWRRQFEALGLNPE

SEQ ID NO: 2436 - protein, 530 aa, unidentified
  source 1..530: note = uncultivated organism
MKRNQRNGTPATIPLVRCAVYTRKSTEEGLEQEFNSLDAQREAGEAFIKSQANEGWKCLPERYDDGGFTGGNMERPALQRLMADIEAGKIDCVVVYKVDRLSRSLLDFAQMMQTFDQHQVSFVSVTQQFNTATSMGRLVLNVLLSFAQFEREIISERTRDKIAATRRKGKWAGGHPILGYDVDPRGFRLLVNEAEAERVRAIFALYLEHESLLPVVQELEQRGWVNKHWQTRKGHATGGQPFTRTSLYRLLTNVAYVGKVRYKDEVHPGEHPGIVDPGVWQRVQALLERNGRSGGAPVRNKFGALLKGLLRCVPCGCAMTPTHTTKDGVKRYRYYVCCSAQKRGWDTCPSKAIPAGQIEDFVVGQLKCIGRDRALLAEVLSQARAQDDVRAGELEAEQRGLEKDLTHWHGEMRNLSAQIRPGDDNGSLIARLADLQERIGTVEGRVRKIREQIHAIHYHLLHEDEAAQVMSIFDPVWGSLSPREQVRVVQLLVERVDYDGAKGKVSITFRPAGIKTLAEELANGREEKRA

SEQ ID NO: 2437 - protein, 544 aa, unidentified
  source 1..544: note = uncultivated organism
MIQGEIYNVALYVRLSEEDQRKKDSRSVENQKCFLMDYISNKPDFILYGIYEDVQVTGATFERPGFNRMMSDIKKGLVNCIIVKDLSRFARNYIDAGQYLEQIFPILGVRFIAINDDYDSANFDDNGLLSMALKNILNDTNLKETSARIISAFRARQQAGDYLGGIPPYGYLRSKEDPHKLIIDPVASKVVKQIFDWKFEGKGDNKIAIELNKSQHLPPKRYFYELGIVKNQRYATMNTWHRSAIARILRHPIYTGDMYQHRLEVTAISSKRNKPVDPAEWIIVPNTHEPIISKEQFQQMQSLLEKKAKEQKAWIKKYEDLAGLPNLLKGLVFCGDCGRAMTRHKSNVGSHGNGVYYVYFCTTHEKVAPDICTRKSIRETTILSVLNDAIRTQIRLSGVIKKKNEELEIRNRQLRQVNSSEITNIKRNLSKSKSLKLSLYEEYVEGQIGRSEYAQRKKQVDIDIENLTTKLKELQEQPMEYRNLSEKDRHWVEFLQSLKRKRNFTADQFHALIKQILIYDNAQIEIVFNFTFHFGCEEGEKNGK

SEQ ID NO: 2438 - protein, 516 aa, unidentified
  source 1..516: note = uncultivated organism
MSRKITKAEPSTVRCAIYTRKSTEEGLEQEFNSLDAQRESGESFIASQRHEGWLCLPEHYDDGGFTGGNMDRPALKRLLADIAAGKVDCVVVYKVDRLSRSLLDFARMMEVFEQHGVSFVSVTQQFNTASSMGRLVLNVLLSFAQFEREMISERVRDKIAASRRKGKWSGGMPLQGYTVEKTKLVVDETEAAQVRQIFELYLEYQSLLPTVTELNRRGWTTKRWTTKKGTQRGGRIFTKNSLHALLTNVTYIGQIRYKDEVHHGEHTGIVPPDLFQRVQSLLQRNGHTGGRAVRNKYGALLKGLIRCRVCRCAMSHTYTAKGNKRYRYYVCGTAQQRGWSECPAPSVPAGEIERFVVEQIRSIGRDPVVIAETVQQVQQQMDEGRIRLTSERTALQRQVRDDHQALQVAATLTNPVERVSRLAAVQERLRVAERRLTEIDNERALLEKDSVNEADVARALADFDQIWQSLAPREQTRILELLIERVEYDGERGQVSLTFRPCGIRALTQELQESAA

SEQ ID NO: 2439 - protein, 500 aa, unidentified
  source 1..500: note = uncultivated organism
MSLPKVGLYLRLSREDEGESDQSMSIANQKTFLLQYVRQQGWPVTEIYADDGYTGTNFDRPAFQRLLEDIRKKRIDLVVTKDLSRLGRDQIGTVYYYQCFFPAHGVRYVAVSEGFDTAAGHTSIALPFLAAANDFYTADISRKVRAALDARRRSGAFIGASSPLGYRKDPEQRGKLLVDGERRWIVEEVFRRYLESGSVRGTARALSAAQVPTPAQCRGEGSRGVWSDTMVRRILTNPTYAGHLTQNRSEKASYKITRRIAHPPEAWTVVPHTHEAIIPQAQFDRVQELLRRRSYRPPVGEAHLLTGLAFCAACGSPMSYVREGARSYMVCQGYRRGSKRCTSHRVREDAVLSALGELLRTLAREIDPGELAARTLPRTGDETVRRRGELERALQACRRRTVHLYRDQEEGVITRTEFQELLLENRRRREELEARLGALPSAPQSNPAWWTERVRETLTFAPLTRPAVLSLVDRVLVKEGKQVEIRFRFRMPAAETVQNR

SEQ ID NO: 2440 - protein, 534 aa, unidentified
  source 1..534: note = uncultivated organism
MSGGKKATNGSLALDQNRVIVIQPAERVETQKLRVAAYARVSTDSTDQANSFLAQMEHYQRMIAANENWTLADVYADRGISGTSAEKRTDFQRMLSDCRQGHIDKILVKSISRFARNTKECLEIVRELKAIGVGVCFEEQNIDTGKVTGELLTSVFAAIAQKESESISQNMRWSYHQRMESGTFLPGSMAYGYRIEDGKIVMVPDRAETVRRIFREYLSGYGILEIAKRLNADGVPVNEEDDRRWTASAISYILSNERYIGDSLWQKKYATDELPARKVRNHGEREQYYATGTQEAIIDKETFDAVQELRKRRVERRQISEAREADPLRAKLRCGECGATFRKCGGEKAYLVCRKHFRDKDACPVVKIPESELQTAFLRLYHKLRWHGSDILSPMLRDLREIRRRKLLWREDIVSLNRKISEISDQNQLLSSMNRMGLVDPDIFIARSNEYAQQLSEAKQKRTKLLDEGGDDTIEKTEDLVEALADMPDFLPEFDGAVFDELVDRVELTADDRVIFRLTNGLMLTEHIERRTRP

SEQ ID NO: 2441 - protein, 531 aa, unidentified
  source 1..531: note = uncultivated organism
MISEQAVVDPTKVAIYIRWSTEDQGEGTTLEVQSETCRAYLVSQGWVVNDDLIFIDDGYSGGSIERPAMGKLRAAVAAGEVHCVVVYKLDRLSRSVVDTVNLVCREWDGKCSIKSAREPIDTTTHAGKMFFYTLVNYAEWERSVIKERTFSGKMRRAHEGRNPGFKPPYGYAAGENGAFVVIDAEAAVVKRIYREYLAGSGLRQIVTRLNHEGIPPREAKMWGQSTVQRILANPAYMGRLEYGRRRQVGGSRIKKKAVVAVDSALIPVLVSKEDWEAVQALKVSRPGFGKGQGSGRAAVSASLLTGLLKCSGCGHGFAGRSQSHPYHYYRCMGVHMKSSAYCNCGGIRQDLLDDLVVGALRQLYGGDEAKERLIRQATAHYEHQLIEARGSLKALAGDVDRLANEEQRLKRMLRAGELTVVEYRELKNDLEKEGADLRRTEERLQSSEKLALAGLHGQERLRETLAQVDEWDRLSHLGRKQLLRQFIQEIRAYRAMRSEQVQCHIVWRWDSEGAGEPPIPTEQYVVAEQGR

SEQ ID NO: 2442 - protein, 547 aa, unidentified
  source 1..547: note = uncultivated organism
MKRIRMLLRVSSDQQLEADGDLSIQRKILVEYIRKHADWMLDEKEYFEGSKSAYKNTSSQREVLQTILQDARNKEFDILVPYKDDRVGRLMWDTPLYIMTLKGLGVDVYTVRDGCISPEADDIMGQMMLTFRYANAQKSSADTGMRVKDTAQKLAEQGKFMGGKAPYGYRLDYSGEVSKHGRALKHLVVIPEQAELVRLIYSLSLNREFGSARIARTLNENDAYRNSAPGGLWKSGTVASILTNPIYAGYTAYKRRERINGRYRRLDADDWILAKQADQRIQIIEPDLWNRVQEKRNMRRKVYAGSPETKGITVIRKNDGMLPLIDVLYCGYCGSKFTNGSKYNYWVIKATGEKRASKQPVYKCQRARQGILHDGRCQFRADEIEPVIFGTLGAYMDKLQEHEDVCEEIEKSRNRERRERKKELEKQQEEADKLRRKIEIMEGNLPDAMAGEYPLSLGELAALIRKQKEALERQELLVREKEQALGKASGSAADWEEIKKEIPSWRDVFYNADGAAKRVLVNRLIRRIEVKKDEITVYFKVNPENFS

SEQ ID NO: 2443 - protein, 506 aa, unidentified
  source 1..506: note = uncultivated organism
MAGNLTALYLRLSRDDGTVADSESIVNQKLFLLEYAKAHSLNVIGVFSDDGYSGLSFDRPEFKRMIKMIEEKKINTVITKDLSRLGRDYIEVGNYIDKYFPMHGVRYIAVNDGIDTDSASSANDMTPFRAVFNDMYAKDISKKVRTALTTKKISGKFIGAQPPFGYRKDPHDKNHLIIDEECAVYVRRIYREFLSGSTILGIAHNLSADKIPTPSEQKKTMAVRKNCIWNDTIVRRILTNPTYAGHLTQNMTRKISYKINKKVRLPKNEWIIIRNTHDAIVSQEDFDAVSEILAKRSYNKQKRSGKTHLLSGLVFCKDCGGGMSFVRQSETRTYLVCGRWRKNAKLGVCSSHSMRELYVENIIKDKLKELASAIDTSEILSAAETFFAKENDSGNLTEQITRKLEVCRRTLLSLYKDKAIGAISESEYAEMSEEIKSEREVYEKRLGELQKKSDNLRSRACLRKLLNSIIGFEDIDRNTLLLLVDKVYIGKNKETEIRFKFDNPQK

SEQ ID NO: 2444 - protein, 533 aa, unidentified
  source 1..533: note = uncultivated organism
MSFAKIRPVPEECAQNAVLYCRFSSDRQKENSIDFQLRADREYCERKGLKVVGEYIDRALTGTNDNRPEFQRMIRDAKKQQFAFIVVYRFDRFARNRYDSAIYKKELESHGVRVLSTEESVGTGDEGIILESIYEAMAESYSRKLSKIVTEGLKETARKGLTTGTAAFGYKSVDHKLAIDERTAPAVRLAFSSYAEGKTKTEICDDLNGRGFRTSKGNPFNIETITRLLSRRVYIGENDYLGVERSSPRIIDDKLFYTVQDLLAKNKRSYGKKKEKAYFALSGKLFCGPCGSAMIGDEGTSKTGKTFYYYTCGSKKRKRSSCTKKSEKKDFLEWYVCEQTVNYVLTDDRISEIAEKVVALNEKENGSEEIRRLEKEIASIEKEFSTIAEKLLATDSPSLIKAINEKASVLESRKADLEGELASLRLRADLRLDQKEVESYLNTFRNGDLLDEEFRRRLIHALVNCVYIWDDKILIYYNVRGFESVSYIDALADAEQLSECSDSLSSGPPFTKLSEHHAFVFTNGVLGIVISRG

SEQ ID NO: 2445 - protein, 539 aa, unidentified
  source 1..539: note = uncultivated organism
MRAAIYCRVSSAGQEDNYSLATQKASCRDYAAKRGWNVISVYQDVHTGSEIFERPGLTALRADMRAGQFDVLLVHALDRLSRDQNHQGLVLSEAEHADVLWDSATEDIDNSPTGKILRAVIGGMAELERLKIAERTHRGKRARVESGKYNVGCRAPYGYCWDGAGKERLLVDAKTAPTVQRIFNEIAAGGSARQVALGLTRDGIPTPSGRGTAWHVSTIRGMLNHPVYVGDARAFRWSKTRRRGKHSQRLKPVDQHVPLPNVAPALVSSDIATAAQSQIAVNMKNASRNNKRPTAALLRAGYARCGYCGNALRVLNGKGGTYYRCNTTSRDIYGCPSFTIAASTLDAAVWARVERVLTNPHVIANEVARLRDADPTEANVTALNKRIAEVERQSTNLMRRIATIDDDEVAAPFLVEIKTLGDHHKRLREDRDVLLAERAGWQLAQDRLDDLEWWCRVQAANLSALTYEQKRLALLALKVETNVWSTDHVPRFTITMQIDLDDTFSGLRSASGDDPDAAHVGASIRRGCARRGGHRADRL

SEQ ID NO: 2446 - protein, 554 aa, unidentified
  source 1..554: note = uncultivated organism
MSKEAASGDRKRYKAGIYARLSADSNERKSESIDVQEEIARKHIERLNRSGQEVIDIIECYRDLGKTGSNFDREGFKRLMQDIRLGDIDCVVVKDLSRFGRNYLEAGNYIEKIFPFLGVRFIAVSDGIDTGDKGNDTKQMASEIKNLVNDMYAKDFSKKAKTGLKQRREAGSYVGGPPPYGYKAVWEGKVRRLVPDENTAGIVKHIYQSFIEKGSYKAVTDDLNRRRLNPPAVYKETGEVFCLLGREYKGWDKSAAERIIKSRTYAGTLVQGKTSITARDERNRIHKQEDEWVVRENAHEALVSVELYRKAQETRNRIEEASASHKHPTEGNPIGENIFDHVLYCGVCGRKMTRHSYAKTYADGHKGRLEGFFCLNAGQTKTAGCPESNRISKQELTDILMPLLRTEFAVYLDKPKRFVEAGKEQIGSAIARSEKEREELRRRVLRLEEESTGAYMAYRDGKMPQKEYVSFKMEQEERLRELKKQEKELEESRRGMEKVQEKYLRAVRSLLKLKDTGELTTDMVDSLIEKIHVYPGKRVEAELRYTNEMLEGWD

SEQ ID NO: 2447 - protein, 561 aa, unidentified
  source 1..561: note = uncultivated organism
MKTVRCAIYTRKPSEEGLEQAFNSLDAQRGACAAYILSQASEGWSALPDVYDDGGLSGGSLERPALQRLLADVAAGRIDIIVVYKVDRLTRSLLDFAKLVEAFDKAGTSFVSVTQSFNTTTSMGRLTLNMLLSFAQFEREVTAERIRDKIAASKAKGMWMGGTPPLGYRPDGRSLAIVEEHASVVRDIFRRYLELGNVRLVADALARDGLVAPTRETAGGKAFGGGTFTRGQLYSILKNPVYAGQIRHLGKLHKGLHTAFIDRDSWDQVQAKLADHLQGERRAAPAARPSLLAGLIVDEDGEPLVATHACKGKVRYRYYVSRGLQHGGSIDPATAVRMPAREIEAAVAQRVAEALNDPLSLAAQAWLQVGPDEVPRLVERSAAASIGISNREHQTTRRIIQKVRLLRGRIEGDVAVPALEELLQVTAASDAPAVITLTSELRLTRTGRTMRLIQNNGAGIGHARPDSPLVKLIAQAHAWWSELRAGELNIAALAQREGVTKSYVTRVTRLAFLSPAVVEAILSGSQSAAVSGGNLKAPDAIPIDWAEQRTTFQSGRSLARG

SEQ ID NO: 2448 - protein, 532 aa, unidentified
  source 1..532: note = uncultivated organism
MTNKNCAIYTRVSTDNQAEKEFSSCEAQEEKIKSFVNSQNNWQVFKVYSDAGYSGATLKGPALQQLLSDMKERKIDMVLVYKIDRLTRSPKDFYQLIEFFEQSKIDFISITERFDTSTPAGRLLRNIMLTFSQFERELTSERTRDKMLERAKKGMANGGLTPYGYMRRDKKLIPHPREAEEIKSIFETYIETGSLAKTYQMLKEKGIKNKNGKNFSKTNIAHILRNVVYVGKIKHNNEIYQGIHEPIISEEMFGLAQKIHKEKQKNFRVYKNFLFGGLISCEGCGSKMTSCFTNKKDGKKLKRYYYYRCTSTLQQDWQACSIKQVSAERLENFALENLERISLDKNYVENLIFRLNHSSNPELKNSAIPRRAGYELTKSCSKFSPESISSTLKFFLSGLAKKKGIEKNLWVKNFIDKIIYSKEYIKFSLFYRENWENLATENSPVPPKRDGASAQKAERENTVSPKNSEFETYSMAPRAGFEELPEGIAAAFGGTIQGAGSHRTTRNKTKSKAPIKGALILFAPRAGFEPAT

SEQ ID NO: 2449 - protein, 575 aa, unidentified
  source 1..575: note = uncultivated organism
MRKNRSTFYLSDTRENIIIFYTKLGAKRKEGDKLRIFIYARKSVFTGKGESIENQIELCRQHMRSLCKDDYERAEIVEYCDTGYSGKNIDRPYFQKMMTDLRSKKPDYLVVYRLDRLSRSVADFATLLNELMDRGISLVCVREGFNTATPFGKTFLYLVAIFAEMERDTIAERVRDNMMLLARTGRWLGGPPPTGFSTEKVADVIIDGKTKTSSKLIVEPLEIKTVRLIFSQFAESQSLAGVYKYLLRNGIKSRDGKSFSHLGIKGILQNPVYCAADLDALEYFRSCGSDVCFDESSCNSKLGLIAYNKRDYKQKGSPRLGKDQWIIAIGKHPAIIPGKQWVAIQRAFEKGDSDGERPPKQRNDYSLLSGLLVCEKCGSRMFSKPRSGKTRTDKTQYDYICGLKMSGGTVMCDCQNLPGQLTDDAVCRELSRYTEEGSLLFEHLERMRQNLAQQVSESPLAEIDKQIKKADEELNNLVAAIAQGVDSAMLEKINERASRLKEEIDYFTEKRRRYENIMDKVDEKELELDLIVHSLATLKNRFEELTLSEKRTILRMLIKKIVWNGEKLHIFPNGE

SEQ ID NO: 2450 - protein, 561 aa, unidentified
  source 1..561: note = uncultivated organism
MKAAIYCRVSTTMQEDNYSLPTQEDACRKHAAVLGYTVAALYQDIHSGYELWERKGLTALREAARAGAYDAIIAYEPDRLSRRQIHSAVLIDECERYGVALLFVNGQHDKTALGEFLANVRAFTAEMEREKFRERSMRGIQARMRSGKLRPSNRPLFGYRWTDEGKGAYEIDEDKAIIVRRIFALAATGTPLRGIATILENEGIPTANGAVHWHAGVIRTMLRHRAYAGIAVGNSTTAKKVGGKQIRAVRPESEHIYLPEGTVPALVSRETYDAIDARLARNKAEATRNSRNPEAFLLRAGFVVCGYCGKPIRGVWTKDCPNQNARAYYTCDPASAPHRDCPAFAMSAPKLDAAVWTKVKTIITRPEVIAEEVAKLRTNDPTDADQTAIERAITEIERKRTNLSRSLEMIDDADTAAPVIAQLKALAARKRELDTERDAVQARQASWQTSQDHLASLQDWIGTVGANVEELVYQERRDLLAALDVRVRLYRKDHTPRYEITASLPFEPDMASDIVSQPYAVLSPSHSGHRASARRAPSFLPAASRRSDRLPATEHAARSPR

SEQ ID NO: 2451 - protein, 533 aa, unidentified
  source 1..533: note = uncultivated organism
MKEKAITEKKPINCAIYTRVSTNDGMEQEFTSLDAQREAAESYIASQKSEGLVILKDKYNDAGFSGATTERPALQQIIADIKSGKIGCVVVYKVDRLSRSLLDFVKLLNLFEQHSVAFISVTQHFNTNTSMGRLTLNILLSFAQFEREIISERTRDKMGAARKKGQWMGGRPALGYNLDKENHRIVINEAEAKIIREMFDLYIKERSLLSVAKILNKKGYRTKSYIRKGKPSGNIPLKATNIQLMLRNMLYMGKINYKKKQVFQGQHEAIISEEVFNKVQAILDGNRREIKVIPKKNIGLLSQILRCKHCNCSMAYSYTRKKAYKYLYYVCLSAQKRGYESCPTKTIHAMKIEKQVISCLREITADKNLKTGVWEALPFAQQRAVILALVKTIQFEAQSSKIWITLNKADKVHEFKIDLETPLNYRPPIEETIKQEPKLRQHLILAYQIQGLLSEGKAQDPKQVAKWLNISNVRIYQIVGMLFLSPRIQEEIIFSRDPILAMLPEYKINGLVQEVDWKKQELAWKKIVSKHAG

SEQ ID NO: 2452 - protein, 560 aa, unidentified
  source 1..560: note = uncultivated organism
MADTPIRRCAIYTRKSTEEGLEQDFNSLHAQREACEAFIKSQAGEGWKLIKTAYDDGGFSGGTMERPALQRLMGDIRQGLVDVVVVYKVDRLTRSLADFAKMVELFDTQRVSFVAVTQQFNTTTSMGRLTLNVLLSFAQFEREVTGERIRDKIAASKRKGMWVGGGLPVGYEVHDRKLVVHQGQALTVRQIFERYLELGSVRLLKRNLDQRGIVSGVKVSKSGKQRGGKPFSRGALYHLLSNPIYVGEIRHKNERHPGQHEAIVSRELWERVQERLRNRAVRCGEGCKTEAPRSPLAGKLFDEKGEPLYVQGAAKGRRRYRYYVSRKLVRSGPEDAEHGWRLPAPEVERSVSAAARQILADRDAIAQAVEESGSGAHRLPSVLKSAQAWSERLRTKREAAAALADLIERTDLSRDGIQVTVEVPIPPAEEQKGVPPLHIVLTRFVPMQMKRRGVEMRMVLEGDTTAVRVDLPLLKAVARARRWSQDLIAGRVQSVSEIARREELDRRSVHRLLRLGFLSPRIVEAIAEGRQPPDLTVIGLSRRIDLPILWRAQEQALGIR

SEQ ID NO: 2453 - protein, 551 aa, unidentified
  source 1..551: note = uncultivated organism
MTAPQTITGARAALYLRVSTARQAEHDVSIPDQRRQGEGWCAARGLKVVDTYVESGASATNDRRPEFQRLIEAGTSKPAPFDLVVVHSFSRFFRDHFELEFYIRKLAKNGVKLVSITQEMGDDPMHVMMRQIMALFDEYQSKETAKHVLRAMRENARQGFWNGSLPPIGYRVVAAEQRGAKVKKRLEIDPFHAETVRTIFRLALEGDGVSGSMGVKAIAAWLNERSIRTRDGGRWGLGAVHQILTRSTYTGRHEFNRRGKDRKLKPKSEAVVVEVPPIIDHETYDAVQARLQARNPKKVPPRVVSGPTLLTGLIHCAKCGGAMTIRTGKGAQYRYYACSTKARQGPTACAGMSVPMERLDDLVAKHLEDRLLQPDRLEVILSAVLDRRQEQTTRKRAHVADLNKRATETDLRLKRLFDAIENGIADVSDPDLKERIATLKATRDQAKADAERVTASLGAAGQKAVAPDMLAKFASAARQRMRIEGGGYRRDHVRALAQRVEVDVGEVRILGSKSNLLQALIAGAAETKPDAVTSFVPKWCTQQDSNLWPSD

SEQ ID NO: 2454 - protein, 560 aa, unidentified
  source 1..560: note = uncultivated organism
MKEKSKFFVAMYLRLSRDDAVKTECEERKGGDGNSKAESNSIGSQRDLIRAFLNEQQEMELYDSYVDDGFSGSNYDRPEFKRMMEDIEAGRVNCVVVKDLSRFGRDYIETGRYLEKIFPALGVRFIALTDHYDSKSADAGESQIVLPVKNFINDSYCRDISIKVRSQLAVKRKAGECLAPFAVYGYRKSQEDKNKLVIDEYAAEVVRSIFYWKIEGMAISAIANRLNEMHILSPREYKRFTGLNYRGGFRGNTGSQWSSVAIKRILTNEVYLGHLLQGKTEKINYKIKRSVKKPKEEWVRVENVHEPIISQSDFKVVQNLLKTDGRISPESKKVSPFMGLLFCGDCREPMVRRRVRYKESDKLYYICSTKNRGEGCSRHSIEEKTLNSLVEVAVRRYANDFLEQQRLFERVKEKQADMEAVAGCQKELIHLKQECDKYYGLCAGLYADLGKGIITKEEFERLNVEFQRKAQEYGKAYEKREKLVGQMLQNGAVCDQKLEEFRNCVRLAEIDRHTLTNLVKRIYVYENKRIEIEFYFQDEYQIMRECVLALSGPQKDERGV

SEQ ID NO: 2455 - protein, 542 aa, unidentified
  source 1..542: note = uncultivated organism
MAARNEIKRCAVYTRKSTEEGLELEFNSLDAQFEACSSYIKSQVSNGWHLIDKRYDDGGYSGGNVNRPGLKELQRDIENGKIDIVVVYKIDRLSRSLCDFTDLSKLFEQHGVSFVSVTQQIDTSNAAGRMMLNILMSFAQFEREMTADRIRDKIFATRKKGLWTGGVTPFGYKVVEKQLEVDPLTADAVRMMFRRYAATGSSRQVARELNAAKVVRPNGGHWLPRHVTTLLRNCIYIGKLPIKRTGDMFDGIHEAIVDEATWNAVQRILDENRPSETKMSHRETLAPLKGLLKCGTCGSAMAPVFSNYKGRKNRHYIYYRCVKDAKRIDHTCPIRNVSAEVIDRLVYQRIGRVLQRPDVIRLVAGGDADKAATFRRATSDMEAFWENMVPAERDRLFRLLVREVLLFPDKVEIVLMLPEGEEHDIVSCSFKTNLGRSCVVVPNDDGSSKDEPEKMAVLTALGRSVNWCELLTSATYKNKQALAKALGLSPSYLTKLLRFPFLSPILVSKIVNGELPEASVTKLLEINSPFWADHEIGNPNNI

SEQ ID NO: 2456 - protein, 544 aa, unidentified
  source 1..544: note = uncultivated organism
MSNKIYKTGIYARLSREDADSAMSNSIQSQRAICLAYIEGHDDLELVDTYIDDGETGSNTDRPGFQRMLQDMRSGRIDCAVSKDLSRFSRNYIDAGNYLEKIFPAMGIRYIAINDNYDSHAAGSGSDAITLPFKNLVNDVYCRDISIKIRSSLEVKRKKGEYVGSFVPYGYQKAPQDKNRLLVDETAAEVVSMIFGMYKDGFPILKIAQRLNSSGIPTPMEYKRIQGAHYETAFRTKKRSEWEYVTVKRILSNIVYTGVLIQGRRGTPNHKVRVTRPKDEADWIRVENAHDPIISCTDFEAVSELMRRDMRCAGEGEKHGLFSGYLFCGDCKDTMVRKTQKYKGKPYVYYNCSNNKRTHECSPHSFSEAKLTEIVFHAIHDQIEVVLHLDTVLRFIDTLPQRERKAFSYEAQMARLEDEIQRYKKLELRLYEDFAEGIINRTEYTDFRENYRGLIGEKQEALRRLEREQRDAAAMGSQNRAWVQAFAQYENVQELDRRLLMALVDKIFIYEDKRVEIAFRYRDEFARAMEVAKNYQGKPLPAAV

SEQ ID NO: 2457 - protein, 566 aa, unidentified
  source 1..566: note = uncultivated organism
MKKVRMLLRVSSNQQLEPDGDLSVQREIVKDYVKKHEEWQLDSKEYFEGSNSGYKNSVADRNVLQNALQDAQAKEYDILVAYKDDRIGRLMWEIGAYVMALKKCGVDIYTVKDGCISPETDDTMGQMMLALRYGNAQKQSADTGMRVKDTAQKLVQKGKFMGGKAPYGYKLELSGEISKHGRALHHLVIVPEQAEVVSYIYDLSLNKEYGSSKIASVLNRHETYKNLAPNDTWKGGTITSILTNPIYAGHTAYKRRERINGQYHRLDSENWITSIDANESIMIIDGDTWNKTQERRKRRGDKYIKALEHKDVNVIRKNDGMLALIDVLYCGYCGSKMTNGSKYNYWTIKGTGEKRASKIAIYKCQNAWQGVTHVKTKQIRADMIEPIVFESIAQYIGKLQENESIFNEIENNQNQEKKRKQAELKKEKQNLENIQDKIRIMEENIPNAMTGDYPLSLEELVAIIKKHKEQAQQQQDVVTLKELELKSTSVSINEWEDIKNKIPTWQDVFLNADVATKRVLVNKLVERIDVKKTEVVIRFKINLNDFIPQPRICGDSHTILCTRDSK

SEQ ID NO: 2458 - protein, 531 aa, unidentified
  source 1..531: note = uncultivated organism
MEKPEKQEKKIIRCAIYTRVSTSEGLEQEFSSLDNQRESAESYIQSQKSEGWTSLPERYDDGGYTGANTDRPALQKLMADIREGKIDSVVTYKVDRLSRSLLDFSQILEFFDQNNVTFVSVTQAFNTNTSMGRLTLNILLSFAQFEREIISERTRDKMGAARKKGKWVGGMVPLGYDSDKVNHKLVINQQEAEIVKKIFSLYLEKGSSLSVAMALNENGYRTKIHLGSSGKKIGGMKFTSSGVQLFIKNVTYTGKVSYGGQIYQGEHEPIISDKIFQEAQEILADNRPERRVPRASNNKGLLNNILHCKDCNSTMYYVYSMKDKHKYHYYVCMNAQKRGYKNCPTRIIAAQLMENKFMEFLRQISDDPRIGAKAWEALTLEEKIPLIKSIAKAAHYDAHNETLEIMLHKADISRQFALKLAELKHIPHHRRQAQVSKEPLVRQNLILAHQISRVSAEKNCTLKQIAVWIGITHSRICHIANMLLVSPLIQEEILLSIDKALYNIPEYRLREVIKELDWDKQQEIWKDLLKL

SEQ ID NO: 2459 - protein, 545 aa, unidentified
  source 1..545: note = uncultivated organism
MKSSLARAAICARVSTVDQVRGTSLATQLEEGYAYARNRGLNVVGEYVDGGVSGKYANRPRLDRLMAECRAGLIDVVIVSKHDRFGRSFRHTVSLIGELEELGVEFVSIAERIDDTPSGRFQRNVLLSVAEFERERILERTVGGMEATARAGHWPAGPAPLGWKLVKDSSGTRLALNAPEVAIWELIVSCMVDKRMSSLEAARALNAAGLRRRSGKVWSANSLWDIVRDTTCLSGTWTYRPEGGRNGRRPKSGPPLTVSVPPILTSERHEALKAVIAARSWTRKQTKHPWLLSLRLFSPHGRRMHGMHDARGHRRYRCPGKIMPDGGRGGGGCECFQVHADDLEALVWRVVTDALSKPDMLLALAEEQAQASATASDINQDDLASLDHKIARLERAAGEQLAKALAAGADPKVAAIAAVSLKEEIEAARERRKAVAAWAANVAERRSRADILAGIANDAARALLADGNIATKQRILEALSVEVTVTGWRACPSCGGTGRLKGANAKMCSGCHGMRLVTEVEIEGAIPVAEAEKAAEAWPVKLVAS

SEQ ID NO: 2460 - protein, 514 aa, unidentified
  source 1..514: note = uncultivated organism
MPQVHVIEPIHSHEPAKLRVCAYARVSSDSADQLNSFAAQVRYYTNLIAGNEDWTMVDIYADRGITGTSTAKRTEFQRMMEDCRKGKIDRILVKSLSRFARNTQDCIAALRELRQLGVTVVFEKEHINTGTMANEMLISMMSAFAQEESVSISKNVRKGIVMRMQNGEFHGSFTPYGYRLSPDGSLSVHPEEAEVVKRIFSDFLAGKSSREIADSLIQQGVPKRKGCSAWSDRGIVYLLTNEKYVGDERLQKYISTRTLPSKCVMNRGQQPQFYFHNTHEAIITRESFDRVQALLDGRRELFRHKQKNTQPPLSGWVTCGLCGASLYRKNRNGRICWVCSRHLQKASACSLPSIQETVVWNSIRRLASNLTDNTHAILESYCQNLEIIRQRRSFLSPDVSSYHQQISDLLTQSHTLVRLRTNGCIDSAFFIAQNNAVQKKLAILKEQLDRQRREDQINEKIEATRSLMKALSHPRETDTNPDLIKRCITGATVYADRIVFEMTNGLQFSERIHR

SEQ ID NO: 2461 - protein, 542 aa, unidentified
  source 1..542: note = uncultivated organism
MTEAKTKFRCAIYTRKSTDEGLEQNFNSLDAQRAACEAYIQSQAGEGWECLPQVYDDGGWSGGNMERPALKRLLAEISKGQVDIVVVYKVDRLTRSLTDFARIVETFDNNEASFVSVTQAFNTTNSMGRLTLNVLLSFAQFEREVTGERIRDKIAASMARGIWMGGSITKGYDLGDRKLNVNPVEAEQVRYIFKRYLELNSLISLAKDLAQNKIRSKRWTARSGKERGGYLYDPSGLSYLLRNRIYLGQITHKDKSYPGEHDAIIEADLFQQVQERLAANHHKFVNRQTRSAACPLHKKIFDAQGKPMRPNFGYGRGKKIYRYYVSDTLLPLGRLKAGGTTPIGDRLSAERTERFLQDRLSSLKPDGPDFEIFEAIERVMFSSNKLTVTLRVAELIGTNACEDTLLAKTQQIDPAAKIDSDDLVLSLDARPLRRGKSVRSIDCVLDAPEERRVLAELVRTSHRKLTELNASPLQPEMHEHMSTPINEWTRERIAIGLLAPDIQKALLSGKAPVGLDPEKLLSRDMPLDWEGQRKFLGMKHAA

SEQ ID NO: 2462 - protein, 602 aa, unidentified
  source 1..602: note = uncultivated organism
MDNLAYKMQAMCISNRSRTSIHDKVRVCFYGRVSTQHEEQVNALSNQLQWYETILAEHPNWEKVNVYVDKGVTGTQAKKREGFMQMIKDAEKGDFDLICTREVSRFARNTVDSLQYTRQLKEWGVEVFFYNDGIWSLEQDGELRLTIMSAMAQEESKHISERVRAGQRISREKGVLYGNGNILGYRLIKGKKSIDNTYEIIEEEAETVRMIYDLYLTGMGAKAIAGKMVEMKRKKADGTYNWEHLSVLRILNNKTYAGYISYNKSYTKNFLGHKRVTVRDVSQYEYVKGNFPAIVSEETWNRVQAIKSKKVVIVDGRKCSKPISKDKWCRHLVCECGSVYGKYKWRTNKNGEVSNGYQCRHQIRYRKRSFHEKQDLDGTGYCNVPSICEWKLDFMAKSILERLWKDQKSSVEELLQDIQDNYSEETGITDREYQIEKLKRESERLKNRMSNLVDMKLDDLIGSEEFEDKKCTIDERMLQIKNELAILSQDEEDNEPVEVEGEIKKIKEYLNGVCDLNQKQLSDELVDAVIARITPMENGAFKWYIQGEEYDTETSFDESKYVLYDRFTLNFEEAKKYRKAFGNFIREVQWKDLIVEVYIRQD

SEQ ID NO: 2463 - protein, 546 aa, unidentified
  source 1..546: note = uncultivated organism
MPPRRQHPAKGWAAALDRTSLVRTDIQQDSSENQQRLNRQTARAFGLKLKPGYDFSEPGKSASKPITRRELERGINAIVKEKAVEALLVSSVDRLSRLGMRHVGEMLDAVDAVGGRIIFNKGNLDSSQPASRAIIAFLSEQARDEANMLSWRIETWREGCRLKGKWTGRVPYGFSVIDGKLAPHFQEAPIVRRIVAEFLSGSTLVRIARGLNEDGLPSPAAAKAADMRAAGREPRARFDSTWRISTLSRVLRNPALVGWQKHNGRIVLGPDGDPISFGDGILEPGEHARVLAELERRTAIVRESRTRTREAGSKTGGGRPPRSLLIGMARCGSCSFAMTSQPVSDHRPAYYRCSSPSLGHNCPAGAYIKVSDADVEVMRQLRLRLGAIDPDDPILGAIAERWRELAMPEGEGERAVLQSRLDAVRGRIVDLEEARYIRGEFPTADDVVRWDGMIDRLKVQRDDVVHDLEELGPLPDLDLNTLRATCGVEVWDATPLPQRRKLLQVAVAKVIVASAHKRPVPAKDRVRVVLVGEESEAIDQTRHPKS

SEQ ID NO: 2464 - protein, 526 aa, unidentified
  source 1..526: note = uncultivated organism
MAKVTIISPVSQNHAEEKIRVAAYCRVSSASDEQLNSYQAQMTYYSHKFENSETEILVDLYADEGISGTAAKKRSEFQRMMKDCRHGKIDRIYTKSVSRFARNTKECLQYVRELKLLGITICFEKENLDTAKAADEMMIAVMAGLAQEESVSISKNIKWAVRKRMQNGTYKAVLPYGFMWNEGKIEIVEQEAEIVRQIFAWYLSGYGSHLIMEMLNDAHIPTRQNKRWRLQTVQRILINERYMGDAVFQKNYHMDTVPFTRKKNCGELPMYYVSNANEAIISREDFEAVQKLHQSKSDKSKWKSRDSSCPLARKIWCACCGSAYRFRIENHVEKWVCLTHDQNSQKCHIKAIPQEQIYQMFVAMFNKLYCYHEEILSPLLEGLHELKLNGFREHADMMEIQNEIIQLKEKIHVLTSLRTKGFLSNEKWHEQTTELNQKIIRMQKELRKRMISDDDDETIEQIEMISDFFKSRTSMMTEFEEEAFTFLVEKITAVNEHELIFHLPGGLKFTEHYPQNKAENFVGYDE

SEQ ID NO: 2465 - protein, 542 aa, unidentified
  source 1..542: note = uncultivated organism
MKRIRCAIYTRKSSEEGLEQDFNSLDAQREACEAYIASQKHEGWELLPDHFNDGGISGGHLDRPALQKLMQAVDEKRVEQIVVYKIDRLTRSLADFAKLVDRLDAAETSFVSVTQSFNTATSMGRLTLNMLLSFAQFEREVTSERIRDKIAASKRKGMWMGGHVPLGYQANGRTLKIDEADAQTIRTLFNLYQRLGSIREVQERAEAMGLRSRRRERSCGRVSGGIPFDRGHLHHILSNPIYAGRIRHKEQVFDGQHSAIIEPQAWGKVQELLQGRASIARGSKKMATTSPLAGKLFDETGDRLTPSHSRKSGKRLRYYVSRRVIAGGSEKHPDAWRLPAEQVEGLLTELIRRHLGRPNAVASMTQCLSAAKMKMIAEKLTGCISSADCLTLIEQGHLRPGAMSIQLDPQALTTLLECLPGQINASELTIEAPFQMRRRGVELKLHLGDPPQDVDKTLVQNIAKGRRWLAMIVDGKPFSEIAQVENVSTRRVQDIAGLALLAPDILDAITLGEQPNGLTSDYLIKTRFSAVWSKQRAQFATH

SEQ ID NO: 2466 - protein, 546 aa, unidentified
  source 1..546: note = uncultivated organism
MADKNRVCCLYRVSTDKQVDYSNGNEADIPMQRKACHRFAEQKGWNILFEEQEDGVSGHKVRAENRDKIQYIKDLARNKKFDILLVFMFDRIGRIADETPFVVEWFVKNGISVWSTQEGEQRFDNHTDKLLNYIRFWQADGESEKTSIRTKTSLRQMVEEGHYKGGSPAYGYDLVKSGRFNKRRHEMYDLKINESEAAVVRRIFDKYTNEGYGTWRIANFLNDNGYRTRSGKPWHQASVRSILSNLTYTGVLRSGEARSPVLPQLQIIKPEQYETAADIFKSRAKKHSENPRVPLNTRGKSLLAGNVFCGHCGARLTLTTNGRYRKLKDGSIDKSPRIRYVCYGKTRKQTDCDGQTGYTMHKLDGIVEQVIKNIFDKMKGISKYEIVSARYKKEVEEEKNRLADTEKEYGKALQKSALLKEEIIKCLEGESSFSKDILSELITDAEKKCNELSELLEAIRNELKQSEELQTELCGKYDEIIAWSQLYDDASTEAKKMIVNSMIKRIDVFRDYKLKIEFNFDIKQFFFGIDSEATLDLSLNEKVKLG

SEQ ID NO: 2467 - protein, 648 aa, unidentified
  source 1..648: note = uncultivated organism
MVQCLDCSFHGYLQYNEFPSTGRTLVILLVSSYYKSQVKWGILLCHSHSQIHYSFSILYVIIIVYIYRKEVKILKQRKKAIYSRKSKFTGKGESIENQIELCKEYIRVHHDTISEDDILIYEDEGFSGKNTGRPMFQKMMKDAKAGKIDSIICYRLDRISRNIGDFANLIEELSTLNISFISIKEQFDTSTPMGRAMMFIASVFSQLERETIAERIRDNMHELAKTGRWLGGTTPLGFESEDSSKITFDGKVRKSCWLKGVPNELTTVKTIFKEFNQLDSLTKTEYHLTKNGFKTRNNNDFSRFAIRNILTNPVYLTADEDAYNYLVSNNAQIYSDLSEFDGTHGIMVYNRTLQEQGKAIKIRPMDEWIIAVGKHNGTITGKDWIHTQELLAKNSDKNFHKPKSHIALLSGLLRCGKCQDYMRPKSSRHTDKNGNKLFSYLCTTKEKSHLERCDIKNPNGNILDAMVVEKIKELSKDNTSFMNDLRHARELYHQHTTEYDASLEQLRTAYTENETAIQTLVTSLSSTPESTAQRYITAEIDKLHNKGEEILNRIKEIEGITKTNRMSDNELDVLKEMLDSFNATADSMSLESKRLAIRTFVQKVVWDGENVHLYLFGSINDDEIVLPLHNPTSENDSAITEPLGENSK

SEQ ID NO: 2468 - protein, 659 aa, unidentified
  source 1..659: note = uncultivated organism
MAERIPSARPATRTTSRNSLRNPGRPLQRNPVGSAIRCAIYTRKSSEEGLEQDFNSLDAQREACEAYITSQRSEGWIALPRLYDDGGFSGGTMERPALKALLADIAAGLIDTVVVYKVDRLTRSLTDFARIVDVFDQAKVSFVSVTQSFNTTTSMGRLTLNMLLSFAQFEREVTGERIRDKIAASKAKGMWMGGRPPLGYTVEDRKLVIVPEEAEQVREIFRRYLALGSVYDLVQDLAARNIRAKRHVSVTGNQTGGGILERGALYHLLQNRLYRGEITHKHHVYPGQHDPIVDQTLWAQVQDRLSKNRVERDIRSSAAEPSLLTGLLIDEDAIGFSPTHAKKNGRRYRYYVSHDLIAYCTQIEPPQIRFARSENQQAAASPQGLSTRPDSASNANVSRRNSQPRRLPAADIEGIVVNGLLQFLKDPAKIDTLYSQQCVAAPTRMDGVRAVTAFATAWPGLQTGERILALRSLVENILIGAATVTIRLRPKAILAIGTCKRLATSDQQQLAVGMFILSHDTNTVSDIEPVRTMQPIEIIIPVALKRVGKEIRHIMTGQQPDVTRKPDQSLIRTLALAHRYKNAMEQSTGKTIAEIAADCGVTSSYFIRILRLAYLTPSITQTILSGEQPLEISSYKLTLKTEIAPSWKKQRLVLGFPSV

SEQ ID NO: 2469 - protein, 524 aa, unidentified
  source 1..524: note = uncultivated organism
MRNRRVHEEPAGQTAANRVVRCAIYTRKSTEEGLSQEFNSLDAQREAGEAFIASQRHEGWTLIPDAYDDGGFTGGNMERPALRRLMADIEAGRVDCVVVYKVDRLSRSLLDFARIMGTFEKRGTSFVSVTQQFNTTASLGRLTLNILLSFAQFERELIAERTRDKMSAARRKGKWVGGIPVLGYDVDPHGGRLAVNEDEAGRVRAIFDLYLEQRSLIAVARELNRRGWTTKVWVTKDGREHHGKPFTKSSLFRLLTNVIYTGQVNHKGTFYPGEHPQIVDPAVWGKVDERLRHNGITGGKEVRNKYGALLRGLLHCDACGTAMVHTYTVKNSRRYRYYVCLTAQQQGWDACPSKSLPAQRVEDSIVDRIRSLGKDPRIAAETARKVREQAEASSQELRGELKTSEKELNRLQRELVKVAAAPGNGVRTDRMADLQERIQTTERRVAEIRSELDILDAEAVPQQELKRALEAFDPVWKALNSAEQTRIVRALVERVGYDGRTGKIAVTFRSSGFKDLCEMVNDEQ

SEQ ID NO: 2470 - protein, 540 aa, unidentified
  source 1..540: note = uncultivated organism
MKAAIYCRKSKETKKGDSIENQIHLCKEYANFYLKDKNIDEFFYYKDDGFTGSNINRPDFQRLLEDIKHKKFNILICYRLDRISRDVADFSSTLNLLTSNNIDFISIKEQFDTTTPIGRAMIYFASVFAQLERETIAERVRDNMLELSKTGRWLGGVSPLGYETYSIKYTGEDLKEHSLSKLRAVPEELKLVKLIFQKYIELRSLSKVEAYLLENNFTNRRGNNFDKTKIKLIIENPVYAKSTESLFNYLSNLGISVYGAPDGVHGLLRYNKQKGVYSPNGKITRVDRDKSEWIATVSSHKGIIEANDWIKAQKIIESNKNKFVVSARTHNALLTGLITCKECGSKMQIAHGHTSATTGKKTYYYVCRLKKESKGTRCTSKNIKTTDIDPYVIDFIKEISNNIYNIISNIEKNKNQLKLKSAEICIEDKIKNEIKEKQKQIDRLVNKLSLNDDLDDIIIPKITLLKKEISKLNNSVSSHNIAQKNFEEKIINTPFFKTLINQHSIIDSLGIDEQKLLIRGLIKEVIWDSKNSTIKIIPIK

SEQ ID NO: 2471 - protein, 503 aa, unidentified
  source 1..503: note = uncultivated organism
MKALYARQSIDKKDSMSIEGQIEQCKMMLHPKEDFKEYTDKGFSGKNTERPALNELLADVRNGLIDGVIVYRLDRFSRNITDFYNLYEILQKHNCDFQSVNEKFDTATPMGRAMMGILITFAQMERESIQERVKDNYYYRIAQDGRWAGGPAPYGFVNAKTGDKKPTLKVDAQKMEAVKLIFKLYTEEINISLGKVAKILTQSGYTSNRKNGAWDSSTISKILQNTVYVKADKILYKYLEIRQIKFLNDESEWNGTTSCHIVGKRVGNSNIRKYTDFKEQSVYLTNFLGIINSRTYIAAMNRLAQNEKIASSNKPSVLQELAGKLKCSCGYAIKSYSRSTNGRPYLDCYANRSLHSCNHKYNKFNFYDIQNEVGNQIQEQLNNLSDILKQKQKIRMDKRRKIEVLQKELDNLITLVAQMSEDLQSSVVKQIELKQKKINELQLNYQLNSDVVDSLQIPHFGITPKITDYSNLSLDEKKYIVNQFIEKIILHEDKEEIEIFWKI

SEQ ID NO: 2472 - protein, 634 aa, unidentified
  source 1..634: note = uncultivated organism
MEWESFLEGEIMELIQKRCAIYTRKSVDEGLEQEFNSLDAQRNLCESYIKSQKHNGWIVIDKHYDDGGFSGGNMNRPGLQMLFADIKSGQIDIVVTYKIDRLSRSLLDFSKINDFFESSHVGFVSVTQDINTNTSSGRMLWNILMTFAQFERETISERVRDKIAASKRMGKFCTGMTPMGYRKDPETRRLEIDPTEGHTVKQIFNRYLKLHSCGLVARELNEKGIRTREWVSSHRVLHGGKPWSVARVHNILNNPIYLGLIPHHNQMYPGEHEALISQETWDAVHEILRQNNGKREKLHRHRNTAILGSLIRCAECKSAMTTTYTDKHRKRYFYYCCLRSLKYPDMKCSNHKLPTQEAEKVILFQIGILFRCYTMQQMICSESENLRKKLIRDMTKERSELRAYIRNCKDEISCREAQEKINKLSKRIENIKFEIKQRTISEEINQFHDFGNELAPTAKLELLDSIIDRIDVYPDRIWTHLKDEYTELEQELSAQLRTSGLLSHTKRKDNHLIIATPINIKTCSGQTHIEIVGISYENNRHSLLRAIALSWKWSDMLFSGEVANIPQLAKTVELSEAYVTRIVSLFNLAPSIVEDILNGNIPDGLSLAQLTEGLPDSWQEQCKKLGFSFRQMKI

SEQ ID NO: 2473 - protein, 543 aa, unidentified
  source 1..543: note = uncultivated organism
MNKIRCAIYTRKSSEEGLDQDFNSLDAQREACEAYVTSQKHEGWVALTDKYDDGGISGGTLERPALKRLMQDIDEGLVDQIVVYKIDRLTRSLGDFAKLVDRLDAANASFVSVTQSFNTATSMGRLTLNVLLSFAQFEREVTAERIRDKIAASKKKGMWMGGMVPLGYNAAGRTLEINEEEAETIRTLFDLYNKHRTVREVAQQAEMLGLRSKKRISAKGNQSGGIALDRGHIHHILTNPIYAGRIRHRDKTYEGLHKAIIEPVVWDDVQARLQVNAAHIRGGGSRAKDPSPLIGKLFDETGDRFTPSHSNKRGKRHRYYISHRLVKRAGEKDLSGWRLPGLQLEQQITKTLQEHLAIAATPAMVKDLTSEEIVRIRAEVELVGLKQKKLFALIGRIDIAAGSMQIHLDADALINLLQIETDRLIPEALTITRPFQMRKRGVETKLVIGDKSPELDDALIRNIAKAHHWLAMIKSGKTFNEIAAIEITSKRRIQQVIEWALLAPDIVRMIVEGRQPVGLTSNWLLRHSLPVDWNDQRQLITTL

SEQ ID NO: 2474 - protein, 573 aa, unidentified
  source 1..573: note = uncultivated organism
MKPDTNVLRCAIYTRKSSEEGLDQAFNSLDAQRESCEAFAKSQAHEGWHVIPEHYDDGGFSGGNVDRPALARLLAEIESGQIDIVIVYKVDRLSRSLADFVRLIDLFDKTGVSFVSVTQQFNTSTSMGRLTLNVLLSFAQFEREVTSERIRDKIAASKKKGMWMGGLVPLGYDRVDKQLVVNADDATIIRHIYQRYLNIGCVRALKSELDAQGYTSKLRPDHHKERGGKPFTRGALYTLLKNPVYVGKVHHKGDLHDGQHAAIIDTTLWDQVQDTLARTRQDKEARASAKYPSLLGGLLWDDKGNRMSPTYTRRKNRHYPYYISQAVLQYREEEAGSVIRIPGKSLESTVTDLLLAYLTSADQILDLVSDHKLSGEQLDQAVQAAAEVARQWQDGNTAEQIPIINQLVSKVVVGIETVTVQLDRNPLIRRLAGKKYGATSIEKRDISLITLTAQVKLRRSGIETKLVYPAGKAPLTHDRSVKALQEALLKSLLWNEELLTGKIRSIDALIERDNLNSRQVHRLRKLAFLAPDIVERIIAGDVPETLTLERLKKDFPLEWQDQRSHFGLNQVTH

SEQ ID NO: 2475 - protein, 592 aa, unidentified
  source 1..592: note = uncultivated organism
MIRKNAAIYCRVSTEDQAREGYSLGEQLEKLKDLCKFRDYNIYGVYEDAGISAKDMEHRPQFQEMLEEVKKHNVNVIVAYKLDRLTRSVRDLETLITELEKHGCSLECAMDDINTSTANGRFFVRMLTVLSQLEIERVSERTKFGMVGAIKDGHIPVRKTLGFMRDNKKLVINPLESEIVKRIFDLYYKGNSYQSIANIFNKENVLNKKWRDTTILKILANPLYKGDFISGGRNGAPVLYEGVVEPIISKELWEECQVQTRKNTRNYTRRNDYIFFQKIVCPNCHKIMACKAPGGSKRKYIYYQCNSCKTYIREDKLVELLVDEISSIMEYDSIVRKYFAPLLKHKIENTNELLTKEINALKDKIIRLKEAYLNEIINIEEYKKDKYYLETRIKDIELKQKEEQELEQYNFTFQDIMLKRDLESIKNFVNPFYELKFQAKWNEMSVAEKQDLIMSYIDTIEVIKNDKELEIKQINFRKTFIEEYANLFANKGINKTALIKENNIPINIEVSAPMTREEIKSYIKKLQLNYPIDYQELRKEQMNDKQFILKYNKGNYFNEPFKLIPIIDKFKITHYGLVEVPVGPINIVNIDI

SEQ ID NO: 2476 - protein, 537 aa, unidentified
  source 1..537: note = uncultivated organism
MREKYRATKYIRTSCPDDELEHRDSISNQSKLIDGFLRTHPEIIVVAEKVDNGYSGLFYNRPAFNEMIADIKAGHVDCVVIKDLSRLGRNYVETGKYLRDLFHLSGVRFISIDDNIDSIQMDGMERIIALIKTIFNEQYSRDISMKTRSSLEAKRRQGAYVGAVPIYGYQRSDDNKHKLAIDLNTCAIVQSIFHMKLKGLSATKIASTLNDSCILSPIAYKRQQGIPHATGGFADCQNAGWSATTILRILRDENYTGTLTQGRQRQESYKSKVLKDLDENEWCRTENAHSPIISKMDYAAVQRVLALDTRTAPKHRKVHIFSGLLICGCCGGNMTRKTTASIKRSYTYYYCPTGKKRGCTSPYMVRDKVLLDMVTLTVKKCAIDIERLVYGLTAAHVVAMARNEYTQQIAVCNRSIHNLQKFRASLYDSHACGIIGTPEIQVLQNYYDSEITLQETKVSALQKKLHSVQELSPNNELAWTQIFLQFIGANELDRLAVTKMIHQIRVLNKNKVAVDFVCQSEYEQLVRYAALRGCNNG

SEQ ID NO: 2477 - protein, 523 aa, unidentified
  source 1..523: note = uncultivated organism
MLKIACYGRKSIYSDKSDSTDVQYTLGAEYCKSHYNDYELYRYEDEGYTGANTDRPDYNRLINDIKDNRLNVVICYKIDRISRNVLDFSNFFSLLSEHNVEFVSIKEQIDTSTPLGRAMMYICSVFAQMERETIAERVTDNMIELSKSGKWAGGKAPLGFKRQRIAFGEKTHTILVENPEEISFLNMIVDTFLDGGYSLNGLEVFFRKQGVKTLKGNYLSSSQLHNILKNPHYAPADNSTLEYFKSLGCTIGCDESKFTGEFGIMAYNRTTEAGKKHSINPPEKWIISVGLHHPLMDSDKWLSIQERFGNNIINKVRKHKIGILKGVLHCSCGYTMRVQHKVDKIYNKTYDNYFCPQRERRGVEYCDRSFTRVSDLDNAVIQILKNIALDKTLIDDYVYEDKVMHTCMRSRSDVQRDIDSLEAKMNNFTAALGSNSSSTAAKYIISEMEKLDTQIAGLKYELMEIDSNNRKRAKTHKDTEDKYKAVCHIVDSLDTADYDELNRLIKNLFKECIWNGVSLHIKL

SEQ ID NO: 2478 - protein, 562 aa, unidentified
  source 1..562: note = uncultivated organism
MGKTVDRIYHAAIYVRLSKEDGDVAGAAKAESNSISNQKNLIRDFLKDKDDIIVVSERVDDGYSGSNFDRPSFQMMMDDIRKGKVDCVVVKDLSRFGREYIDSGKYIERLFPALGVRFIAINDHIDNKEESGRDDIVVPFKNLMNDAYCRDISIKIRSHLEVKRKNGEYTGAFTPYGYKKDENDRNKLVPDLYAAGVVKDIFRMKLHGMSQSAIADRLNGQGILSPVEYKHSLGIRIQDHFKTHEQAEWSPVAVRRILENEVYVGTLVQGRHSTPNHKVKKIVDKPEEEWIRIEDSHEPVISRREFAIVQRLLGMDTRTSPNEDEVYVLAGIAVCAECGAPMVKRSVPAGGKVYSYYICSKNAATKECGPHRIPKEKLESLVFEVLKTHIANVLDTGRILEYVNTVPFQELEVKELERQKEAKEQEAQRCRELRDMLYEDLKDGIFSKEDYAELYEGYTGRRKKAEEAVRKLRHAIQDVMEARTDKYEWLRYFKEYQNLSGLSRMAVVELIDRIRIFDKNHVEIDFNFEDCFRSALRQLQSAGCTVCTGKNGRVTIQKREVV

SEQ ID NO: 2479 - protein, 515 aa, unidentified
  source 1..515: note = uncultivated organism
MSDVIEPSPDQLMDIYARKSVDVRGRLGELSPNAQIQRGREWAAWNGLRVRKVWQDRMSASKKHLVRPDYTRALEALAEGEVKTLWCYKLDRFDRRGALAVLRVLENLEKSGARIIFGEDGLDTSNPDHRRMIMWKAEDARDEADRISKRVTFTKAWQREQGEWVSGKVPYGLKADDNRKLVADDSPARPDHPKFGSKATVVKRIFRMAKTGEYSLRSLARWLDEHQVPSPTGKTWHANTIYRMITNPAYSGWQVHCIGTQRGVLYRDKKGQRVRVGVALVPDDEREAAERAIRGHAKVKKTYRGKVTNLLTGLTRCYTCNRAAPVSSRSYVCSSALHSGTRCPAPGYAFRPALNDYVTHRWFARLTNAEPDDPLLKVVAERWAALTRPEETSEVQEAMAAMKAAESALERLLRDRRDGLYEGPAARFFEPAYADAMRDYNKAQEVLRRVGAEAGVDIGFLLDAQTAREAWESADLDLKRELLRLAIDQVRIKKWTGGGSFDGDKRVEIVWATSA

SEQ ID NO: 2480 - protein, 582 aa, unidentified
  source 1..582: note = uncultivated organism
MGAKDVKQYVIYSRKSKFTGKGESIENQIEMCRQYIASLYGEEAAKQALVYEDEGFSGGNLERPKFKKMMKDSYETKFEAIVVYRLDRISRNIGDFAKLIEDLGRRKIAFISIREQFDTSSPMGRAMMYIASVFSQLERETIAERIRDNMHELAKTGRWLGGTTPTGYESEAVTNVTIDGKTKKACRLKVIPEEIRLVELIYDKFLETGSLTKTDQYLLEGQYRTKNNKEFTRFAIRGILTNPVYMIADEDAYEYMIEKDVDLFADHAAFDGKHGIMAYNRTLQQAGKAHQVKPMEEWIVSVGKHKGVITGKKWIQVQNLLEVNKSKSYRKPRSNVALLSGLLFCKNCGEYMRPKLSSRVNANGETIYTYLCTTKERSRGHCCSMKNANGNMLDAKLMAVLADLSKNNSDMFRQLDQGKKVLGGNCEGYEAELAKLKEQIAQNEAEIRGLVTTLTKLAGTPTEEYVVKQIDELHEKGEALKKRLADMEALTARHALADYEFEILKDVLYSFHSQIDTMTVEQKRNALRMVVKKVVWDGENAHVYLMTDPDDDPELPEPPSSGGVVGGPDFVDEKSPSGEYSE

SEQ ID NO: 2481 - protein, 536 aa, unidentified
  source 1..536: note = uncultivated organism
MNTSQNVINGALAKKLTHKAPQVIVIDPVQQIRSNKLRVAAYARVSSNSNDQENSFAAQVKAYTALIREHEEWEMVDMYADEGITGLRMDKRDDFLRLLRDCRRGKIDRIVTKSISRFSRNTRDCLNTIRELKALGISVYFEKENIDTATMTDELIFTFLAGNAQQESMSISGNMRWSYERRMKSGKFITCKAPFGYRFTGGGLEIHEQEAEIVRYVFDSYLNGKGKDEIAQELTAAGYSTRDGNERWHNSTIDYMLKNERYMGDALLQKKYTTDALPFRKIRNKGERDKYYFKNSHPPIISTEVFEQVQRLNQSRLHPTMSKRMEHPLKRRIRCGECGSAFKRKICNGKTYWVCRNHNNSKSNCSITQIPEAEIYGAFLQLYNKLKIHHSAILTPLLEQLQTLKRSRNLSNMQVAQINQKIAELTEQNHVLSGLKSRGIIDSALFLSQTGEVNRQIRELKAEKNKLMEQDEDDSTITETRCLIATLEDGPELLTEFDEMLFDSMVELVIAESSKRLKFRLINGLELVEILERTVR

SEQ ID NO: 2482 - protein, 541 aa, unidentified
  source 1..541: note = uncultivated organism
MIRCAIYTRKSAEAGLEQDFNSLDAQREACAAYIASQKAEGWVALPERYDDGGVSGGTLDRPGLERLLADVGAGRVDRIVVYKIDRLTRSLADFAKLVERLDAARAAFVSVTQSFDTGTSMGRLTLNMLLSFAQFEREVTAERIRDKIAASKKKGLWMGGLPPLGYDVRDKALVMNDAEAKIVRTIFELYLKLESIPALKAEADKLGFRTKARGDAGGVPFTRGRLHHLLTNPLYAGDVRHGDKLYRGRHKAIIDKALWREAQAMLIANAQKPRRAHRKTMPPPLAGKIFGKGGEPLAPTQTNKTGSIYRYYVSKRLIVGNDGEDGWRLPAHALEATVAEAVAAHIIDPAFPSTALRRITANAVARAHDNATTLAERLRQHGGSGQLATLITAVRLSDDQIGIELEEDALADALGLIADEIAPSALTISAPATLKRRGVEKKLVIKAASRTIDRTLLRTVAQGRAWAEQMRSEPVTIGDIAKREGLSRVWVMRHIEASVLSPRIIERIALGRQPAGLTTAWLLRNPPPADWAEQERLIARL

SEQ ID NO: 2483 - protein, 546 aa, unidentified
  source 1..546: note = uncultivated organism
MSVPLKRCALYTRKSSEEGLDQEFNSLDAQREACEAYVKSQASEGWRSIDANYDDGGISGGTMGRPALQRLLADIALGKVDVVVVYKIDRLTRSLADFARMVELFDRHEVSFVSVTQSFNTTSSMGRLTLNVLLSFAQFEREVTGERIRDKIAASKAKGMWMGGRLPLGYDSPKKGSRALVVNECEAETVRLIYRTYLELSSVHELERWLKARGIRSKQHTTRKGKKTGDQPFSRGALFRLLRNRTYLGMIVHKDTVHPGMHPAIVESELFEEVQSLMDANKRRTSESRNNVADAPLVGRIFDADGEPMSPTFSRGARGKLYRYYVSASLQQGQKPPADDSITRRVPAALLEKTLLETIKRTINKKNGDSLACLSRVEIHRENVHLLMSVKYLAQMRTNLDDGEHAEQDPVDPKQLRLSLPVRFATSRGRTQIIGGCSQQPKPDPILIKALRTAHTMIKKDKHKLPMMMFAPTTPWRRKLVRLAFLAPDLQQAIMVGNQPTGLTLSYLMDEDMPLSWEDQRQWICAHSKTQANKAPDPKRETPVTT

SEQ ID NO: 2484 - protein, 545 aa, unidentified
  source 1..545: note = uncultivated organism
MYCSNIHISCSTWLHRCNRMSKEESVMLTIGIYPRKSVYRDNSDSVHVQVQLCKDYAGIIFKDQEINFKIYDRDEGFSGKNMNRPSFQELMEDVRNDALDVVMVYKLDRISRNVQEFSAMYDIFQQHNVSFVSVKESFDTTTPMGRTVMYILAAFAQLERENTSERVTDNMRALGASGKWTGGKLPTGMTSVRRQVGDKEHSYLVVDKDTIWLVKLLYGLVTQGYAITKIERYCRDHGIKSQSGKFLSTSQIYNIITNPVYCQNSIEAYYYFKDSGCTLPDPSLFDGTKGLLGYGKTKSGKDSQKKQDKASWSIAIGIHDYVIPAADWIAAQEHLGINKMMHTPKYDCGILKGVIRCKCGARMDVRTYYKNDIRFSYYYCKDMARQGKAKCNTSYVRISDVEDAFLRELRKIRFNPEGFKLHRDAVTDTMQSVTSIKVEIKQTQAAIDNLTTTLMNAMDSTASSYIVAKIEELDKQKRALETNLRQATLREQAGKSLQETEKAIYNDICYLLDNFDTIEYSAKNELIRKIIKKCILDENGLHIVF

SEQ ID NO: 2485 - protein, 549 aa, unidentified
  source 1..549: note = uncultivated organism
MNRLNNKDQIFKVAIYLRLSKDDGDLSVSENGKAESNSIHNQRELLHNFLKQHPELELYDEYKDDGWTGTNFDRPGFNRMLEDIRQGKVTCVVVKDLSRFGRDYIDCGKYIEKIFPQLGVRFISVNDNYDTFAMSSSDNIVVPFKNLINDSYSRDISIKVRTNLEVKRRQGEFIGNFAVYGYMKDPDDKNHLIIDETAAAVVRDIFKWKIAGLSPGSIAVRLNQQGALSPMEYKRSQGSNFQSHFKKGTTAKWSHVAVRRILQNEIYTGVLVQGKRTTPNHKTKKIIYRNKEEWVRVEDTHEAIISRTQFHLVQELLQEDTRAAEEDTAVHPYCGRIFCGDCGAPAVRKTVRSGKKEYVYYVCGKNKSDRNQCSKHSIREDVLDMAVLATIRRQIEVILDMDRALQDMERLAWESFEIKKKNNELRMGTYEDFQAGILTRDEFVSVKSEFTARIAEGQKAIDRLIQSKREIQQGLSEQQGWLNQFKEYENITSITRRVIVSLVERILIFEGNEIEVVFRYKDQLADIMAFLENQDGQTNIAAAPKLEVV

SEQ ID NO: 2486 - protein, 514 aa, unidentified
  source 1..514: note = uncultivated organism
MTRICLYTRISTDEENQPTSLASQHERLEAFCKVQEDWRIVARHDDRSTGTKLDRPGLQAALDLARQGRIDQLLVYRIDRLSRKVRQLSGIAEELDKLGVILRSATEPFDTGSPAGRMMLQMLGVFAEFEYATIVDRITAGIERRAKEGRWYSGRPPFGYTLHDGQLAPDPITSPTVKRIYQLYTQDRLGTIAIAQQLGAKHAPAPSAGWGHPAVHRVLTNPTYLGRIRWRNQDFQSTHEPLIDQATFDHAQAILAERGSDASRRRGNRSDFLLSGVIRCGHCGRAYIGMSAHGKGGTYHYYACTARQKYGPKACQGERVPREKLETAVLHQLTGIYRDGPLIHDALGAAQEQAQRERPALDEQRRAITTEITRVERSAERYFEAFEQGQLSPERCEQRVSRLNARLEDLRAQQSELADNGADEAAHAPTAADLAATASQLESVIADGEPEKTKALLRILIAELRVNSKTDIQPTYRIITPDRTHKAGVCATSGKVETARIEPASAAPRVAPVL

SEQ ID NO: 2487 - protein, 554 aa, unidentified
  source 1..554: note = uncultivated organism
MLRCAIYTRKSTDEGLEQEFNSLDAQREACEAYIKSQKHEGWKLLPQHYDDGGYSGGSMDRPALKKLLQEIEAGRVDIIVVYKVDRLTRALSDFARMVELFDKHKVSFVSVTQQFNTTTSMGRLTLNVLLSFAQFEREVTAERIRDKIAASKKKGMWMGSPPPLGYDVQDKKLVVNETEADTVRTLFDLYLELGSVRALKEEADRRGIRTKHRPNSKNPGNKPFSRGNLYVLLNNPLYVGEVRHKTETYPGQHDAIIDRETWSAVQDRLAGNAATRRRATNSKSSHLLTGLLFDETGDRLVPTHTNKKGVRYHYYVSQRLAEKGRQKEGGWRLPARELEAAIVNAVRDYIADHKRPIDDLRLHELSSSEQLDLKHRIDNLSAELDEADKGNRAGVLETMISTATLGNDCLTICLRRSALFSVLRGIAAPTVSMEQTIDVQVPIRIARRGIETKLVIAREHPARISTDLNLTELVTKAHYWFDLLSSGECQSVREIAQRERVDESDVSRSIVLAFLAPGLIEKIMAGRRSSHLTANRLKRMSEVNWKWDKQMDLY

SEQ ID NO: 2488 - protein, 546 aa, unidentified
  source 1..546: note = uncultivated organism
MSPTGRTLRCAIYTRKSTEEGLEQDYNSLHAQRDACAAYVQSQAGEGWTLLPDVYDDGGFSGGNMVRPGLKRLLDDVEAGLIDVVVVYKVDRLTRALTDFSRIVDVLDRAGASFVSVTQAFNTTTSMGRLTLNVLLSFAQFEREVTGERIRDKITASKKLGMWMGGNLPLGYDAAGRTLTINEAEAKTVRWVFGRYLELGSVHKVVQELEAAGVVSKSWSTKAGVLRGGLRIDRGALFHILHNRTYVGEIPHKETSYPGQHPAIVDRAVFDAVQARLAENDLKTRKPGEVRRPQKGAPFKGIIFDSAGNRMTPLKAARPGKTTYRYYVSSPIQAGRRQNLGAVTRISAHIVEEIVASRLHELKLCIQTEASPDWSAIRNLIDRVEVTSDAVTLQFDEAMLERASRDLGPQDRISVDRLERRGPDRILTIPVRVVKRGGAKVAIGPDGQSAIHHRATDPALSAALIRAEAWKRQLLTGQAKTLNQIAEAEGVTAAYAARTIRTAFLAPDLKAAILDGRLPAGLTLEAVPRQEMPLDWEAQRRLYAAG

SEQ ID NO: 2489 - protein, 529 aa, unidentified
  source 1..529: note = uncultivated organism
MTVATYLRISYEDQEMKKAVKTESNSIANQRNLISNFIGKHPEFEHARIVEFCDDGWSGRNFERPAVRELLNQVQDGRIRCIVVKDLSRFGRNYLEVGNYISRVFPFLNVRFIAVNDNFDSSNPMAAESLEVSFKTLLHDIYSRDLSHKVKNSLRFQARQGKCMAAFAPYGYVKDAGHKNRMIPDPDAAENVRSVFRMAADGMTTLQIAREMNHRNILTPMQYKRMNGSNRTIPNRIHEDNFWTPETVIKILRDERYTGKAVFGKRKREGAGNTRQVTVNKAEWITVDHAHESIISQVEFDQAQKKLRAYAKRGTVRKTENLLHKKVRCGICGRCMMRTGSRKNPSYTCMTSCMTEVYPCPTERIAQADLLEIIQKNMQEQVKYAVDSSQIWEERQRHIENQEVLERDNSEKKLCMLKQSHNRIESYIQELYEKFAFGELDRDAYVRLKKAALERYGNVSKQIEELELKMGHGKMNGRMENRFEENKISVIEKPMKDMIADVLRAVIVYPGKRVEVVWDYRDEFSASVF

SEQ ID NO: 2490 - protein, 631 aa, unidentified
  source 1..631: note = uncultivated organism
MTESKITRCAVYTRKSTEIDLNQEFNSLEAQRESAENYIKSQKHNGWQLLPDRYDDGGFSGGNTERPALKRLMADIKAGKIDVLVLYKIDRLSRSLLDFMNMAEFFEQHNVSFVSVTQDINTSTSAGRMMLNILMTFSEYERDVITERIKDSIAGAKKRGKFCGGVPILGYDVNSSTKKMEINKKEAKLIKEIYKLYAESGSAFEVAKKLNFQGYHTKSWTSKKGKHHSGNKFSPKGVYRILNNPLYIGKVPHNDKIYNGEHKAIIDQKLWDKTQRLLKANSKTAPGSRRNATASPFKGLLTCGYCGGSFGLTYTGKKDRRYMYYLCMTDHARTEQQCPLHRFAAGNLDKIILQQLARIFKTPSMLVNLYNELRKREKLKRKELLKRQSELETALQKIRNEIHSGGNIAELRHKFTILDNELLEVKNDLKNLGEVYSTHDLLETCDSIEAIWEELFPAERYNLARQIIDKITLYTDHILMDIKHHGLKSLITELRSDKNIEVYQPENTEIIQLNIPILIKRWNGRKLIITSDNKNNPEPSDTEPTAIAKRLAQAHHYLRLLESGKYPTITLLAEAHNQDPSKLTKILNLVNLSPQIQKMIVEGNAPESMTLVKLYSGISADWEEQEKIYLT

SEQ ID NO: 2491 - protein, 701 aa, unidentified
  source 1..701: note = uncultivated organism
MPTAAIYARKSVETDKGESIENQINRGIALCQLNGWDYIIYQDYGISGKTLDRPDFERMMKDAHAGKFQYLVCYKIDRVSRSVSDFSSLIDELISLDIGFICIKDNFDTTTPMGRAMMMITAVFAQLERETIAERVKDNMIDRAKLGKWNGGPIPLGYNIHTETIEYQGRKKKTSKLVIDEDEAAIVRQIFDMYIELGSIRGTAIKLNQVGIKTKSGSNWSDSQVSRILQNAIYCISDQDAYEYYKNHTKVQIANHETEFDGNHGLMFYNRRKEHKNTTKERDESEWILSIGEHQGIIPGAIHKKVQLLLKSNKVKAPRTGTSAKSPLTNVKCDICGQAMSIYSSRSNPDKPYVGFFRCNKKERMGLKCANKSVKADLLERVIVSAISKLYEDEKSVIEAINAYNNDNDDKRIPKIAEKQNLTRQVDEIEREIKNLVTALGKNTLPEILIQERYSELQKQKNTLLDRISTIEDELNEISINEHNIDQTLKYVKVFKESYYTLDLEERRKLLSSIIKEVRVNRDKVKLELYFLPAVDLDSPAFCYQMGVHALAKCKTISIEASLFDESSIEKLPKNTFEEKLIYIMKKLNLNKKEMAKKCGFSVALFSLWRKGSKPELRTIKKISNATGYPMSFFIDPNILPENTLGEIIYKYRTLSGMSKADLASKVGLEESTIKDYEKDKFRGKNQVTVKKIFKEIGYIK

SEQ ID NO: 2492 - protein, 511 aa, unidentified
  source 1..511: note = uncultivated organism
MPVVQVIPAITQQLKRQRVAAYCRVSSDSEDQLNSFSVQVEHYTNTIQENAEWEFAGIYADEAVTGTRTDKRDEFQRMLTDCKAGKIDRILVKSISRFARNIADCIQTVRELKQLGVSVEFEKEQIDTSSMGGEMLLSMLSAAAQEESLSISSNLKWGIRKRMQTGDFITCRAPYGYHLHDNLLEIDREEAGVVRFIFNCYLSGMGIQELAEELENRQIPSRWQNHHWTYAHVQYILSNEKYIGDALVQKKYTPDFLPFRLLRNQGEVPQFYIENSHPAIIPREQYEKVQVLMGRKKSVQNQPKEYLLSRRVICDVCGATCKRRVTHSQTVTWVCRKHFEKKEKCPTKAVTETEIQEAFVRMYDKLLEYRESILLPMTVDLEKAKEKRENASWYLLQNQQIAELMRQHHTLTKLRTRGCIDAGLYLERTTGINQQLAELRRQIKLSDDSGQLQQVLEKTRFLLEFFETASPIYNFDQDIFQSVAEQVRIREDGIRFVLVNGLCLTERRLKL

SEQ ID NO: 2493 - protein, 543 aa, unidentified
  source 1..543: note = uncultivated organism
MSQKIAYQRLEDILKKGSRIALYARYSTGKQDENAQIHSVRNFLSDYGCELLDDNIYIDPKTSAVKVPMDQRKDLQRLIKDSKENKFDCIVSYKNDRIARNTQEHNELRTEMQRLGMPVVLSSTREIYTVGEIVPLTIKDALTQIEPLLIAERTRDTFSSKIENGEWTGGQAPYGYIYDKETELFEITDKKVEVVQEIFRLFKLGYGLQQIANKLIADRRDIGQKWYKDKIKYIITNPFYAGHMTMNRYVKGKLQLKMETWTWSKKQESIPAIMSRDEWEYCFYLYVERRKSQTVRKSSTPFWLRDILHCNECQLPFKTKNQKTKSKRKNGEKVEYGKILYECRNCGLKLETEKIHDKFKEDVGRVLKKLLEKHRENLIQQTQLQIEKEHEEITNVQKELANKRIKLIENIDVLDKKISQLYKDITTGKGLKANHTEDVLGKEDEQDDWNSKLVEILLTGRSQKHNDLEEIKQQQQLLEDKQESLNIVMNALKNQYQDELLNFSFDPENEKSMRNFLLQFVKAVYVSRDMRLDYKIYENLISE

SEQ ID NO: 2494 - protein, 537 aa, unidentified
  source 1..537: note = uncultivated organism
MRSAPPSERPGGRGPAGSSTKRCAIYARKSSEEGLEQDFNSLHAQREACEAYIASQRHEGWSPVPTRYDDGGYSGGSMERPGLAALMADVDAGRIDIVVVYKVDRLTRSLADFAKIVERFDARGISFVSVTQAFNTTSSMGRLTLNVLLSFAQFEREVTAERIRDKIAASKRKGLWMGGHVPLGYRVLNRKLIIDEFEAEQVRTIFSLYLKLGSIPALKQELDRRAVRTRVRSRSDGSTFGGVLFFTGALSALLRNRAYIGEIIHKGEHHAGEHDPIVDAATFEAVQQRLASQLVERTRRPSPNGLLRGAIFDSRGNRMSPSYTVKHGARYHYYISRALLENRKAEAGSPPRASATAIDDIVLGALRQHVGEMPSADAAQRELVLELVERVEVHRDQVVITFAGHASQRGRVIALPWTPRKSRPQKVIHEAIAAAEGTTTAAPHQQQANRERLIKAIVKARAWLDDLTTGRVESVDGIAMREGKSARNIRMMIQLAFLDPSIIEAVVEGRLPATIGATEIVRDLPMAWTEQRAVLGV

SEQ ID NO: 2495 - protein, 537 aa, unidentified
  source 1..537: note = uncultivated organism
MKVAIYSRKSKFTGKGESVENQVQLCKEYAIKHFNFDESSFIVYEDEGFSGGNTKRPEFQRLLKDTEANKFQMLICYRLDRISRNISDFSQMINILNKNNISFISIREQFDTTTPMGRAMMYIASVFAQLERETIAERIRDNMVQLAKTGRWLGGTTPTGYKSEPVVTLDKCGKQHRMYRLAAVPEEMDIIKLIYDRYISLKSITGIEKYLMEHNITTKNGANFHAASIRPILTNPVYAIADKTLYEYLLENNYNIYSSIDEFNGVNGLIAYNKTIQDKGCKERYRDTGDWIVAVGMHEGIIPGEKWIKAQEILKENKSMCYRKVKSNQSLLSGVLICSNCGSFMRPKAMQRKNEKGQQVFYYICEMKEKSKRKRCDVGNINGNKLDELILEEIKKIVLQNPPLFDDVPVNKNLFSIDETEWEKDTVQKKMNEIELGIQNLVLAISKSTNSEAVDVLTKNLEELTGKKEELNKKLLDIRKNESRDHGGCDLYITKESLGKFDDDAWQFMSIKDKRMMVRSVIEKVSWDGEKIIMNLY

SEQ ID NO: 2496 - protein, 503 aa, unidentified
  source 1..503: note = uncultivated organism
MSTKKRELRKSVGIWIRVSTEDQARGDSPEHHEERARCYAQAKDWEVVEVYHLEGVSGKDVGEHAETRRMLKDIESGRIQGLIFSKLARLARSTKQLLDFADRFRDAGADLISLQESIDTSTPAGRLFYTMIAAMAQWEREEIADRVSASIPVRAKLGKPLGGQAPFGYQWKDKKLIPNPKEAPVRKRVYELFREQKRLKTVARMMNEAGYTTRKGGKFSDTTIARFICDPTPKGLHRANYTQNPDGTKKWGYKPEEEWVYSEVEPIISAELWDECKAIYDNQRQTRKKPSKKAVHLFAGSIYCSCGKKMYVPYGNKNYVCGTCRNKMPADDMEHIFIEQLKGFLLSPEEIAGYLKEAHETLCERQDALETLKGRLKAAGQQIDALFGLHEQGEIPTEGFGARYEPLLEQQKDLERQIAETEAEIDLLKVEQLSKDHILMEGQTLADRWPKLQREDKRQIVENLVDEITIGEEEVSIDLLYFPSVQEAAKGQRNKWGSSRTRA

SEQ ID NO: 2497 - protein, 568 aa, unidentified
  source 1..568: note = uncultivated organism
MAKEHIRCAIYTRKSSEEGLEQSFNSLDAQREACCAFILSQKHEGWTPLANRYDDGGFSGGSMERPALQELLSDIKAGKLDTVVVYKVDRLTRALTDFAKIIEIFDSHSVSFVSVTQHFNTTTSMGRLTLNVLLSFAQFEREITGERIRDKIAASKKKGMWMGGVVPMGYECVDHRLIVNEAEAETVREIFTQYIKLRSVRELKKYLDQSELRSKARTSAAGLKSGGATFFRGALYHLLRNRIYIGEIHHKDQCYPGQHQPIVPRELWDRVAALLDSNNQAHRSGASLSTPSLLSGKLFDSNGARFTPTHAARGAKRYRYYTSQSVIRREGTQPEITRFPAQDLENFVLGQIHLLLQAPDKCTAGTEDSPSKEAVTERANDLAKKWPKLEISKQHEFTKSILRRVVVGKAAVWIEIDQTKMFTALLGQNSEALSPSSGRKHEILKLSGDFQALRRSGQISVIDPQNGSSFEGPTVPSLVKAIARARDWYERIAGGEITTMAQLSQESGLRRRYLRTILHCATLSPQITEALLLGRHQPNLSLKGVLRDMPLGWGEQETMIPFLRMMSG

SEQ ID NO: 2498 - protein, 528 aa, unidentified
  source 1..528: note = uncultivated organism
MKDKNLSNMVIAIYCRKSIYRDTSDSIKNQIDMCKDFIKRCYGDGHTILVYDKDEGISGATTDRPCFQKMMSDIENDIIDMVVCYMIDRISRNIKDFCNIYFTLQEHNCRFVSVKENIDDTTAMGRAMLYICQVFANLERDNIRERIIDNMSHIEQSGYWASGLPPLGYNIAKITEHGKTHTILEINEETSAIYLHLTDLFLNQGKTLFACEKELRSEGVRTKKGAVIDSSRIWKILSNPTYMCADETAYNYFKAAGCNMVHDISLFDGSHAIMVRSRFKKEDTKMVLRDKSEWKIYVGMQKPLISSNEWIKMQELFKGNVYSKKKKTDQFGICTGIIKCKCGYSMRSKHDKRRSGYTTYLCTRKENKSRGTCDSKMVKCDIVDNAVIDMLRQISTDRDTLARFVRKSQPKPLYNTKSLKRRLLAIDKQIQKFTLSLPDAEGTAAKKYIIQEIDKLDSEKTDINTKLAESSVIDLQAVKEDKHIDELYDSINELLENFDMLSTAAKNNMIKSIIKEVVVDGENITLKL

SEQ ID NO: 2499 - protein, 614 aa, unidentified
  source 1..614: note = uncultivated organism
MGVVKIKPALTKQDRERAEAIKSRRKAEADTIREPQKEISIRKKRSVTAIKPTLRTDKKLKLKVASYCRVSTGMEQQETSIENQRRHFEKLIQDNPDWECVGIYWEAAVSATKKETRPELQRLLADCKAGRINLVITKSISRFARNTTDCLEMIRQLKEYGVTVRFEKEGIDTSTMESELLLTLHSSFAEEESHSISKNRAWTAQKQFKSGTFKYSKAPYGYDLVSGNFAINEEQAEIVREIFQMCISGIGCRRIARSLNDRGVPTNSKNKNGEPNEWKEVRIIRMLRNITYTGAVLMQLSYCDEHFKRRKNNGERTQYFMDEHHAPIIDKITFDLANQMIDKRAAEKGIYTTDSNERKRLFGNRYAFTGKLICAECGRVMTRDVEKRYSSIPVIYQTCYDRSGKSKCSMSRVRQINIEYAFINLLNKLSFAGNRIIDEYVKALTKDYASHNSERIMECRIVLEQLREKLRRYELLSSRDSSDMNVYRIKALELSMQITELESEIYLLENDPLTASEIKVLREALALWSDDLCEEFPEDMFLRIVEHVVVKTNDYAEFSLKCGMVFRETINLPKGRQYIEIGTRFIMSDSEDNASLNAVEKAAYIYSQIKIHDS

SEQ ID NO: 2500 - protein, 625 aa, unidentified
  source 1..625: note = uncultivated organism
MNEEKKICGIYTRVSTDDQAREGFSLPEQRQRLKVMCEYKNYKIYDYYEDAGISAKTGNIRPEFDRMLEDIENGKINTIVALKLDRISRSIYDWENIMKFLEKNNADLVCANDDINTTNANGKMISRIMMSVSQNEIEKTSERTKIGLSGAIKNGNIPGHTPLGYKRDNKKLIPDILTKEIVARIYQLYFEGNSYQKIANVFNQENILNKVWRDNTILQMIENPIYKGDFLHGKKTTTPTYYKNVVEPLVSKEMWECCQAQKKKNSRSYMRTQTYLFLQKLKCPKCGRIMGGKATFKKKSSKTYYYYGCNNCNNNIKEDYIEESIIHLLSDILEYDSIVSEFFLPMLKNKIENPKEQLSKELKIQEMKKERIRKAYINDAFTIDEYKKETEIIDNNIKELETKILENNQMETLKFVPEDILVKRDIDFINKIKLPNLYNQIMVTWNELSRKTKSNIIMNYIENISLRLDENERYIVNDVNFRNTFFKEFKELFDSGYIDWKYINLTVDGINYVRYSNYLPQEKVEEHIMRLREFYDVFYCEGTLDLKTNLLETKKYDDAEVVRIFPIEKDNTNKDKINMGMISVMKDEDTRIEDKEKLFETIPDVVKSNEYFNYDKQRFLDGLSN

SEQ ID NO: 2501 - protein, 545 aa, unidentified
  source 1..545: note = uncultivated organism
MSKINSYNACIYARLSRDDGDKLESDSIINQKALIRDFLSKHPEIHAVSEKTDDGYSGVNFDRPAFQEMMDEIRSGKINCVVVKDLSRFGRNYIEAGNYIERVFPFLGVRFIAINDNYDSLDRNQSDSLIIPFKNLINDAYCKDISVKIRSQLEIKRKKGQFLGAFAVYGYLKDAEDHNKLVVDSYASEIVRAIFKWKRQGMSQGRIADKLNMQGVLCPMEYKISLGMKVQTNFRVHKKALWSQTAVTRILSNEIYTGVLVQGKQGTPNYKIKKVLPKDEAEWIRVEGAVPVIIDRDTFDSVQMILKKDIRIAPEEEVVYPLSGYLKCGDCGQNMVRKSYNAGGKAYSYFICSTRKAGKGCSTHTIREDELMDMVLQSVSKQVEYICEMEQLLDIVDSLPESQMNVFNYDAQIVRLKEDIERYKSFKLKLYENLQEGLIGQDEYFLFKKSYATKITEAEAAIQAIENEREQAVSRNRDSLAWMEVFKKYRNVSAVDRCMVVDLIRQINVFEGGKVEVVFRHGDEADKVVKMLEHLPEDFRDRQAV

SEQ ID NO: 2502 - protein, 543 aa, unidentified
  source 1..543: note = uncultivated organism
MQNTQNKIWNATLYLRLSRDDGDKEESNSITGQRELLRDYISQHPELREYAVRVDDGFSGSTFERPSFQKMIEDVRAGRTDCIIVKDLSRFGRNYLDVGEYIEKIFPFLGVRFIAVNDHYDSLGDKKSSDDLIIPFKNLINEAYCRDISVKIRSQLEIKRKNGQFLGSFAAFGYLKDPQNKNRLIADEYAADIVRDIFRWKLEGVSPQDIADALNKLGVLSPMEYKRSLGMKYTTSFKTNSKALWSAGTVIRILKNPIYTGVLVQGKETTPSYKVHKRITRDQSEWVVTEDSHEAIISKIDFDSVQKVLKLDTRRSPDGEAVGLFSGMVFCGDCGASMVRKTVPAGGRKYVYYVCSAHKQEKSCSPHRMRDTVLEDIVLDSLKQHIREVVDMSELLSMTDTAPLRTARAQKVQRQLEKKHEEYEKLQKLLMSLYENLADGIIDREEYTRLKQNFTIRAEETEKQMDALRENLSDIQNQGSSNDWMEEFSKRQGLTELDRSVVVALIDKILIHANDVVEIVYRWQDEFSWQLDILRRARLQEVV

SEQ ID NO: 2503 - protein, 516 aa, unidentified
  source 1..516: note = uncultivated organism
MKKRTSSETTESVRCAIYTRKSTEEGLEQEFNSLDAQRESAEAFIVSQRHEGWEAVAETYDDGGFTGGNMERPALKRLLADIKSGKIDCVIVYKVDRLSRSLMDFARIIEIFDSQHISFVSVTQQFNTATSMGRLVLNVLLSFAQFEREMISERVRDKVAASRRRGKWSGGMPLLGYTVENTKLVVDEIEAASVRQIFELYLEHQSLLPTVRELNRRGWTTKRWVTKKGDRRGGRTFTRNALYKLLTNVTYIGKIKYKDETHVGEHAGIVPVEVFNRVQNNLKRNGQSGGTLVRNKHSALLKGLLHCKSCGCVMTHSFSCKGNKRYRYYVCGTAMQRGWSECPAPSVPAGEIERFVVEQIRTIGQDPTLLKQTTIDVQQRNQLECKQLKDEEKSLARQMLDDHAKLQAIVANPNIASNLSGLSEIQSRLETADRRAQQIASELALLEAQKIDDQQITNVLAGFDDLWQTLAPKEQVRLVLLLIERVSFDGPGGNVAITFHPTGLKSLTETHLEHAQ

SEQ ID NO: 2504 - protein, 540 aa, unidentified
  source 1..540: note = uncultivated organism
MRIAIYVRKSKWTGRGESIENQILMCREYIEKFIEDSRDAQILVYSDEGFSGKDTNRPEFQKMLEDMKQGPFQYLVCYRLDRLGRNLADLALLIEKLNREHTEFVSIKEHFDTTTPMGKAMVYFSGVLAQMEREQIGERVRDNMFLLARSGRWLGGSTPLGFHVKEKLYGEEKIRKAFYLEVEEKEAEILRQIFREFLSSHSFTKTAQKLTEKKIFTRRGRAYTPETIGEILENPVYCQSGKLAYDYFASLGCRMGFSREEASEEKGLIRYGKTVSSRYRGQETPPQEWIIAQGEHRGLIFQEDFLRVQSLLERHRLGKRGEGRIQNETSLLAGLLFCSCGSRMRPKYYRKNQVNEEGQRKFSYRCICRDKTRGQACRSGPLPGNVADSMIWEFLMERTRQAIPVKEIFQEIRRKTEKEKEQEEERENIHKEEVRLEQEALRLTQRLAETKDRDLAGFLENEIRRRLAERENLRKREMEKRNSLEQKERENLICRYSDPEFFFSFLSVPNKRIYIRIWLERIVWEEERSRLCLFVSSGPQ

SEQ ID NO: 2505 - protein, 546 aa, unidentified
  source 1..546: note = uncultivated organism
MDTETKPQKKRIYCAIYTRKSTSEGLDQDFTSLDAQRESAENYIHSQKHEGWTGLEERYDDGGFTGANMERPALQKLMSHIKEHKIDCVVVYKVDRLSRSLMDFAQLLEFFDKYNVTFVSVTQAFNTNTSMGRLTLNILLSFAQFEREIISERTKDKMGAARKRGQWLGGRPPFGYSRDKDAKKLVVNEDEAKVVRKMFELYLKGNSLLKVAGILNEEGYRSRPGKQKNGKPFGGLKFGVTQIQQAVKNVIYIGKVCYAGQIYAGQQKAIIDEETFKKAQEKLKENRIERKATKNIECTGLLSRLLTCKTCGHIMFHTYTMKEPTRKYRYYVCTNAQKRGYSSCPTKSINAQAIEDTTINCLRKILIDNGRKLETRDKEEIDAFLSPVWDTLFPQEKRRILRALVKELDYSSDTKKLGITLNGGDLRLEVDVDLKQVRTLNKWHKEEEIGKEPKIRRNLILAYQLQKLIKEERINGLKEAAGWLNIEQTRLDHIMTLLNLSPAIQTEIISGDRSMLNSIPEYKIRSIAEEFDWNKQLKIWQELFDK

SEQ ID NO: 2506 - protein, 525 aa, unidentified
  source 1..525: note = uncultivated organism
MKKQIRCAIYTRKSSEEGLEQDFNSLDAQREACEAYIKSQMHECWILIEKQYNDGGFSGGNMGRPAFQELLSDIESDEIDIVVVYKVDRLTRSLMDFAKIIDIFDKHETSFVSITQQFNTTTSMGRLTLNILLSFAQFEREVTGERIRDKFAASRKKGMFMHGIAPIGYIKKDGILYEDKEHSHKIKTIFEKYIEFKSVAKLHNYLNENQIYTRTGKSFRKGNLHRILRNKVYIGKIEHKNEVYEGLHDGIIDAKTFNKVQKIMDENSINAKNSTGSKHISLLAGKIFDDKGNIMSPSHSRNRHGACYRYYISQAIIQNRAHEAGTISKIPSDEIEQFISEKIKEIISDKEQIQNYIKDKPIKKQSKILEFLESYIPDIVFIRTVLSKITIYQDKIRVLLDKDLLVQSIEAVTYGQLLNFKSSGDYFLDFSYAVKISPAHQKGTKIVIGHNKIEYNLTLIQAITKGFYYFKLLQEGKMTKEQKSSSHIRRLMKLRLLSPEIIESVLCGTQDRSLTIKELYTMAVV

SEQ ID NO: 2507 - protein, 564 aa, unidentified
  source 1..564: note = uncultivated organism
MREANSLNTAKYCFRENFDNFLLGANSLRFFVYSRKSICGERGESVENQVEMCRRYIRDKFPEEKNPEISVYEDEGFSAKNTERPRFRQMLRDLRKENPDFVICYRLDRISRNVSDFSTLIEELNGRGISFICIKEEFDTSKPMGKAMMYIASVFAQLERETIAERVRDNMLMLARNGRWLGGTTPTGFVSERVTKVSDDGRVKTYFSLRENISELNTVAVIYEKFLECRCFAGVYKFLTARGIQSRTGSDYSLPGIKQILQNPVYCAADEVAFDYFTALGCDVCFKRDDCSDKYGLLAYNKRDCKKKLSRRPANKWIIAMGSHKGLISGEKWTKVQKIIGSGGEETSVSKERNDYSLFSGLIFCAQCGNRMFSKRRSGKSSRREQYDYICKGKLLGGESGCRSLNLTGKRTDEAVYAFIVNLIHENSGIYKLLEKLIRGFQKERGEDRISIIESRIKQYDLEIKNLLDSLSKAKTEEGFVKMVNARITELDAEISSLSEEKSRLEIEEKSFENECFDIFSERLSDLKNCNEIMSVFEKRELMRIIVDKIVWDGENLHVFMKYQ

SEQ ID NO: 2508 - protein, 546 aa, unidentified
  source 1..546: note = uncultivated organism
MNAKTPKTVRCAIYTRVSTDQGLEQDFNSLDAQYEASQAYIRSQAHASWTPLRGKYDDGGFSGGNTDRPALQRLLEDVQAGKVDVIVVYKVDRLTRSLADFAKLVELFDQHNVSFVSVTQQFNTTTSMGRLTLNVLLSFAQFEREVTSERIRDKIAASKRKGLWVGGMAPLGYDTKDRKITVNEAEADRVRDIFRSYFKLGSISLLLADLRKRGIVTKMRTLKTGKTVGGIPFTRGPLAHLLRNRFYIGEVAFKGETLKGEQQAIVDRKLFDAVQAKLNDQRNGHTTTRLKSEALLIGRIFDDRGNRMSPTHARRRGIKCRYYLCSTILNGQPDKSGSVTRVPASEVEALVVKSVRDQLELPTGSKDDPALVRDHVVRVEVQPDQLIIELAPKDATDRKRKRDRQSLEIPWRKAPSTRRREILLPDTATRETARPIRSENRALLVAAIARGRCWLDELATDPTATIESIANRAGCSPRKVNMTMSLAFLAPDLVKAAIEGRLPHGMGVTRLSELPAEWSRQYRALGLPAPDAPHSNRVSARAVSVS

SEQ ID NO: 2509 - protein, 533 aa, unidentified
  source 1..533: note = uncultivated organism
MRKEHNTVGSLALEQGPRVIAIPPVSQEQTRKLRVAAYARVSSDSEDQLHSFAAQTAHYTELIHQNPDWEFVDVYADKGITGTSAEKRDDFQRLLADCRRGRIDKILVKSSSRFARNTKESLEAVRELKALGIGVCFEEEKIDTSALSGELLTAIFAMLAQKESEAISERMRWSYQVRMRAGKFITCSAPLGYDLVDGKLVINDSEAQVVRYIFHQYLSGQGLESIAKELTRYGVPTRTGVPCWRMTAVGYILCNEKYVGDSLLQKSYTTKTFPHRVVKNHGSRPQYLIRDSHPAIIDRNTFEQVQKLLGRRREALHPQPQEKYTFTGKIICQACGATFKRKSVGGTSVCWICQTHNRFPEQCQTARIYEQQIKAAFSRMYYKLRQQGIDILKQLLKDLHAAREARMLWSMDIVKLNDKIADIISQDRLLAQLKQQGLVDPDLFISRRDRLAEQLRATKLEKEHLLEAEEDQTIQQTLAIMDALESGPDLLAEFDEELFSELVEKIVVENEDWLRFRLINGIELKEQVERTVR

SEQ ID NO: 2510 - protein, 552 aa, unidentified
  source 1..552: note = uncultivated organism
MVNNTDHIIRVAIYTRVSSQEQVDNGTSLESQAEQLEAFCKAQKWEIFNQYTDPGFSGKDDKRPGLESLRRDAKAGYFEKVIVWRLDRLARNLRLILGIEAELREQNVAIFSMREMVDTSTPIGRTVFQVLGLAAEWERESIIERTKAGRLQRYKEGKWAGGPVPFGYDYDHETKKLVTNSNEAIIVKRIFNEYINGGTLNGVATSLQRDHIPPRSTHSMGWRLNAVHNILLNPIYKGNQIVNRHCHIADIKKVDMTKAIEISVPPIVSEDIWKKAQNRLSTNVHNKPSKRGEYLLQGLITCGLCGYVFKSDKNKEKRFYMCRGRMKDKHLDGSEKCKAPSFRADWLENEVNDRLKALIDDPTKLTQVIRNSINTLRLREEELNARIRPIDEQIGQINQQKSKLADDWIICNMDKVKYQEIRSTLDKEEARLKLIRSNIDPSQIAELEKTQVQLRLWENQLKDIAWNLENEDGSKIRSVDAPHNIAASAIRFNDDSLSAVVGFPTSPRQLLDLLQVKLVVFNDRIEVNALIPMQPIELQRFTSTSRGEEDFT

SEQ ID NO: 2511 - protein, 596 aa, unidentified
  source 1..596: note = uncultivated organism
MQKNEDMIAIYSRKSKFTGKGESIGNQVDLCKDYVRNMFGEGYVDRCVVFEDEGFSGGNLKRPDFQKMMADVRKRKFKAIVVYRLDRISRNISDFTGLIDELTKLDVSFVSIREQFDTSTPMGRAMMFIISVFSQLERETIAERIRDNMHELAKTGRWLGGNAPTGFKSEPVSKVNVDGKTRKSFKLVPIPEEAEIPKMIFDLYTETDSLTAVEAEMLRRRIKTKQGKDFTRFAIKAILQNPVYMVADEDAYHYFTEREADVCFDREEFDGTCGIMAYNRTDQEKGKATVLLPVSEWIIALGQHPGLVPSKQWIKVQESLDRNKSKGYRKPRNNEALLTGLLFCSCGERMYPKLSQRKTADGQPIYTYVCKMKERSKRERCNRRNAGGNILDAAIIEQIKSLREHDSSFITQLEKNRRFYTGNREQYETQLADLRAEYGENEKTINGLIDSMGMIGESIARPRVLKRIEELSEANREIENRIHELEGLTEANALSDMEFDLLRQMLSMFRISIDGMSIEEKRAAIRTVVHKVIWDGVNAHVVLFGADESDIEFPDMDDRLGHQDEISAEEPLEAFAEVDCGEPEEENFAEDARNSL

SEQ ID NO: 2512 - protein, 556 aa, unidentified
  source 1..556: note = uncultivated organism
MAEKKTKAYIYTRVSTAMQVEGYSLDAQKERMRSYAKSMDIEIAGEYEDAGRSGKSISGRPEFQRMINDIENQKDNVSFVLVFKLSRFGRSAADVLNTLQIMQDHGVNLICVEDGIDSSKEAGKLVLTVMSAVAEMERENIAAQTMEGRRQKAREGKWNGGPAPFGYSIKDGSLVINEDEAKIVRLIYDKYVNEEVGFATIVKWLNEKGYKKSRGKANAFSVSYVAKLIDNPVYYGMIAYGRRPIEKVAGTRDKYHRIKTDKYGLYPGMHEAIISEELWKKAQKQRKKNQEKYRQKSLNGQTKIHLLSGLLKCPCCNQGMYSNKSIKKKDGKVINAYHYYYCKNQTGATGTPCTFSKQINEQQLNEEIIQIISKLVADPEFSEKLKSQIKVSTDISTIEEELAAWRKKQRNCLAAKKRIENEIDRLDYDDRHYESKLASLEERLHKKEEELYEITDQIEDCVSKKELAEKKAISAENIYDALVNFEKIFPVLDERDQRDLMVTFVRDVFILPDPSETGRRIKSIVFNFPVIGEDTQISLDTLQPVETVVLMSRIER

SEQ ID NO: 2513 - protein, 579 aa, unidentified
  source 1..579: note = uncultivated organism
MKPATPKIQRCAIYTRVSTDQGLEQEFNSLHAQREAAQAYVKSQAHEGWKLVRDHYDDGGFSGGSMERPALQKLLADIKERRIDIVLVYKVDRLTRSLTDFAKLVELFDQHDVSFVSVTQSFNTTTSMGRLTLNVLLSFAQFEREVTGERIRDKIAASKKKGIWVGGVVPLGYEVKDKKLLVNEAEAGTVRMIFERYLALGSLPALQRELRAQGIVTRKRTLSSGKIIGGVHLTNGPLAYLLRNRTYLGEINHRDKSYPGEHQPILDPALFDQVQARLDENRRIRRLKNERSQALLLGKLYDDRGNRMTPSYAIKKGVRYRYYVSCVLAQGRKDDAGSVSRIASDAIETIVLDALAKIPATDAQATRRDRPTPTGLGEKPRLDVDDFTERHPDPEPDWERVERLVDRLLVCSQSVEIRLADGADLSVQSNVITIPWSPATFRRKREVIQPPDGSSAAAHPIRAEARTKLLAAIAKGRRWFNEIVSGDASDIESIAARERLSERSARMMLSLAFLAPDVVKAAVNGTLPRGLGVSRLTELPASWNGQRQTLGLAMSPSSRSVTARRSFRSNPHEATTRRR

SEQ ID NO: 2514 - protein, 544 aa, unidentified
  source 1..544: note = uncultivated organism
MKSKQTQLNNKAGIYLRLSKDDEKAGDSLSIENQRLILQKFVKEQGFELVDEYIDDGYSGTTFDRPNVQRLLDDAKSGVINIVVVKDLSRFGRNYIQVGQYVDYIFPLYNIRFIALSDNVDTADKNSSGMDMMPIMNVFNEWHSANTSKKIRAVIEANAKTGKYRTTHAPYGYVKGTDERCLPVIDEPAASNVRRIFELRASGKTLNEIVSILNDEKVPIPADYLFEKFGIPNKKGSKHLWADSILRNILKNPLYLGDLVLLRTTTVSYKNKKRIEKDDPIIFPNAFEPIVTRELWDKCREIEASTSHGKHTKRGTMHVLSGLLFCADCGGKMKLGQQYIKPSRNHPTTRLMYHYICGNHSRFGKYYCFNHYIRREVIEEIVLNDIRSKASFVMTDEKKARADFLKRKEQITSAKYNADKKVLKAKQRRYDELEKLIQSVYEDKVMGKIPEEICIKLLEKYTAEQNELKPEIEELEISVSEVTKNEMDVDEFIRRIKHYIDVRELTREMCMELIEGVTIGADPEGKTSAREIHIYYKLLDKSSK

SEQ ID NO: 2515 - protein, 519 aa, unidentified
  source 1..519: note = uncultivated organism
MKKVTKIDKTAQSNIRLQKIRVAAYCRVSTDSDAQLESLEAQKSHYESYIRTRSDWTFAGLYYDEGITGTKKDKRPELMRMVSDCEAGKIDLVVTKSISRFSRNTTDCLELVRKLLGLHIPIYFEKENINTGTMESELFLSILSSMAESESVSIAENSKWSIQKRFENGTFKISYPPYGYDWDGQQMTVNKEQAAIVKEIFSAVLSGKSCVAIARALNERDIPAKRGGKWDASTIRSMIANEKYTGDCLFQKTYSDAEFNRHINHGEKNQYIVQNHHEAIITHEDAEAARAMILQHAREKGIRAESSKYQNRYAFTGKIICGECGSTFKRRTHYCIDSQYIAWVCATHIEDKTKCSMKYIRDNELKLAFVTMMNKLIFTHRRILKPYIEALQNSPVDSPMKRIQELQTMLAANTEKRETLSRLMTQGIIDQVLYNRENNFLLSEAENNKREMEALSNNISGSVSTLASANDLLHFTEKGVMLDAFDDELFTRHVDRIIVVSREEVCFELKCGLSLHERM

SEQ ID NO: 2516 - protein, 531 aa, unidentified
  source 1..531: note = uncultivated organism
MKAGSAKAVRCAIYTRVSTDQGLEQDFNSLDAQYDASQAYICSQAHAGWTLLRAKYDDGGFSGGNTDRPALQRLLEDVQAGKIDVIVVYKVDRLTRSLADFAKLVELFDKHNVSFVSVTQQFNTTTSMGRLTLNVLLSFAQFEREVTSERIRDKISASKRKGLWVGGMTPLGYDAKDRKISVNGAEADRVREIFRSYFKLGSLNLVMADLHKRGIVTKLRKLTTGKSIGGIPFARSSLAQLLRNRFYIGEVDFKGEILKGAQPAILDRALFDAVQARLNEQATNHKAKWMKSDALLTGRIFDDRGNRTTPSHARRGNVKYRYYLSSALLQGTAERAGSVRRVPATVVEALVIKSVREELKPSQPIDDRSLIHTRVARVEVQPKQLVIRLTEEPKAATNGNRTRANGTLHVPWQKTPSTRRHEILLPEGMSPQHARPIRSETRATLVAAIARGRRWLDELTTDRSVTTEMIAKRETCSLRKVNMTISLAFLAPYLVKAAIGGRLPRGMGIARLTDLPPEWSRQHEMLGLPSH

SEQ ID NO: 2517 - protein, 552 aa, unidentified
  source 1..552: note = uncultivated organism
MAFSLPQADLPAGKRAVLYLRVSTGRQATGDVSIPSQRDLTQRFCLANNWQVVDEFVEPGASGTDDRRPVLQKMIEQAKEGRFDVICVHSFSRFYRNGAEMELTIRNLRKYGVEVVSMTQPTGDDPSQTLMRQIIGIFDEYTSRENGKNVTRAMRENAKQGFWNGAKPPLGYRICDVELRGTKMKKCLEVDPVDAETVRLIFRLYAEGDGQSGPIGVKKVTEWLNSNGYRTRVGAAFGIGPVHGILTNKCYATGKWPYGVKNFKTKQNHDPSTVIEINIPTIVPMELFEQVQRRLSINNPKVTPPRVVYGPTLLAGLAVCASCGSGMTKSGTRRRGKIYSYYSCAGCKLGGRSVCKGGNIPLEKLDGLILDNVTQQLFNPERMGVILGALVKRTNTKDAALDDRWNRLQAERKDKQEKLARLYRAIEDGIVELDDDLKVRIATIKQERDIVQTSLDRIHVQATNSYELTPDRIAAFAKLAQDKLLKGDAQARRAYLRSIITRIEVSKEKVRIIGDTNELAGAVSGRKEGPQNVRGYVRNWRALQESNLWPQD

SEQ ID NO: 2518 - protein, 584 aa, unidentified
  source 1..584: note = uncultivated organism
MNQKRIGVKPSHKSSLNMKKTNAKPQNPTNPKKQDELGIAIIVCLWYNEVKILNGVTVVTDVAIYIRLSEEDREKKENDSESIINQRNMLTEYANERGWDIYDIYSDEDYSGSDATRPAFNKMIADAKDGKFKVILCKSLSRFARDVSMVETYINGYFIEWGIRFISLADYADSSQKGSRKNIQINSLVNQWYLEDLSENIRSVMTHKKKQGQFTGAFAPYGYIKDPQDNHRLIADPDAAAVVKRIFQLYLAGYGNKAIANALNNDGVPCPSKYRKTKGFKSNRNNVAVEELRWSDHSVWHILRNPNYTGDLVQGRYGKPTYKSKSIKEKTPGEWIVVDGVHEAIVSKADYDRVQATKASRGLNNRNASVNRAVANIFAGTVKCKICGRSLVLSGSGKINKGTRYLRCAGRKSGISSCKCAMVKYDLLAGEVTEKIQEIIQRYCDFGRLEKHTRKSRDFNSEAAALKKSKDKNLFEQKKIDDALSDSYVDKSSGVITGEEFSVISARLKVKKEELVKEYSYIQAQLDKLFSLQDAESKVNQMIAQYQNFTELNREIVNAFVDVIYIGERDQQTKDFDLEIHWRL

SEQ ID NO: 2519 - protein, 582 aa, unidentified
  source 1..582: note = uncultivated organism
MVKNESRRTTQIRCAIYTRKSSEEGLDQSFNSLDAQREACEAYIASQAHEGWHAIPRAFDDGGFSGGNVDRPALTHLLDIVRNDAVDVIVVYKLDRLSRSLADFIRLIELFDQHNVSFVSITQSFNTSTSMGRLTLNVLLSFAQFEREVTGERIRDKIAASKKKGMWMGGRVPLGYDVVERELHINQSEAVTVRHIFDRYLALGCVRKLKAELDTDGYRSKPRPTEHKIQGENPFSRGVLYSLLKNPLYLGKVHHDGKLYEANHPAIVDTETWKTVQAKLNQNRTKHAHRQDAKHPSLLAGRLTDHRGNRLSPTYTQRKNRRYSYYINQAILQYREDDAEEVHRIPASELNQVVEALLLELLSDTNNLIDNLSAHAIDAAKLERLTESAATLHAQWGSYSIAEKIPLLSIVDAAVVVSANRVKLSVSCTGLCNLLLKKHSAVDEYEKGSHDESSTITLSRAVSLRRSGIGKKLVIQSKDVVPIKAHPRSVRALQRAVVQAMLWNEDLITGKVGSIDALVKRDGLNRRQVYRLRQLAFLAPDIIERIAEADVPETLTLEKLKKGFPMEWQAQRRLFFGAQIPR

SEQ ID NO: 2520 - protein, 517 aa, unidentified
  source 1..517: note = uncultivated organism
MADVIVIQGNQAVQQEKPKLRVCAYARVSSKSYEQQYSFFGQVQHYTRLINENLEWKYVDIYADEGLTGARKDKRDEFNRMIDDCRAGKIDKILTKAVSRLARNISECVEVVKELKELGVTVYFEEQQLDSGRPSDFTAICVYAAIAQEESISIAQNMRMSCSARMKLGTYKQVNAPYGYYIENDEFKINEEQAQVVRVIFRAYIEGKSIYKIADELNQAGVPTKFGGVTWRIKDISYILSNVRYKGDALLQKSYRDGFPYKAKKNRGEKDKYYKYNANVPIVSREEFDKAEKLLSKRRELYYSGRTIQEHSFSHMIICRECGSIYRKKDRVNGKYAWVCRQHDFGIDKCASKPIDDACIRKAYILMYNRLKENQEYILHPMLSQIETIRTSSAEKNLIKDVNIQIAQTTEQVLSINRLKAKGLIEPVSYMEESNRLNEQIIKLRKQKKKFQQKNEFDKVIDNTRKLLKEFEITGAIAEFNKEQFRRVVQKIYADSDTLTFKLINNMELDIRIEEVL

SEQ ID NO: 2521 - protein, 582 aa, unidentified
  source 1..582: note = uncultivated organism
MDGSTLNLKTRRCAIYTRKSSEEGLDQEYNSLAAQRDACAAYVQSQAGEGWELLADHYDDGGISGATLERPDMQRLIADVEQDKIDIVVVYKVDRLTRSLADFARLVEIFDANSVSFVSVTQAFNTTNSMGRLTLNVLLSFAQFEREVTGERIRDKIAQSKQRGMWMGGTPPLGYDPKDRSLVINKAEARLVRRIYERYLELGNVRLLMLELNADGVRSKRWKTNKGTIRGGSKITKGALYHILKNRMYLGEINHKGNSWPGNHKPIIGVSLFDRVQDRLKDSARRNKESIKAKCKSLLTGLLFDDRGNRLIPGHTKKRGRRYRYYVNQALQKGQKEDAGHTLRLPAPDLEGLILRWLISVLRNQKRIFGWLTKWQLNIGTDKIEVVIQTAEERASMLESKSFLKQREFVASMIKRIRILPDRVEMTLFMERLLSDLGADVEEMEQLDRTVKLTCRATLKRCGWERKLVVKPSAQSPDPSHPNPQLIKAIARAHDWMAQIKSGKVKSLEELAEATRFTRRYIQQLLPLATLGPDVTTMILEGAQPPDWNLETLVKKQLPVDWQRQRETLGLESSDSAESIAA

SEQ ID NO: 2522 - protein, 552 aa, unidentified
  source 1..552: note = uncultivated organism
MARKSRKETAGLPAPEIDTTCRAGVYVRLSVEDKHTRTASIETQQLIIARYLEQNPEIIVVQTYIDNGATGTNFHRPGFQQMLSDIEAGLINCIIVKDLSRLGRNVIDTGYYIERYFPAQGVRFIAVNDRYDSSSPDHAHDGIIIPLRNMINEAYALDIAKKIKAQQRQAMKDGKYVGARTPYGYLKAPDDCHKLIVDPVAAEVVKTMFQWAAEGDGLNTIAVRLNETGVLSPSHYKKKLGEITHENLIGNGNWQTRTVAKILRAGVYAGDLVQGVSKVIDHKQVRASADEWTVVRDTHEAIVSRELFDAVQKALDRAAQQAKDREIHSWSPNLLRGKIFCAHCGHSLHRQKCVRKKTADVYVYHCISNNRIKKGACPGVFIDEMNLLDALADILQEQLDTTLGQYSLGLESLSKEAEEQKSIQAKIASRKQEIQQLHTYQRGLYEGLIQNHLSQDEYFAFKEKYEAKIEEISEEIEQLKAGLTIIARQLEQYKMLSQDAQHIKEDRQLTAALIDRLIERVEVSREKQITVHFRFQSEFEHGEEVLNQCRNM

SEQ ID NO: 2523 - protein, 558 aa, unidentified
  source 1..558: note = uncultivated organism
MTSKQKWNKKAGIYLRLSKDDERAGESLSIENQRRILEKYVAEQGFELIDCYIDDGYSGTSFDRPGVQRLLEDAKTGRINVIIVKDLSRFGRNYIEVGQYTDYLFPMYNIRFIALVDNVDSANAESAGMDMMPIMNVFNEWHAASTSKKIRAVIEASARAGKYRASYAPYGYVKGTDEKRLPVRDEPAAGYVLRMFEMRARGISPNKIAEAFNDEHIPIPSDYREQKFGIPSTRHSHHLWSCSTVKQILTNPIYLGNLVQMRTTSLSYKNKKVVRREPEDMITVYGTHEAIVSQELWDKCREMEASVSQGKKNKTGYVNPLSGLVYCADCGSKMHIGWNNTRHKRSDPRTYRRDNFKCGAYAKFGERACTSHYIQIRVLNQIVLEDIRSKISLVAADEAKVRREYICRASRQTEAESAASRRQIKRLTARLEALERLLFSVYEDKVAGKIPEEVCVSLLEKYQAEKNAAKAELALLERRAADTRQEQADVDEFIRRLKSYMDVPELTREMCMELIEFVTVDECPGKYSKQSREIHIYYKLIDKQASQQQKLSWQNLNV

SEQ ID NO: 2524 - protein, 506 aa, unidentified
  source 1..506: note = uncultivated organism
MKYLIYARVSPKGSGYEGETSIQMQIQFCREYVKRQSGEIIGEFADEFFSGKSMERPNFREIMAKLERGEAEWDTICVYKLSRLTRSTRDGAFIFEQLHNWGKGFVSVTEPTFDFSTPMGRAMLTIFQAFNQFEREQSAENTKNKMVSIAQKGLWPIGKAPFGYKRGAKKDNKLYVDPRNAEIVRDIYNLYLDDHTPLCSIAKKYRHIFTPQHITSTVLHNQVYLGMIVYDGKIYQGQHEPIIDQKIFDQVQERLGKKSENDRTHVKEKAQKYNYLLTGLVRCHCGRFMTPASGKSSQYHYYKCTNRLDCNFSVSAEKLEEAAKKKIRLLAFPEKLKNALSGYLEENKQNFLETYRTDLDRITIALEQAEAEQEKLYHLILAQSFNAKNLDFFNAKFDKVREEVENLKAKKDFLQAEFDRINIDTYAIAQEMADKLKTFASLIKHRRSTKRLRHDAECHAYEHRYHNRKRRWNLCFSLHRIQYVYWKRMERVTGVEPASPAWEAGA

SEQ ID NO: 2525 - protein, 519 aa, unidentified
  source 1..519: note = uncultivated organism
MDGRNVKVIQPTIARINAERKQRAAAYCRVSTDSEDQANSFAAQLKYYTEFIKDNPNMDFVDIYADEGITGTCISKREEFQRMMRDAAKGKIDRIYTKSVSRFARNSLECIEAIRKLAVCGVSVLFENDNIDTQCMNSELILYVKSAFAQSEALAGSKRVSTAFRMKMENGSFVTTNAPFGYTVDKTGVLRIIPKQAEIVKEIFDLYLSGSGIERIAEHLNAECASGDYGKWQATSIRYILMNEKYIGDSLWQKTYTPQAFPLKNVPNHGQVDRFYVSNTHEPIVSREVFEAVQTRLHRNGPTRTKAQQNCIFQRRIYCESCGWAYKKKVSNGKVYWVCSGKSIAGQTCSGQSILEDTLEEAFVLMYNKLRYFEKEVLDLTLKRLLLVREKISGQNDKVSQIDLEIAKYCDTNNMYTKLHGQGIIDEVSFLERTSELKYKVTELRKKRLRLINDNEDEQVIERFRALKEMLSESPPTILAFNPQLFQDITEKVIVGAQGDVVFQLLNGLQLRQETKGVI

SEQ ID NO: 2526 - protein, 528 aa, unidentified
  source 1..528: note = uncultivated organism
MSRALLYARYSTDRQTESSITDQLRACREYAARRGLTVAAEYTDEGISGAAFGNRPGVHRALAALAAGDVLVVADLSRLSRSQELAPLLDRLRFRGARVVGVLDGFDSDSPQARMQAGLSGIMSDELRASIRARTHLALETRARAGRATGSRAYGYDNAGEPREPDATIAREIFQRFADGESARAIANDLNARGVPSPGAAWNRERRTRHGRWLTTALHEILTNERYVGRVVWNRSQWVKDPDSGKRIRRERPRSEWIEREGPALIDRETWEAVRARLAERDRYGGRRGAQPQYLLSGVLVCEACGSRLIVVGANGGRYRCSLNHAGGASACGMAVTVRRDVAEDVILAPIQTAVLSEEAVAHALAFMTKLAREKRVQTAQEAAPAVQRLDAELAKLREIAEQNPGLASLQAAVQDAEQRLTAAKRAAWRTAAAQPTNADAFEQAYRSAVRRMRLLLAGTNAPGRALVRQLLGGDVPVWPAPEGRHLMAKVGISALPLIRAAGLGEPVGSGGVLWIRPPEPVRLLRAA

SEQ ID NO: 2527 - protein, 538 aa, unidentified
  source 1..538: note = uncultivated organism
MNKRRHTIEVEVDDSPKVAAGYIRVSSVAQIEGESLDTQERNIKDYTRLFGWEYCKTYRDEGVSGKKASRPGLDRLLKDAKNKAFNTVIVDNLSRFGRTTADVLKNVKDLQKVDCHFVSIKEKLDGTGPYGQFMLTVFAAISELEHYMIKVRMEESRDFKVAEGRTISGTVGFGYAISRPTKDSVQIVTVEREKEVYQKMVSLYLDDENLSIQDVALKLDAMQFKPRRGKRWCTATMAKIMHSPVYYLGKTVVNKHKTPVEHACEKFVTFERWKKIQVKMANSKKRVGRPLNAKDDFLLHGLLQCGICGAKVVPRRDSHTQRRYYCCYWKEAHRKLLESNHRERCTLPIFDANRTEKQILEGIANLLFGTFEGSWIDPTKNENPWDSRIKELERTIQELERQKKLEERALKRVDEMIYDEDFSQKEFKQRKLQIKQKITSLGIEIEEANVKLQEQTKGREEQDFLMSFSVDKSAALREVYAVYQNLSLSDKQRLVKGLINDKIILMANKRKIYVLKHNPLILNDVLLQKYQVKDQIRY

SEQ ID NO: 2528 - protein, 1281 aa, unidentified
  source 1..1281: note = uncultivated organism
MNQNEKRLWTQTLWDPLDEKNKSPYESKEPGIRVAAYCRISNSGRGNDSSLINQVQHFTELIYKRDNWKFVGVYIDDKISGATVKYRPGFSRLLRHAEEGRIDLILTKSVSRFCRNTAELIETVNRLKELGVAVYFQNEQLDTSTNYNNFLLECQAAVAQEELDAVSQNVQKSYEHRLQRGKPYYKNMFGYDTVIQNGEKTFIINPDEAEVVRWIYHEFLSGKSRAQITRELNQSGVKTKKDIKCWTNNYVTQVLNEIAYTGDKMTRKRVRDMLTKSMSLNHGQITQYYIENSHPAIISHEVFELACKRMQEVRYNSLREQSVHTKWPFSGRLKCGKCSCTLRRANNNNWICKYALPSVGKCNLYRPSDREIVEMSLSAMFERFVRKGQSREGQSGESQIELNLKNFEFQHFIKQIRKILIRVNENDHFEFHRLKYFNAIEMLDSMNTAEADIKREELRAEYKDFEKRISKIENDRAYRNQSLEWLETIKSMDDFIERMTDEIARAWILDIVVYSKTAYIVKWIDDEETVIGPEEIAEIEKNKWESPGNLKASKPGPPGEVRSFEGVENMGRAEEHDELISYQNAKLVEHRQTRIDEISVVEQNLLVRQDNRHHIKPNNNVIKLEPGMGIETINGIKRKVSQSKATNVLCDRNIKVAAYCRVSTDFEEQKVSMQTQVAYYTYLILKNKNWDFAGIYADEGFSGRNMSERKDFNRMIDDVRKGKIDLIITKSISRFSRNVVNLLEILKMFKELPNKPVVVFEKEGLRSDDEKSSLLITLMSGIAQNELTSLSSNVKWGRMKYAERGIVFRGVSVYGYMIDKHNNWNVIPKEAEVIRYIFDEYIENRSISGIIRKLYEQGIKSPNGYDFWADSTLRDLIKSEKMKGDYRYQKFCPTELTGSGKKLNKGQMPQVYIEKHHEPIVSEIVWARAQEVYNETNKPRIVESREGRSAGRVCYYNRFNCGHCGGTVTRYRGKERDSPEGSTWRCHNSYWRIDTECIVGGAKAEKYLDYYFMRTLEKIRGSSEFRRMVDEVIEKLRLTDDEEQNEKELADEIKSLNQELYEAVEGELSIHGLDTTKINELTEKIIKSRDELILYHNRIEKAESIRSQYNKLMKAISEQEFLNFRDFHNMRPRIKPGQSLYDTTKNAKDRTYVNEKGPDHFREDLFEKYIENGVIYDDGRIAYQFGLGVIFSADMTYQDYKDEHQSAKDEINFEELVNSKEVKKLKKFCKKPKFSKEMREHLGIAGECTFYKRILYPLYHARKLQLIKGKRRYDRRYYWKD

SEQ ID NO: 2529 - protein, 539 aa, unidentified
  source 1..539: note = uncultivated organism
MKAPAVKRVRCAIYTRVSTEHGLDQEFNSLDAQHEAASAYIKSQAHAGWTLVRARYDDGGYSGGSTDRPDLQRLLDDIRARKIDVIVVYKVDRLTRSLADFAKLVELFDAHGVSFVSVTQQFNTTTSMGRLTLNVLLSFAQFEREVTSERIRDKIAASKRKGLWVGGNLPLGYEMKDGKIAVVEEEAAQVRLIYRRYLELGGVRALQRDLREGNFRTKTRLLTTGATRGGIPFGRGSLFYLLSNHFYIGEVKFRDEILPGEQPAIMDRELFDAVQQKLRDQRSHRTVTRNASDHLLTGLLYDDIGNRMVPTHATKAGVRYRYYISAPHFDGNSKTAAVGSVSRLPAAALEDVIVKSLTEHLTTAQQSFSSGPLRVDDRTAIREQVARIDVHADRLSVRLKSPNNAEAEEAADERCLSIPWQKRPSKISRQILLPHGASRTEVRPERAERRAHLVRAIARGRRWLNELTSGSITQAEQIAAREQCSVRQVNLTISLAFLSPALVKAAVEGRLPRGIGIERLRDPDAEWTLQFKGLGLNPQ

SEQ ID NO: 2530 - protein, 526 aa, unidentified
  source 1..526: note = uncultivated organism
MKPAASKQVRCAIYTRVSTDHGLEQDFNSLDAQCDASQAYIRSQAHAGWTMVRSKYDDGGFSGGNTDRPALQCLLDDVRAGKVDIIVVYKVDRLTRSLADFAKLVELFDRHGVSFVSVTQQFNTTTSMGRLTLNVLLSFAQFEREVTSERIRDKIAASKRKGLWVGGMAPLGYDTKDRKITVNEAEAARVSDIFRSYLRLGSLNLLMADLRKRGVVSKTRTLKTGRSVGGIALTRGPLAHLLRNRFYIGQVMFKGETLAGEQPAIVDRKLFDAVQAKLTEQTNNHKGTRANSEALLLGRIFDDRGNRMTPSHARRRDIKYRYYISAALLHGRPEQAGAVKRIPAQEIETLVIKATRDHLKISSEIEDKSLINDHVVRAEVRSDMLVLELTNTNTPGPKRKRGPNVIEIPWRKTPSTRRRQILVPESQQQQDARPIRAENRATLVASIARGRRWLDELTTVPAANTESIAGREGCTVRQVNMTISLAFLAPDLVKAAIEGRLPYGMGVRRLRDLPSEWPRQRKMLGL

SEQ ID NO: 2531 - protein, 538 aa, unidentified
  source 1..538: note = uncultivated organism
MYKLYMDDGYSAGTRDRPALKRLLFEASLRRFKVVLVYKIDRLSRSLKDLIDIVAELNQFDIGFKSCTELIDTTRPEGRLMFHQFGSFAQYERELIGQRTRFGMMKRLRGGLWNGIPPYGYRIVDKKLVIEPTEAERVRGIFDWYMRKNMGVVAISRELNRLGVAPRKGDRWKGTRVHKMIGNPLYAGLVRWGGETAMGSHEPIISTKTFEAAQATMHGRNHKSRQLRSPNVLSGLVRCGLCGAPMHVTYPGIEPKSRFKCYVCNNRYNHRSCKQDYIRADILEGSVITEIGKLAKRRDVVSALVREFTEHNRTTLLPELEARHIETTKEFEFVRSEKEKLSRWLLGAGLTAQAVAFVNGQVDRLSEEESRVQEHLWAVEDEIRGIQAMTYSAEAICDRLAEVVEAFPTLTDGERRLLLDSLIAEVVVKNKEVAVVLTPPLSGLGFLSTPLAPRGEKTKAGATFIIWVIYGLSIYYGSRDGGSVEAGSEHSGSKYSASAQVESGILRHPCTAEVVAHGSFPSGRLRRPERSQGLPTRR

SEQ ID NO: 2532 - protein, 547 aa, unidentified
  source 1..547: note = uncultivated organism
MSHKICFYIRVSTEEQAKNLEGSIKNQKERLNEAVKFKNLSGNFGEVVSVYIDRAKSGKDTNRPELQKMLFDIESGKIDLVMVSEISRISRNMKDFSEIWEMMKKNNCGFYSLRENFDTTTAAGEMVLYTIANIAQFERRQVSERVSANIKARAKRGLYNGGSVPLGYKLGERKGYLEIDEEMAKLVQLSFTTFLEKETLSQTARYLNDQGHKIRRWKQGGGRYKRLSHFSVDNLHKILKNKAYIGIKVFKDDDKQGESKAVWEPIVDVDIFNRVQNKLKDNYRKKKPSSKTRYHYILSSIVYCKVCGDVMCGKSAHGNGGKIGYYEHSWATKRNSTLSKKTFKCDGVQRVLAKKLEPLVNEKVEELLFGDDLASRLFKNINKRIEENSSNSERDSIKAQIYGINSQIDALTERLAELPKELSASSIYKQMKTLEDRKLELSEKLEKLTKSSQADYIAKLNEYDEFVQSLRKLWMTASSDMKSRIIKRLIHKIEVGVDSVVIHYNVDKRNMILETKKPSKKEGFFKNSNFFNLNGSNSLTNGAQERT

SEQ ID NO: 2533 - protein, 546 aa, unidentified
  source 1..546: note = uncultivated organism
MTKLLSAIREILVAIYLRLSRDDQNGDAESMSIAHQRDMLLAYCEERGWKIYDIYIDDGFTGTNFERPGFQRMIKDIEAGNINMVLTKDLSRLGRNYVMTGQYTDFFFPEHGVRYVAVNDSYDSAKEDNDIAPFKNILNEMYAKDISKKIRSVRQISAKQGKFMGSKPPFGYVKSPEDKHLLVIDPPAAEIVKRLFREFVGGESGRNIATKLNAEGVDTPAEYYFKQTGKRATRSNTLQQWGSCTIMQLLRNQVYIGDMVQCKRKVSSFKTKKRLVTNPDNWVIVKGTHEPIIDRFTWECVQKRMDAMKHAPSHNTIRVNSTDEINVFSGIIRCADCGAAMAFNRKVEKSGVVRRFYRCSRYANSGSKSCSMHAIDADTLESVILSDIQYYARTAITDEKKLFDRLLSFSGQEQQEEKTAQEKILRDATNRIAFVQEASKRLFEEKVKGNVPESLFKKMFADYERELSGLEDKEADMQRQIQMRASGEADVQQWIGLVKSCVSVDRLDRATAYQLIDHIAVHEQTDKNGKRTQDIQVKYNFVGYLS

SEQ ID NO: 2534 - protein, 564 aa, unidentified
  source 1..564: note = uncultivated organism
MNKPRIRCAIYTRKSSDEGLDQDFNSLDAQAEACAAYIASQRHEGWIADKTRYDDGGISGGTLERPALQRLLANIDAGHVQLVVVYKIDRLTRSLADFAKLVERFDAAGCSFVSVTQAFNTASSMGRLTLNVLLSFAQFEREVTAERIRDKIAASKKKGLWMGGVPPLGYDPHPDPKTRGLVVNADEAETVRTIFALYDDLGCLNAVMRRASDLGLRSKLHRFRSGRVQGGNPFSRGQIYALLRNPIYIGKIRHKTRVWDGLHAPIVDEALWDQVQSKLQAASSRPRGRKGVGDHPSATRVALLTGKLRDDTGDRLTPTHTRRHGRQIRYYVSNRLISGGTDPRGWRLPGIALEQAAANAIARHLVALARDHRICAEADLQQGNAVRDRVRHLADRLSGGTPDLLATLLVEGHIAKNRIVLTLRAKALGDALDLQPDVIDPAVLRIEAPFALRRRGVEGKIVVGDREPNPDRTLLRALSQAHVWVADLRGGKPLGEIAAATRHSESYIRTRAQLAYLAPAIQGAILEGRQPADLSLERIIRKPVPLDWDAQARLYGFAQDPRHP

SEQ ID NO: 2535 - protein, 517 aa, unidentified
  source 1..517: note = uncultivated organism
MKVAIYCRLSEEDKNKESAFCDSESIQNQKSMLISYSIEHGWDIYKIYSDDDYAGADRRRPEFNRLLEDAQKHKFDIVLCKTQSRFTREIEIVEKYIHGVFPSLGIRFISIVDNADTANKENKKSRQINGLINEWYLEDMSDNIKSVLTDKRRKGIHIGSFALYGYKKNPDRKGHLIIDEEAAAIVHEIFTLFAQGYGKTAIARILNDRAIPNPTEYKRLHGIKYQQPKSNNSTLWKYSTISNMLTNEMYAGNMVQGKYGSVSYKTKQNKPRPKSEWYRVEGTHEPIIDMELWNSVQALLKQRTKPFSNGKIGLFAGKVRCAGCGYTMRSSKSRGRHYLRCSCRHISKDACTGSFISVDKLEQAVLQELKRMTALYLDKSRLEKQLRTNEALIPKSEKLKNDIHLYKKKKADYTLALENLYLDKVRGIISEEDYLSFSKDFSEKSQQLISRIDDMQAQQDELQRAMQAEWGENRSSLLYAAPDRLNRRIIDKMIDYISVSRRIPGTYTIPIEIHWNF

SEQ ID NO: 2536 - protein, 565 aa, unidentified
  source 1..565: note = uncultivated organism
MARGGAIPPRTEQHGPVRCAIYTRKSTEEGLEQEFNSLDAQHEACSAYILSQRHEGWIQVKGRYDDGGFSGATMERPGLKQLLADVAAAKVDVIVVYKVDRLTRALSDFAKIVEVLDARGASFVSVTQAFNTTTSMGRLTLNVLLSFAQFEREVTGERIRDKIAASKKKGMWMGGTVPLGYWVQDRKLIIEETDAKLVRHIFERYRALGTGRLLTEELRANGYRTKERPVGGMVRGGIPFTRGMLFHMLSNAIYIGKIVHQGIAHEGEHEAIISPALWEDVQRQIESNRVERRNGSRSAHSSLLAGMIIDGLGRRMTPSHAVKGNKRYRYYVTHDAELRDGEPAAWRLPSRDLEHAVAWRLQQMLKDRQELRSTIAANVDGATLVESLAAALRLANQIDASPKCRSIISELVQHVQVHEQRIQIRLDTSALRKRLNLPAATAAAEFWIEANATRVRTRYAAKLIIADASGQAVEADERLIALLREAQAARAAALDHPERNLKEMAAQQHQCRRRLTRLIKLSWLAPDIVSAIVEGRHPHTLTPKQLLAADVPLGWSEQRELLGFA

SEQ ID NO: 2537 - protein, 507 aa, unidentified
  source 1..507: note = uncultivated organism
MHRFTDQMSGSTLERPGLQQALAYGRAKRYDMLLVYRVDRLSRSVRGLAQVLEELDQAGVSFRSATEPSDTGTAAGRMMVQMLGVFAEFERATLIDRVIAGMERKAARGEWLGGHPPYGYRLNRDTALLEPNEAEAPVARLIFDLYTKKRLGARGVANYLSHHGYRSRPGQLWSHVSVLNVLRNPAYVGKIAFRDTPYDSPHAALVEAETFAKAQGLLRQRGEDASTRRSNTTDFLQSGLVVCAACGRRYVGTAAHGRNARYRYYTCFSRNRHGRQGCRSDVLRADLLDHAVLESLLATYVDTEVVSAAIERWRSRAAKQGPDSASQVRRLEAEISGNESAVQRYYTAFENGRLPETRFVSRVDALERRLTDLRAKLEELRDSAQNVEAPSNQAVRSAEEALRDAMLNGRPGQRKALLKELIVEVRVESRDSVIPTFRLPTTAVRVTESMVGGPGLEPGWVTPHAPQTCASASSASRPAGYLVIPWHLPAKGLEPLTSWSEAMRSVH

SEQ ID NO: 2538 - protein, 589 aa, unidentified
  source 1..589: note = uncultivated organism
MKDIDERLNSKKAALYIRVSTHMQIDKDSLPLQENDLINYAKYALGIDRYTLFKDAGYSAKNTNRPDYQAMMTRLRTGEFSHLIVWKIDRISRNLIDFAEMYAELKRLGVTFVSKNEQFDTSTAMGEAMLKIILVFAELERNMTSERVTAIMLSRANSGQWNGGKIPFGYDYHKEDKTITVNAAEAASVLLLYSKYIETNSLLQVAKFMNDNHYGTRSGKPWNPTTVSHVIKSPWYVGKYLYNKHDLKPSGNISTKHLKKETEWILIENHHEPIVDEESWNKVTAMLKENRRSNKDVSRYYTRVNTHIFAGLLICGGCGSQMQSTLDRVRSDGYRPSIYLCSRHRRFNDCNNKYISDIVVGPFILNYIANIIKAQNNFGKSTDISTFEKKLLRGDVFKDVEHIERAGLIQMYQMIKDGKWQSETYTENAKATDFEKVANEQDILTTDKKKKERALARLNSLYLYNDDAIPEQEYLITRKGLEDDIERITQRLEEIEVNSSKNYTLSDDEFIQQASYFIMSQQLLTKRYIDFETLARKIDTKIIKNFVNSIIKKIVILDGKIVSISFKNGIKHDFLYFDSLVENKENEPK

SEQ ID NO: 2539 - protein, 511 aa, unidentified
  source 1..511: note = uncultivated organism
MRIATYTRISTDEVNQPYSLGAQSERLASYVASQEDWELVGTFTDQMSGAKLERPGLTSALRAAKAGRFDLLLVYRVDRLSRSVRGLAEVLETLDAAGVGFRSATEPFDTTSAAGRMMVQMLGVFAEFERATIIDRVIAGMERKASQGGWCGGHEPFGYRAVKGEGRLAVDESEAPLIPVIFDLYANKHLGSHAIANQLSAAGLSTRAGRPWQFKSILTVLRNRTYLGQVHFRGTWSNAGHPPLVEKSLFDAAQAILDERGEDVSKRAANSSDYLLTGLVICGGCGSRFTGTRATGRNATYRYYTCGGRQRYGTKTCSADRLPAGALDDAVVQSLLAAYEDTDLFANAVAEAHGRAQLGHARHEGELAVLDAELAKVNAGIDRYLRAFETGAMPEAICGERVKALGSQSTALRARREILSDEMDEADLTAPSLEELSALRDRVAEALASGDPAPVKTLLQALIHEIRVDSRQAIHPIFRVPLGGGHQQDDAVRAPSRSVGARGLEPPTSAV

SEQ ID NO: 2540 - protein, 533 aa, unidentified
  source 1..533: note = uncultivated organism
MKTDKEIKQVLCAIYTRVSTSEGLEQAFTSLDNQRESAENYIQSQKSEGWIALPQRYDDGGYTGANTDRPALQKLIADIKEGKINCVIVYKVDRLSRSLLDFSQLLEFFDQNNVTFVSTTQHFNTRTSMGRLTLNILSSFSQFEREIISERTRDKMGAAKKKGKWIGGKPPLGYDLDKVNHKLVINPQEARIVKEIFKLYLEKRSLLSVAMALNEKGYKTKIHTTLQGKKYGGISLKSTNIQLTLKNPFYIGKVSYHGELYPGEQERIISDELFQKAQAILVDNRRERRIAGTTKNIGLLSGLLRCKVCDASMYYAYSRKGKYKYHYYLCMNAQKRGYKNCPTRLVNAQTIENKIISYLRKAVPNDKLKEESWITLSLQDQIKLLKSLVRQISYDAKEGLLEIDLHNDKCLKFELKLEELKHIPPHKKDIEVTQEPAVRQNLILAHQIAEVMYEKSYSLHQISKWVGIAHPRLCQIASMINVSPKIQEEILFSQDKRLYRIPEYRLRDILSETDWHKQQEIWNVLLKSSDKRV

SEQ ID NO: 2541 - protein, 516 aa, unidentified
  source 1..516: note = uncultivated organism
MSEAGRVLRCAIYTRKSTEEGLEQNFNSLQAQREAAEAYIQSQRQAGWVALPEQYDDGGCTGANLERPALQRLLAAVRAGAVDCVVVYKVDRLSRSLLAFSRLMAMFERHGVSFVSVTQEFNTTSSMGRLTLNILLSFAQFEKEIISERTRDKLGAARRKGKWIGGIPILGYDVDVGGGRLVVNAAEAERVREIFAIAAGADSLQATQQEIERREWKTKEWTTRKGRRHAGKPFCKTTLRALLGNVLYIGSIRHKGTIYPGEQAAIVEPEVWERVNRQLEIRGRSQTGGIHQRRQTLLRGCLYCSQCGAAMVVAASTRHGRHYSYYVCAKAKRGSCGQAPAATGDLETAVRRQVCPGVAHPDSLAEMQAMLRRVSYHSGTRQVTVETREGSRWEFRLEEANRPGVRGDRAEAAGRVPRISRLLALAIKLEGLVAGGQVRNQAQGARLGKISRARMSQILGLRNLAPAIQEKLLFLPQRGSGREQITEKRMRGIAQVVDWEEQAKLFGPLLAGEAGA

SEQ ID NO: 2542 - protein, 548 aa, unidentified
  source 1..548: note = uncultivated organism
MKAKDFYNVAVYLRLSKDDGEAGKAESNSITSQRDIIRSFIRKQDNMEIFDFYVDDGWSGANFDRPAFKRMMGDIEAGQIDCVIVKDLSRLGRDYIGSGRLIQNTFPEHEVRFIAINDNYDSLTADFNEEALVLPVKNFINDAYCRDISVKVKSQQKMKRESGQYIGAFAMYGYVKDPDNKNHLIIDKYAAGIVESIFEWKVDGYSFEAIADRLNGRGVLSPMEYKKANGEKFSTGFRTKARSKWSAQAVRRILMDETYIGTLVQGKSERVNYKVKKSVVKPSEEWVRIPDAHEPIIAKDLFEMVQQLLKTDCRSSSGKSTSHLYSGLLFCGDCGEQMTRRVNRYKGREKVYFICSNYNKHKKCSRHSIRKEDLDKLVLYGMKNRIEKTLDQVEVISRVKDLDMRYDDIVAFDSEIVDLKAEQEKYKKLRAALYEDYKKGIISEEDFKTFSAIYEEKFSAIESDLEKQMSNLKDLFKDGLEAGMKLEKYKDALQVDELNRPTLVHLVEKILVYEDKKVQVVLRNQNQFIKVAMLCEFLKQSGTEGKVV

SEQ ID NO: 2543 - protein, 557 aa, unidentified
  source 1..557: note = uncultivated organism
MPQNEDVIALYSRKSKFTGKGESIGNQVELGKEYVRVHFGEAAVDKIVLYEDEGFSGGNLNRPAFKRMMDAARKRKFKAIIVYRLDRISRNVSDFSGLIEELARLDIAFISIKEQFDTSTPMGRAMMYIASVFSQLERETIAERIRDNMHELAKTGRWLGGTTPTGFASEAVKSVTVDGKTKKSCKLKLIPEEADIVRTIYELYQETDSLTITEARLMKHGIKTKKGNYFTRFSIKAILQNPVYMTADQDAYNFFADHHTDLFFPQRDFDGIHGIMAYNRTNQEKGHSTVYLPPKEWIVSVGKHPGLIPGKVWVSVQNSLERNKSKAFRKPRSNKALLTGLLYCSCGNRMYPKISSRKTAEGDAVYTYVCKMKERSQKSVCNNKNINGNLLDMAIIEQIKLLQDDEEHFTRQLEQSRNFYTGNSMDYEQQLSNLKKEKTDLEKKMESLVDSLTDMKGASSKAQVSNRIEKLSGECQNIEKRIQELTGLTSHHTLSNLEFDILRQLLTVFKDSIDEMSLEQKRAAVRIIIRKVIWDGVNTHMVLFGVSDNELGLEKVH

SEQ ID NO: 2544 - protein, 566 aa, unidentified
  source 1..566: note = uncultivated organism
MYKRTGKSVKPTNKNVDTIPSSGKRKQLSVAGYCRVSTKDESQETSIENQRIHYQHYIESNPDWKLAGIYWETGVSGTSAEARPELQRLLADCRAGRVDMVVTKSISRFSRNTTDCLALVRELSALGVTLFFEKENLRTDERGSEFFLSILAALSQEESRSISGNMKWAIRKRFRDGTYKGGKAPYGYRKTADSRYMIEPEEAAVVRRIFSALCGGMSSAAVAKRLNDSGIPTWSATHGQGDAAWSGNRIRQIAKNRFYVGDAIYQKTYTDDCYHQHPNHGELDIYLSENAHPAIVDRDTFAEVNAAIERNAEKYGRAKAGNRRANRYCSSGKFFCGVCGGKMYRSGGHRRDYICQAHARGGQCPMPQVPEKDILNAFVTLLNKLVFALRRGLPFPATEEADRNELQRIDDALSENQRRWDALYDRIQAQQHTPALLEERAALEHEARLLLDRRDRLSFTDGTEELCRRVEHRDILPAAEPSDEEIFRSFVTSVIVRKGEWVEFRFTCGLCLRESLRRPAKNKALPIYTEFILAPGENEDSFAAGEVDAAVFYDRIVPLRQDEKNK

SEQ ID NO: 2545 - protein, 580 aa, unidentified
  source 1..580: note = uncultivated organism
MYISSEQQVFAIYSRKSKFTGKGESIENQIEMCRQYIARCFGQEQADSALVYEDEGFSGGSTKRPNFQRMMKDVHEGKIQTIVCYRLDRLTRNTKDCFEFVEELERYGATFISIKENFDLTTPTGRLMFTFVAALAQMERETIADRIRDNLQELAKTGRWLGGITPLGYESEGSEYWKVDGKKRKTFHLKLIPEEAQLVRIIFSKFLELKSLTKLETYLLNQDYKTRQDKHFSRFAIRELIMNPVYAKADEAMYQYLIDNEVHPFSAHETFDGTHGIMAYNRTEQTKSSTTRKKPIEEWVVSVGEHEGIIVGEDWVAAQGLLDENKGKSYRWRAGQTNEALLSGLLRCRCGHCMRPKVTSRTTGDGERYFRYLCELKEKSRRHKCDNKDINGNQLDRAVCFEIKKLAEDKSELNRRLAAGKRAFEEKSGQLTTELERLKKAQRENQKEIDALVSSLAKMAGTPGEQSILDGINQRSERGEGIQGDIRKLEQILREQNLQIQSFERLRDTLKSFASTMDGMTVEQKRLALRVIVKSVVWDGEKVHIYLFGDDTPHGDDIDLPPLPDDGPDGLDGPSCEDSK

SEQ ID NO: 2546 - protein, 579 aa, unidentified
  source 1..579: note = uncultivated organism
MRTEKEQQVFAIYSRKSKFTGKGESIENQIEMCRQYISRCFGQEQADGALVYEDEGFSGGSTKRPNFQRMMKDVHSGKIQTIVCYRLDRLTRNTKDCFEFVEELEHYGVAFISIKENFDLTTPTGRLMFTFVAALTQMERETIADRIRDNLQELAKTGRWLGGNTPLGYESEGTEYCKVDGKKRKTFHLKLIPEEAQLVQMIFSKFLEVKSLTKLETYLLNQDYKTRKGKPFSRFAIREIIMNPVYARADEAMYQYLIANEVRPFSDQSAFDGTHGIMAYNRTEQTKGSTTRKKPMEEWVVSVGEHEGIISGEDWIAVQGLLDENRSKSYRWRAGQTNEALLSGLLHCRCGHCMRPKVTNRTTADGERQFRYLCELKEKSRRHKCDNKDINGNQLDRAVCFEIKKLSEDKSELTRRLAAGKKAFADESGQLTADLERLRKAQRENQKEINALVNSLAKMAGTPGEQSILDGINQRSERDRSIQENIRELEQIVQEQDLQAQSFEILRDTLKSFASTVDDMTVEQKRIALRVIVKDIVWDGEKVHIYLFGDEDPGGDGIDFPSLDDGSDDPDGPLCEDSK

SEQ ID NO: 2547 - protein, 523 aa, unidentified
  source 1..523: note = uncultivated organism
MSTTTKRPARTRGEATRPTSGAGPRSVRCAIYTRKSTEEGLNQEFNSLDAQRESAVAYVASQRNEGWTCVPDRYDDGGFTGGNIDRPALKRLMDDIEAGKVDCVIVYKVDRLSRSLMDFARLMELFDRKGVFFVSVTQQFNTTHSMGRLTLNILLSFAQFEREIISERTRDKIASARRKGKYQHGKPILGYDFVPAPAPYTGRRLVVNAAEAERVRRIFELYLEIESILRVADECNARGWTTKSWTTTSGRVVGNRPFDKSVISRLLRNPLYLGKVPHNGSVYDGEHEAIVDEDTFRRVQAQLKVAGQRGGASAKNPTGALLGGLVRCKGCGCAMSPSSASKKKADGTRTRYRYYVCTNAAKRGRHRCAAPSLPGPALEAFVAEQVKGVLASSPSARVIVDRAVELRREAAAARIAEQARLEATVQRLAGEEQTSATARDMERAKRTLAALSRQIAADRTRLIDEDEVAGAVECFDGVWSAMTQAERSEFMHVTLASVEYDGHTQNVSVTFSPEIGPEEHGHA

SEQ ID NO: 2548 - protein, 580 aa, unidentified
  source 1..580: note = uncultivated organism
MSRRRQGAASDRTRSRSFHCATYTRKSSDEGLEQSFNSLDAQRDACEAFILSQKHEGWLGLPDAYNDGGFSGGSMERPALRRLLESVRNGSVDVVVVYKVDRLTRSLSDFAKLTELFDQHGTSFVSVTQQFNTSTSMGRLTLNVLLSFAQFEREVAGERIRDKIALSKRRGMWMGGLPPLGYDGKEGKLIVNAVEAETVRLIFRRYLEAGSVAELKHRLDQDGIVSKRLVFADGKTAGGVPLSRGAIYQILRNRLYRGEIAHRGEVHQGNHQPIIDEELWDMVQARLTDQSQRARGSKAKPGSSPLLSGRVFDGDGKRMTPTYAIKGGRQYRYYVSASLVRGGSKETGIRVPAYDLESLVREAITDHLRDPLWIGQLLAKDRDARATKRFIEGAGELAQSIMHGSDGIRESAAYDVVRSLVNRVTVSKETVTITIDHVALSSVIAARGDDLTLTGDGTPVEIAVAARSLRCGKQVGLVAGNVTTERRSVDPKLVRLIADAHRWFEDLHTGRVATIAEIAARDGQQVSHVSRTLPLAFLAPDIVTLILEGRQAPTLTPDRLKVRRLPLPLEWLEQRALLLG

SEQ ID NO: 2549 - protein, 530 aa, unidentified
  source 1..530: note = uncultivated organism
MNKCEVIISGTQAIKRENFMRMINDAANGKIDLILTKSISRFARNTLDTLKYVRELKSHGVAIIFEEENINTLDMAGELLLTVLSSVAQQESETISSHIKLGLKMKKERGELVGFSSCYGLHYDSKTHKMSVIEEEAKIVKFIFEQYLKGYGCSMISQMLTNMNIISPGGHSSWSPTTIVQILRQEKYVGDVIQGKTYTVDSITHKREINNGEEDKYIIKDHHEPIVSREVFEEAQMILSNRSISIMTGRKRISAQSFTGRMRCGLCGNTYTRRKGHTCIHWACTTCVKGNKVLCPNSKILPDEIIRNTFMESYYLLTANDGLALDEFMDTIKGIIKNTAPDVMSARYEDERKKHKAKLTKLVDLYVDGDVDRVVYEKKRKNLEYKINELTEKIDTLAKYTNNDSKIEINLNKIRNSLKAREASNHIEEFDKIIFDSLVDYVIIGSLDENNEPNGFVIRYICKTGIYNKSRTDISETMILENGLNNTEGNIYVPILDFLSNQKFFTYEFVNGKRAKKFIDKIRVRVEIEK

SEQ ID NO: 2550 - protein, 505 aa, unidentified
  source 1..505: note = uncultivated organism
MNSAVIYARYSSDRQTEQSIEGQLSVCNDYAKRNDIVITGMYIDRALTGRSDDRPEFQRMIKESKSHGFDIVLVYKFDRFSRDRYDSLYYERELKKNGVKIISATEAISDDPQGILLKSIIDGYSEYYSAELAQKVKRGNAESRKKGLFTGGRCVFGYKIINQRYVVDEFEASIVRRVFNEFVSGKRMKDIRDDLNKENIITSTGTFKPNRIPRMLKETKYIGKCIIAGSEYLNMCPPIINVETFEKAQVMIEKGKHKNAKEKAITTYYLSGKLFCDCCGSAMDGVSGTSKNGKKHFYYKCFKKTRDTHSCSTKPIPKELIEKFVFDSIIEKLNDEKVFEMIAVKTAEAINKEVQDDLQSKALAKEIKSIEKKLDNFTNAIANGIYNANTQKAMLELIERKEKIQTELAILDLKKQNKTSPEKVMKYLEKFKKLDYNNPANIKVLFNSILKQVIITEDRHIIIICNNTDPINKKSEQLNKVFAFESNGDLYGVRTHKCMRERHVC

SEQ ID NO: 2551 - protein, 561 aa, unidentified
  source 1..561: note = uncultivated organism
MQQAKPRSRRCAIYTRKSSEEGLEQDFNSLHAQREASEAFIQSQALEGWKLIKTAYDDGGVSGGTMERPALKRLLVDIGDGLIDVVVVYKVDRLTRSLADFAKMVELFDAHGVSFVAVTQQFNTTTSMGRLTLNVLLSFAQFEREVTGERIRDKIAASKRKGIWMGGVPPLGYDVKERQLVINRVEADVVKLIYDRYLKLGCVRQLSKELERRGIVSKLRVSHKGIRSGGCRFSRGALYQLLGNPIYIGEIRHKQERHPGQHEAILSSELWERVQERLNQKAARDRGTSNRSISSPLAGKVFDAAGQPLYVQGATKSGRRYRYYVSKCLVNGGASDNSLGWRLSAPELERVVAIVARHILSDRAGLLLELEKSEIDSPDVRAALESASRLHDRLQNDWDAAACLVGLVGRVELSDDGISLTLGIEIPFSRAGVRTSSILNLSRFVPLKMKRRGVETRIIMAPGDELSRKVDPALLKAIARSRAWFEELASGRVRSLADIGRREGITTRYVERLSRLAFVAPTIVEAISVGRQPAELSTETLLNRIDLPIQWPTQLTALGIN

SEQ ID NO: 2552 - protein, 517 aa, unidentified
  source 1..517: note = uncultivated organism
MTAIYARQSVDKADSISVELQIETCRARLAPEEASETYTDKGFSGKNTDRPAFQRLLADVKAGRVKKILAYRLDRISRSVHDFTGLCQTLSDHGVQFQSCTDGITLDDSLSGTVMAQILMVFAQFERDTIQRRVTDSYFGRAKTGMYLGGRPPFGFDKGETVHAGHRTACYVPHPAQAGRVQWMYETYVREGQSLGTLARRLNTLDVPTRTGGAWSTLPLGRLLRNPAFVRADAAVFRYLRGKGATMNDPIEAYTGAHGCYCYAPRASASRGANPRKFSDLARSFITLAPHEGLVDAALWLEAQHKLDRNKALKNSSAGTHSWLSGLMKCAKCGYAITVVPRPGGGHYINCGGRKQGVCPGRSRTMTLEEIEAAAEPYVLDFLARLRDATACEKRPPSAEANRLEIEITAREIELDRLTRNLALVDEADVVRLLAGQIHEAGQTLGALRRRRDAMLYADAGPDPNALFAAVPDEWPGYSVAEKKQIAHVILARVMVSEHALELTFWGDPQDAPIFCG

SEQ ID NO: 2553 - protein, 527 aa, unidentified
  source 1..527: note = uncultivated organism
MSCTDKVAIYARVSTDEQAKKMASIPNQIESLEKYCANQGLEIYGRYKDEGWSGATLDRPELQRLLSDARDNKFKMVLVHRTDRLARSIPLTVSLVLQTFDKMNISFVSITEPYDTSTPGGRMFFVQLASFADFERELIRERMTEGRLRKARSGKWVAATAHYAYDVDKNQNLVLNPERAKIFRQIIAWTLEGKSGRWIEGKLNSMGIPPYSDVKGFKRKHSYHKWHQSNIRDMVLNPIIIGQADFAGIKISAPPIITEEQFNWIKRQYVKNKANARRNTHHFYLLRGILFCKRCGSLLWGRKKTRIRGSGLVYKFSQYYCPRASSHSPCGMRPINIPLVEDRVWELAQNLVMDSKKLTDAVKARNMDLFANKLVTEDRLAEYDKSIKSLKAELDRLLSLYSQGQIFTVEELDAKARKVKAEIADINIARDSLLKTEERLSEQRSHLNNAMEYFKSIRTRLAAFSQEERRKLVERLFPVIKVEWDETKKVHTLDIEGDISIFPPSNVELSGGSPAVNDAHRKRSGGR

SEQ ID NO: 2554 - protein, 589 aa, unidentified
  source 1..589: note = uncultivated organism
MHSTTKDNIINCAVYTRVSVDERAETQTYSTLDNQRDSCLAYIESQKSVGWKPFKVYEDAGQSGGSLSRPAMKQLIEDIKRKRVQVVVVYKIDRLTRNHKDFYSLLEIFNEHDVKFVSTTQHFDTTSPAGRLLLHIMLEFAQFEREMSQERTYDKRFAMAKRGMWCGGFVPLGYDVKKKKLVINKEEAKIVQFCFELYPKLASMGKVAEKLNEMGYRTKKFHLRGKSAAGSTKFDKKKISNILTNNFYIGKVRFKDKDGKQYIFDGEHKPIITDPKLWDSVQNILVNNRETHKTFKQNKYEMLFLGLMRCGTCGSIMTNSSKEKRRKLYLYYRCTAAVIKGKPACPVRTVAADELEEFLIDKFKELGKNQKLLTKSIEKSNVLAKQGLEPLRRSKERTESQLAKINQELKQLVDILKTPDLDKKRARSIVKEISDLEGSKEKLEDEIHRIETNMQHLSQHVIDADTFIRLFREFPKVFETFSFDEKRNLILLLVKEVIYTPTKVTVQFWGDIPEMNFDLKNPPDWTPPPPDDGDTPYTPKGSGGSGIEAPMRTKNLVRMGVLNGSPARTRTWDTVVNSHLLYQLSYQGM

SEQ ID NO: 2555 - protein, 543 aa, unidentified
  source 1..543: note = uncultivated organism
MKQKHYIAGLYYRLSQEDERQGESVSIDNQRTILRKYAEERGFEIHDEYIDDGVSGTTFQRPEVQRLLDDAKTGVINTIIVKDLSRFGRNYIEVGQYVDYVFPAFGIRFIAIQDNVDTENRDSGAMEMMPIMNVFNEWHAANTSKKIRAVKRTHALEGKFSGSRTPYGYLKGTDEKRTFVIDEETAPVVKRIFEMYASGISPQRIAEIFNEEDIPSAGRIAFLRSGRKYNNNEHPYWEQATIRPILKNIAYLGHLAQQKFTTISYKNQKAIQKDPSDWVIVYNTHPPIISQELWDRVQERMKSQAKGRKMHTGITHPLSGFLYCADCGGKLKMGYAWDKRKNDYRYNFDCGRLKRYGKSYCFSHHIQAHILEKIVLDDIRDMAKMIVLDEDSIHEEFVRHNAELRDQSAKSVKKQLQVKRRRTEELSRLMQTAYEDRVNGKMPEDICLNFIQKYSEEQKTLATEITELEEKLNEAENVRQSADEFIQNVKKYLNAPELTREMCYELIDRIIVGGLPKVTGKEREIVIVYKVDIASVLRHKFDK

SEQ ID NO: 2556 - protein, 508 aa, unidentified
  source 1..508: note = uncultivated organism
MLVLYARKSVERENSISCETQIEYCKMMIRPEERDEKVVTFIDNGFSGGNVDRDGFQKMMRLVRQGKVSKVIVYKLDRISRSLSDFMNILQEFKEHKVEFVSSQESFDTSSPYGDLIVKILMVFAEFERTSIINRVTQAYAHRSEMGFYMGGRRPYGFELMPATIHNVKTKKLNPIPAEAEQVRYLFEVYAQKSVSLRRLLDILVAEGKQPLDGSHWTTAKLSTLLKNPIYVKADSDIYDYYDRHGTQIVTDVSQFTGDCGAQLYGHTKHDPGAPDWSDMRLVLLTHPGIVDSDIWLKCQRKLEKNRQITNSYSNPTSWLAGKVVCELCGHTMTTIKGKANQNGEMRRYFNCTGKSHKRICTGPKATIYAEDLENMVYDCIAEKLSGLKTAKRSVRKGNSGELNDLKLKVKAIEQSEQQLLDTILAGGFNDDLLTIANQKATQLKRDRLALYERMEDLKSRENETDAVVNLAKSWKTADYQQKKSVAMLLIHKILICEDGSTKIVWNL

SEQ ID NO: 2557 - protein, 507 aa, unidentified
  source 1..507: note = uncultivated organism
MAETQFKNCAIYTRVSTDMQAEKEFSSCEAQEQKIKYFVESQNGFRVFKVYSDGGYTGANINRPALQELLNDIQQKKIDIVLAYKIDRLTRSPKDFYQLIEIFDKYSVSFISITERFDTSTPSGRLLRNIMLTFAQFERELTSERTRDKMAERAKKGLYNGGYSPLGYDRKNKKLFVNKKEAGQVRLIFEKYIETGSLAKVYDYLKQNNIKNKYGTPYYKSTIAYLLRNVLYIGRIKHRGNIYQGIHEPIISEDVFNLAQQIHSEKPRRFKIFKNHIFGGLIKCGDCGSIMTPTFSNKRNNGKLRRYHYYRCTSTVQKDWKSCSIRQVSAERLENYILESLERISKDKNYIENLVFRLNNDRNSGPCLGFELTDTGLKITAENIIFTLQSFLSGIAKRKEFEKNLFVKRFFKGVSYSKEEIILSLFCLQNNAQSDLPAEMPSRRLATRSAARVENEKTGLNPLPAEELVRDYAVSCGTWIRTMINGFRVRRPTVRRSRIINQKPTFP

SEQ ID NO: 2558 - protein, 516 aa, unidentified
  source 1..516: note = uncultivated organism
MAANTIKPVRCAIYTRKSTEHGLELEFNSLDAQRDACEAYIKSQASQGWKALPQHYDDPAYSGGNLDRPALQQLLKDIDAGRVDVIVVYKIDRLTRSLADFAKLVEAFDAKSISFVAVTQQFNTTTSMGRLTLNVLLSFAQFERELSSERVRDKVAASRRKGKWTGGTVPLGYDAKHKKLVINKAEAETVRYVFQRYLELQSFGKLVEDLDRRGIVTKRRDTKVRKYNGGIPFTYGPLAYFLKNRLYIGETGHKAKWFPGEHAAIVDKKTFEQVQQLLASKSAGRKAHRTASEALLMGKLYDDRGNRMSPSFSAKNGIRYRFYISSALLRGQKAQAGSVGRVSATEIESAVLAALQPHQEQAAFENEPDRIKMVERVVVSRDQLMMTIAGSGGASDVDGTTADIRIAWSTKAKDSGAAVESDGPPESASNEGLIQSVVRAHVWEQSLRDRVYESVEMLAEAIRLHPKVVRQALRLAFLSPDVTSAILESRRPAALSLAQIPKLLPLSWTDHRRLLG

SEQ ID NO: 2559 - protein, 569 aa, unidentified
  source 1..569: note = uncultivated organism
MVKSLRCAIYTRKSSEEGLDQAFNSLDAQREACEAYVQSQVGEGWKTIRVAYDDGGFSGGSMARPALRRLLDDINHGQVDVVVVYKVDRLTRSLADFAKIVEAFDARGVSFVSVTQAFNTTSSMGRLTLNVLLSFAQFEREVTGERIRDKIAASKAKGMWMGGVLPLGYDLPTDATTRALVVNPIEAEVVRRIFQLYLDLGSVHRLRDQLEADGVCSKARVTTKGQSKGGLPFGRGALFHLLQNRLYRGEIVHKGVSYPGQHLAIVDQDLFDKVQALLASHRTTRAHRPTRAATSPLTGLLFDSAGRQMTPAFAYGRSCRPYRYYVMADVQQGALATLGADANLRRIPAIPIEELVLDRLRRLAGGAALLSDYEAARSYLRRVEVRTGAVHVLFDASLIAIDRHDLKSGLARAKALIAGSDIAPCDGAHSDTLEMDPMTGLVRLIAQAAVKPRGGRFWMVGPDGADAVKRVRRDPALIKTLRRAHEILAATGAPHGADVQALQSSMSITDSFERRLVELAFLAPDIQRAILEGRQPAGLTMRQIIDVGVPLGWSQQRELFGFARADGIS

SEQ ID NO: 2560 - protein, 605 aa, unidentified
  source 1..605: note = uncultivated organism
MKEERKIAGIYIRVSTEDQAREGFSLGEQEEKLKQLCDYKGYEVYKVYCDAGISAKDMEHRPKFQEMLKDMQDGKINYIVAYKLDRVTRSVRDLEELITQLEKYNTYLVCDRDDVNTSTANGRFFVRMLTVLSQLEIEIVSERTKFGMVGAIKSGHIPGIKPLGYKNDSTRKTIIDPTTAPIIKRVFDLYLQGKTYLQIAKIFNEEKILNKKWRDTYIEKIINNKIYMGDWEQYKAIGKKEGLEPIIYMNVVEPIVPRYIWEECQAQKIINQRTYTRTRVYTFFQKIKCPHCGKIMKCKGAGGKKKRYIYYNCEKCHENFRESYIEEEFERIVGQLLRFDNEYNELFLPLFADKEIRIDKSDIEKEIIKLTKQKERIKKAYMSEIVELDDFKEDLKMINDKLDILSKQLEREQELNNKNNFTPEKVMAKRDIQRIFMKNGSDVSLFLDEWKVMPKESKQEFIAKYIESLTFEKNKDYPHGIHLIDIKLKSLFNEKVDRLSELGLSQVPVEFISNDKSVILNVSYPLKESQVKEYMKEFKDIKGVKLHIHPTFNYSFEDMPNEIIFDLDKNEKILKLIPIIKDIDNPENISNKFKLGIVTSTIKTI

SEQ ID NO: 2561 - protein, 502 aa, unidentified
  source 1..502: note = uncultivated organism
MKKVCAIYTRKSTDERLDMEFNTLDAQREGCEAYVLSQKSEGWVSSSEPYDDGGFSGGSLERPALNRLMDDIKAGKINVIVVYKIDRLTRSLTDFSRLVEVFDEYGVTFVSITQSFNTTTSMGRLTLNVLLSFAQFEREVSGERIRDKIAASKAKGMWQGGRAPFGFDIENRRLITNEEDAPQAKAIFDLYLELGCVSRLKVELEHRGIKSRPRVSQRGVAYGGQYFGRGALYGLLQNPVYIGKISHKGTIHEGLHDAIIPLELWDAVQDRLLNQAPHKRGLEKQTHKNLLTGLIFDEYGNPYTPVFTNKKNKKYRYYFNPVLAKDKLHPNKARSRFPAHEIETMVEKFVRGEVARLSGVEKGAAFEYLLKHQGAVPAYDLMRNCVERITVKFDCLSVKFKSKNFAKLVEKHLRVSVTGCADGYEITVPFQIKRGRDVAMVVPSQSVDAFDLPPERLKHLVQGVVWRDEHFAGAYIKDIAKRESCSDRYVRDRIMSSFEDLS

SEQ ID NO: 2562 - protein, 524 aa, unidentified
  source 1..524: note = uncultivated organism
MTRKRCAIYTRKSTEEGLEQAFNSLDAQREACAAFILSQAHEGWELVGEHYDDGGWSGGNMDRPALKQLLADISAGKVDVIVVYKVDRLTRSLADFARIVDTLDNAGASFVSVTQAFNTTNSMGRLTLNVLLSFAQFEREVTSERIKDKIAASKKKGMWMGGPVPLGYRLGDRKLLIDEAEAQIVRSIFRRYVELRSVTKLADALAHEGVRTKVRQYSNGRTVGGIHFGRGSLSQLLQNPIYTGRVNHRGDLHQGEHDAIVNVEDWAEVQRILDANRHEWKLGKRAKYPSLLTGMISDPDGRPMSPVSTHKGSRRHHYYVTRLKPGQNNALAWRVTAGEIDRAVITGICDWLRSNERFLDRDQLLSARELADDLPGFSVPEQCKLLGEIDLKVRLGETDIRLIVGQQDWPSISLPSRMVHRGTELKHVLDNGVPQRDPDPILLKLIALAMSARKAIFSNTADPLTSHYSKRHLWQLLRISFLAPDIIAAIVEGRQPVSLTGRRLLRVTDLPFEWAGQRRLLGFN

SEQ ID NO: 2563 - protein, 566 aa, unidentified
  source 1..566: note = uncultivated organism
MNATKTVRAAIYVRKSNAQGLEIDYNSLDAQTDACRAYIIAQAPNGWVEYPKVFSDGGFSGGTLERPALKEMMAKIEQDEIDVVVIYKIDRLVRSIVGFVHLQEIFEKHSVSFVSITQQIDTSTAAGRAMLSLLVSFGQFEREMCSDRIKDKVRAAMARGIFCGGIPPFGYKSQDGKLVPDPETADVAKSVFETFIRLKSPLATAREMNERGLRLRGNRWQSHNVHRILLNPRYAGDVRIGDKVVRGQHEPLVTRETFESAKAILESLKKPRQQRTGEPTNALLEKLIFCGECNCAMSYRWTLRRHGDRRKEYGYYVCRHTFTYGTSSCQVKTVPAAVVETEVERAVERIFRSSLEFVAVAARKAEIPQTMILGGIRADGVLWGEIGGDGRRRLVRTVVERVTVRQNSLEIVFNTRDLGRRVSALADIGIVQADGTLLVRIPVVIKVISGNKRIMRTEANATLQTSATAALTVAQNPLLRTLARGYAWLQMIDRGEVKTVSELATKTGVDPHFVRHTLRHPLLSPKIQRAIINGTESEKLTLTALRTLETDVWEEQERLFGFADAQ

SEQ ID NO: 2564 - protein, 528 aa, unidentified
  source 1..528: note = uncultivated organism
MAKTITVLPATKKLYSKETVDRIKKRRVAAYARVSTDSEEQLTSYEAQVDYYTKLIQRNDDWEFVGVYTDEGISATNTKYRDGFNRMVQDAMDGKIDLIITKSVSRFARNTVDSLVTVRELKANNVEVYFEKENIYTFDGKGELLITIMSSLAQEESRSISENVTWGCRKRFADGKVSMPYSAFLGYEKGEDGQPRIVESEAKVVRLIYKMFLEGKTPTYIAKYLTAEGIPTPTGRNKWSVTTIESILSNEKYKGSALLQKTFTVDFLSKKKKVNEGEIPQYYVEDSHPAIISKEVYDLAQIELEKRRQNKGYKSSASAFSGKLYCGECGSVYGSKVWHSNSKYRRTIWQCNAKFKNEHKCQTPHLTEDMLKSAYIDVFNSLIDNREEIISFIEQTVERLMDTTAIDKRMFIAKGEMESKLNAAQEYMALNGKVVIDQNEYNEKFDKLMEIYQAAEDEYTQIKREKTELMDRCKRCKAFIKTLDSSSVLQEFDEGLFCGTVEKITVYENRLEFEFKDGTIFPYSLTNK

SEQ ID NO: 2565 - protein, 534 aa, unidentified
  source 1..534: note = uncultivated organism
MKNILFNVAEYIRLSREDGDKAESDSIGNQKKLITDYLKDKDDFVLYDTYIDDGFTGTNFNRPSFKRMIADIEAGKVNCVIVKDLSRFGRDYIDTGKYLERYFPDHEVRFISITDHIDSMKQAYDMLLPIKNIFNEQYARDISKKVHASMKTKQRAGEFIGAFASYGYKKSPADKNKLVIDEYAAGVIRKIFKLYIAGNGKIRIASILNEEGIVCPSEYKKLNGDHYRNSNRLDSTSYWTYSTVNRILQNEMYIGNMVQNKKSQRMRGKSKAQDKEDWIIVKGTHEAIIDNETWNKVQDLLKRSTRNPNLNSNMSIFAGFLKCGDCGRALTKKIGSKNNGGTVNYYCGTYVRSGRQYCTPHPIPHLVLEKIILEDLEAIMLNIDNMREVIEQNQEAAVTVKRVNENEKTRLTAELEKVRKLKKAVYEDYRSELISKDEFATYRQDYRKKEELLEKQLESIDNRQDEATPDIFDSPWIKRLLELRTIEKLDREIVVEMIHEITVYENHKIKITYNFSGEFETLFKTVYTDTENIG

SEQ ID NO: 2566 - protein, 558 aa, unidentified
  source 1..558: note = uncultivated organism
MFIKGVIDLKIAIYSRKSVFSEKGDSIENQIELCKNYCKNHLDIKNSEFYIYEDEGFSGKNINRPQFKKLIDDIKNNKIDILICYRLDRISRNVADFSSTLDLLQEYNVNFISIKEQFDTSSPMGRAMIYIASVFAQLERETIAERVKDNMLQLAKVGKWSGGQLPLGFISEKVTYTNEEMKNKSFSKLIPVKDELEIVKFIYTNYIQKGSIHNLVKELNNIGYKTKTGSNFELSGVKRILKNSLYVKSDESTHSYLKSKNYNVYGNPNGNGYLTYNKKTDKDNIIIAVASHKGIISSEDWLYVQKKFDENKEKVESISNRTGTGSNETLFSGLLKCGNCGSNMVIKYNTKNKDGKNYIYYTCSSKNKSFSKTKCDTPNLRAELVDSQLIRKIKTYNKDVILNVYNSKLNILLNSSNKNLLTSLNNQLSEKTNQIHNLIKEISLANEETLKELLRNEINNINSEINDIKSKINNTELIQNDIKNTIDNIKLLIKSFINFDKYFFDNDDINIKRNLLKNIIEEITFDYQNKNFNVKFFYIDNMYLDSTCESLDCYLYPS

SEQ ID NO: 2567 - protein, 587 aa, unidentified
  source 1..587: note = uncultivated organism
MRKKQRPNGGAVRSAAKAVHRCAIYTRKSSEEGLEQEFNSLDAQREACEAFILSQKQAGWVAVPDMYDDGGVSGGTLERPALQRLLGDIEAGRVDTVVVYKVDRLTRSLADFAKIVEAFDARGVAFVSVTQQFNTTSSMGRLTLNMLLSFAQFEREVTGERIRDKIAASKQKGMWMGGLPPLGYDIADRKLVINAVEAATVRHIFQRYVALRSVRALRDELEEAGVVSKARVDRFGHAGGARPIARGALYHMLQNRLYRGEIVHKEAAYAGQHAMIIEADLWDAVQAALVGNRVDRARGGEATATAPSLLTGLVYDGAGERMSPTHANKKGTRYRYYVSQSLIKNRRSKASADACRVPAADLEGIVEGRLCTLLQDEAAIYDGAGAALTNMRDRKTLLDDAADLARRWPAMPAAAKRGMLQALITRITVRSDVVEVEMRLAALPDILATGPDQPQMPSVTEHSPTVIFSTAARFKRTGMETRLLVQGPSGSPHRAPDRSLLRLLAQARQFRELVMGGQGRMMRDLAAEAGVNASYFTRVFRLGFMAPEIIQVILHGRQPAELTANKLKLAGSLAPAWSEQRRQFGLS

SEQ ID NO: 2568 - protein, 598 aa, unidentified
  source 1..598: note = uncultivated organism
MKNENGVIAIYSRKSKYTGKGESIGNQVELCREYIRLHFSDRDAEQAIVFEDEGFSGGNMNRPAFQRMMEQIEKGEIKALVVYRLDRVSRNVSDFSGMIENLKHKDITFVSIREQFDTSSPMGRAMMYIASVFSQLERETIAERIRDNMHELAKTGRWLGGNTPTGYQSESVKSVTVDGKAKKACKLKLFPEEAEIVKTIFDLFSQTGSLTMTEAELLKRRMMTKNGKQFTRFSIKTILMNPVYMIADEDAYRYFQRKDADLFSSREEFDGIHGLMAYNRTDQVKGKPTVYKPVSEWIVSVGKHPGIIPGKLWVAVQDNLEQNKSKSYRRPRKNTALLTGLLFCACGHRMYPRLSKRTIADGDIIYTYVCRMKERSKKEFCKRRNANGNTLDTAVVEQLKRIADEQSDFVQQLEKSKMFYSGNREQYEQRLSAMRKERADLEKKVSSLVDTLADTEESAVKRSILTRMEEINAEIGNLSESIDEMVSIAAEHALSDIEFDVMRQLLATIRNGFDDMTYEQKRAAIRTIVRRIIWDGENAHIVLFGAQDGEIEYPDISSLTENSVAETEEDEDLVPFGDENEDEDGELEPKTHLREDSK

SEQ ID NO: 2569 - protein, 559 aa, unidentified
  source 1..559: note = uncultivated organism
MARTKNRETNTAVSQFSYNPTRWNLAKYIRLSKEDLNRGKDDSNSVTNQKKLLDDYYRQHLDEFESAETYVDDGCTGTDTNRADFQRLLADIYAKKVNCVIVKDLSRLSRNYTDAGSLIENLFVQMNVRFISLAEGVDSYLNPDSVSSILVPITNVMNDQYCYQTSKKIRQVFDYKKRNGEFIGSYAPYGYIKDPNDKHALLVDHEAAEVVKQIFSMCLSGMTVRAIVNHLNDHGVMCPSVYKQSQGLKYKCPNGQTQPMWSTITISNMLKNPVYVGDMAQGRNRVKSYKIHKIEAVPEKDWIVVPNTHEPIIDREAFEKVKQLLKRDTRTSPKQKQLYLFSGFLRCADCGRAMSRIASKELYVYYQCGTYKSLSKKACTMHSIKSTRLEAAVLYAIRQQVHLAVSYSAIVSKINLAPLKKSQSIRLNELITAKEKELTKIMRYKQALYQDWKDGHITHNDYRHMSEDYEQQNEAIGTVIANLKKERDELENGIDTENPFLATFRKYENIDKLTREILIELVDHIKVYEGGDISIRFKFADELRRIIQYIEVNSHLQVG

SEQ ID NO: 2570 - protein, 512 aa, unidentified
  source 1..512: note = uncultivated organism
MPQVKVIPPILEQTKKLRVVAYARVSSDSADQLNSFATQVDYYTAYIQSKEEWEFAGLYADEAASGTTTQKRDDFQRLLADCRAGKIDRILVKSISRFARNTIDCIQTVRELKQLGITVEFEKENIDTGTMGSEMLLSILGAAAQEESLSISSNLKWSYRRRMKSGDFITSKELLGYDFKNNTLIPNPEEVPIVQYIFHSFLDGKGTEEIAAELSASDIKLAKRDSGKWHASMIQYILTNEKYVGDALVQKKFTPDELPFRKKRNHGEVSQYYIHNSHPAIISRETFEAVRDLLRWKNSRRTKGQIQKSPLSGLMKCGLCGSTFHKHASNGEKCWFCAQHIKDKDLCPMPILHENEVHTAFLTVYNKLLDHKDLILKPMLEQLLEVQSKTMFAKPETTELHNQIANLTRQNHSLARLQAKGCVDPALFLEKCNRINRQIEELRQKLRESQRPDSIRVAADRTKRLLELLEKTGPMPIFQPAIFQDMVQKITVYPQKYCFHLVNGLVLEERRD

SEQ ID NO: 2571 - protein, 540 aa, unidentified
  source 1..540: note = uncultivated organism
MLRINNYKVAKYMRLSRDDGDDRESESIENQRDILDSYINEHEELEDAGEYVDDGYTGTNFNRPGFKKMLQDIESGKINCIITKDLSRFGRDHIDTGYYLERYLPTNSIRYIAIGDNVDTLSPDGLQFLTFKLSFNDYYAQDISNKIKSVKNRKIEKGEFQGGIAPYGYKKDKNIKNHLVIDEFASEIVKEIFDMYVNKGMSTIKIADNLNERGIEAPAVYLKIPVCMKRESKNPQGYIWQSPQIVKMLKNEVYIGNVVGRKFQKISHKVEKVRATQKDEYVIVKNMHEPIIDELTWRKTQDRLNKHTRVKIRNNEEPIKEFVYCAECGGKATYRVRRKTRKSGYLWEQKTFICSNKNTHKKNCTCMPIDEQIIINKVKQAIKEEIEQINYSEDEIRNIYKKAEKKVQTKTNILKKKELTLQEKLNENEEQMTEVYQDKMQKLISADDFSIIYKKLQKEKNDLLAQLHQIETEILELQKENKEESYLEILNLAKRVLNLKDPSKEIYSKLIKKIEFNSNKEVTVTLTFGEVKIEEYKKAI

SEQ ID NO: 2572 - protein, 518 aa, unidentified
  source 1..518: note = uncultivated organism
MKITEITSEKNSEKIIRLAAYCRVSTDSDDQLHSFAAQVRYYESYADSRDEFELVDIYADEGLSGTDMKKRDEMNRMIRDCEKGKIDYIIVKSVSRFARNTQDLISTIRLLKSLNVTVFFEEQNIDTSKLNSEMFLTFPGMMAQQESESISGNVRWGIQKSMESGNYTPHTPPYGYDISDQKLVVNEQQARIIRRVFEMYLSGFGKQCIADTFNNEGIQSPGGNTKWYHTTISYILNNERYMGDALLQKRFRTNTLPYTRKMNRGELAKYYVEESNPAIVTKETYQFAQNLQKKREVHSGDKKHEHFLSHTLFCPECGRAFRRLVSRGIPYWVCSGANSYTNQCKPRRIREDVVYDTFSILIYKLKYNNKRILGEMIKQFQNMLSHNRDIQDVIGEIDHEIAKLCAQLQAIAKLHNAKILNSADYTAQSSVINQKITSLRIQRRKAISENEDDEILEQLRTLYRLIEECIPSSELDETLFKDIIERIIVVSSDNLEFHLIGDLYLTESTYTGMGCKIA

SEQ ID NO: 2573 - protein, 874 aa, unidentified
  source 1..874: note = uncultivated organism
MRIATYTRISTDEVNQPYSLGAQSERLGSYIASQEDWELVGTFTDQISGAKLERPGLKGVLRAAVARRFDLLLVYRVDRLSRSVRGLAEVLETLDSAGVGFRSATEPFDTTAPAGRMMVQMLGVFAEFERSTIIDRVIAGMERKAALGGWCGGHEPFGYRAVKGEGRLEPDEAESPLVPVIYDLYANKRLGSHAIANWLTDAGLVTRSGKAWSYKSVLTVLRNRTYLGQVHFRGTWSESSHPPLVEAGLFDAAQAILYERGEDTSKRATNSSEYLLTGLVVCGACGSRFTGTAATGRSATYRYYTCGGRQRYGTKTCSADRLPAEALDDAVLGSLLAAYDHVELFTTAVEEAQRRARLGQDRHQGELRALDAELARVDAGIDRYLRAFETGSMPETICGERVKALGAQATALRARREQLAEEMEDAELIAPAPEELAVLRQQVAEAVAKGSPGQVKALLQALIHEIRVDSRDAIHPTFRVPLGGDHHQDDAVRAPSRSVGVKGLEPSLGAVEAPCLCRLGYTPGERRVTAPRAPLSHPMVAPAPRCSRVDFGTVRGTQLSHPMVAPAPSCCARTFCTVGSTIEVVSSGPTSQDSARAALVPLPSLPVDDTVDGERRTDVDGWGRSERVRQVARALYTPMYRYWFRAEWEGLEHVPRTGGALLVANHAGAIPSDAPVIMHGIEEELGRPVYGMADFFFRTVPWVGTLWARAGGVTAHPDNALRLLRDQGQLSLVFPEGTKGPSKTYTDRYRLRRFGRGGFVEIAMRAGVPVVPIAVVGAEESMPIVTRLPSLARALRLPYLPITANMLVLGPLGVVTYFPAKFRLRVLEPVHFDVPPGQERYSKSRVMDEAESIRQRLQETLYDMLRERRSVWFG

SEQ ID NO: 2574 - protein, 559 aa, unidentified
  source 1..559: note = uncultivated organism
MMLRCAIYTRKSTDEGLEQEFNSLDAQREACEAYIKSQKHEGWKLLPQHYDDGGYSGGTMERPALKKLLQEIEAGRVDIVVVYKVDRLSRALSDFARMVELFDKNKVSFVSVTQPFNTTTSMGRLTLNVLLSFAQFEREVTAERIRDKIAASKKKGMWMGSPPPLGYDVQDKKLVINEAEAETVRTLFDLYLDLGSVRALKEEADRRGIRTKHRPNSKNPGNKPISRGNLYILLNNPLYISEIRHKSETYPGQHDAIIDRKTWIAVQDRLTDNAANRRRPTNAKSSHLLSGLLFDETGDRLVPTHTNKKGVRYHYYVSQRLTEKGRQKDDGWRVPARELETITIQAFKNYLADQQTVIDDLGLLKLSGNDQADMKRRAANLTVELDEAGKGDRAGVLGVMIKSISLGEDSLKVELHRSTLFSVLRGVTDNAVTAEETIFIAAPIQIGRRGVETKIVMCSSKEPSTEPDVHLVELIAKAHTWFEDLTSGKVSSIEEIFERESIDDSDASKIIRLAFIAPKAIEQFLEGKHCVDITAKKLMRNTTIAKSWQEQPFHIDDFC

SEQ ID NO: 2575 - protein, 511 aa, unidentified
  source 1..511: note = uncultivated organism
MERPGLKKMLEHIEMGLIDVVIVYKIDRLSRSMLDFLGMVKFFDEHNVSFVSVTQDFNTDNPMGRLMLNVLQSFAQFEREVTSERIRDKIAASKKRGMWMGGVVPLGYDATGRKLEINPDEAETVQYIFKRYIEIGSITKLMRDLQQKGFKTKSWVSATGKYYEPKDFSKSGLYRILGNPVYTGKIQHKAKGVIYDGQHQPIIDEEIWNKTQAILAKNTVEKIRVSDNADRPYLLKGLLRDPDGFSLTPSATRRGEKLYRYYVSLKAIKHGYDRCAIKTVSATMLEEIVLDTVKKLITCPEMRAQIGKICGAAVSAPEAKAAFDKFNVIWDELFPVEQARIVHLLIERIIIHPKLLQITFRPLGYMSLLHEIMPSLKEEVRKTATADVPVTLDIPVEFQRRAGRKHITAPDGKDLVRNGRLRYNGSLIKALVRAHEWQDMLDTGRFRTIAEIVEKEKLGDSYVRKIIRLTELAPDITAAIMNGEQPKTLTLSQLMEPLPTCWSGQRQMLNF

SEQ ID NO: 2576 - protein, 528 aa, unidentified
  source 1..528: note = uncultivated organism
MYETNLSLTAPPKITVIASRKQDVAKLRVAAYARVSSDSEDQQNSYIAQVDYYTKHIATHENWEMADIYADDGISGLVASKRDEFNRMIQDCRDGKIDRVIVKSISRFARNTKEYIQYVRELLRLGITIHFEKENIDTGKMTSEQVATIYGAFSQMESQNHSNNMRISVKIRMEKGDYLSPSTPYGYKLENRTLEIIPEEAEVVRHIYAAYLNGQGKDDIARELNKLDIPRTNGKELWHPSTVAYILTNISYTGDMVWQKSFATNEIPFRQVRNNGQKPKYFVEDCHEPIISKEDFERVQALLQSRRSQIKHSKSEGNTLLAKKILCGNCGSLFRKKIVNGKVYWTCHRHDRQKDFCGISQVPETEITASILRLYLKLKTHYREILSPILTQLTELREKELRSNRKINDIDKEIAQLTEQNLVLVRLKSKGYVDSALYLSQTGEIDFKLKELRRLRRRIMETTGEDQQARATEAMLDYLESGPEFLDELTDELFESLVESITVLSETELNIRLYNGLALKETIERTVR

SEQ ID NO: 2577 - protein, 562 aa, unidentified
  source 1..562: note = uncultivated organism
MAKRPPSEGAWSAGGPVRCAIYTRKSTEEGLEQEFNSLDAQHEACAAYIASQRHEGWTAVKERYDDGGFSGGNMERPGLKRLLADVAAGKVQVIVLYKIDRLTRSLSDFSRIVDVLEKAGASFVSVTQSFNTTTSMGRLMLNVLLSFAQFEREVTGERIRDKIAASKKKGMWMGGPAPLGYEVRDRKLVINEADAAIVRHVFQRYVALGSGQALLDELREQGYRTKQRPQTDGSVKGGIPFARGMMFHLLGNRVYIGETVHKGTAHPGEHQAIIDPELWEAVQQRIAANSVERKTRRNSRDVSLLAGIIVDGHGRRMSPSHAAKGGRRYRYYITHASAITDDEPAWRMPARDVEAAVVSRLTSMFRGRPTLRELVGAVDATALANVFTRAAGTTDRLDSSTYHRRTIVASIVRQVRLLEDEIVITLNGTTLATMLGAPINDAHQLVFTAPIARVRRGKEVKLVVTDGTAHDRNEQLIALLTEARVARERMLAAPELTIKDIASASGQCRKRLARLLGLAYLAPDIVAAIMQGEQPPTLSSRMLLTAKLPLVWDKQKTMLGFA

SEQ ID NO: 2578 - protein, 553 aa, unidentified
  source 1..553: note = uncultivated organism
MTKKNLSQKSDDKKVVAIYCRVSTYMQGAADFSSLDAQESQLKSFCEGKGWEIYHKIYKDTKTGSTLERDELQNLLRDAEDGKFNVVLATKLDRFSRSMRNFYELSERLEALGVDIVTATQNIDTTTSQGKFFRDIFLAFAEFERNIIAERTRESLYTRAKQGFWGGGHVPLGYDVVEKKLQVNELEKKVVNKIFNYYLLNPSTRTVAKIINEEGEKTKIRVSKKGIRTGGNPFVKQSIIDILKNKVYIGLIRVNDEYFKGIHESIVDEELFEKVQKRLKASSQDTNVVRRTTSPLTLLGLTKCGLCGNSLTSTSSKGGRHYYYKCSKKIHNTSDHCNAKDLPAKELENCVLQVMNFLIDDEGFFNAIFKQINNNSSDELTIINENLTTLISNKNRIQKKIDNLYNRMSEDEDFSNSNSYKDTINKLESEKMDLSKKIQHIEHQKENISGRTIDKNNLKILLADFLNIYDSMTIEGKKRFNHLFFVEIVSHFKSGDEDGVIEIKIRGDGKLEKKWSEIKNANYKTTVRTSNILGSASRTRTCNPSVNSRMLHH

SEQ ID NO: 2579 - protein, 588 aa, unidentified
  source 1..588: note = uncultivated organism
MSMSHKIGIYVRVSTEEQAQVIDGSIDNQQHRLKSFIDLKTLQEKNWGKLVDSYIDDGYSAKDTRRPAYQKMMKDLKAGKINLILVTDISRLSRSIPDFCILLKELEKQKSKFLSVKEQFDTSTPAGEMMIYNMINLAQFERKQTSERVSMNFHSRACRGLLNGSAAILGFDKDAQNCGKYIVNDNEAPWVRKIFEMYLELGSSYTVAKKLNAQNIKPKDASKKFAGSEEDHKWSANLVQNLLRHLAYIGKLEVNKKNKNEDQDTLKPWHRYQIVDASWPGIISEDTFYEVQTLLDETHHKDMARTENSDKRFFLLSGVIRCKECGKALIGESAHGKKQIHRYYSHKRIPGVEQNCSRKRVNADDIEAAVVNHLDKVLLKAGYLDLVEANIRNSLKVQKKDLLALKKSIDDQVQKLSLEIDNVFKIQISMNSDSAGSTLIREKLDELALRKKDLTKQKEKIAQDLELEKEITDAKSYIEDNAMMFNRGWKKSTPIVKRRLVQRLFNSMHLTPYGLETFYKLSESDVGIGTTLETQLAAGKKPAATKVGINASKFFNDGQFNMNLYAGSFRGGTGGGGGNRTRVRGLVQ

SEQ ID NO: 2580 - protein, 548 aa, unidentified
  source 1..548: note = uncultivated organism
MKKRCAIYSRVSTSMQNEAEYSSCDAQRDRIMSFIKSQEDLEFTKEYSDPAFSGKDLERPSLQQLFKDITQKKIDVVLTYKIDRFTRSLKDFYSVIEFFEKYNVSYISVTERFDTSSPSGRLLRNIMLTFAQFEREMGSERIKHKIEQMAIKGIWYGGRAPFGYKNEDKKLLIDKKTAPFVRLMFEEFIATGSIVAVMKRIKEENIMKVYNDTPYPLNSVFRILRNPVYIGKIKWNEKVFDGLHEPIISKEIFNEAQSLTTKKVRKKRLYKEFLLSGLVKCGSCESSMTNVFTNKIKRRYYYYKCNKVAKEGKNAVCSVREVNAEKIELFIIENLSRISQDRQYIDNLVFRLVHKIPHGSGIEPTEVSSEKLANRVQQVLMEFKNKMENSTQIEKCLAVKRVIRKIVFSKDTLEVFISIEDTTNDEILNLSGLGSGEGVARMRGVLPNSCAPVNDIEFAKQKREPTGDRTQDTCLKRAVLYRLSYRLSTFLILDEFFFFGGLGLIDQLDILIGQLLDFRLGLETLVLSDRLFFLDLLDAFVRLATNRP

SEQ ID NO: 2581 - protein, 911 aa, unidentified
  source 1..911: note = uncultivated organism
MPIATALPITVQQHRPSIVTTIPAAPRATEKLPACGYARVSRSWQEDSLENQTAHLEQIIRANPDLEFTTVYSDDLSGREASNRPGLQQMLADCRAGKVSIVYTKSVSRLARNVTDLLSIVHDLSDIGVPIVFEREGIKTDQMHSELFLSLMASFAAAESDSIKKNVTAGHRMRFKLGIHKAFQAPYGYDNVDGRLVVNPSEAEVVREIYSRFLAGEGGTRIAKDLQSRGVPTKKGGRWQHNTVLGIVKNPACYGTVVDQKTYREGGKVHINRGELDMFVQEGRHAGIVDEGSFNRVQELLAGRRQHYNVFRMEEDEENVWFRLQRTCFSSHMFCNQCGSVLHRSNQYKTGPDVDPQIGKGWTWKCSEHAKDNALCSMLPLKEADITRAFLNMVNKIIYSMSTDLPLLDLFIEALLGEEEDRNAEVLERLSDELQKIDYERQSAIDLANRYAISPAAYREKMNALQRREGEIRQAQTKLEWSHAVQEAEKVKTLLSSPFQATVLQGSGSHQHRQAVLRDFDEVLFAGIVERVVVQAKQFVTFELKCGLKFTEYFAELDNSAGGSMLSNADASHSLAPWQGKGVKEQKNSTETAPFKPPYGYKRVDGRIEVKPDEAEKLRVFFQLLSTGTSIDAAGLAAGIPRKGSSLYKIAHRKAYAGTSIYPPIIDTSLVRIKNTEDRRTAFVPLYSEFEFGMVPEIDQNLSPAECISVLFRQIKPTTVFQPGVADFPTRRSTTQPDAVEDFTSAATLPTVPISAIKPIHTAVADAVLADAHTAAPVADHKSDPAQTDTDDAQPVGTDILLPITKTNRKMRVVDLAIEMHNRRISIAKADPASDPAAISASSASSTVFSASSATSSDGEATEDSVAPEPVRVKDKIQVTFTGRTGTKKKDAPAPLPPAPRRPITVSISSR

SEQ ID NO: 2582 - protein, 521 aa, unidentified
  source 1..521: note = uncultivated organism
MRFAWYGRKSVYSDKSDSIDNQERMCREHSDFRFPGEVESWARYSDEDFSGANANRPDLKRLLHDVELGLVDVLVVYQLDRLSRNVRDFSNIYSLLDAKGVKFVSVKENIDTSTPIGRAMMYVTVVFAQMERETISARVVDNMNGLAKKGYWVGGMAPLGYVRMPIEVDGKKHVSLAIDPKGAEYLLWLYDRFIDSGKSVGALATAFRNEGILTPRGCYFSSSQIYTVLTSPFAVEATPEIYDFFAAKGCNMDPGSPRERWDGTHGVMIYGRKTGGKHVSRRAPYEHWLVALGYHKPFVPAAKWLAVQDRLSANAFAKTMKYGTPLLRGVVRCKCGALMMTARKVYKGQVQSAYYCLRRSRQGVEACDCKQTNTEVLDEKALEAFRRIDLDHGLIREFLEVDQSTGPDPKDLASKISRCEAKIGKLTAALADADGSSAAKYIVAEIERMDLELQALKRERDIAVSEERARGLAKKTAEAKAAEISRLIRGLDGFSDVERNEIVRSVVKSCVWDGKRLFISL

SEQ ID NO: 2583 - protein, 546 aa, unidentified
  source 1..546: note = uncultivated organism
MSASPARRARRKFRKQLSDKDTVIVPFTPEGDAAVSYRRQSHYTDESLSAETQERDNTRWCNAYDVPITGSVEDLHVSGDLDPFKREGLKQWLSDAPPKPWKTLIVSKLDRLVRNVMDALNLLNWLRARGKRLISIAEGIDSSNSMSEFLITLIVAFARMERERMRERFTSSKAMMKAEGRWSGEAHVYGTMPVQLPGGGWILGLDPYAVKILHKLSKMARAGKRLTDICDWLNDNKVVAPRDRQLQLSAERRGEDPGKIELKGYKWGESVVRRLFENMDLVDLGIFEPAEQSAILARLEDKARRKTRGSNQPYPFSGVLMCPECMEPLWHSIKTAKNTLADGSKANYLYNYWQCGTHSHGPAMRAEVIEKYAETVFYTVFSSVPVRERIVLPPTNHANEIAKLEREYTKVMGGVARAKSQEDRHRITSDANKILADIDTLRALPVDPGGVQWVPTDRTWKEELEGLTPEERRERWLDLGFMFVVKKMPDGSWNAGWRLPDGWREAMPEVAELLGHQGGGETGVIVPIAPIFEDPTEEPPASGRKH

SEQ ID NO: 2584 - protein, 574 aa, unidentified
  source 1..574: note = uncultivated organism
MARVSRRPAIASQNNHVALQKEGQPVVFQAGIYVRLSVVNSGLGEDCESLENQEALLREYIDAKPDIRFIEIYSDNGESGTDFERPGFRRMLEDVRSGKINCILVKDLSRFGRNYIETGEYIEKIFPFLGVRFIAVCDDFDTHNPNCMNDGTVFSLKNLINEAYARDISAKIHAAFDAKRQNGEMKTKNAPYGYKLSGDPKHPYIIDEEAADNVRLIFRMKIEGISTNAIARHMEAAGCLTPLRYMKEKGWVTQCRENSHWDMSAINRILTNPVYLGHMVQGKTVVRLCDNIPKTVLPPEQWTIIKNINPPIVDPETYDAVQRIIAKQKAQHRERCGKYDYLKTEPILPGLVFCACCGKPMIRHKNVVSPKSCLYYYICPTYRMHKDSVCPNKHGVREDELLAIVWEQIRRDMERLDDLEKRMARARGSSSCRSRLPQIEQSITKAEYRLKKLKAYLLSAFESSGSGEMSEKDYEFARCRYEKQMEEVEDELAGLYAQKEKVNERAATSNRWMAEFGRFREERGLTREIAAALVERIEIAENKRVTVVLKYRSDYQNLLENTEKMEGEYRGFAG

SEQ ID NO: 2585 - protein, 558 aa, unidentified
  source 1..558: note = uncultivated organism
MSQPLRAVIYARCSSQKQADRDLSVPAQLDACRAYAQHRGWRVVCDYHDDGISGFEDERRPEFRRMLADMVRQPRPFDVIVVWDFSRFSRSLEHSLKVMQDLRAAGVVLESTKEQTDDTPAGWLMGTIFRSFNEFQVRKLAEDTRRGMHKNASEGGWNGGAVPMGYQVVVPENGRGPRHLMPHPQWAPLVGRIFHMALAGKGSCTMAAALNDEGLRTVRGRRWTKQSVLYILRNEVYTGVYTWGKRRSTKFGVAPMEPLRIEDNHPALISYEDFARVQAAIKVRRPSVTHPKTVAGEYLLSGLLVCGVCGASYIGHGARNGAYHYYTCQTKMKQGAKACPEATNFERSRVEGVVFDLLRKGALHPPVFADLVREVQGSLRTAQRAVEGERVVVQGQVAEIQRRLDNLYEAVESGSIPFARLAPRIEKVSQEKDALETRLAELPVMGNEPILQIADEDIETWVSDLRAVVERGTVDEKRGLLRAWVKRVVAHGDELTVEYTFPLVGVPGPGGRGGLPKPQARVPVNRRGRRKRPVRAAEARKGEPAVRRVLPTVTNGSP

SEQ ID NO: 2586 - protein, 607 aa, unidentified
  source 1..607: note = uncultivated organism
MSRILKERARRRALALKTEVSADTAGVLRVVFYYRVSTDEQEEKGTVEAQRIYLHDKFRADFRDDAPTAVRMQLVGEYCDDGWSGAKALGDRPDGRRLLDDARAGMFDVVIIYKLDRLGRSARVLIDAHDELERCNVAITSATEPFDTRPGPQQAIGRFVFQLLASLAELERATIRERTMNGKHRVASAGEFINGLVPFGFDVVDNHLVPSRRAVEMLAITESELVQQIFERVAAGETCYAVADWLADAGVPSTQRWFNKQHQRSTDKTNGRWNNQRVWATIKNVVYKGERNLSFDQRDLDQSVPGIVSESVWQTANDRLKRNNKWNGTHDDHVYTLSKKIICSGTLPDGTPCDLRYTGGITNSSADGRKKYRYYRCNGRNADFARRRGAPCNGPMVNVEVENVIWQDLVWAVKHPDEVLAGLQRTLRGRQSNGALYQRQHDELRSQRRVLEQTQLHLRDSLRSPSRYRPIREIEEDLVDVGDKIAQLDADISRVEAYLAVDSALESRLSSTASLMRRLGDQIDDITASNDRVAMKRIVQELVVEVRALPREEPVAAGPGKPDLPRLQVTYAFSTDSTMSSVRDLTNIKTLVIGMLEMPSARERILA

SEQ ID NO: 2587 - protein, 524 aa, unidentified
  source 1..524: note = uncultivated organism
MTAAPTKRCAIYTRKSSDEGLDQAFNSLDAQREAGEAYVKSQASEGWKLIPTLYDDGGFSGGSMERPALRRLLDDVEAGMIDVVVVYKIDRLTRSLADFARIVETFDARNVSFVSVTQAFNTTSSMGRLTLNVLLSFAQFEREVTGERIRDKIAASKAKGMWMGGVPPLGYNVPEAGSRTLRVNEAEAEIVRTIYERYLEIGSVHRLAAKLADEGIVSKRHVTSNGRELGGTPFGRGALFHLLRNRIYLGQIVHKDLVHQGEHQPIIDAHLFKRVQQHLATNQVSRRANAERRTERAALTGKLFDASGEPMSPTHSRGRSGRLYRYYVSASVQRGENRNCELHRVAASAIEQLVASMLERLLSGKDSGPILQSVHLRPDAIDLVLPANWARAVAARIEGEEQVASLGEKCVVTIPISFPLRGGRRSVTAGQPHAADHDITMIAALRKAHAMVGRDERGQPTIETAPTSPYERRLLRLAFLAPDIQQAILAGRQPRILNLEQLIHQDLPIAWSQQRKMLSFAPSV

SEQ ID NO: 2588 - protein, 562 aa, unidentified
  source 1..562: note = uncultivated organism
MKIAIYSRKSKFTGKGDSVENQVNLCKKYIEDKLNRDGILYSAQDILLFEDEGFSGGNTNRPEFKRMMQEVRKRNIKMILVYRLDRISRSISDFSNLLDQLKKYDVEFVSVSEDFGGNSPMATAMMCMTSVFSQFEREVIAERIKDNMLELSKNGRWLGGNTPLGFQSQEIAHTDQIGKIRKSYRLITIEHEISTVKLIYDKFLEFNSLTQLETYLINTNIKTKNNKSYSRFTLRNILSNPVYAIADSLLFHYFEELGCQIYNPNPDYTHQYGIMAYNRTKQVKGRSTKLRDYSEWIIAIGQHQGIINSEDWIKVQNMITANKDKSFRKVKSTSALLSGLLICKNCGSYMRPKNGRINKDGKQSFYYVCELKEKSNGEKCTMNNLNGLKVDKMVIEQIKQMQSSNSGLLTKLAQDKKKLNAVEDTQLAEKEHLQNLIDKNKKEIDNYIKKLALIDDDDITAVVINNVKKLKEENRSLENKLSDLNQNVHLTLANDTTLNYIAQKLTLFGDEIVSFEVTKQRSYLGTIIEKMEWDGNNVEVYLFGPHSQKRMSKMFPQSEDSK

SEQ ID NO: 2589 - protein, 565 aa, unidentified
  source 1..565: note = uncultivated organism
MNRLNCAIYTRKSSDEGLEKEFNSLDAQREACAAFILSQKHAGWVALPDLYDDGGLSGGTMERPALQRLLADIKARKVQIVVVYKVDRLTRSLADFAKIVDVFDAHGASFVSVTQQFNTTTSMGRLTLNMLLSFAQFEREIASERIRDKIAASKAKGMWMGGNVPLGYDVKDRKLSVNEIEAETVRMIFRRYADLGSVRALGHELDRLGIVSKRRAGAGGVLSGGNRFSRGALYTLLQNHLYRGEIAHQDRIYPGQHDAIIDTDLWQVVQEKLAENRQTRTLGVTAEEPSLLAGLIMDAAGQRMTPTHAVKKGRRYRYYVSASLITGIRSDHANGWRIPAGDIEGLVLDRLRAFFASEREVGEALLCFDLDASTLRWTLSEAKQLAGSWTDLPSIKVRELVRSVVETVEMQDEKIVISLKRKDGASVLLGSAVNLPVIGEAGTFELEIEAKLRRAGKGIRLVVGGSAAEKPNRQMAALIRDAHATRVALMTGRDATLEAMALRLGIKRDYLSVHMRLTYLAPDIVWALLSGRYPAELTPTRLVSLCKDLPYDWKLQRAVLGFETR

SEQ ID NO: 2590 - protein, 588 aa, unidentified
  source 1..588: note = uncultivated organism
MPTENLQTNAKKLRAAIYIRVSTDEQAQSGNGLAVQEEKLKAFCKSQAEEYILEDEHIYKDEGYSGSLDIKHRPALARLFEDAENKKFNVVLVYRLDRFFRSTRHLLNAFEVLKASDVSFQSATESFNTNEISGRLLLRLLASIAEAERETTRERTMSGKIKAAREGKFVCGVPTYGYFIEKPSKKLAVIPEQAKIVKKLFSWVVDEKLPLREVEKRMNQMKVPPPYNAKYKKRQTLNYWHRRTIGRILTNETYTGIFYYRKYKRPFNNLTSITDKRMLRPKEEWIEMECPAIISREMFEAAKRQLLKNREFAKRNQKRAYLYSKLIFCSRCGYRMFGGFQPSTKKWPNAGGRYYHGVYKNDKAVGESKRCEWCPTYSENRLVPIWESLKEILKNPNNMFNPLEKYLYREESPENVKERLEQIAVELSTVQEKQSRVDELYINGQIDQPKYREHSNANGIEEKKLSDEASRLRQSLLTKKEKEERSVAIGQAYEQIKSKLDSVSYDGKSEIIRLFVERITLHAKEDFASVVFKFPSSTETATVRLGKKVSHESKVFPLVLNIKTITEAERRAEIIRSNPLMYVPKTLV

SEQ ID NO: 2591 - protein, 550 aa, unidentified
  source 1..550: note = uncultivated organism
MPRRAPDLITPRHGAASVPDRSALGWAVYARLSAKKTGRAKKRRNYLETVDSQIADIRAFAAQKGLPISEKHIYKDNHLSAWKKNGKRPDFDEMITACVNGEVIGILVWKFDRFTRRTRDALMFTDLAEKHGILIDGPISGSYDMRDPEDRKKLRDAASAAEYESDNISLRVTDKLGKKKALGLQWGPGRTFGFEILSEAREFDDEVMPIQRPDEVEIIQEIARRATSTDGGRKPETWAALARELNERGITTATGAPWRASTLARMVRHPRNAGYITRKVDNRTEIVGTMPDRYPDDDGTPGEPYLPILDAETYARLRGELMTSKGGRKPNGTYPLSGGALLCGRCGKGKTLAGAGRGNAGGRPADSARRYKCPEHNGGCGMSVRAADVEAMVRDAVIERSANPRLRAEIADKDHALDLAREGLRQQLADAAAEVDRLDEEDAALEVRRANQTPPLRERAYRATKDEYARLIAKAEARVRELTAELQKTPAVDEGDVPAITAEEWEKMGRAGKQRDVVRRLHLRVTVYPAPPRLPGAKINAFDPRRVVIE

SEQ ID NO: 2592 - protein, 546 aa, unidentified
  source 1..546: note = uncultivated organism
MVRCAIYCRVSSDEQVEKGTIGSQVDYAKRYLELHGPEMNITEHEFYLDEGVSGTIALSGRPAGSKLILDAKNKKFDILFIYRLDRLARNVKHVLDTYDLLEKHGIALKSMTEAFDTGTPTGKFFMTLLASIAALERETILERTQGGKDRNAKEGKWVSGSPPFGYRIEDKRLVIYDPEAETVRLIFQLYEDGMSTVAVAKYLNAKDVLTPTMSKGTKNKSTGKWHAGHISIILRTTAYVGEYTYLKRSVRRKDTIEVEVPAIIETQKYKDTQARIIKNADVARGSKKHNYLLRGLIYCAKCGRALVGSSGDSKSGRVYYRCTGTLDHGQGKKCDTKQLRAADAENSVWNDVYELLAHPEELISEMESELGVNKKTSEPLQSELDDVENIIIEKQAARGKVIGLMTRGKLTEQEAEAALEELANELGSLNSRKEFLFDKITNAQNFEGDVINVRIVIDAVRDHLDELTEEERSMLVKAMVRRVEVETVFTEAGKWDSLVNSEYKFYRSMELSNSTEAENHTTFYSVESTWVFHAFSRKGGERIRWR

SEQ ID NO: 2593 - protein, 569 aa, unidentified
  source 1..569: note = uncultivated organism
MSNNTRKNIRDERKIAIYSRKSKYTGKGESTQNQIEACKRKIELTFDDVDLKNDVIIFEDEGFTGYNTNRPDYQKMLKMIKNKEIKAIVFYKIDRISRNVSDFSNLVIELNNYDVAFLSATESIENVTPSGRAMMFMISVFAQLERDTIAERIKDNMLELAKTGRWLGGTPPTGLKSKQLDYLTVDGKKKRLFQLDDVPEEKKIIITLFYKMIELRSQTKLETFTIQNNLKTKTGKDFTRWGLKNILTNPVYAIADLDTLDYFKSMNVDIYADEKEFDNEHGLMVYNKTEHKKNMVTKKDVSEWIVAVGKHKGFIPGKIWVEVQDILEGNSNKKYRKPSASNAMMSGILRCAHCGSFMRPKLKNKTIDSQGRKRFDYMCELKEKSRKDKCQCKNINGIEADELVLKEIKKIMTPTSQFYKTLKKISTDAFNKEYKDNQELKTLKSLITKNENNITLLLDKIKFVDVSLLDDLSKEIKELKSANVELEKEIKSLTNNNYNEINDKETADLLLNLIDTYLTSFDTLDLNTKRNLIKLLVSSITTNGKDITVNFLGSRSTTDFSFPTGAECK

SEQ ID NO: 2594 - protein, 580 aa, unidentified
  source 1..580: note = uncultivated organism
MAAKANKKDRCYIYMRVSTNMQVEGYSLDAQKDRILKFAEYQNMEIVGEYCDAGKSGKSVTGRPEFTRMLEDIESGVDNIDYVLVFKLSRFGRNAADVLNSLQFLQDYGVELICVEDGIDSSKDSGKLTITVLSAVAEIERENILVQTMEGRKQKAREGKWNGGVPPYGYMLDSDNDMIVIDPDTVDTVKLIYEQYVYKDMGLEEIVRYLNEHGYKKKQYRKRDLNYFTAHFIRNVLDNPVYTGKISYGRLKTEKVKGSRDEFKRVKNNDFMLSDGLHDAIISEELWELAQAKRRRVAKRTKKKYAVDHVHLLSGLVKCPVCGEAMTGTTAKRKNKNTGDYDFYFYYRCHNRKILDDGSVCDFKSNYNEEALDTEVYELVKCFVNGEGCRDMIMEQIDRKVDVSTLEAEREQLRLKLRQVKGAKDKLQEKMDALEVSDRFYERKYEDMNERWANLYDKINSIEESIRGVTRKMAKAKQDALSSQQVYDILLNFEKLYEKMSDEERRRFYELLIKEIEVHQDRGRNDRMVKSILFKFPIFYNGETGDMICLPKEKTVETVVALHHQRPTVGSQNNPISGGQ

SEQ ID NO: 2595 - protein, 543 aa, unidentified
  source 1..543: note = uncultivated organism
MKVAIYTRKSKYTEEGESIENQINMCIEYAKNMLGVTDYEIYEDEGFSGGNIDRPQFKKLMKDIKIKEFTHLICYRLDRISRNVADFSATLEMLNKLNISFVSIKERFDTSSAMGRAMMNISATFAQLERETIAERIKDNLRELAKTGRWLGGPPPLGYKSIEVKNNDSNGKGRKKHILEINPAEIEMIKTLFKLFLEYKKYNTTANLLNNLGFKPRHGKVFNLTIVKQAINNPTYVIADKKIFNYFNTKGCSTYLENKFNGQRGIMPYHRRDSSNNMLDQSEWIIAVGDHQGIITSDEWIKCQEIKEKIKNRSSNRDGTSKLFLLSGLMVCKCGSSMSGRYKKVKDKEYRYYTCNLRNRNSKECNNDALNAQSAEDAVVDHLKKITLKIIISNYNKTKHENKKKIDNIKIIEQYTREIEENKIYIRGLVKKMAVENDEDLLQDYKNERKSLKFRNIELQSMINDFNCKNNNIKNMEENLDDLLALFDEFKKFYNFTKSFEDKQRLIKDVVKFISWDSETRYLDIVLVGSYKKKPVVNQLFHL

SEQ ID NO: 2596 - protein, 565 aa, unidentified
  source 1..565: note = uncultivated organism
MKDQKRKQYVIYSRKSKYTGKGESIENQVEMCRQYIAAQYGAQAAEEALVYEDEGFSGGNLERPRFKKMMADAKTKDFGAIVVYRLDRISRNIGDFAGLIEQLGEMGIDFISIREQFDTGSPMGRAMMFISSVFSQLERETIAERIRDNMHELAKTGRWLGGTTPTGYESESITTVTVDGRAKKACKLRIVPEEVRLVRMIFDMFLETGSLTRVDSYLLENGFETKRGNQFTRFALKNILTNPVYMIADEAAYEYLLENRVDLSARKEDFDGFHGVMAYNRTIQQTGRAHQIKPMEEWIVSVGKHEGIIPGEKWVQVQKRLDMNKSKAFRKQRSHIALLSGILCCGSCGDYMRPKVDNSFTADGQQNYHYLCTTKERSHGKCCAVRNPDGRALDELVIREIKKLGSDRSHFVELLEKRKRQLRDDREDDNSELTRVRNQLEDTQAQIRQLVSSLAKAAGSVAEDYIMEQIRELHEKSETYKSRLEELESISAEHQLSQIEFDILRQMLSSFRATIDEMTLDQKRAAIRSVVKKVVWDGKMVHIYLFGSDGDVQIPPLEPFGEDSK

SEQ ID NO: 2597 - protein, 527 aa, unidentified
  source 1..527: note = uncultivated organism
MNVKTEGLRAVIYVRISRDDGNTEGAGPIERQLADCRMLSELRRYVVVAEEEDRGVSAYGEKKRPAWERVLEMVERGDVDVVVAWHIDRMTRNMVDLERLILLTEDHGVSVATVTGDIDLTNETGKMVARILAAVARAEVERKATRQKRANLSRREEGQPWTSGWRSFGYTLQGEVVEDEAALIRASAQDLLNGTAIREVARQWRDAGISTPRSEKGADGWTHNGVKSVMLNPKIAGYVTYGGEIVGDGAWDPILDRETFALLSAKLTDRSRRTNGPGRKPANLLSGIATCSECGELVSGGTVSIQKQEKGKRVNVGRRPVYKCPRDHLNTYRAEADELVLQAFAVATQTLLPGMILSIPTGGESAELVAEAEQKRRELVELAESHAAGRIPLVVLEKASVGISERLAEIDRMIEASETTDYDPRRLNGEALRRFEDLDTEGKRAFLRRLASITLHRKGKGTKNKAITDQITMDVKVTSSDGETRWVPVLRPGGAGEPSEGLTRPSDVLAATTQALPGGMAVEAVSG

SEQ ID NO: 2598 - protein, 551 aa, unidentified
  source 1..551: note = uncultivated organism
MKAKKNYNAAIYLRLSRDDENVDGSKAESNSISSQRDMIRSYIRKQDNMEIYDIYVDDGWSGANFDRPEFKRMMQDIETGNTNCVIVKDLSRLGRDYIETGRLIQKTFPVFSVRFIALTDHFDSLTADYNETSLVVPVKNFVNDSYSRDISGKIRSHQKIKRENGDFIGAFAAYGYKKYDENRNLLVPDDYAANIVRKIFSWKMEGYSNLAIAELLDSLGILSPMEYKKMQGEKFQTGFVTGVKTKWSAVAVKRILINENYIGTLVQGKEEKINYKVKKSIKKPEEEWTRVQEAHEAIISKEDFETVQDLLKIDTRAGSGEKKAHIYAGLLFCGDCMEQMVRRVNRYKGKETVSFICSTKNKSGECTRHTISEDDLNNLVFTGLRQQVSLFLNKSSVLRSIELMEINFEEVVAFDKEIERLHSEQDKYLSLRAGLYEDLKKNIITEEDFKNFREIYEKRYQELQQAICNQEETIKKLFKSGVTAGMNLERMRTAMQITELDRVTLISFVKRILVYEDKRIYLELRYKELFSKVIMLADYVEKNGQLKREVV

SEQ ID NO: 2599 - protein, 527 aa, unidentified
  source 1..527: note = uncultivated organism
MATVTRIKATLDVNTSAPLYENRKRRVAAYARVSTDQDEQFTSFESQIQFYTDLIKGNPDYEFVKVYSDEGLSGTSVKKRKGFNEMIDDAKAGKIDLILVKSISRFGRNLKDIIEYIQELKAVGVEVHFDKEGIRTFDKNVDISLAIMSAIAQEESHSISGNVTAGIRYKYARGEYSMPFGTFLGYKKGEDGKPVIVPEEAEIVKDIYRYFLRDKMTAYQIAAKLNKQHRYTKKGNTWKRSAVLSILQNEKYKGDALLQKGYVKNYLDHQVVKNNGEVDQYYVEKGHEPIISDEDWAAVQIEMKARESAKTCSADGDIFSAKLVCGDCGAFYGRKLWHSTDKYRRFIYQCNHKFSKGKTKCTTPNLTEDDIKSAFIEVFNQLIINKDEVVAIATETADEMFDTSVLEDKKKELTDELNDQKDLIDNLVKTQNTKPIEQETFLRKYNRYKEKFSEIKKEIEAIRKEIESRFGKRIIFRQKIEELQKGDENKQFNDIMFTVLVEKIVVNHDKTLKFVFSTGQKLIAKGK

SEQ ID NO: 2600 - protein, 532 aa, unidentified
  source 1..532: note = uncultivated organism
MEATLEKTVRMIPAKPETQQKSHRQLRTGAYARVSTKEEEQHLSYENQCAYYTDHIQKNTEWCFAGIFADEGISGTSTKKRDGFNRMIKQCRAGRLDLIITKSISRFARNTVDSLNFVRELKQMGIGVIFEREGIDTRKVTNEFLLTIFASLAQAESESISANVKWGKQKSAANGNVSFAYSKFLGYRKGPEGTPVIVPEEAVVVKEIYNRFLSGESFQAIALALQSQGIKTPKGCDAWSCTTIRSILRSEKYKGDALLQKTYIEDCISKRVRVNRGELPMYYIENSHPAIIGRATWNRTQEELARRAGKRKVKEIGTKTEQGKYSSKYVLTELLICGDCGTPYRRCTWTQRNGTKKIVWRCINRLDYGTKYCKKSPALEEGMIQEAILRALTDIATGEPLAMENLKLHIELGLQSDAQDESTALRLRLNELNIALIDLISAGAGEDVYAGAGEEILALQARLSEIEGNQRKSEQTSEFLLGIFAMAEQCQHHLIAWDEKMIRQMVECVKVLSGERLLVIFRGGAEREVFIA

SEQ ID NO: 2601 - protein, 524 aa, unidentified
  source 1..524: note = uncultivated organism
MRVAFYTRISTDEDHQKYSLDAQKDRLNAYCVSQYDEYEIVKIYRDTSTGTNMNRPGLEEMLFDAENGLFDVLVVFRVDRLSRNVRQLAQMVEMLTEWKVILRSSSEPFDTSNSAGKMMLQMLGVFAEFEHATIIERTKAGMERKARNGEWGGGLVPYGYKREEGMLVIDEEESVIVRRMFREYVFGKKGATKLCRELNEAGLRKRSGKKWENRGLIKILKNPVYTGVISWKGEIFDGKHDPIISKELFDKAQAVLENRNLASNGKRFKNDSDFFLTGLIFCGKCGKGLVGTAAHRNGHRLKYYSCSNRTYQKGCDLPYIRADIVEVLTIKEIQTIFRNPELLDKIYNLVKTELAKRQPDKLKEIDKVDSDIEKTKSILQKYYEAFESGEMSPKSCRERINDLEGRIMQLENERIRIGNEMEQLQITEVEKEKLEEYIDALEEILKEGKNEQTKHLLKILVKKVVVNDKDNIELTLRLPDGDEMRQSLNQPEKEKRQPENVNQLAPTVRNQEHKAPREGLEPPT

SEQ ID NO: 2602 - protein, 517 aa, unidentified
  source 1..517: note = uncultivated organism
MKAVIYARFSSDKQNEASIEGQLRECMQYAEYNGMQVIGNYIDRAFSAKTDHRPEFQHMIKDSYKNLFDIVLVWKLDRFSRDRYDSAHYKRILKKNGVRVISATEAISESPEGILLERLLEGCAEYYSAELAVKVRRGMTENALKAKANGVRAPFGYYIDGDDKYQIDESLAPIVKEIYSLYLEGKRVKKIAKLMNARGIKNRGYDMNYNSVFRILTNRKYIGEYKFGDILLPDAIPAIIDKETFDDVQQRLKNNKKAPAMHRSEDDYLLTTRLFCGKCGAMMVGEIGTSHTQSKYRYYKCNQAKKHKCDKKAVKKDWIEDFVIEEILSLISNDEVIEELSDRIYEMQTEESAAVTVIKNQLSEIEKKLNNLAEAIAQGVFSSTTKKLLDDLEEQKSNLEVELFKTQINHPVLTKEQIQFALYSYRKLDLSSQEGKQQLIDVFVNSIFLYDDRFLITFNYKGQSKTVTFEQVNSSSLTSKGSPTRGASVPEFRNRRVFSMLFNALYPAAPAAATLGS

SEQ ID NO: 2603 - protein, 540 aa, unidentified
  source 1..540: note = uncultivated organism
MAERGKLRCAVYTRKSTEEGLEQAFNSLDAQREACVAYIESQRHEGWSLIPEYYDDGGYSGGSMDRPALKQLMADVSAGKVDTIVVYKVDRLTRSLADFAKIVEVLDKAGASFVSVTQAFNTTTSMGRLTLNVLLSFAQFEREVTGERIRDKVAASKAKGMWMGGPVPLGYDVKDRKLVINEAEAAIVRRIFTRYCELWSIGKLVFELARDGVKTKVRPYKDGRIVGGIPFTKGPLAYLLSNRVYAGEVTHNGKVYPGEHAALIDLALWQQAQSILAGNRVERRLGSKGKAPSLLTSLLSDDQGRPMMPTFTIREARRYRYYVTREAAQGMRGVDGPLRMPAGAIEALVTSQMADWLEAVTPTEDMDPLVADLMASKAHEHARMLRHGTQREQRIVLLELQAQVRMHAERVAIKFKPAYLPQPVLLDVPAKLVDRGSDLRLAIGPDGKNVHAAVDPALLKLVTLGAAARQHLLTGKPDSLVDTYSKQHLNRLARLGYLAPDIVTAIVEGRQPPSLSGRTLLLFANLPIEWAEQRRLLGFV

SEQ ID NO: 2604 - protein, 508 aa, unidentified
  source 1..508: note = uncultivated organism
MKTAAIYARYSCDAQTEQSIEGQLHVCKEYAERNGIVILDTYIDRAMTGTNDNRPDFQRMIKDSAEKRWNFILVYKLDRFSRNKFESVINRKKLSDNGVKVVSAMENIPDTPEGIILESLLEGMNQYFSAELSQKVKRGMRETRLKGYYQGGGLPYGYRVEDRKIVVDEEQAKNVRYMFEQFAKGVYVREIIEALTARGATYHSKPFAKNTVYNILKNEKYCGVYYHGEERIDNMYPQIVPDEIFERVRNITESNKHGKRSVEVTYLLRHKLVCGYCGQSVIAENGTARNGERRYYYKCRGRKARVNDCKKKAIPKEEFERLVLDTIITQLKEPELMDKLISAILEEQERRNRENSALLVMQREHRQNEIALDNIMKAIERGIMNNTTNKRMKELEARQEELERLILMEKSKQVRQFTEKEVREYYEQALRMEPQLLINYLVQKIVLFDDRMEIYYNSPITNSPDDGQCCCFYKGDNIAGCRNIARNAFLNKEKNLNRTHSKEWFDLG

SEQ ID NO: 2605 - protein, 556 aa, unidentified
  source 1..556: note = uncultivated organism
MRKPSDRRPAPSVRHAAAICTRVSTLEQVRGTSLETQMDECRAYADNRRLEVVGEYVDGGVSGKYANRPGLDRLMADCRAGIIDVVIVAKHDRFGRSFRHTVALIGELEELGIEFVSIAERIDDTPSGRFQRNVLLSVAEFERERILERTTAGMERSVVEGRWITGRPPFGWRLVPGERGRSRIEIDPDAVPVWERIAAALVDRGLSTYQTARELNHAGVRTPRGFSWTGQTIYNLVNDAQGLEGTWTYRRPDRAWAKPGDGPPIPIPIPAIFTTERAAALRQALARRSRTRKPIKTVSLLSGRLRSACGHPMWVMRKVSGDRYYRCAGKRATDGGGKAVGDICDCHNIDAANIEEHVWSIVAEALSDPDGLLALAAEQAGLAAQTTGMTADDLAVLDRRIARLERAAATALADALAQGLDMTVAAGAVKNLQSRLDDARAQRSQVAAWAASAQQVAGRANTLTQIATETSLALSLRPFCDAHRRVIDVLDLLVEYRDWTACSTCGGTGRIKGVPHGSSCPPCVGLGGHPVLSITGHLPRLGVAESPWPVTLAAAR

SEQ ID NO: 2606 - protein, 509 aa, unidentified
  source 1..509: note = uncultivated organism
MASNPKLLRCAIYTRKSTEHGLELEFNSLDAQRDACEAYIKSQASQGWKALPQHYDDPAYSGGNLDRPALKMLLADIESGRVDVVVVYKIDRLTRSLADFAKLVEAFDARSISFVAVTQQFNTTTSMGRLTLNVLLSFAQFERELSSERVRDKIAASRRKGKWTGGTVPLGYEARDKKLAVNKTEAETVRTIFRRYLELQSFSKLVADLDRRGVVTKRRNTSVAKYNGGISFTYGPLAYFLKNRVYVGEVHHGGKWFEGEHKAIVDRATFDSVQQLLTSKTIGRKAKRSESGALLMGKLYDDRGNLMSPSFSTKNGVRYRFYVSSALLRGRKAAAGSIGRIAAAEIETAVLAALKHQQQKGFDSAFAPIETLERVIVSCDQLLLTTSNTTDRDSREIRIAWATRSKDSVTTVEGSGTSEAAHDEVLIQSIVRAHAWVRCLQGDTYHSIEQLAEASRIHPKVVRLALRLAFLSPEITSAILEGRQPAGLSLARIPKLLLLSWKEHRRLMS

SEQ ID NO: 2607 - protein, 548 aa, unidentified
  source 1..548: note = uncultivated organism
MRSYNINSKAACYLRLSREDGDKIESDSISNQRELISDFVKSQEGIRLVKEYVDDGYSGTNFERPAFKEMMNDVREGRIDCIIVKDLSRLGRNYIETGRYLERIFPFLDVRFISILDHYDSAGEDNDADQIIIPFKNLLNDSYCRDISIKIQSQFDIKRKAGKFIGSFASYGYAKDPADKNHLIIDPFAAEIVRQIFQMRIEGYSAYRIADTLNEMGVLPPADYKRSIGLNYDTGYKTSAHSVWYASTVLRILTNEMYTGTMVQGITRKINYKIKQSRRVPKKDWIRVKGTHEAIVTEEAFQAVQNLMLMDTRTAPGEEAVHVLSGLVVCGDCGQSMIRRITRKKNKQYYYYHCSTYKNGLGCTSHLINAEKLEGIVLDALRLQIRLLIKAEDIVSEIDKIPMQHSGMKVINGQLEELEKEIERYSNFKAKAYSDMLAGEITQEDYHTYNRSFTVRLDRAKQKKAELIESRDNILLNEKKLKPWIQQLRDYQDIDHLTRTIVVSLIDRIIIYDKENVEVRMKHADELDVLMTMAKKAEAEREEMLCAL

SEQ ID NO: 2608 - protein, 613 aa, unidentified
  source 1..613: note = uncultivated organism
MKKKTKQIAEDNRGVAIYARKSRITNKGDSIGVQFKQCAEYATRELSLDDDYTFINYEDKGLSGYYSDRPDFQRMLHDIEMGKIRAVVCYKLDRIGRKTADLLRLLDFLEKHKVDLLICSNNINTASGVSKIFIQIFAVVAEFERDTLTERITDNMMELAKDGRWLGGNTPTGFSVKRVTTGSGKNKSAYSYLESIPEEKAMIQKLYEIFGQLRSIKKTADKMNKLGYRTKAGSKFNASTTRLLLKNPVYCVADENVYNYFYENGGGLCEELSAFDGQHGLSAYNKTDQEKFEDADSTFISPKFVQIMSAKPVSEWIISVGRHEGFIPSQQWIDTQNMLDDIAEKYNRPHRKTNALLSGLVYCPLCGKRLRVISESNRWTNGKPRFKYVCPGYRENECTFQAVDGVLLDEFVVQQLSNLSAEDSEYFTKLLNQRASDIFSHSQNEQELTELKKKKAQLETAISNQVKNMRDASDDLKRFIQEDIQDLSNELREVGILLEKLEDSKRNQMYAVRNIEEIKERLLSFGKYAEDAQPDVLVTLIQSFVERIYIVDENDERYCHIFIKGCTKEDYDEFFRATGYISGAGENSAITSKLPLCDSDECCKHYMVLAPVL

SEQ ID NO: 2609 - protein, 554 aa, unidentified
  source 1..554: note = uncultivated organism
MRTGLQVNGSCIMREVMRAVIYCRVSTKEQTQNLSLPTQRKACIEYCERNGLTVDRIFVEEGESAKTADRTEFQKLISYCRENRKRIQFIVVYSLSRFSRDQFVHVTFRALLKKHGVTLRSVTEPIDDTSTGRLMETMLSAIAQFENDVKADRTKAGMQTALESGRWTFGAPLGYVRTGGRGSTIVPDPERAPHVRRAFELLASGLHKKREVLRILNAEGLRTLRGKPVSAQTFQAMVRNPIYAGWMKVSGWQDLPPMHGDFEPIVSRELFDQAQAVLDGKRLTVTGYSRNHPDFPLRRFVHCETCGTPLTGSWSKGRSQRYAYYRCRNPKCRAVKLSRQTLEARFMEYLEAMKPKLEYARLFREIVLDVWHDSQREIVNTRRRLQDHLDTLHGKKDRVVEAFLHQRLIDQATYQRQVVKLDEEIASAEVAVHEAHVDELDVEGVLGFAEHLLSDPARMWCEASLDQKQRLQKVLFPQGVTYSPDGVFGTAETSVIFRLLQVLPTEKAREASPTGFEPVSRGLAHGALPLRKRSEIRVLRRTLGGWLPWMQRAS

SEQ ID NO: 2610 - protein, 585 aa, unidentified
  source 1..585: note = uncultivated organism
MRTKEKKEDNRKFAIYSRKSKFTGKGESTHNQIEQCKAELIHKFPKINLENDIIVYEDEGYTGYNMDRPDFKRMMNDIYVNKIRTIAFYKLDRISRNVSDFSNLLNELDDYDVTFLSATENIDNVTPTGKAMMFMISVFAQLERDTIAERIRDNMIDLAKTGRWLGGNTPTGYDSEPIIKYDLDGKKRKLFKLTENDELATIVTLFSKMLELRSLTKLETYTLQNDMKTRNGKSFSRWGLKNILTNPVYAIADQDVLDYLIDLKVDIFAEEKDFDGQNGLMVYNKTEKKGKSKAVVKRDIDEWIIAIGKHKGAIKGKEWVEVQQLLEQNCQMKYRKPTTSNALLSGILKCSHCGSYMRAKLQGHDTDSQGRRKFSYMCELKDKSKKVKCQCPNINGLEADKLVLEEITKLANPTSKFYEALKKISKDNFTKAYKDNEQLKALKKQINKNENEVKALSDRLPYLAVELVHEQSEKIVELKKRTEELQKKVKELTNTNYDEINDKESADILINVLDTYTSSFDDLDLNTKRNMIKLLVSSITSDGEDITINLVGTRTVSNDEASSCTCAIKQDFLKLSNFPTGEHHK

SEQ ID NO: 2611 - protein, 536 aa, unidentified
  source 1..536: note = uncultivated organism
MRKTDLQFSLPSFDELKSSAFNPPSPSGQKQAAREMNVIRAAVPARRLKVAAYCRVSTDKEDQKSSIRIQKEHFSSVAAQHEDWLFVGVYADIVSGTKKEKRPQLQRLLADCAAGRVNLVLTKSVSRFARNTTDLLEMVRSLTAKGTDISFERENIDTRTMDSEFLLTILASLAEDESHSISANCRWGLQKRFENGTYRAASAPYGYDLVDGNYTVNELEAEIVKEIFSRALAGEVLRQIAADLNARRIRTKRDGQMWKGKIVHPEWTGYSISTILKNVSYTGDQILQKCYTDSSFRMRRNDGQYPQFYLEEHHPAIIDRETFEAVQKMMEGNRKGPQSEKQYTALSGMLTCGCCGASLTRHKNRVGSVYWVCARHRKKADACGLPSLREEDFIEDFKKLMWDLKADDALVRGYRDSLAVGYQSHPKVSRIEERIAEIDREMDSRNNIRSRVHSADFQTRQNELAAERDMLQSDLEMMKDNRIGMTEELLSLIHSVGGSFDFEDTFQKITETVTLHDRSVFTVRFLCGLEVYYDGR

SEQ ID NO: 2612 - protein, 602 aa, unidentified
  source 1..602: note = uncultivated organism
MNEERKVAGIYIRVSTEDQAREGFSLGEQKEKLLQLCRFKEYEVFKVYEDAGISAKDMEHRPAFQEMLADMKKGKINYIVAYKLDRVTRSVRDLEELIAVLEKYNTYLVCDRDDVNTSTANGRFFVRMLTVLSQLEIEIVSERTKFGLNGAIKSEHLPGQIPLGYKKDGNKKTVIDETTKDVVIRIFNMYLEGKSYQQIANIFNKEKVLAPKQWRDSTIQKIIENRVYMGDYEQYKRIGKAQSIEPIIYMNVVEPIVSRAVWEEAQLQKEKNQRAFTRDRVYIFFQKLKCPKCNSIMKCKGAGGKKKKYIYYNCEHCGIYYREDKIEECLEHFILDLVEYDMAVKKYFLPILANKKETSTEKIDKEIEALQKQKDRIKKAYLSGIVEMEDFSEDYKIIEEKLSILEQKKLETLNLNSVTFTPQQLMADRDIEREKLIRDNMLTETMKQEWHRKSKEEKQEFISRFIESINLIKDEDGEFIIDKINFRSSYIEQLIKFFESGIFDVYVPMEVNGEEKYVRTGVNINQEQLDEYIARLNKEFEIEFYEVAQIDLNKTYNDKEVEFELGSVDEKLIRMVAIKEDKSFPTSQEENVRIGAIAYTTA

SEQ ID NO: 2613 - protein, 574 aa, unidentified
  source 1..574: note = uncultivated organism
MARKKFYNNDETTIKTEKKNIWNTALYIRLSRMDGDNLESDSVTNQRKLLNDYIDEHDEFIGVEEFIDDDWTGTNFNRPGFQRMMDEIENGKINCVIVKDLSRFGRNYIEAGKYLEHILPSYNCRIVSVIDELDSYKDTDAALGLMVRIKNLIHDQNSQDISKKVRETKNMLRKEGKYISQPPFGYKRDPNDRYKLVVDEEAANIVRKIFSMYLDGIGMIRISQKLNELGIMTRTDYRKTGTIYKSDDTVITSKGWRPNSIRHILGNKAYIGAVCQRCRTTRNYKDRKTIYLDEKDHIIVYDMHEPVISKEQFGRVQEILNKRCTKTSRHSEELYLFSGMLRCDGCQSSMIRNPRFYKNKWYVYYKCRGYNQQGTSVCSHSHSITEEQLSAAVRYSLNLQIQTLVDMKRVIEAINQNRSVKKLSVDFSRLINEKATKKEKLKTMKLASYMDWKSGSIAKDEYTFMRDKFDVMIEKLNKEILALENEKKDEEDIRNNSFGWLDNLIENGYLKNLTREITAEFIDCIYVSRDKKIRIVFKHQNEFDRLSDYIQRHAETGCTGKEGGMHNVSDGAAG

SEQ ID NO: 2614 - protein, 534 aa, unidentified
  source 1..534: note = uncultivated organism
MTKEIIKEKKQNNCAIYTRKSVSDGLERDFTTLDAQRESCENYIASQKNEGWLCSPEKYDDGGFTGANTDRPALQRLLSDIKANKINCVVVYKVDRLSRSLLDFAKLLSLFEEHSVTFVSVTQHFNTQNSMGRLTLNILLSFAQFEREIISERTRDKMGAAKRRGKWIGGRPPLGYNIDKEKHKLIVSDNEADMVRKIFELYIEKKSLMAVTIAMNNAGFASKQYTSKKGLKFGGIPFRINGIHLTLRNPLYIGKVKYQGELFQGEHEAIISEDIFHKAQDILAENRPEWEMTRKNKHIGLLTGLLRCKACNCSMYFSYNTKASKYTYHYYVCMNASKRGYHSCPTKLLNAQKIEQKIVELLRTLTPLPKLEEKAWEMLNLEERITVIKTILKEASYDTKNGILDILLNDNNKHEYKVELKELKNLPTPPNPVNIKNEPQLRQNLILAHQVQGILAEGKAEGLRQVAKWLNLEHQRLNQIMNLLLLSPAIQEEILCSENESISLIPEYKLRDIAFELRWDKQLEMWQTRLGILS

SEQ ID NO: 2615 - protein, 500 aa, unidentified
  source 1..500: note = uncultivated organism
MRAVIYARYSSDNQREESIEGQLRECNDYAEFNHIEVVGNYIDRAYSAKTDHRPEFQRMIKDSAKNFFDTIIVWKLDRFSRNRYDSARYKHLLKKNGVKVVSAKETIAEGSEGILLESLLEGMAEYYSADLSEKVKRGMTENAKKGKTNGVPAPFGYYVDEDDRFQIDEKTAPIVREIFELYVDGKRTQEIKNILNARGIKNRNYPFSYNTVFRILTNRKYMGEYKFGDIVIPNGVPAIIDEKLFEKAQTRMKNNKRAPAMHRSEDDYLLTTKLFCGKCGALMTGAIGRNRKNVQYRYYRCNRAEKKECDKKSVRKEWIESQVIDCILEILKSDKILDEIATRIYEMQAEESFLLKSLQGQLDDTKQKLKNIVTAIENGVYSDTTKERLDELEAQKKVLEAKIGEEQHAHPIVPQEEIFVALQNYKRIDISTKEGKQKLIDAFVNSIYLYDDRFVITFNYKDQSKTVSLEEIECLPLTSQVSPQKENHRASRWFSCCGDF

SEQ ID NO: 2616 - protein, 551 aa, unidentified
  source 1..551: note = uncultivated organism
MLKKLVRCAIYTRKSSDEGLDQEFNSLDAQREACAAYIASQKGEGWKLVPDLYDDGGISGGTLERPALQKLLAAIEAGEVDLVVVYKVDRLTRSLADFAKLVDRFDTTGASFVSVTQAFNTATSMGRLTLNVLLSFAQFEREVTAERIRDKIAASKKKGLWMGGPVPLGYESRERTLVINDAEAKTVKSIFRLYLELGSVRCVKEEADRLRLVSKKRTRAGGNVRGGVPFTRGRIYHLLSNPVYVGEIRHKTLTYPGQHPAIIDRTTFEAVREKLDAHKHRSSNPAVTATSSPLAGKFIDETGDRLTPSHAVRRGKRHRYYISRRLVVRSGDRDTGGWRLPAAALETAVARLITDSLATHISTQCLVKGAPAEKLQELQLKARDIVAALKGPDRAPVLNAIVDAGCIEPGQLSVTLEPLALAEKLGVLPAHINRDAVTLTGAFTLRRRGVEARLVFGDTTSGVDETLLQNVAKGWAWFEEVKAGTTMQGIADRESISQRRVAHLVDLAFLAPDIVQAIVDGRQPVTLTADSLIRSPHRSSWAEQRAWLSGI

SEQ ID NO: 2617 - protein, 563 aa, unidentified
  source 1..563: note = uncultivated organism
MAKTSKRKYGQKEVIQQPVKIYQVGIYVRISSSRKEDSLQSQLEIIKGHIARCDEKMVVCGVYTDNGKTGTNFERGGFLKLLQDIRLGRINCVVVKDLSRFGRNYLETGDYIEKIFPMLGVRFISVTEGVDTAKKSVDTLDIKVRNLVNTSYATDISEKMTMTQRLLQEEGAYVGGAGPYGYKRGTGKEKGKLLPDPDVKDILKMIFVLYAEEKKMTAVIHYLAEKRVNTPGVYVKTGKVYAEEGEEYVQWTIGTLVGIMKNRIYIGCLEQRKSTMRGGKNRILNDREDWILHENYCEPLVSEELFQRVQELRAASKHVNKKSSNSPKLTENVLYGKIFCGVCGKPMVRYSNIVHLKSGKCTRKEAYECQRQYRIDSKKCVSNRIFREEVEKKILDRIRQETGKGVTTGKKTQGNWIQDKQNYENEKKKMLYTLGDLQERQKKLYASYITQAVSKEVFQKENEILHRQQAKAEKQLAITEDELKRLMAGRERLEKAGRKKWGKELTLEMVQDWIDRVEIYPGKEVEIYLQDPFGTPAGIAEQGKEEAGSLYVESDGKGAYVCS

SEQ ID NO: 2618 - protein, 519 aa, unidentified
  source 1..519: note = uncultivated organism
MRFATYGRKSVYSDKSDSVDNQERMCREYAELKFSGQIESFDVYQDEGFSGANTERPGLERLLSDVRADLIDALVVYQLDRISRDVRDFSNIYALLEEKRVMFISIKENIDTATPIGKAMMYVTMVFAQMERETIATRVTDNMIGLAKKGFWTGGPAPLGYHCGRISAGGKNHSLLVPDDDGADRVGKLFDAFLESGSSTRRLQAALTAAGVRTNKGTPISAPRLYRLLTCPYYATADAAMYDYFVDLGCEIDPESPREKWDGSFGVMVYGRIRRAGKSQERTDKDAWIVCVGVHQPLLPSEKWIAAQRRFRENVFDKTPRREPPLLKSVVRCKCGRLMHVSYQGKYSFYDCARRRENGPEACDMRQIATRKLDQAALDVFRRISADPSEIEKYTRKEEAPSFGSEIEERERRIRKLERGIENLTASLAEGQGTTAIRFVYQQMEQMDLEAGALRREVAELRSRERELEKSRKDAGAKAGRIKNLIQMFDGLSARDKNAVVKEVTKECVWDGETLFLKL

SEQ ID NO: 2619 - protein, 546 aa, unidentified
  source 1..546: note = uncultivated organism
MGIKPTLYCAVYTRKSSEEGLEQEFNSLEAQREACAAYIASQKHEGWQPIKTQYDDGGFSGGDMARPALKQLLEDIEAGKVNVVVVYKVDRLTRSLADFARIIERFEKRDVSFVSVTQQFNTTSSMGRLTLNVLLSFAQFEREITGERIRDKITASKKKGIWMGGTVPLGYYPENRKLLVEPKEAETVRYIYRRYLELGSVRLLKKDLDRKNIRSKVWGEKGGCEFSRGALRWMLSNPLYIGQLRHKGTCHPGQHEAIIDLELWDQVRKLMAGNSAEYKRRSPDIIAYPLMNKLFDVSGERLISTRTDKWGKRYRYYVSESLLLDTREASPNGWRLPAPEIERVVAHAALETLRDNVAVTAAIQEAGIAAHYIPSVLNAVEKIVPDTGDVIGKFVERVEVRKDGICLILSVAPLLPETESGGATITRDIPMVMKRRGIEMKLIIGDGGPARVDQTLVKAVVRANKWFDDLASGRAQTMAEIASREGIDKSYVYRLIYLAFLAPDITESIIAGRQPADFTVNKLTKATDLPLDWAEQRQLLGFSSCT

SEQ ID NO: 2620 - protein, 580 aa, unidentified
  source 1..580: note = uncultivated organism
MSDVTPKRCAIYTRKSSEEGLDQAFNSLDAQREAGADYIRSQKHEGWQIIDQHYDDGGYSGGTTQRPALKQLLDDISHGDIDVVVVYKVDRLSRSLHDFAQMMKLFDEQKVSFVSVTQQFNTTTSMGRLTLNMLLSFAQFEREVTGERIRDKLAATKKKGMWVGGQPPLGYRLEDSKLVIIPKEAELIQKIFRGYLKQPSLIGLAEKLNQQGHTTKRWVSSKDLEHGGKPLNPKYIYRILTHPLYIGKITHKDKVWAGKHEPIIAKSLWEKVHDTIQTQHRQTRYRWDHPYLLKGKLRTHEDFAMSPSTVHRPTPAPGSGGNIQHKRLVRYYVSQKAIKQGYKNCDIKTINASHLDELTRALVLDYLQRESFDMLRGQDSQIRDHWLRTMINRVLLAPGQLTIELNAEQIDACKQHDWPTINTSANTEDHKTIATPTSLYQPQVEHRGKQITLTLAIQIKRLDGKRMLLSPGGQDLFVPANPEPKGHIVTALGHAYHWHQLLKRDNSLTIQALATQLNTTASRIHKYLLLINLSPVILKRVLTGHLPPRVTLTNLLQAADHLDWQAQRIYLNLDESSHSG

SEQ ID NO: 2621 - protein, 550 aa, unidentified
  source 1..550: note = uncultivated organism
MQKMKNKLFQAAIYVRLSDEDGDFSILKKSESNSISNQKQMLYNFVKNKPDIMVIKEYSDDGYTGTNFERPGFQAMMEAVRSGIINCIIVKDLSRFGRDYVEVGRYIEKIFPQLGIRFISVNDSYDSITNEWNIVLPIQNLMNDSYSKDISMKTRSNLEIMRKEGDFIGSFPVYGYLRSSQNKHKLEVDNDAAKIIQDIFKWKISGFSADAIAKRLNALGILSPMEYKKSIGSRFQSSFKTGVQAKWSHNTVRRILKNEIYTGVLVQGKVTTPNYKVKKRITKEKEDWVRVEGTHEPIIARPQFDLVQQLLEEDTRAAKKEYGVYLYSGKIFCADCGGTITRKVVKAKDKIYTYYICSTHKKDKKLCTSHKIKEEMLNKAVLATIQAQISVILNIEKTMQDIEALSWEKREIEKIESNIRFQRALIEKNNKLTLDIYTDLKEGMIDETEFYMFKEEFSTRIQQAQSAIKKYQETKNAIIQGLSNQQSWLAQFRKYANIKELDRKVITNLIEKIYVFENEEIEVVFRQKDQLSHLLEFIENHKSSVSEEAV

SEQ ID NO: 2622 - protein, 525 aa, unidentified
  source 1..525: note = uncultivated organism
MTAKRRPSPGNGAGPATVRCAIYTRKSTERGLEQEFNSLDAQRESAEAYIASQKHEGWVCLPERYDDGGFSGGSMERPALQRLLSEIEAGRVDAVVVYKLDRLSRSLLDFSRIMETLDRHRVAFVSVTEAFNTKTSMGRMVLNMLASFAQFEREQISDRTRDKMSAARRRGKWVGGMPILGYDVAPGGGRILVNAAEAEQVRQIFALYLETGSTVETLRDLAHRGFTRKRWVTRGGQERGGEPFDKSRLLYLLKNPVVVGKVSYGGAVYPGEHEAIVDSGTWERVQAVIRRNGATAGGAHRNRNAALLKGVLRCAPCDRAMTHAWSGKNGRRYPYYVCTRAQKEGWATCSTKSVPAAGIERFVVEQLRAIGSDPSLAARVLAEARSATEARSAGLRRELAVVRREMGRVSGMIQRVLAKPAGKRNGAGSRAGDRLADLQGRLRAAEERARAVEAELTVLDDDRIEEWELAAALEQFAPVWDSLTLAEQARAIELLVERVAYDGAAGRVSLTFRPSGIRALADGRA

SEQ ID NO: 2623 - protein, 526 aa, unidentified
  source 1..526: note = uncultivated organism
MEERTVITIPARRKPGNRKKEEQTHKLRVAAYCRVSTDSEEQETSYDAQVEHFESLLSKNPSWENAGIYADDGISGTNVKKRAEFQRMIADCDAGKIDLIITKSISRFARNTLDCLKYIRQLKEKNVAVFFEKENINTIDSKGELLVTIMASIAQQESLSISQNVKIGIDYRNQQGKLQVCTNRFMGYDKDEDGKLIINEEEAKVVKRIYREYLDGASYYQIAHGLEADGIKTGAGKKKWLSSTLQKMLQNEKYIGDALLQKTITKDFLEKKRIPNDGTLPQYYVENNHEPIIPKDMYMRVQEEMVRRARLETGTGKRRVYSGKYALSSMVYCAHCGDLYQRTHYVSRDKRKKVVWRCVSRLHLKDMDFVCPSRTVPEEDLHAAVVMAINRAFAQREIYLPELTEAILETVDDGNSAEIKEVDKQIAEVQKQLVGKAKAKDKQAIDILGDQIDDLREKKRCLMAEAAVKEGERQKMQELEGYLKDLKNEVTEYDERTTRRLIKQVTIDDEQITVLFKGGIEITVNA

SEQ ID NO: 2624 - protein, 577 aa, unidentified
  source 1..577: note = uncultivated organism
MWGLISVSFHNTKQSLRLSDLMYHTKQKTEVIFMQKKIYRTAIYCRLSREDGDKVESNSIASQRAICEDFIAKHDDLELVCEPFIDDGYSGVSFNRPQFRELEDALRKGKIDCIVVKDLSRFSRNYIDGGRYLEKIFPQLGIRFIAVNDAYDSLTGDPQSDSFIIPFKNLINDSYCKDISMKIRSSLEVKQKNGEFVGAFAPYGYRKSPEDKNRLIVDEDVSEYVQMIFSMYKDGFSIGRIADRLNQMGVLSPMEYKHSAGVKFETVFKTSETAKWTYKAVHRILTNEVYIGVLAQGKRGTPNYKVRVVQFRNEEDWVKVENAHEPLVSYEDFMAVKEMMKRDMRCSPDKDEAHLFSGFLFCADCHQSMIRKTVPSKNKKYVYFVCSSNKHSHTCSPHSISEKEVEEKVFRAIHDQVELVVNLEKALAMIDRLPSKSRKAFNYEAQIAKIEEEIERYQKLKLRLYEDLSDGIIDKSEYFDFRNSYTKIIEEKQETLLRVKKEMKQVVATGTTERNWVTLFKQYENIDELNRRVLMALVDRVLVYEDHAIEIIFKYRDEYQQTLEYVLGYADELAIAV

SEQ ID NO: 2625 - protein, 566 aa, unidentified
  source 1..566: note = uncultivated organism
MKAVKVMLNKGGTGFRPLTKSTLPAVTRPRQMQRPQDKTVEPAPMQVETIAPVISQKKPRVCCYCRVSTLLDSQETSIEGQREHYESFIKGNPEWEFAGIYLEAGVSGTKAEIRPELQRLIADCKAGKIDLILTKSISRFARNTSDCLEMVRLLTSLGVAIHFEKEQIHTDDMHSEFMLSILACLAEDESHSISGNMKWSIRKRFENGTYQQPVAPYGYEWEEGKLVIVPEEAEVVREIFAMSLRGLGCRNIARELNNKKIPTARGRKWSQVTVMEMMKNPVYTGDALYQKSYMDETFHQRKNKGELDQFYDKDHHAAIISREDFEKAQAVIGQRAREVGYNGEEQKRSSNRYCFTGILFCRACGSVMHRQPRGKDSVTWVCHKHALHPDLCRMKPQSDDDLKRAFVNCLNKMAWSQARGEGVLDVYENMLGKTEAEKNAERLVEIEKELEENWNETNKLNAIVMRERFLPEHREKKLFLTKQAQDLMAEKNRILIAGAPSGTLQQLKTFIGGWKITDDPAVFPEETFTEFVERCTVLPGKMVTFEFRCGLKLTESLYQSILEDGR

SEQ ID NO: 2626 - protein, 551 aa, unidentified
  source 1..551: note = uncultivated organism
MERKKVAIYARVSTIEQAEEGYSIDEQERILKEYADKHDLEIYNVYSERGISGKDIDNRPALKQMLKDIEKHEFNMILVWKINRLSRKLSDVLKIVELLEKNNITFKSYSELFETNTPAGKMQFQMMASIGEFERGTIAQNVKMGMLARAREGKWCGNKVLGYDIVAIETTANKKRKETKLVINEVEAEAIKLIFNEYCNGKGYKAITNKLNKLGYKTKKGNNFSVGSIKDILTNPVYIGKLRYNVKQDWSEKRRRNINPNPIIVDGIHDAIINNEVWDKVQKIMKSKQGKPSRIYDGEYPLTGILKCPVCGAGMVIMRTTNKLVNGTKKRIAYYACGNWKNKGTAVCNSNSIRVEKANEYIFGKIGELLSNENMIKSIISNINKTRKNNVEPSKNKLLKIDKEIEMLKNKKNKSLELYEDNILSKEEFIERKVELDKVINNLREQRQPLLVNLTDENQLEVDYDYIKDILKKFSKIISKDLTRDKKKMLMHMLISKITIGKDRKIESIKLKINDSLVQYLKHEGEVSKKDTSPFASLNIIGNELYLEIAK

SEQ ID NO: 2627 - protein, 505 aa, unidentified
  source 1..505: note = uncultivated organism
MKKITKLEPTAPVIRPRKRVAAYARISMVTELMSHSLSAQISYYNEKIQKNPDWLFVGVYSDNGISGTGTAKREGFRRLIADCDAGNVDLILTKSISRFARNTVDLLQTVRHLKEIGVEVLFEREGISTFTTDGELLLTLLASFAQAESESISANVKWAVRKRFEEGIPNGHKAPYGYEWDGEMYRIIPEQGEVVRYIFGRYLAGTSGYSIAKELKEMGISGQSGVPMCDSTIKDIISNVAYTGTMILQKNYFTGEHVRKKNKGELPRYAVEEMYEPLISVEEYERAQSIRRSRAEEIPCSDPTRFSGLVKCGNCGCGISRRTARGKKKWVCNTRERKGVKKCDSRPLPEKELEAAAEAIVGKVDDEEFRRCVHLVLVYGDRIEFHLADGKVKSITRKYGGHKARNGFSGKLFCGECGEKMTRDTWKKRNAEMVIRKHCWMCAAPRNACSLKRLPEEELRKAAADILSTEEHEAMFVEKVRKAVIFNDRIQFEFKDGTVKIWQRK

SEQ ID NO: 2628 - protein, 543 aa, unidentified
  source 1..543: note = uncultivated organism
MTRAAAYVRVSTSSQIDGESLCTQRSSIQDYCTSRGWELVKVYEDAGISGAKDDRPALQALLSAVKAGEIEAVVVRDLSRFGRSARDLLNNIQTLKDCSVTFISIKEGIDGSGPYGQFMLTILAAISQLELEMITSRMRENRLARWRDRRIFCGKPPYGYSWNTKEKRIEIVPDQGEIYSRIVKEYLDLGKSLNDISIDLNAEGTPTRNSGKWSSGTLSKILKCADYCGEITVNQYLTDVKGRVIGHRPESEHIIFEAPPLTTKAKWDRLQERLQSSNSRSGRPSSAAQEFLLHDLCRCGICGAKMRSDYGTRRVDGTRSRHYACYWHKASPKVSEIKGHEKCPLPLIPAELLEWQVFYVELMRQLGIEPEHYKPLLDTQHKWDSKIESLEKTLSNVKASLRRKEITLRNLDSLLERDDFDSASYFQRRNVTLQEINSLDNKLTVTQKELEEHRNRKNEEAEFAKRVSGTDPFKALTYKIINLPFQEKNRLLRGILDGPIVVGHSTLNPHHQLDPEDEMMKILEGIEMTVRHNYPLLLDFISE

SEQ ID NO: 2629 - protein, 507 aa, unidentified
  source 1..507: note = uncultivated organism
MPRFDAIYARQSVDKKDSVSIDAQIDDCKRLCSANPRIYYDRGFSGKNVDRPDMQKLIKDIQSGIIKKVVVYKIDRISRNLSDFCNLFDMMKKQNCDFISSTQNFDTTDPMGEAMLKILFVFAEMERKNTQARIIDNYNYRIKEGCWASGKAPYGFRIEKTDRGVKTLVPVPEEIEVVKWMFKTYAKEPNVSLWQIQSKLIEQGFKGRQSKNGFSRTTINNILANPIYAVADELLYQYYQKKFIEFVNKSEAWNGQYSASIVGKNGRSLRNENLEGIRIYITNVPGTIDSRTFIMVQNRIEQNQRIASDNSPNNNLKELSGLLKCAKCGSAITMQNRPTLTCTGRSKKKICDVSFKGIKFETVRENVAIQVQDYLNNLSELIKKKKRQQQETNSEIEKMQNRLKNLISLIGSDEEVSDELRQEIRDVTLKIREKMLKQKMDSVDDVISLRLGITDQKIFSGIFDENGKVIFEYVNLSDERKQTILRAIVKKILVHVDGTVSIDWVKF

SEQ ID NO: 2630 - protein, 546 aa, unidentified
  source 1..546: note = uncultivated organism
MPRTNQSKPQETPTEKKRAGIYCRVSTREQGESGISLKSQERRCRMHCEAQGYEVVDTFVDALSAKDLDRPEMTRMIKAAKDDEIDLVVALKLDRISRVPRDFYNLIEELELYGKGIVVVEDQWDTTTSVGRMLVGILIQFAAFEREIGIERTNAATRQRALDGKPGGGVAPLGYDRVNKEFHINTKEARIVKRIYSEYISGKGPKRIAEGLNNDGFRNKKHLNSDGSFRNGGRKFTEKHIHNFITNCLYCGRLHFKGEMLPGNQEPIVPEKDWNDAQKIVATNRDKKNLGNTKQDQFILAGLLSCGICGDIVSATAGTGKQKKKYTYYQCLSARAPEGKRNDCNFKSIPTEQLENIIAAMIKEIANTDGFLKAIEEEFIATSTAKELEGLKDDLRNANSQISDTEMKIKNLIDILANGSLDDTSPIEKELDSLNTLKQEKAAYRENLIQEISQKKSPTPNADTLMTIYKEFDELWDTFSKPERRMVLNLLIDGVEIKHPKDSDKGEIILYLYNEPPIKSLYEITEGSHVYLCKLRRRDLNSRPGD

SEQ ID NO: 2631 - protein, 522 aa, unidentified
  source 1..522: note = uncultivated organism
MAYCMYLRKSRSDRDAEMLSGEDTLSRHYAMLTDLAARNRHAIGAVFKEVVSGDSITERPQCQQMLNDLIAGKWEGVYVTAIDRLARGDTADQGTIQRVLMVSGALIVTPTSVYNAKGSATDEQAVDFSLFLARQEYKSINRRQRAGIERSLDEGKHVAHLAAYGYRRYKLPDQRGYTLRLHDAESAVVLQIGMWYLYGMDGQPMGLTAIASRLTDLGVPPGENAKGWSASRIHRILTNPVYAGWIRYGYEKQEKIVTLTGVEKRRVIDNNCKLRKGLHEPIYTQEMFDAIQTKLHGYQKHLPVRKGAPLANPLAGLIYCSECGHVMSHLPTSGRQPALIKCRTRGCPTVQNYREPVEQAVLATLRQWLDDSGAISGPASHQPDPAPVVSALDALHAERKKLTAQIDRLQDLLEQGVYDVPTYSSRFSRLQQRLDAIDQRIADEEAAQAARPVYATPAQLRPALTHLFEHYDGVTPQEQNDMLKACISRVVYSKSKKGLHLRGEALVDPNQFELEIYPLLVK

SEQ ID NO: 2632 - protein, 519 aa, unidentified
  source 1..519: note = uncultivated organism
MSKRSSSRATAVRCAIYTRKSTQEGLEQEFNTLDAQRESAEAYIASQKGEGWVCLPDRYDDGGFSGGNMERPALKRLMADIEAGRVDCVVVYKVDRMSRSLMDFARMMATFEQKNISFVSVTQQFNTTQSMGRLTLNILLSFAQFEREIISERTRDKIAAARRKGKWSGGRWILGYDVDPATKKMIVNAEEAELVRDIFQMYLDKRSLLEVSRDLNSRGLRTKLVRTSKGKTYGGREWDKAAVQKVLTNVLYRGLVRYKTETYPGEHEAIVDDDLWNKVHELLRSNGRNGGMFAQAKHTVLLRGLLHCAPCGTAMGHTTTNKKGKRLYRYYVCYRAQKQGWDACPCRSLPAEQIEGFVVDQIRRIGTDPALRSLTLAKCREQMETQRLAAEAELSGVERDLARLSAELGRTAGDAVSNVHAAALLADLHEKIAVAEERATGLRRQIDEVSAGAITKEEVDAALGDFDGIWSSLSPKEQAKLIRMLIQRVDYDATKGSVSITFHPLGLRTVGQKAGEEAA

SEQ ID NO: 2633 - protein, 561 aa, unidentified
  source 1..561: note = uncultivated organism
MPDTDNNPLAAAYLRVSTSEQGRPDRPSLGQQEERITALCQAHGWTVIETYQDVVSGRRWERPGLQQLLADAETGTFARLVVLAIDRLGRNLKDLLEITERLRANGVALVSVKESIDTESASGNLYYQLLGAFSEFESHRIAERTSDGRHGSVRAGKYLAPTTPYGYRREGGQLVEDPIQAAVVRQIFQWTTEGMGLRAVATRLNEEGVLPPNPEHTRRKSKWGWQFRTVQKIITAGRYAGHAVYGGLVTDPGLRRSGDPAQPLKHPRYRKDADLGTPMHCPSLVTDELFEAANAALGQRRFDQHRDAGHFYLLQDLVFCQCGSKYLVKTNREGGQSYACRRRRTYGPAAGHEGVRWSWPASVLERAAKQHVARLLVDPTYLEREAARYEVQAKRAQTDREAELRHLRNHLEELDAEQRRLIRALRKGTVSEDQVEEELNAIGFERRAVEGRLRTLQQSPISVSGFMQQAGELRNVAALFQHVRELVPGADWNDDAWTDGVIGSDEAWQQTIRQLVTRIVVNDNGSLTFEGVQLNIPSRGEAHLNASRYMVTVRTPRRARR

SEQ ID NO: 2634 - protein, 588 aa, unidentified
  source 1..588: note = uncultivated organism
MEHIENNSLKSTRTWRACGYVRLSHEDGDKEESNSVTGQKNLIRDYFSRHPELSECGMAVDDGFSGSSFERPAFQKMMDDVRARKIDCIVVKDLSRFGRNYLDAGEYIEKIFPFLGVRLIAVNDNYDSMDGAASNELVVPFKNLINEAYCRDSSVKIRSCLEVKRRNGDFIGSFAVYGYLKDPQNKNHLVVDGFAADVVRDIFQWKLEGISAADIAARLNADGILAPMDYKKQQGLRFATPFRVKSRSPWSATSVLRILKNSVYMGVLEQGKNTTPSYKVKKRVERPRGEWAVVENAHEAVVDRQDFFSVQKVLAMDTRRSPGGSKVELFSGMVSCGECGAAMVRKTVPSGGKKYVYYVCAAHKTEKTCYAHSIRDATLEKIVLESVQKQIQYVISLAGLLEMAETAPFQKAGAKKIQERMESRKREADRYRRLLESLYENMMDGVITREEYRELKKNYTELRSEAEAQAEGLQEEMVRILESSADGNGWMEQFKKYRNIAKLDRTAVVSLIDRIFIYRDRRVDIIYNCQDEISLLNETLAQMQGMDGGTEYTFCGPVAECSMDSPGSGQDLSGRALPDQNLSGKAGV

SEQ ID NO: 2635 - protein, 511 aa, unidentified
  source 1..511: note = uncultivated organism
MAQVQIIQPYQPQSDVLEKVAAYCRVSTDSKDQLNSYRTQIGYYTNFIAQHPGWELVDIYADEGISGTSLEKRDEFKRMLQDCRAGKIQRILVKSVSRFARNTLELIETTRELKDLGVVVVFEEQGIDTAQMLGEMQLTLLAMAAQEESTSISKNMRWSIQKRMERGKYVTTKAPYGYAITDGKLTPNPEEAAVVQTIFRLFLEGKGQQQIAFLLNQTGIIPRESPKWGRTTIEHILSNERYIGDALVQKRFTTETLPHRQVINRGQIPQYYITDSHPALISREIFDQAQMLKATRAVSPIQSTHTFTHRIQCPSCGRYYRHINSSGTSRWACPNRVNKVKDCPNFWIPEKTIKAAFANMIGKLYSYHDSLLAESMKLLEEIAARQEQGNTKLYELNSALADLNEKAHTLQRLHNKGFIEDADFREQSDALASQRKKLTDQRTQAIHGSKALVTLDKLRELQRQLDALPEFPWEFDMDQFDQLVEKIVPISNTELLFKLKCGLELKEVIPQ

SEQ ID NO: 2636 - protein, 580 aa, unidentified
  source 1..580: note = uncultivated organism
MNLNNKANNKRYYNCVIYTRKSHEEGLEQEFNSLDAQRESGEAYIKSQAHENWKLLPKYYDDGGYSGGTLERPALNELLDDIKQNKIDIIVVYKVDRLSRSLGDFAKLMDLFDKHKVSFVSVTQQFNTTSSMGRLTLNVLLSFAQFEREVTGERIRDKIALSKQKGKWMGGVPPLGYRVVEHKLKIIEDEAKTVKLIFELYTGGKTNLQTSQHLNHQGTTTKSWVSKTGIKHNGTTWSPKQIYRVLANPLYIGKIKHKDKLYDGEHKPIIEQNIWDKVQSTINKQNTLDCLTKQQKHFFALKGLIRTKDDFALSPSTNKNIRYYVSQKAIKYGYGKCKIKNINAKLLEEVIFIYILDNLSAQLKQHLVNMYHQDSAQCWLAIRKLINMMTISPNNLWIELNNHEVKTLADKLEKQEFVSESRQQKQESTYNQNTVDAFKPIYQAKIQNTNSVLIIKVDINIKRHDGRRYILSKDGKSLINNSLNNDNELSSNNSQILGAIAQSYSWKDELNQNNLTINELADKVGKHYNFVYKRFQLLSLSPTILKQITSNTLSPLISLKNLYEAGKYLSWDKQHQYLDI

SEQ ID NO: 2637 - protein, 522 aa, unidentified
  source 1..522: note = uncultivated organism
MIKQIRCAIYTRKSSEEGLEQDFNSLDAQREACEAYIKSQKHEGWVLIEKQYNDGGYSGGTMERPAFKELLKDIENDKIDIVVVYKVDRLTRSLMDFSKIIDVFDRHETSFVSITQQFNTTTSMGRLTLNILLSFAQFEREVTGERIRDKFAASRKKGMFLHGTAPIGYKKENGTLIEIPEQSALIKMIFEKYLELGATPKLYKYLIENNIKTPNGKYFSVGHLNKLLNNKVYIGKITYKKEVYNGLHKGIIDEDLFEKVQECINLNKGERKFATNNNSYALLSSKLFDDKGNYMSPTYSYNRHKKRYRYYVSQPLIQHREQDAGSINKIPSDEIENFVRHEVESFIIKANIQKYLINYTITKQNKILNLLEKLKITDQIIRLMLHKVVIYKEKVELELNKNIMVKILEELASNQEISIDIKETEFITITKDTKIISTPRHGNKLIIGDEVQYNPTLINAVIKGFYLYKLWQENKLQQEQKNTYNYRLMNLRFLPLKIVEDILNGKQDQILTLKKLYELSRV

SEQ ID NO: 2638 - protein, 523 aa, unidentified
  source 1..523: note = uncultivated organism
MPKVAIYCRLSIEDRDKSCGDNSASIQNQKAMLRDYCRDRDWEIYDIYIDDGYSGIDRSRPEFNRLLNDCEKGRIDIVLCKDQSRFSRDTMVIEQFINDKFLEWGIRFIGVADNADSDSESYSTMRLFTSAYNEMYVKDISSKIRRTLAYKREQGQFIGSFAPYGYQIDPEDKHHLIVDEETAPVVRLIFNMYVSGDGYRRIVQKLNDEGIVSPSEYKRSKGSKYVNCNADSSNSKGLWTQSTVARILANEMYTGTLVQGKSHHISYKNKKRKKVEQADWVRIPNAHEAVIDAETWERSQQRLNSHTRVGKRSQELSPLSGKVKCACCGRPMKRNVYYNKAKTVKYYGLQCATYKTGAMNCPNTKTISGMVLEKHILGELNSIVEQYCRSDEISFTDIRSEQLRELEHRLSTLEVRHKAAKERLVKMYKDKLDGSVSDEDYALFRQSLSDEETSLLEQIAEVKGQIEDCRKRCDSAESQRALIEKYTHFDKLDRTIADEFIDFVEIGMTAESGEREIHIHWKL

SEQ ID NO: 2639 - protein, 509 aa, unidentified
  source 1..509: note = uncultivated organism
MSNTLALYARKSVERENSISCETQIEYCKMMIRPEERGEKVVTFIDNGYSGGNMNRDGFKKMMGLVRQGKVSKVIVYKLDRMSRSLSDFMNILQEFKENKVEFVSSQEAFDTSSPYGDLIVKILMVFAEFERTSIINRVSQAYLHRSEMGFYMGGRRPYGFQLVPTVIHNIKTKKLDPIPSEAEQVRYLFEVYAQESVSLRRLVDLMNAEGRQPLDGSHWTTAKLSTLLKNPIYVKADSNVYDYYDRHGTEIVTDVSQFTGEFGAQLYGHTKHQAGNPDWSDMRLVLLSHPGIVDSDIWLKCQRKLEKNRQITNSYSNTTSWLAGKVVCEPCGHTMTTIKGKPGKDGQVRRYFNCTGKSQRVCHGPKVTIYAEDLENMVYQCIAEKLAGLKEARYSSHKGGGERNDLKLKVKAIEQAEKQLLDTMLAGGFNEDLLTIANQKASQLKRDRLALYERIEELKNQEDQAGAVVNLAKSWKTADYQRKKAVAMILIHKILINEDGDAKIIWNV

SEQ ID NO: 2640 - protein, 526 aa, unidentified
  source 1..526: note = uncultivated organism
MSRKVLRCAIYTRKSSEEGLDQEFNSLHAQREACEAYVKSQVGEGWSALPAPYDDGGVSGGTMERDGLKALLCDIQAGKIDVVVVYKVDRLTRSLHDFARIVEVFDKHQVSFVSVTQAFNTTTSMGRLTLNVLLSFAQFEREVTGERIRDKIAASKAKGLWMGGNPPLGYDPKDRTLVVNEDEAVVVRHIFARYLELGSVNDLQAELARQGYRSKMRTTKDGRKIGGSPIGRGPLRHILSNPVYLGCITHKTVTHVGMHPPIIAVDLFDTVQEKLKAARVQRSTAIRTRAPLTALIFDAEGNRMSPTRSRGKGGKLYSYYVSAPLQQGGTVRPETLSRLPAAATEEWVHEQLARLLPYVGERGNAALQRVEIHVQSVHLAIDPEKLTQRASERQGLQAHLIAALQEGETFSDDGSLWWVRVGKRLRFRSGRAWVDGAASTPKRFDVTLARALKSAHRIARAHASPTSMLERSPTNPYERILVSLAFLAPELQASIINGSQPPRWRLEQLMTRDLPFAWIDQHQAFD

SEQ ID NO: 2641 - protein, 562 aa, unidentified
  source 1..562: note = uncultivated organism
MEHAKSRTRRCAIYTRKSSEEGLEQDFNSLHAQREACEAFIKSQTGEGWRLVKTAYDDGGLSGGTMERPALQRLLEDIRRRLVDVVVVYKVDRLTRSLADFAKMVELFDARGVSFVAVTQQFNTTTSMGRLTLNVLLSFAQFEREVTGERIRDKIAASKRKGMWMGGTVPLGYDVRDRRLVVNRAEAATVKHIYERYLELGSVRLLRGDLERRRIVSKVRVSKNGVRSGGRQFSRGALYELLSNPIYLGEIRHKKERHPGQHEPIVGRELWEEVQQHLRDQAAKRRERPTKAPPSPLAGKLFDENGEPLYVQGAVKGARHYRYYVSRGLVRGSVQDDQRGWRIAAPELERAVGAATRQILGDRAAIAGAIEEFNLDASRLPSIFKVAEAWIQTLRSEAEAASVLTRLIEGVGLKQDGIQVSIKLPIPSDEGRDVATPNELALTRFVPMRMKRRGVEMRLIIDGGATPAARVDLPLLTATARAYRWSNDLLEGSARSVGEIAKREHLTARHVRRVMRLAFLAPRIVEAIAEGRQPADLSTLAMTQRIELPPLWSAQERALDIR

SEQ ID NO: 2642 - protein, 563 aa, unidentified
  source 1..563: note = uncultivated organism
MRPFCGHRSAFHSPHAMGLIASSKSGPLRVAAYCRVSTDHEDQRNSLENQRAFFAHHIQQQPGWVPAGVFADEGLSGTSTARRPAFNRMISLAQAGEIDLILTKEVSRFARNTVDTLRVTRQLHALGVGVLFLNDHIDTRDNDGEFRLTIMASVAQEESRKISERTRWGQAQAMKRGTVFGNNTLFGYVLRHGTLTVDQAQAAVVRRIYHQFLAERKGTYRIARELTQEGVPPPLGPGGNWSSTEVLRILHNEKYTGDLLQQKYITTDHLTHRKIPNYGSQPQLLLKDHHEAIIDRETFQAVQEELTRRRALTSDGKRFTSRHWYSGKVICGLCGKTMTVKTTRRKSGTVYRRFVCRGSLAEGQGASACTAKGINAAGVDAAARHVLGLLPLDRERMLRDCLAALPSLCTASGTQAKEADQIRQAIARQDARRARALDAFLDGSITKDDWVRQARRWEAERRSLEDQLRQLTAPPDTSDAKDEKSVHTFLEKALDGAPCVLEEVIERIVVFPDVLHLFVWELPVFFQLRLDRKGSGRSYAIQVTSCTPFPRRENTSSFPPNPE

SEQ ID NO: 2643 - protein, 526 aa, unidentified
  source 1..526: note = uncultivated organism
MNLTELIARTPDADERLIRIAPYCRVSSDSADQLHSFAAQIRYYTEFVKSDPRYRLVDVYADEGVTGTSMEKRDEFNRLIRDCRKGKVDRVITKSVSRFARNTEELLTVIRTLKECGVSIYFEEQGIDTDRISNEMIVTFPGMAAQQESETISKNLRWGIRKRMQTGEYIGSGAPFGYRLVNGQLVICEKEAQTVRRIFDLCLQGYGKLRIARLLNAEKIPRRNGENTLNWCQDGVSYILKNERYIGDALLQKQYTTDTLPFRQKKNRGEREQYYIENAHEPIISMELFETVQTLLRERDNNAGNRTSSKSRRTILGGMMKCPDCGRNFRRIIQNGTAYWVCSARIGGIYDCAKLRVKEDEIFYAFTILTAKLKHFLQPLLGTAIRQMEMLLSETREGQDAIAEIDRKTADLTAQNLVLAKLHCKGILSAADFAAQSTDIGNRISELRAKRRKLLTEDSGDEALEELRELYRAVDSAPYIGIFDVRLLEGITKRITVQDNEHITFHLLGDISLTEQIREKGRCRAQ

SEQ ID NO: 2644 - protein, 525 aa, unidentified
  source 1..525: note = uncultivated organism
MAYGKRIRGNNALKENQNRVITIEATQRSEDFALRVAAYCRVSTDSLDQMNSFAAQQKYYTALISSKENWQMVDVYADPGVSGTSAKKRKDFQRLLADCRRGKVDRILVKSISRFARNTRECLEIVRELKGIGVSVVFEEQAINTGEMTGEMLTSVFAAIAQKESESISQRCRWGVQYRMQNGLFNTCNAPFGFRLQSGKLVVCEDEAVLVRRIYEMYLNGAQAREIVEQFKKEGVCPESWNWKSIEYILKNERYAGNALLQKRYSTDTLPPKKARNHGERAMYFVEGCNDAIVSKEVFDLAQQLRKSRSRPMIPNPRPLSGWIVCGCCGKSVRPKSVNGKRYMACRTHEENKELCTIQEIPETEIERAACRLYYNLKHHREILDGMLDRLLKVKERQMLWRPEIIEQNKRLSDLSCQNQLLAELKKQGFVDPDIFISKRQALAEQIRTVKLNRERMLSEGNDQSIPVTRAMIDALEDGTDYLDKFDGDVFGELIDKIIVDSGEQLRFRMKNGLELVEHIERTRR

SEQ ID NO: 2645 - protein, 547 aa, unidentified
  source 1..547: note = uncultivated organism
MKVAIYLRVSTEDQVREGYSLEVQEENLKAYAEREQHQVYKVYRDDGISGYTKERPALIKLLQDAKDNKFDLVIVYKLDRFSRNLRDLLNIVEELSAYNVGFKSATEPFDTTNSAGKLMFQQLGSFAEFERNRIKERVFPGMIKGVLAGHWQGARFAPFGYHYIKEKQLLELIPEEAEIVKMIYSMYLSGKTTSEITAHLYHHAYKTRTGIKFHSKLVCDILKNKFYTGKIVWNRKHYSKKEKTKGGYGKGYRYLPGNVSDVVEGQGKHASIISDDDFKRVQLRLANNTKRIRRIFNKHEHLLTGILRCGLCGCSYLGMTNTANHKTGERKKWYRCRLKGETRGIECNNRNIVAASYDEFALEVLEKATAHKVVKEKRYTELRKVAGDPTDDIVNSFYSFSQALNDNREKQKKLTTIYLEGGIGSEIYKQTQQPLKDEEEKLKRQIRGLEMKLIEKEASQEYNNLLTSVLNNPAKPRSYLTIFEKKALLRLVFKKIVVKEGVITEVDLYEPFKTLLPKEDIACLLSQVKTNLKIRDSDCTYARSDVK

SEQ ID NO: 2646 - protein, 603 aa, unidentified
  source 1..603: note = uncultivated organism
MKVALYTRVSTEDQAREGFSLEVQRTYLLQYAKNFGWDVFCSLSGKDVYMDDGYSGGNMDRPALQRLLFDARNKQFDLVLVYKQDRLSRRLKDLLGLLEEFESIGIGYKSATEPFDTTSSAGKMAIQMLGSCAEFERNRLVERVFPGMVVGVKRGHWQGARYAPYGYRYNKDAKKLEVHPEESKIVKEIFSMYINGKSTSQIAGHYYHLGIPSRQGGKFYTKFISDILKNKVYLGMLVWNKRRYDTKTKTKNGEGKGYCYIKNDPSKIIEVPNTHEPIISQREFDEASTLLKRNRTNGVVRFRNNVYHLSGILKCNECGGNYRGMTHIVNHRTKMRRPWYRCSSRGIRYIKCNNKSVTADAINKQVWDIVEVIRKNLHVLEELGDMIRLNASEPERVYVEQLEEKETLLKKNVEKQRAIYELFSEDKINMGLYKDRAELLSNEEKKLKQDIKAIHLKILDKRNSVNLVKATQDFLLRLRSTPESDNHQLDYLIKTFMRIVFKSIAIQNQEIVKFELNEPWKTCYEEGMKWLKTNEKTTIQAIPEAKARRSYVCFCAPSDDEWLDAYRKVLSFLKELFQDETSRSTKKKPTEGSTTTLPEKNDS

SEQ ID NO: 2647 - protein, 511 aa, unidentified
  source 1..511: note = uncultivated organism
MKTVEIISDQSIEKTEKIRLAAYCRVSTEKTDQLNSFIAQIKYYSDYAKKNTQYELVDIYADEGLTGTDMKKRNEFNRLLNDCKKRKIDRVITKSTSRFARNTQDFLIVIRMLKEIGVSVYFEEQGIDTGKLNMEMFAAFPGLMSQQESENISQNMRWSYQKRMQSGKFNTNNAPYGFVKENGELLINDKEAHVVQRIFDMYISGYGMQRIANLLNEEKTPLKYGHTHWTAATIKYMLNNERYMGDALLQKSYKTETLPFRKIKNRGEKAQYYIENSNVSIISKETFEAAQMMQRTRAKNRKANTKIYPLSKKIRCADCGKTYRRMIVNNTAYWLCSSRASGITNCTNLRIREKDIYDAFNELVIKLQDNREKIIIPTIRYIELMQGKNSENQQKIFAIDKKIADYTAQNHTLAKLHTKGVLDNISYTQRSSVITDKIINLRSERRRVLNESEEQELIAKLKNIDGILQEYIPGSEFDEEVFEQIIEKITPIDNTRLRFTLYGGLSFIEKI

SEQ ID NO: 2648 - protein, 538 aa, unidentified
  source 1..538: note = uncultivated organism
MKIAIYSRKSKFTGKGESIENQVEMCENYIKSHFSESQNSISIYEDEGFSGKNLNRPQFQTMMKEEFNKPFDLIIVYRLDRISRNVGDFSSLIDKLNSYNTSFISIKEQFDTSTPMGRAMMNIAAVFAQLERETIAERIKDNMYMLARTGRWLGGVTPLGYSSKKIENVDGVGSKRYYFKLVQNEECDIVKLIFAKYLEFRSLNKVMTYCINHNIKSRQDKDFSVSTIRKILTNPVYCIADIDGYNYFENQKSNMCCTVDDCTGDYGFVGYAKTQGATKSDRIVNDADKWIISVGKHKGVIDGKTFTCVQNVLLNNVDKNIRFKQSHNPVALLSGLVVCSCGSYMRPKYYRENKNGVKPYSYMCELKEHSHRQKCKNSNLNGLYADKTICDILLNYNVEGNIFNKYLNDIKNNIDTQKYKQQISNLEIEKSKKKREIDELINVLKSNVNPRTVEYVDKAITALDNEISQIDKDMNSLKLASSYNDNTKAKLSNVEEAFAFFKENFDTISIENKRNFLRQCISKITWDGENLHIFTKSL

SEQ ID NO: 2649 - protein, 517 aa, unidentified
  source 1..517: note = uncultivated organism
MAGGVAVYIRWSTDEQADGTTLEVQLEACRLFVGSQGWTFREDLVFVDDGWSGGSLERPGLGRLRDAVRRGEVSCVVVYKLDRLSRSVLDTVTLVLQEWEGVCSVRSTREPVDTTNPTGSILFYMLASYAEWERATIRERTLSGKIKRAQQGKNPGFAPPYGYRKAEKPGEWQIDEDEAVIVRRIFREYIAGKGCSKIAADLNRDGLRPRKAAHFNGMWLARMIRNPIYCGVLRYGRSTLATKAQRLQGANARVRFDEPRYACITGAVPAIVSPEEYARAQEVRAGRSSVAGFRNRGTEFLLTGIARCRCGAPVRGDGREKQGGGRYYRCSKTRIEDPGRCWCSLMPAAALEAAVLERVREALAPANRGLLLATWEAESQGQARQVEAELGRVSSALVRVAKARARVTADYRAGELPAKLYARHVDELDREEEALRAASAGLADELERLRASRVDLSEFEVLLLRLDGWEALTPDERKQVLRHALGRCVVYREPGTRRHLANPNPIEIQLEIRRTGA

SEQ ID NO: 2650 - protein, 516 aa, unidentified
  source 1..516: note = uncultivated organism
MEMEGYDAVYARQSHDVRDSLSIDMQIEKCTAKSEDPDRVKVYADRGFSGKNANRPDYERLMNDVEQGKIRKIIVYKLDRFSRSTLDFSLAWERMIRHHVDFVSVNESFDTSAPIGKAMTFIIMVFAQLERETIAERVTDNYYARAVTGAWMGGPAPFGTSISRIIIGGRSVPTLVPNEWMEYAVNIFKDYASARQPSLGSIGKALTEKGIADDKGSIRWPNVKIARLLRNPVYVKADADIYAYYKALGATIMHDITEFDGVHAAMLLGKRTGSCASGYASRQRNKISDCKLVLANWQGYVDSGTFLACQGRLQENRQIRNFKAEYSWLQGLMKCGFCGSGVKLQIQRSKSRKRYGEITHMRLACTGYIDHVCYHRIEFDAPEVEAVVEKEMIKVIDEMQEQQELQNQDIYEEEKKLPNNTKIEINKIDEKIQNLMNCIASGGATSQTIVYINQEIEKLSKEKIKLSQTMISTKKNIPLEKIDFKKLCFEDKKIVAKSYIKKVVINDNSIEISFRL

SEQ ID NO: 2651 - protein, 570 aa, unidentified
  source 1..570: note = uncultivated organism
MEPQKKVRCAIYTRKSTDEGLEKEFNTLEAQREAGENYIKSFKHQGWEALPEHYDDGGFSGGSLKRPALQQLLKDVEQGKVDMIVVYKIDRLTRSLLDFAQLVQTLEKHHCSFVSVTQHFNTCDSMGKLTLNILLSFAQFERELGAERVRDKVAASRKKGMWTGGTVPLGYTLKDKKLIIEPAEAEIVRFVFDDYIRTRSEVRTTQHVIARGYKPKERKNKDGTLKNGEEFNHGMVNKILNTPLYLGKMPYKGELYEGQHKAIIDQETWDRVKSIKSENIGNAFRPSRLIKNSLLKGLLECECCGTMTPTRCKKGNRYYEYYTSLKAVKEGVARCGCKIGTVPAGELDTFVLEKIQQVFKSPEIMRELAKQLELANPKYTANEAYKLVDNIGEAFQYFEPATIHDFIAEIVDKVVLHHDYIEIKLKPYGANIYENQMAIKDECYCKEKLILKYPMKLGRKRGSVKIIEPTLPTKSVPARDEKLYNAVTQAFYLKDIMETKKWSLAELSKHEHCDHTYLGQVLRLTTLAPDIIMAILEGRQPKLLTLRRLLRERFPYAWEDQRRELGFEPA

SEQ ID NO: 2652 - protein, 511 aa, unidentified
  source 1..511: note = uncultivated organism
MRIAIYSRKSLETDTGESIKNQIKFCMEYFQRQNENCTFEIFEDEGFSGGNINRPGFQRMMELVKIKQFDVVAVYKIDRIARNIVDFVNIYDELEKLNVKLVSVTEGFDPSTPIGKMMMLLLASFAEMERMNIAQRVKDNMKELAKLGRWSGGTPPTGYTTEKVIENGKKVTYLKLITEESQYIEEIFKKYADGYTTYKISNEMKKKGFNYPSKTIINILNNPTYLKSTKESIKYLQSQGYTVYGEPNGCGFLPYNRRPRVKGKKLWNDKSKFVGISKHEAIIDLELFMKVQERLQENAIAPRPKESSYTWLAGLVKCRCGSGMFVQPGRQKKDGSRVAYFRCTSKKSNPNSSCNNKFLRVDRAEKIVLEYLSQFLDKNYFNQLIKQKNNNIQLEKEINALNKKINSNTTAINNLVDKLMFLSNEASFVVTKKIEELTSQNNKLKEELLILERRKILNSFDEANSEAFYKIIINFINCVDDIELRRFYIKNIIKFMVWDSDTDTLTVELNI

SEQ ID NO: 2653 - protein, 670 aa, unidentified
  source 1..670: note = uncultivated organism
MDELFCSRKNKKCVIYIRVSSERQVQGYSLEGQKRYLKEWAEFEGMTVLNIYVEPGRSGKSISGREVFQHMLDDIATKSVDADFVVVFKLSRFGRNAKDILNSLTFIQRYGVNLICKEDGLDSSTSMGKMMITILGAVAEMERENILTQTYLGRTEKAKQGGWNGGFAPYGYELVDGKLERKEDEAAIVELVFDKFVNEGMGYSTIAGYLNKQGIPKLPSKNSHGTAFVDWNTGQIKRMLDNPVYTGRVAFGRTRLQKIDGTENEYRRVRADDFILSDEIVHEPIVSEELFEQARVKRKVTSTTGCPLVGRNSKHLLSGILKCPMCGSAMYSDTVMWTNKNGKRMVRRKYQCGHYAKAKNGQCKKNTILADWIEKEVIQYTKLLVNNEQFAEDVKKQIGQKMDVSEIDAEIEGYKKSLKKLERSKANLEHDIDNIVADDKNAARKRNDMNKRLDKIYEEIYSIEDQIEGCEMKKASVEQDALTQENVYKLLLVFDKFFDKMNKEDQRRLIETMISAVYLHPKETWKDGGNPIKEIKYTFLASNDAMEALRENSPSVETVVLLSHKKPDGHINVKVEFCEGEGKVPLDNIAKRAETYKPKERVTYKMIKEYIEAKYGFKVHTAYIAEVKRDLGLPMYDAPNAVEELKQPRKHPTVEKVEAIKDALKHFEVI

SEQ ID NO: 2654 - protein, 557 aa, unidentified
  source 1..557: note = uncultivated organism
MKRRSRQTVLSENDAVSAPRAALYMRVSTGRQAEHDLSIPDQRSQLRSWCSRQGHDVVAEFVEAGASATDDRRPIFQQMIERACDGEQSFDLIVVHSYSRFFREAFEQEFYLRKLAKHGVRVVSMTQPVGDESEPVQAMMRKVIALFDEYQSKENAKHVIRSMKENARQGFWNGAMAPLGYRPVEAEKRGTKVKKKLAVDPVEAETVCLIFKLYLHGDGKSGALGVKEIVKWLNARGYRTRRGKTFGVGSIHKLLTNTIYIGRRRFNQISSKTRKRKPDEEIVEISVPAIIDADVFERVQRQLHARSPRAVAPRVTTGPNLLTGLAVCATCGGGMMLRTGTSKGGRVYRYYTCSSCATKGKTVCKGRSISMDKLDTLVTDHLMERLFKPERLAVILASLSSRRAEKAESLNGRLIELQREVTDADDKLKRLYRLVEDGMTDLDEVLKDRLNTLKGDRDRAKAALERAKELSTPQIEIDPALIERFGRTMREHFSTGSVPFRKAYLQALIDVIEVDDHRVRIRGSKDLLEKAVLASQNTQFGCSQMSTNWRARRDSNS

SEQ ID NO: 2655 - protein, 519 aa, unidentified
  source 1..519: note = uncultivated organism
MNRRRLPDPPPPSKVRCAIYTRKSTEEGLDQEFNSLDAQREAAEAYIRSQAGQGWILLPERYDDGGFTGGNMERPGLRHLLADIEDGQIDCVVVYKVDRLSRSLLDFSRLMEIFERHNVSFVSVTQQFNTATSMGRLVLNVLLSFAQFEREIIGERIRDKMAATRRRGKWTGGTPILGYDLDRSQGRPRLVINAEEAARVREIFRLYRSLGSLLPVVQELNRRGWQNKAWKGRRGRIKGGRPFGKSSLHALLTNPLYIGKIRYRGALYQGEHEAIVDAEVFEQVQAMLRHNRQVGNVTNRNKYGALLRGLLFCKACGRAMTHTFTCKGQRQYRYYTCTRAIQNGHKVCPSGSLPAGEIERVVIDEIRAIANDRGLQAEVLRQVQEHFAAERAELTTEERQLKRELSRYDAELRRLSASHGAAEQLAELHDRMAQGERRLGEIRQRLQEQEQNSLTAADIDAALADFDGVWDSLSTREQVQLVALLVARVEFDAVESTVAISFHPTALKALADKQHGGTP

SEQ ID NO: 2656 - protein, 506 aa, unidentified
  source 1..506: note = uncultivated organism
MRKVVSHEENQAKSVGIWIRVSTEDQARGESPEHHEKRARDYAALKEWRVREVYHLEAVSGKSVMGQPETQRMLADIASGHITGLVFSKLARLARNTRELLEFADIFQTQHADLISLHESIDTTTPAGRLFYTMIAAMAQWEREEIAERVAASVPVRAKLGKPLGGQAPFGYEWKDRQLIPHPEEGPVRKLMYELFLQHKRKKTVARMLNDAGHRTRSGGRFTDTTVERLLRDPTAKGERRANYTKSLGDGKRWVMKPESEWVVTAVEPIVTRELWEQCNQNLRDMSKGKRPARTVVHLFAGLAYCSCGQKMYVPSNSPKYICYKCHNKIPVTDLETVFHEQLKSFFFSSSDIAAYLQQADETIKEKMELLKSLEKDAEKTKREMDKLYNLYLADEISRDGFGARYHPLEERQKQITDQMPHLQGEIDFLKVQYLSSGEILTEAKDVYSRWPELEQSDKRQIIENIMEKIVIGKDDVAISLCYLPSSSEIMAGGQRNLRGSWRRPA

SEQ ID NO: 2657 - protein, 546 aa, unidentified
  source 1..546: note = uncultivated organism
MTQPAKLRCAVYTRKSSEEGLEQGFNSLHAQREACEAYIRSQVGEGWVLLRTAYDDGGFSGGSMDRPALKALMAEIEAGRIDVVVVYKVDRLTRSLMDFARIVETFDRKGVSFVSITQSFNTTTSMGRLTLNVLLSFAQFEREVTGERIRDKIAASKAKGMWMGGNPALGYDVEDRCLVVNPAEAATVRMLFERYRCLGTVHALKEELDRAGVVSKAWVSQKGRSVGGQSFSRGALFHLLKNRLYVGEVVHKGQSHPGQHTAIVDRDLFDAVQAGLLANAATRRDRPTKSSTAPLKGLIFDQDGEAMTPTFGYGKGGKAFRYYVSASLQQGARRNPDDDAVRRVSAPQIEALVLERMQRLTSAAGWAGVAPYLQRVDLRAHCLQLTVGSAGLLDRRGADDLAMAALSRRLEPDDRLQVDADKRLHLTIGVRPVFRGGRTWLVNLNGAAAIAKARVDAGLVSALRKAHAALLQHNAAPGADLKVLRNAASPDDAYVRKLAGLAFLAPDIQQAILEGRQPPGLTARQIIERGVPLAWPDQRAMFGFPS

SEQ ID NO: 2658 - protein, 574 aa, unidentified
  source 1..574: note = uncultivated organism
MKAKEFYNVAIYLRLSRDDLSTAGGRDIGSIDAGSRKAESNSIRSQRDMIRSYIRSQDNMEIYDIYVDDGFSGANFDRPEFKRMMQDIEAGNVDCVIVKDLSRLGRDYIEAGRLIQKTFPAFSVRFIALTDHFDSLTADYHETSLVVPVKNFVNDSYSRDISGKVRSHQQAKREKGDFIGAFAVYGYRKSDKNKNLLVPDDYAAGIVRKIFAWKIDGYSSFAIAQLLDGMGILSPMEYKKMNGEKYHTGFVTGVKTKWSAVAVKRILTNEAYIGTLVQGKDEKVNYKVKKSVRKPEEEWTKVKEAHEAIISKEDFEIVQDLLKVDTRAGRGEKKSHIYAGLLFCGDCMEPMTRRVNRYKGTETVSFICSTKNRGGGCSGHKIPEEDLNRLVLNGLKQQVSLFLDKSKVLEAIGQMEIHFEEVAAFDKEIERLYSEQDKYLTLRAGLYEDLKKGIITEEDFKNFREIYEKRYQELQQAVRSQEEMIKRLFQSGVSAGMNLERMKTAMQVTELDRTTLITFVKRILVYEDKRVYLEMRFKELFSKVIMLADYIDADKQHGKGGKPALPAGADGKNL

SEQ ID NO: 2659 - protein, 517 aa, unidentified
  source 1..517: note = uncultivated organism
MATAQDNLARKQIYIPALQPETVILRVAAYCRVSTNSEDQLNSFSAQQTHYNDLIRNHEGWQLAEIYADEGITGTSAAKRDDFQRMLSDCRKGRIDKILVKSISRFARNTKECLEITRELKELGISVLFEEHNIDTRMVTSEMLTAILASCAQAESESISQNMTWSIQKRMQKGTFNTCRAGTGFLLSKDGLRIQPEAVSVIQGIYIDYVSGQNSREISDRLTVEKALGRVWNRKLVDYILTNERYAGNALLQKKYRTDTLPRMKKPNRGERPMYYVEGSNPAMIEQELFNHAAELRKSRRRDAIQGQARPFAKKMHCECCGNLLRSKKVNGIWYWVCRTHEESTEKCTLLPIREDEIIRAFFRFYHNLKNHQEVLSFMLQQERKIRSRQMLWGTGIIEINKRISDIISQSHKLTTMNRCGNVDPDIFIAKSNQLAEQLRKAKQQKERLQIQENNSFIEMTEQIQTQIVDGPDMLVTFDAELFCELIESIIVQSNTKIRFRLKNSLELPESIERTVR

SEQ ID NO: 2660 - protein, 511 aa, unidentified
  source 1..511: note = uncultivated organism
MEDMLTTEYDGCGRCLVATRRLSRMADDTSSPTRQANQDLKAVADVGGHIIAWADDWEVSGATDPLTRKGLGPWLRGEMGPYDGLVGPSVDRIGRNVRDALNTQVLLTSQGRLVVTADHTGVWDFSDPNQENDWLFKALGSQMELRAIQKRNRDETIRAREAGDPKQRPSYGYMYVRLIPTGKVDHVEIDPVGSEVIREVAQRILADETGKITCATEAARLTREGIPSPSDRRAQLYGRPLSGGPWTGKTVKHILCSEAALGYLMHDGRPVIGDGGKPTRIAEPLWDRAAHNAIVAKTAPKRSGSRAPKGVQLLSGIAFCGNCGARLYLTGRRGGNGAYTGAYGCTARVRGIQSSANCKPAPTIGVADLDAQAGEWFLARYGAGEVMRKIYDPGTGHAAEIAELEAARKRLRDDRKAGLYDSDDDAEWYRTEYKHLGEEIIALKALKERKPGIRAVGTGRTIAQEWEKADDARRREMLTEFEVRVVLHPLGHAPRVAITGMEIPEGYELAG

SEQ ID NO: 2661 - protein, 528 aa, unidentified
  source 1..528: note = uncultivated organism
MLDNSNVAPGKNKTLRCAIYTRKSHEEGLEQEFNSLDAQRESAEHYIEAQRMRGWTALPDRYDDGGFSGGNMERPGLRRLLADIDAGKIDVIVVYKVDRLSRSLLDFMKMIDLFNEKGVSFVSVTQHFSTTDPTGRMFLGILITFAQYEREVIAERIRDKVAAAKRRGKYCGGVPILGYDVDRDNKKLLVNPDEARTVQYIFRRFIQIGSVKRLGQELNEQGYRTKAWTTKKGKVRKGSEWNTAHIYRLLNNRLYIGEIVHKDRSYPGEHEGIVDRTTWDKVQAILADNKPVKVSMAMTKMVAPLKGVIRCGYCGCAMGPTYTRKNGRHYTYYICEKDSKRTVSRCPLKRIPSGDIERTVVEQLSAVFRTPTLVAKTYFAARDIEQTERERLLKQKTLLEKELTQSRQQAIELMKPGNNQTGKPEMLDNVNRQAVELSKQLANVNRRCTVYQSANITELDISEAFQNVEGFWEDLFPVERNRLIRLLVDKVEIRETGIDMELRTNGLTTLIAELAGLACEVTERRASR

SEQ ID NO: 2662 - protein, 530 aa, unidentified
  source 1..530: note = uncultivated organism
MRNESRARDLRPVGVGRADVRCAIYTRKSTDEGLDQAFNTLDAQREASEAFINSQRHEGWTALPQKYDDGGYTGANMDRPALKRLLADVEAGLANCVVVYKVDRLTRSLLDFARIMEVLDKQGATFVSITQQFNTTSSLGRLTLNILLSFAQFEREMISERTRDKMGAARRKGKWVGGNLILGYDVAPQGGALNVNEDEARRVREIFQMYLEYGSLIPVVGELDRRDWRLKAWTTREGRGVGGSVFTKNKLYDMLTNVTYTGRVDYSGQIYAGEHAAIVDDETFTRVQETLKRNGRRGGRNVRNKYSALLKGIVRCATCEAGMIHTYTKKKNRLYRYYVCVKAHQRGWDKCQTRSVSAQALETAVVEQIRGISRNPAMMGEVLRQLADQNRRGSVESDREKAAIERELEELAQEMGGLAGLVSSPGPAAKSATDRLAVLHDRAAELEQRLAGVREKTGNADSQRVDSNDLQKTLEEFDPLWEQMTAWEREKFIGALVKQVSYDGTTGTVTLEFRSGGIRSLCENGTARQS

SEQ ID NO: 2663 - protein, 567 aa, unidentified
  source 1..567: note = uncultivated organism
MQKKQIVRMLLRVSSNQQLEADGDLSVQRRLVMEYISKHSDWVLDEKEYFEGSKSGYKTAVSDRDTLQEAMKDAKKQEYDILVAYKDDRIGRRMWEIGAYVMTLKNYGVDIYTVKDGCISPEGDDIMGQMMLALRFGNAQKSSSDTGMRVKDTAQKLVQQGRFMGGCAPYGYELVLSGEISKHGRALHQLKVIPEQAEVVRHIYSLSLNKEFGSAKIAKVLNEDEYYKTMAPKDVWKSGTITSILTNPIYAGHVAYKRRERINGKYHRLDSDDWIKSVEPDGSLQIIDGDTWDRTQVKRRSRADKYIKTLENQGVKVMRRNGGMLSLIDVIYCGYCGRKLTNGTKYSYWTMKDTGERRASRTPVYRCQSAQLGIPHDKVTQFRADRVEKIVYDSIMEYIRNLQEKEDIFEVIEQSQSRERKILESEIRRLEKELKKIADGIETMEACIPQAISGTYALSIEELAAVIRKQKEKAEEQKQLVSQKRGAIREVALTMEEWMQLKAKIPTWQQVFQNADAETQRVLVNKLVGRIDVTDEQIVIRFKLNLNDFLPRISGGCGTIPYTHGSA

SEQ ID NO: 2664 - protein, 639 aa, unidentified
  source 1..639: note = uncultivated organism
MSESSEAKIKRCAVYTRKSTEAIEDGFNSLDAQRESAENYIKSQKNNGWQLLPEHYDDGGYSGGNTERPALKRLMADIEAGKIDILVLYKIDRLSRSILDFMNMAEFFEQHNVSFVSVTQDINTSTSSGRMMLNILMAFSEYERDLITERVLDKIAGAKRRGKFCGGVPILGYDVEDKRLMINNKEAKLIREIFTTYTKLGSGLEVARILNGKGCHTKSWTSKKGKFYPGRKFAPKDVYRILNNPLYIGMVQHNGNIYDGEQEAIIDKKLWDKVQYLLKENSKCPSGESKNSLVSPFKGLLVCGYCGGSFGITYTKKKNRRYMYYICIKDNDRAEHECPLRRFAAGAIDKIILQQLSRIFKSPAMLMKTYRELEKLQKEQRAKLLKRFSELKTEQDEVCKQLRDGGDIAILTPRYTELANSLDEVKRELESIGEIYSTDNLAETCGSIKDIWEELFPAERYKLAHQLIDKITLYTDHLVMDVKHHGLKSLIGELKTDQDIEVYQPENSEIIQLKIPVLVKRWNGRKLIVTPGEKESEQELLEHEPTAMAKRLAQSHKWIELLESGEYSTLSQLGEAFNCDLSKVMKILNLASLSPKIQKIIVNGNIPQSLALRRLYGNIPVDWEEQEQMFGFKQEAAYA

SEQ ID NO: 2665 - protein, 506 aa, unidentified
  source 1..506: note = uncultivated organism
MRSAVRHEENSGKSVGIWIRVSTEDQARGESPEHHEKRAHDYAALKEWRVREVYHLEAVSGKSVMGQPETQRMLKDIKSGHITGLVFSKLARLARNTRELLEFADIFLAQGADLISLHESIDTTTPAGRLFYTMIAAMAQWEREEIAERVAASVPVRAKLGKPLGGQAPFGYVWKDRQLIPHPEEAPVRKLIYELFLQHQRMKTVARLLNEAGHRTRSGARFSDTTVERLLRDPTAKGERRANYTKSLGDGKRWSLKPESEWVITSVEPIVSPELWEQCNQYLRDRENGKKPARKAVHLFAGLAYCTCGAKMYVPSNSPKYICYQCRNKIPVTDLEGVFHEQLKSFFFSSSDITAYLETADGTIKEKQTLLESMETEAQKAQREMDKLYHLYQADEISRDGFGARYRPLEERLKQVTDQIPRLQGEIDFLKVQYLSSDEILSEARDIYSRWPDLEQSEKRKIIENILQKIVIGQEDVAISLAYLPSSAEIMAERQRNLTGSWPRPA

SEQ ID NO: 2666 - protein, 501 aa, unidentified
  source 1..501: note = uncultivated organism
MSLEHKPIMRCAIYTRKSSEEGLEQSFNSLDAQRESSEAFILSQRQEGWRVIPTHYDDGGYSGGTMERPALKRLLEDVEAKKVNIIVVYKVDRLTRSLSDFAKIVEALDARGVSFVSVTQQFNTTSSMGRLTLNILLSFAQFEREVTGERIRDKIAASKKKGMWMGGLVPLGYDLEGRKLVPNAKESELIRKIFSLYLNLGCVSKLAVELNREKIRSKIWITRTGARLGGVAFARGALYALLRNRLYIGEIRHRDQWYPGEHAGVVPRDLWDKVQTQMNSNLRTRRQRAREQASSLLTGLVEDAAGNRLTPSFTIKRGRRYRYYVSQLAIKNTTGQRDGPTRVPAHELEGRVIEKLVSFLKSDADVFDRLGAENESPASTRDLVVAAKKLAARLPSLPSDDLRDVLGAFLRRVAIQENSIEVMLSRKELRLLLENGGKVVASNLCLRKTVDANDLISLTIEAKSKRCGGEVHLVVTAQLQRPGSTSQVFADKGDRTSLRLA

SEQ ID NO: 2667 - protein, 535 aa, unidentified
  source 1..535: note = uncultivated organism
MENNAPKEKKRINCAIYTRVSTADGLEQDFTSLDSQRESAESYITSQKNEGWLILQERYDDAGFTGANTDRPALQKLITDIKEKKIDCVVVYKVDRLSRSLLDFSKLLEFFDQNNVTFVSITQHFNTQNSMGRLTLNILLSFAQFEREIISERTRDKMGAAKKKGKWIGGCVPLGYDLDKENHKLLINVEEAKLVREIFDLYLKEKSLLAVTQIINDKGYVSKRHESYKGKKRGGIKFKSTTINQIVRNVYYIGKVRYHGVIYSGEQERIVSDDTFTKAQELLVINRRVPDNTPKGKKIALLSHILRCKACDSAMHIAYCIKNNKMRYYHYLCINAQKRGYKACPTKLLNANLMDNKVISCLKTIIDDPRITSDEWNILPLEQKSTIIKSIIKEIRYDGATGMLEIQLHDDKVYTFSAPKEELKHLPVLPKDRLIRTEPQLRQNLLLAHQIQQLLSEGRSDNLKQIAGWLNITPQRINQLRNFILLCPKIQEDIFLGDDKAISEIPEYKLRRIIDTMDWQEQQKFWQELRNNPTK

SEQ ID NO: 2668 - protein, 529 aa, unidentified
  source 1..529: note = uncultivated organism
MSRRQQTDGSLALEQKKVIVIEAAQRPEAQKLRVAAYCRVSSDSSDQMNSFAAQLNYYTTLINSKDNWTMADIYADAGISGTSAEKRPDFQRLLSDCRRGRIDKILVKSISRFARNAVDCLKTIRALKAIGVGVCFEEQGIDTSEMTGELLTAMFSAIAQKESESISGNMRWSYRHRMKSGKFITCKAPFGYHLKDGMLEVYEPEAEIVRMIFDQYLAGQSKDEIAAHVTTLGIPTRDGKEYWQHSSISYILRNERYVGDALLQKRYTTDTLPYKKKMNHGEREQYYMPQSHPPIIDRETFNAVRELLDRRSITMPRYERDPLALKITCGACGTPFRRTICSQKTYWVCRKHYKNKHNCSMEQIAEDEIHAAFLRIYHKLRLHGEPILKQMLSDLQSVRERRMLWSMDIIELNKRISDINDQDRMLADMNKCGLVDPDIFISRSNDLAHQLRTAKLEKERILGADHDDTIPRTRELMETLETLPEFLPAFDGEIFTDLVDGITVDSGNILRFRLKNGLELTERVERSVR

SEQ ID NO: 2669 - protein, 529 aa, unidentified
  source 1..529: note = uncultivated organism
MSGTEKTNGSLALTPQIITIPAKEPERTRKLRVAAYTRVSSNSRDQLHSFVVQNAHYSKLITDNPKWELVDVYADKGITGTSVEKRDDFLRMMEDCRSGRIDRILVKSTSRFARNTKESLEAVRELKSLGVSVYFEEQNIDTEQATGEALTAVFSALAQKESEAISERMRHSYQMRMQRGIFSTRCAPYGYRLVDNQLEVIEDEAVVIRQIFDRYLSGVSMEDIAKEITAWGIPTKQNTPFWQVRSIQYILRNEKYIGNSLVQKTYATATLPHRKKENKGEEDQYLIEETHSPIISQEVFDKVQQLLSRKSASIPPRAGIPHPLSCKIVCGHCGAICKRKVCRGTAYWVCQTHEKSAESCLTMQTPESEITEAFLRVYFRLKRYGEEVLTQLIQALQTAKTGRLLWSEDIISLNNRIADIASQERLLAQLKQQAIVDPDIFISRSNQLAEQRREAKLKKSRILRAEDDQTIQRTQELLDILEEGPDLLMTFDGALFSELVEKITIQNNSTAIFRLINGLEIPEHFERRK

SEQ ID NO: 2670 - protein, 519 aa, unidentified
  source 1..519: note = uncultivated organism
MERSITQTAFLKPPSEQMIRVAGYARVSSGKDAMLHSLAAQVSHYSDFIQRHHGWSYVGVYADEAKTGTKDSRDNFQRMLADCRAGKIDLIITKSISRFARNTVTLLETVRDLKGLGIDVWFEEQNIHTMSDDGELMLSILASYAQEESRSISENVTWGQRKRFADGKVSMPYKQFLGYEKGEDGTPVINEEEAAIVRLVYKLFLEGKTPAGICRYLEQQSIPTPSGKQKWSQTTVDSILSNEKYKGDALLQKKFTTDFLTKKMKVNEGEVPQYYVEHSHDAIIEPLEWDMVQAEIARRRSLGRAYSGNSVFSSKLVCGDCGGFFGQKVWHSNDSYRKVIWRCNSKFKGESKCATPHLDTETMQRKFLVAYNQLMADRESVISDCVLMRQMLSNAAELNAELDSLNAEIMVVSELVKTCVRENASTAQSQEEYAKKYNGLLARYEKVTTRLAEVTAEKERKHDQDRELRLFIEALKKQPLVLEEWDERLWIAILDRATVFRDGRIVFKFKSGREIEVER

SEQ ID NO: 2671 - protein, 541 aa, unidentified
  source 1..541: note = uncultivated organism
MDKKNIRCAIYTRKSTEEGLEQDFNSLDAQREACEAYIKSQMHEGWILIEKEYNDGGYSGGTMNRPAFQELLSDIKEDKIDIVVVYKVDRLTRSLMDFSKIVEVFDKHKTSFVSITQQFNTTTSMGRLTLNMLLSFAQFEREVTGERIRDKIAASKKKGMWMGGIPPLGYKRENKKLVVEEHESLKVKLIFEKYLELKSVPKLMEWLRNENIRTRSDKEFYKGELYHMLSNKVYIGKIVHKDNVYEGEQDGIIDDITFERVQKLLYENKVDKICGTKCSSNSLLTGLIFDDKGNRMTPSHSTSHKRRYRYYVSQAIKKYSKITVGSVSKIPAGEIEKFIILTTKELLQNKKQMQKILSEFDVNKQIELLKIAKNIKYYENPKLIRSVVNKVVVSDKDVEITYNARNIRELLSIISRGDKVTLIPQGKEIEPITITKPIKISQPSKTGNILILSAKETDATTPNPYLVNAIVKSHYYHKQIRNGRTIEDLKKEENLKDSKYIRNILSLKYISPDLTEQIFDGTQSEDLSLQKLIKFLNSVQK

SEQ ID NO: 2672 - protein, 596 aa, unidentified
  source 1..596: note = uncultivated organism
MSTAHRRCAIYTRKSHTEGLDQPFNSLDAQRQAGVDYIKSQKHEHWQVIDKHYDDGGFTGGNMDRPGLCELLQDIEHGVIDIVVVYKVDRLSRSLHDFAQIIKKFNDYEVAFVSVTQQFNTSTSMGRLTLNMLLSFAQFEREVTGERIHDKIAATKKKGLWVTGHPPLGYEIVDRQLVIISAEADLVNKIYMGYLEHASLLELTNQLNQAGHVTKRWLSSRNRWHGGRKLTPKYVYRILTNPLYIGKITHNSSVWPGQHKSIVSQALWNRVQETMDRHQRQTRHRWNHPYLLKGKLRTHENSAMSPSTVHRPTKNKDQKRLIGYYVSQTAMRRGYAHCPIKTINARHIDDLVRTLVLDHLDSQSLEHLRTRDCEVRDFWLREMIEQVALSPDQLAVTLNTGQIEACREYNWPEVGAETNQPSSLTCLYKPTIEHRRDQTVLTLAIEIKRLDGRRLLLSPDGQDLLMPTEPQPKEHIVTAIGSAYRWREQLIRDGLKVSQLANRLGISKSNIRKYLPLVYLSPNILKRALTGQLSASVTMKNLLAAARYLDWQHQAHLLGLNKSPNPSQATLDPSRSLSKSAPVKMAKETFGRFNLR

SEQ ID NO: 2673 - protein, 538 aa, unidentified
  source 1..538: note = uncultivated organism
MPEKIIREIPPHPIDRKPRKERTLLRVAAYCRVSTEEEEQKGSFETQCSYYTEKIQSHDGWTLAGIFADDGISGVHTKKRDDFLAMIEQCKKGKIDLILTKSISRFARNTLDSIQYVRELKKQGISVIFEKENINTGTMTSEMILTVLSAFAQAESESISQNVARGKRMGYRQGKFSFPYSCMIGYRKGPDGNPQIIPEQAETVRLIYNDYLAGDSLVKIAENLDARGIPTPKNKGKWSSQTVMRILQNEKYAGHVLLQKTYTADLLSGTIKKNNGELPQYYIENNHTPIVSQEMFLLVQEEIARRKSKSPASQKKVRTNRGRYTSQYALSERLICGECGCYYRRVTWNIRGKKKIVWRCINRLEFGKKYCKSSPSISEDVLHNAILRAIRELAQQQRAQTQKCLHDTILQCATGGLDISLTTLKNQLEQKNRDFDRILEMALTDGAESEFVEAKMSKLNDEILCLKQKIKQTEKEATTQQASKEDIKKVFDTLLEEHEKLTEYNDSFIARIIERVMVDDFEWLTIRFIGGYEIRIRL

SEQ ID NO: 2674 - protein, 522 aa, unidentified
  source 1..522: note = uncultivated organism
MRFATYGRKSVYSDKSDSVDNQERMCREYADLKFSGQIDSFEVYQDEGFTGANTDRPGLERLLRDVKDGLLDALIVYQLDRISRDVRDFSNIYALLEEKHVMFISIKENIDTATPIGKAMMYVTMVFAQMERETIAARVTDNMIGLAKKGYWTGGNPPYGYVRERIVVDGKKHVTIVPDPEAAKYVESIFDTFLENGYSLQGMETAFKRQGVRTVTGAFFSTTQLHKILTMPFCVPATKAIRDFWINQGCNVEGSEEEWDGSHGVMIYGRSTQKNKRHQLQPKSEWVVCVGAHKPFLSEEKWLAVQDRFRQNTFDKKQKYDVPLLKGVLRCAKCGGLMQVSRKKKKVGVSSHYYCLKRMRQGPGACDMRMLKCELLDDEVIAIFRRINADPDVVRKYAAAEQAEDPGADIPVLAKKVSAQTAKIERLAASLAEAENSSAQKYIVAEIERQDLNLAALKRELELARTKKRKAEMNGRNLQDKAQEIGNLVKAFDSLSAKDRNAVVREVVKECTWDGETLFLSL

SEQ ID NO: 2675 - protein, 687 aa, unidentified
  source 1..687: note = uncultivated organism
MKESTSHSRVVLPLHEQGIAIYSRKSRFTGKGESVGNQIELCRQYLRAHEPDAPEPEIFEDDGFSGGDLNRPAFRRMMRAAEAGRFRMLIVYRLDRISRSIGDFTALIERLAQLNVAFVSIREQFDTSTPMGRAMMYIASVFSQLERETIAERIRDNLHELAKTGRWLGGITPTGFASETVQAVTVDGRTKRACRLRLLPEEAETVKAMYSLFARLGSLTAVVKGLQERGITTKNGNAFTRHAVRDILHNPVYARADADMLAWLRNAGAELSAAQEEFDGRHGVLAYHRTDQSRGRTAVALPPEAWIVAVGQHPGLIPGSQWAAVQERLRRTDCRTPRTEHETPALLAGLLQCRCGRPMYAKYRRAADGERFSYVCRAKSTGGREQCSCPNVSGTAADAAVRAMLCALPEDHAALAAALRTLRRSLPESSPAQQACVPLTLRDCLNAVRRTQRVLEALTEQLRWDGETLCVTLRRVDSKCNTIVAEQTAVEVENHEPFGAKWSMFCRLKVRSYVLAANVAGTLKVAPLQILKFPVVLPHKFLDAEKFNLRFSDASEITEIADKLRWYRYQKGLRQRDAADYASIDRSTYIHYEEAGRDFYPKEHMEKLAELFEVPLEDLLDDYNLFLLRGQGEQIKAIRQRLGLTQKAYATQLGVPLQKFKRWEQGSAQIFKSTWEKYFKQGLESRE

SEQ ID NO: 2676 - protein, 562 aa, unidentified
  source 1..562: note = uncultivated organism
MQNHAMNLFDQLDPMSQAGTQKRAAIYARVSTTEQAEEGYSIDEQVRVLREMCEREGYIVYKEYVDRGISGKDIKGRPALQQLLYDAQHKSFDVVLVWKMNRLSRKLNDLMSIIEKLKTKNIAFRSYTERYETESPSGKLLFHMMGAIAEFERDNISQNVKMGMIARAKEGSWNGGQVLGYDVVSVPSDNRKRKTSKLVINEKEAQTVRKIFNLYIQGNGYKSIANRLNKEGYRTKKNKAFSINGVKTILSNPIYAGYIRYNVRRDWNEKRRNNINPNPVIVKGQHEPIITEEIWEKAKNIMKNRSGKPNRIHSGEFPLTGILKCPVCGAGMVLGRTTNRNKDGTKRVLEYYVCGAWKNKGTAVCHSNSVRTDYADKYVLQKLAELANNDVLIQHIVENINRKNKDGLTPLQQEYETLKKSLSTIQTKKDKVLGLYEDGVITKDDLVSRLSSLNDEKERLEERLTPIEEQMVQGGIPNINFRVVKQVMQNFMTAYKEALTQEQRKQLLHLLIHQITISENRKIDTIQIQLNKEVVKHFTIKGEESSSTMDELSPPFSIFINL

SEQ ID NO: 2677 - protein, 550 aa, unidentified
  source 1..550: note = uncultivated organism
MTAAVRPKRAAAYVRVSLIGKRRVDTIVSPEVQLQSAESFVRSKGWEFMHELSLQTQDLNVSGFSKTWRKRPGLMRLVQAAERGEIDVIVVYKSDRIGRNLRESLDLLHMLEKFGVTVLSSTEGIDPETKEGTMTRNMLMSVAQYQSELLSERVYDAHLYRAKTEGKFSGGTLPCWCEYAEDLTTIVPIPAMVETMRRLVDLRLAGNGYVRIAKTLNSEGHRMKSGKPWRDGAVYKYLSPTWIDSMEGVGFFNRNPNDPTKEQVRFEKAFPPVLTHDEAQVLRAVQAEYSRNPLSKGPAEVSGAKGWLKGGTPSQKNGRLSPNATHLLSGLCRCGACGNRLLSSLRSKQETYRASSHSYCCPVSRANFEGHKDGGYILSGEALEEATVRVVREFLEFPPEPEERKSPLVTPAEANLRRVSEQIERMLDLFSSGLVEKADFEPKYNALVAERERLRKAYEEETRAEVLRHAERIAGGVEDRKELRSLLALLVESVEAPVYIPGHTVREGLTSLRRYARVTMKYADRRGYKTFLAPIHKSDYKGERKVYPEP

SEQ ID NO: 2678 - protein, 595 aa, unidentified
  source 1..595: note = uncultivated organism
MTMEPIAPTRRCAIYTRKSTNKRLERDVNSLVTQREISSAYIKSQQYKGWAELPCRYDDGGHSGSGLERPALARLMQDIEAGEIDVVVVYKIDRLTRSLADFVRLIEIFDRRNIALVSISQAFDTSDSMGRMILNVLLTFSQFERELIAERVRDSIRTRKRHGEMHGGLPPFGYIATPNGLKIDNSEAKIVRFIFDEFLRTRRYTRVMAAVREQGLRSSVKYSPRGKPRGGTPISPSTVYSIVQNPMYVGEIRGHDRTYPGKHEPLISREIWDEAQVICQDRKRREPNNRDTDHFLAGLLWDDLGRHMRLDLKWHWGKFYNTYVSSNAIWSQKQFLRQYRSSADELDAVVLASVAEFLCDRIKLRMALKGMGLFGKELDGLVEKGPVTSDRLVATPKPHLKELFKAIAHRIELGEDQVAIQFRMLEVRRYLEWNSNMSFRGRPADWPCSDARYEYVVSVRAVTAERWPSLHINPRKASCTGTPDRKLVDLIRSARNAQRLVEENRELDLEALAKIQGYRTAQFARLVRLNYLAPDIITAVFDGTQPPALNRKVLLNSNVPTDWAIQRKLYGFPPPERVIDPRNLFGRGMWPSAFE

SEQ ID NO: 2679 - protein, 744 aa, unidentified
  source 1..744: note = uncultivated organism
MKKDEHAKSRELKPCAIYVRVSTQMQAETGLSIESQIESLKQEAERRGKPVFDVYYDAASGGSQANRPEFQRMLKDSQRKPPPFDMILTWSISRFGRNTMESYIATEKLRERGVSIFYYKEPFNDQDPVGNMVIQILRAVAEFSRLEYVKDVERSKTHLAKNGYSTGGPPPFGLRRLDMIENGKRHVRWAPDPATAPIAREIFQMYADGHGYKAICKWLNNQGVSTIRGNKWQAASFSRMLRNEIYIGNVVYNKEVKRRVCGSGGSLEQRPQDEWIRCDGVIEAIVPRELFDRVQLKLLGNNVSDSMTKNSQYLLSGLLKCGICGNAYLGRTPKKKCGDKVYTYSQYVCSGKERFNDKRDNVNLKRDWFDGLVVNRLLGRILTEANIKERIHNEAAEIEQAVAERNERLEELKKKKKNIEIALQKYYEAFESGSLTPEELKARLKRHKGRVEEIDLEIRNIQNEIAICRMRKDSGIETLLNVDFNRLKSMYDALPFERQKEFLKTFIEKVVIDPEWFEIHYVLPSGLGVEHLLFEGDGGDDGGKRRKAGGSDIRAGGNATGRILDGGWDGASGNRNGNGVSRNLGAANGKKTALLPAFSESYKILTCESGESDKNPGQNSVSDFFGHDDSAPRLSAYRKSRKNSGEAATTPKNAKSKNPQETKPISAIADQQSASHLSSYGKNGEGGIRTPDDVAATPVFKTGAINRSATSPNCFKKDNSYLLFSQSTAMATQVGEESKKRFNC

SEQ ID NO: 2680 - protein, 576 aa, unidentified
  source 1..576: note = uncultivated organism
MKTNSAKQFVIYSRKSKFTGKGESIENQIELCRQYIASHYSQEEADAALVYEDEGFSGGTLERPQFKKMMRDSQSTKFAAIVVYRLDRISRNISDFAKLIEELGERQIDFISIREQFDTSSPMGRAMMYIASVFSQLERETIAERIRDNMHELAKTGRWLGGTTPTGYESESISTVTVDGKIRKACKLKSIPGEIHLIQLIFDKFLETGSLTKTDQFLLQGRYQTKRGKNFTRFAIKGILSNPVYMIADEDAYNFLTKNEVDLFSEKEAFDGKHGIMAYNRTLQRPGKAHQEKPMNEWIVSVGKHTGVISGAKWVRVQRLLSLNKSKSYRKPRSNVALLSGILYCVKCGDYMRPKLSGRLNAVGEPIYTYLCTTKERSCSKVCDMKNANGNMLDAKVIATIKKFGKQNEDMARQITQIKKRISGSRESYDDEAAKLKEQLTETDLEIKSLVLSLGRAGGTHAEQYIMEQIDELHEKSESLKKHLSELEAVMQQHSLADVEFDLIRQSLSVMGDNIDDYSIEQKRAAIRTFIRKIVWDGENAHLYLFGSDGDYVFPKPPAAETVSDGIGEPLGEDSK

SEQ ID NO: 2681 - protein, 597 aa, unidentified
  source 1..597: note = uncultivated organism
MHPNAKNQDINCAVYTRVSVDERAETQTYSTLDNQRDSGLSYIESQKSVGWKLFKVYEDAGQSGGSLSRPAMKQLIEDIKRKRVQVVVVYKIDRLTRNHKDFYALLEIFNEHDVKFVSTTQHFDTTSPAGRLLLHVMLEFAQFEREMSQERTYDKRFAMAKRGMWCGGFVPLGYEVKNKKLVINKEEAKIVQLCFELYIKLASMGKVAEKLNEMGYRTKKFYAKGKDASGNTKFDKKKISNILDNHFYIGKVRFQDKDKKQYVFDGEHKPIITDKKLWDDVQNILVSNRETHKTFKQNKYEMLFLGLLTCGECGSTMTNSSKEKKGRMYLYYRCTSAVIKGKKACSIRTVAADELEEFLIQKFKELGNNQTLLKKSVEKANSLANQGLTPLRKDKEHAESQLTKTNQALKHLIEFVKTGELDKKRSRGIVKEMSDLEGSKEKLEGEIHRIETNMQHLSQQVIDADAFMRLFKEFPKVFETFSFDEKRNLILLLVKQVIYTPTKLRVLFWGDIPEMNFDLRNPPDWTPPPPDDGDKPYTPKGSGGSGVEEPKRTRNLVRLGVLNGSPAWARTTDRHVNSVLLYQLSYRGMNCFNPRSI

SEQ ID NO: 2682 - protein, 580 aa, unidentified
  source 1..580: note = uncultivated organism
MKKQPLKQYVIYSRKSKFTGKGESIENQIELCRQYIATHYSQEEADAALVYEDEGFSGGTLERPKFKKMMQDSQKIKFEAIVVYRLDRISRNIGDFAKLIEDLGDREIDFISIREQFDTSSPMGRAMMYIASVFSQLERETIAERIRDNMHELSKTGRWLGGTTPTGYESESITNVTVDGKTRKACKLKIIPDEINLVKMIFQKFIETQSLTKTDAFLLQGNYQTKRGKKFTRFAIRGILSNPVYMIADEDAYEYLVENNVDLFSDREAFDGKHGIMAYNRTLQRPGKAHQEKPMDEWIVSVGKHKGVIPGAMWVSVQKLLELNKSKSYRKPRSNVALLSGILVCGECGDYMRPKMTDRLTATGEPIYTYMCAMKERSRGHVCDIKNANGNMLDAKMVDALMKIGRNSEDMARQITQTKKTIQGNREGYDAEIAKLKGQIEEHENSIKALVVSLAKQAGTSTEQYIVQQIDELHNTIEGLKQRLKELEAITQKHELADIQFDIIRQLLSTFGENLADYSVEQKRAAIRTFVKRVVWDGENAHLYLFNEDGECEYPTPPDGGTDPNGESEDSESPLGEDSK

SEQ ID NO: 2683 - protein, 551 aa, unidentified
  source 1..551: note = uncultivated organism
MTKKLDPARPVLRCAIYTRKSTEEGLDQAFNSLHAQREACEAYIKSQTQEGWTALPTLYDDGGFSGGNLERPALRRLLADIDAGRVDTVVVYKIDRLTRALADFAKIVERLDGAGASFVSVTQAFNTTTSMGRLTLNVLLSFAQFEREVTGERIRDKIAASKAKGMWMGGALPLGYDLPTDRATRALVVNPVEAEQVRLIFQRYVELGSVSKLERWLDDNAIRSKAHPSKSGRARGGFRFGRGALFHLLSNRTYIGQIPHKGQSYRGAHPGIVDPELFDAVQALIAANTTTHRKRTTRVSTMPLKGLIFDVDGHPMCPTFGHGRKGQIYRYYVSAPLQQGHRRQPGDDAIRRVPAEAVETLVSDRLQRLGRPRAAATGTSAPSLLRRVEVHATSVHLLILGNALFGVHCDLEVDLDQFSKRLAPGERALVDQQDPVLVRLILPVRLKLRGGRTWIVTPDGSSALAKAHADRTLINALRNGHGLRSAMDVDGAAAIAPASAYDRLLCRIAFLAPDIQRAILEGRQPPGFNLERLIHGETPLAWSDQRAEYGF

SEQ ID NO: 2684 - protein, 510 aa, unidentified
  source 1..510: note = uncultivated organism
MDKRIAIYARKSVFREDSISIESQIEMCEYEARGQEYLVYQDNGYSGKNTDRPDFQRMVSDIKTGLISKVIVYKLDRVSRSVLDFSGLMDLFQKYNVDFVSATEHFDTSNPMGRAMLNICVVFAQLERETIQQRVIDAYASRSKKGFYMGGKIPYGFSKTPIVIDGVKTSMYVQEPDEAADISLIYELYSRPSATLGDVLRELNARGLNTNRRGQHWNTARLSEMMRNSIYTTNDISIYEFFKQQGSNLINPPEQFNGVTSQYLFNGTNTNRKTWDLTGQNVVIAPHQGFIPPDIWLACRRKLLANHQVKTCKAKNSFLSGKIKCGNCGYALIVRFSQRSKGHVRYFIDTGWTENHCCTHKLPTIHADDFEAVIIDRIREKLSELTIRSDSSAKDEMLENINQIEAKITKIESEIENLVDKIMLTDTDKTAAKYINNRIAKLDSEKNELLREAERMKADRQKKSDTDYKVLHNVMDKWNGLSFDDKRSVIELLIEKIFVFPDRIEIHWKI

SEQ ID NO: 2685 - protein, 529 aa, unidentified
  source 1..529: note = uncultivated organism
MRIEKIKPAAAEKSRKKEKIPKKRVAAYVRVSTDYEEQLMSYRSQIEHYQALTARYENWELVRVYADQGITGTKDEIRDEFMRMIRDCMSGQIDIVITKSISRFSRNLVDTLQYVRKLSEANVTVIFEKENINTSAMEAELQLALLASLAQSEVESLSSNVKMGYLAKMRRGELIGGNGCLGYDYDAKEKTLVVNKEEAETVRLIFERYLEGYGSFVIAKELTALGKKNHKGIVYWRAGGIVDIIRNEKYMGALLLGKTYIKDPITKLKIKNYGEREKYYVEKHHEPIIDPEMWRKANALLDGKRGGKHAHENGMIPDGVRKRKYAFSKKVICGFCGASYIRRIHMHTVNTFKPVWKCSVSISKGKNACSLSKSIDEKMLEDIFMEMLRQFLIESDRIESNISEMIASQFAGPEKGEEELLRISQRRKEILNLFLEQKMSKDSYLKEDKELQALLHERESRYQEAKKAGEKKQEILKTLQQIQSEVSETDMYGQFERDTFELLVDKIIVGEKREDGSVDPDKITIVLKK

SEQ ID NO: 2686 - protein, 554 aa, unidentified
  source 1..554: note = uncultivated organism
MERTDRVRCAVYTRKSSEEGLSQSFNSLHSQREYCEAYIKSQGGEGWTVVRQRYDDGGFSGASMTRPGLQRLLADIDAKLIDAVVVYKVDRLTRSLADFARILERLDKQGAAFVSVTQAFNTKSSMGRLTLNVLLSFAQFERDVTGERIRDKIAASKAKGMWMGGLAPLGYDSPDGSGDRKLRVNETEAVAVRSIFERLIQCRSFHDLQQQLMEDGIRSKPRRSPRGALIPGVPFSRGALRHLLQNQTYLGLIPHKGQTYEGRHEAIVDRTIFDAVQALLHHRSAVWKRRAPNLERAPLQGRLFDALGQRMKPVFTRRKGRLYGYYVAPKLMPGLTSPAKADALTRVPCRLLDDLVRNRLIDLTGVVPEGISTNVLREVVTRVEVHGDSVQMVLNQRALRGLNANLADTRTVEARLHPGDRLLAEASRLNHVRISIPIRMKMRGGRTWLEDAEENAGKKARAARLAAIKRLREAHHAFEPARPALARQLPRIRLAQAPSSDIGRIDWAFLAPGIQSAILNGRLDPASIARLADQPSIPLSWAVQRRLLEPNCAM

SEQ ID NO: 2687 - protein, 545 aa, unidentified
  source 1..545: note = uncultivated organism
MVRNMIRKPSQPINKERHTLPRKVMVIKMKAAIYCRLSEEDTSKLNENDDSGSIQNQKSMLQQYSIEQGWEIYNIYSDDDYAGADRRRPEFNRLLRDAEQRKFDIVLCKTQSRFTRELELVEKYIHGLFPLWGIRFVSIVDNADTANKGNKKSRQINGLVNEWYLEDMSENIRSVLTNRRKNGYHIGAFALYGYKKDPNQKGHLIVDEAAAAVVREVFDLFSQGYGKTAIARLLNDRGIPNPTEYKKLQGLRYKQSKIKNSRLWKYSTISDMLVNEIYIGNMVQGKYGSVSYKTKQNRPRPRDEWYIVEGTHEAIIDRELWNRVQAMITERAKPCYTGEVGLFARKVYCSGCGYALRSTKSRGVRYLQCPSRHISKNACIGAFISENRLERIIIDEINRLASEYLDKDALVDSIEFSTDYQTQKAGLERDISIFEKKLSDYSKTLSELYLDKTAGIVSESDYIEMSKTFSSERHRLEKALTNCQKQLYSLNESLKSGDDRQRLIEQYTRLGQLNREIVEILIDHITIGKRIQGSRDIPVEIYWNF

SEQ ID NO: 2688 - protein, 574 aa, unidentified
  source 1..574: note = uncultivated organism
MPLNTCGASSSQKRCAIYTRKSSTAGLALELNSLETQREVCSAYIKCQAHRNWVELAQRYDDGGFSGGNLERPALKHLVDDIEAGRVDMVVVYKIDRLSRSLGDFIRLIDALDQYGASFVSVTQTFDTSDSMGRLVLNILLTFAQFERELAGDRARDKKAALMRRGLYVGGTPPFGYTLVKGGRLALDPERADLVREMFDRFPSVPANQLAREFRSRGCTTRRFVTKSGRARGGWPIHTSSILNILKNPIYAGYIVHRGDWIKADFEPLTSRAQWDLVQKVRQSRFPAKRDPVGNFLLGILHDEQGRRMKINGGSGRASGDRYYRSEYTSWSRDGITRRVMVNADRTEQLVVSALQAFLVNRVELKDAVLSLGLYSDEIRRLLRMGHTAAKRVKTMDRRQLRAVLLALLCRAEVNTAELRLYISCYELTRLLGWDGVGLFEKSVVKPTRAADRVHVLHAPAFLICGHPRFALPIDPCPAQAGVPKPWLVEMLQQASELRSFMLANRSKSISELAREKRMGPSTFARLLRVNYLAPDIQAAIVDGTQPDDLTCWHILKGPMPLDWEQQRRLLGFG

SEQ ID NO: 2689 - protein, 539 aa, unidentified
  source 1..539: note = uncultivated organism
MSGPEAYRAALYMRLSKDDEGAGESSSITNQRDMLTAYAGEHGYRICCEYVDDGYPGTSFDRPAFQRMLRDIEARRVNLVLTKDLSRLGRDYIQTGQYTEVYFPAKKVRYIAVNDGFDSESQYTDIAPFKHVVNEMYARDASKKIRSAFAAKMRGGSYIGNFAPYGYQKDPGDKNHLVPDGAAAAVVQKIFALAAAGARPAEIARYLNGRGVLSPALYRCARHPQLREEDYTQRRAWTAAGVAKLLDNIVYLGHMAQGKTTKVSFKSKLTLRNPPQDWIIVENTHEPIVAQELYELAQRRRKSRTCGKKGQFSNIFSGVARCADCGRGMSTVGTRKKGSPASLACGGYKLYGSKACTNHFIDYNSLYRVVLEAVREQAVLTSGEREALYRTLSAQLGAEPDAGDGAGEAERLRGERGRLERLIEQLYDDRLDGRLAEARFYSLLEKYEGQSRALEERLAAQPGPSDGAGRAEALGRLAGLVEQCGAPTRLTAGLLFALVDHIEVGQGRYEQTEHGRVKRQEITIYFRFAHQPQVKEVAL

SEQ ID NO: 2690 - protein, 566 aa, unidentified
  source 1..566: note = uncultivated organism
MAEQRRHVAVYSRKSRFTGRGESIGNQVELCRDYIRAHFSPGDAEEALVYEDEGFSGGNLNRPRFRDMMSAAKRGELSAVVVYRLDRISRNIGDFAGLIEALHRMEISFVSIREQFDTESPMGRAMMYIASVFSQLERETTAERIRDNLRELAKTGRWLGGITPTGYASEEVRQITVDGRVRKACRLREIPEEIALIRSVFETFLETGSLTGTDALLLRSGLVTKNGKRFTRFAIRGILTNPVYMTADEDAWRYLTGKGVELFSDQEEFDGKHGIMAYNRTVQVKGKSTKFRPESEWIVSVGKHPGLIPGRSWARVQAILEQNRSRAYRKPRGHVALLSGLLVCGGCGGLMRPKQTGRTNARGEESFHYICTLKERSKSACCAMRSADGNRLDEAVLEELMHLKEDSGEFLRRLEAGALPSGEDGGEWSAGQEPLRAALDANEQEIGRLMNALGKASGTAAEDYILRKVEELHTRGELQRQRLRETEHPAVFDVLSPEELRAFCRKSASLRKTVSSMTVEERRALLRSCVKNVIWDGENARVCLLGAEVPALPSGISFGPSGEDSK

SEQ ID NO: 2691 - protein, 546 aa, unidentified
  source 1..546: note = uncultivated organism
MALKVAVYARVSTDEQREKQTIETQVEKAKDFCRLHDLEVYDFYLDEGISGITPFEERPEGKRLLEDAAQKKFSTVVIYKLDRVGRDILVIRSFLDTLAKYGVAFRSITEPFDTSTALGKSFMELLGVFAGFERSMILERSKAGMERIAKEGKYTGGVVPYGYKVNEEGYYEPDEEPIPGLNLSPAEIVRKIYTWLAYEDKTLLWIAKKLNQMGVPTNYSLSDLKRGKRSKNLASFWRPTHIGRLVKNEFYKGIHRWGKRNHKTKKKSSGEVERKVPALVDPKTWELAVEAIRRNRNQNRPDHRTYLFSGLIRCQTCGHIFIGNYYKTKSGEVKYYRCAKRHSPMNYDGVKCPNSTHIREDRLDTEIWENVRRWLDNPEEAVEELIERERELLKESNEQVKKIQELEEELKAFSDKKERAAYTFINGLITKESYENLLAEFEIQERKIKEELQRYQELLQRNYSEQDAVSIVMNSLEKLREIVKDKDAVPYELRRSIYRLLIQNIIAHKNGRVEVIYAFKSFKSENTRSGVCSSNQKEICRVRNRT

SEQ ID NO: 2692 - protein, 502 aa, unidentified
  source 1..502: note = uncultivated organism
MKAVIYARFSSEKQNEASIEGQLRECMDYANFNNIEVIGNYIDRAQSAKTDNRPNFQKMIKDSYKRMFDCIIVWKLDRFARNRYDSAYYKNVLKKNGVRVISAKESISQGADGILLESILEGYAEYYSAELSEKVKRGMTENALKAKSNGVRPPFGYYVDDTDHYQIDETLSPIIKEIFNLYVDGVKITEIASRLRERGVKNRGYELNYNAIFRILTNRKYIGEYKFGETVMPDAIPAIIDKQTFNAVQQRMARNKKAPAMHRSEDDYLLTTKLFCGKCGAMMTGEIGTSKTSKQYRYYKCNRAKKKACDKKTVRKEWLEELVLDEIKNLLANDDIISELADRIYELQMQEDNAATSIQAQLTGVETKLNNLVEAITQGIYSSTTKKALDELEERKRNLEIELFESQTRNPVLTKEQILFALYNFRKIDISTQEGKQRLIDGFVNSIYLYDDHFVITYNYKGQSKTVTFEELNSSPLTSKGSPNWNYPNTTITEQWVRVVFY

SEQ ID NO: 2693 - protein, 571 aa, unidentified
  source 1..571: note = uncultivated organism
METNAPHRIAIYSRKSKFTGKGESIGNQIEMCKNYIRLHYPGFSEEDILVYEDEGYSGKNTQRPQFKKMMNDGKHHKFDAVVCYRLDRVSRNIKDFAELIQELQQLNISFVSINEQFDTSSPIGRAMMFICSVFSQLERETIAERIRDNMRELAKSGRWLGGTTPTGYKSKELVGSITVDGKVRKAFKLDIIKQEAELVKLIFDKFIETNSLTKTETYLRQQHIKTKNNRDFSRFSISNILRNPVYMIADKEAWNYFERLGVELFSEESAFDGVHGIMAYSKTIQTTGKSNQLKDVKDWIIAVGKHKGLISGAQWVQVQKMLDQNKSKSYHKPKSNVALLSGLLFCGDCGAYMRPKLSSRLNANGERIYDYLCETKEKTRSQDCKMKRPNGNELDRLVCEQIKALSEDHSAFLKELEQARKSLEEHQGDFDQRLDELKKAQKETERKIQSLVETLADTAGSAAKYITEQINELDKENESLKEQIENMENLTMGQSLTDLEFDILKEMLKNFSSSFDTMSVEQKRSALRSFVKRIVWDGETVHIFLFGADDKGIDFSNPASEMEEPQGEDFK

SEQ ID NO: 2694 - protein, 556 aa, unidentified
  source 1..556: note = uncultivated organism
MGWHIMARTSRRYEIEKEESFKSVYRAGVYIRLSNERHEEWREKSSSPKAQAYVCEEHAKSKGIQVIQVYEDYEYSGTNFERPAYIQMMADVRNGKINCIIVRDLSRLGREHIEMGRLIDKVFPFLGVRFISVIDKLDTIDGLDNNKSFEVMLKNIINDMYAKDISSKIISSKHARAKDGYFIGSLPPYGYKIEKTSKGQKLVINEETAPIVRQIFDWTFEGKSQYEVTLELNRLKIATATHYNKTGEMYRLEDGQEWSKGTVAKMLNNETYTGTLRQGKRRQNLAKGESPYSTSPEDWIVAENSHEAIISADEFQQIQKIRRERKENHCFSSERNDLVRDPENRYLGLVFLKDTERALYRRTRIYGKDEKRLFYCFQADNFTGKSVEKIDIFIKEEHLDAMVLKTIQEIASKLISEKSFLGRIKNEFLRRKEVAETSLKELSMKKDLSEVAIARLYERYATGNLDKAKYITLKEDESRKHASYSSEISRLEMMISKLKKDERKSRKVARTIFQARKETKLSAEVIKELIERIDVISKTEIEIHFLYDFNENGGIQ

SEQ ID NO: 2695 - protein, 514 aa, unidentified
  source 1..514: note = uncultivated organism
MPQVQIIEPTIGPQEQKIRVCAYARVSSDSDDQLNSFSAQVEYFTQLIQNHSNWEFVDIYADEGITGTRADKRDEFQRLMRDCRAGRIDRILVKSISRFGRNSTDCIEAVRELKMLGVTVAFEKEGIDTGQMTNEMYFSMYSAFSQEESTSIAKNMRKGAAMRMKNGTYRLSQAPYGYRLDEKGGFLIQPEEAKIVRKIFGDFLSGKSIQEITNELAAAKVPKLKGNPVWSATGVSYILTNERYIGDGLFQKLFTTDAFPFKKVKNRGEKSQFYAENTHEAIISPNVFRMTQELLEKKNQLHGRKKEMQSYTFSKMLECSECGSTFCRRVTKTGTVVWSCYRHFRDKRLCTMENVQESEVESAFVTLYNKLGRNRSEILTPFILQVENLRDKNFISHPGAMQLNKEIADLLEQNHALATLRAKECIDSAFFMSETNANNAKLENLRKELQRYRDLNDYREILDGSHLLLKIFDEQESILQFEPTAFRNMVIKVRISSDTICFQLINGMELAERR

SEQ ID NO: 2696 - protein, 524 aa, unidentified
  source 1..524: note = uncultivated organism
MSKKRNSASETATKAQVRCAIYTRKSSEEGLEQDFNSLDAQRDSGEAYIAAQKHEGWVCLPDRYDDGGFTGGNMDRPAAQRLVKDIEAGKVDCVIVYKVDRLSRSLADFARLMDVFEKHHVTFVSVTQAFNTTHSMGRLTLNILLSFAQFEREIISERTRDKIAGARRKGKFAGGRPILGYDIVRTPSGSKLVVNNAEAKCVREIFGLYLQHQSLIPTVKEMANRGWTTKLWQTKKGRSVGGRAFDKNLLYHLLTNVVYVGKIRHHDQVYAGEHDAIVDEQTWQRVQSMLQHNGRTGGSEPRNKHGALLRGILRCVPCNCSMVHTFTCRQTKRYRYYVCLKAQKRGWHTCPTKSVPAGEIEKFVIDQIRSVGRDPTVLAETLRQAKGQNSRNLADLQAQEQALQRELGQCNTSLKKLAAGSDEPTTVAALADVQDRMRRAEQRLTEIRQQIGTLSGEVVDEREVATALSVFDPVWDTLSPREQARIVNLLVERVDYDGENETVAVTFRPNGIKTLAQEINEVAA

SEQ ID NO: 2697 - protein, 561 aa, unidentified
  source 1..561: note = uncultivated organism
MEAGKERFAIYSRKSKFTGKGESIGNQIELCRQYISAHYGACFADSACVYEDEGFSGGNLERPQFKVMMQEAKKKKFTAVVCYRLDRISRNIGDFANLIEELNELHISFISIKEQFDTSSPMGRAMMYIASVFSQLERETIAERIRDNMLELSKSGRWLGGNTPTGYTSESVSSVTIDGKVKKAFKLKMIPEEANLVKVIYEKFVETGSLTQTETYLLQNGHRTKYGRLFSRFAIKGILTNPVYMIADQDAYEYLREKKVDLFAERESFDGNRGVISYNRTLQKAGKTHEMKDMEEWIVAVGKHEGVVPGSMWVNVQVLLDQNKSKSYRKPRSNVALLSGILFCGGCGGYMRPKLSGRYNADGEQIYSYLCTMKEKSRMKCCGMKNVNGNILDQMVLEEIKKISVDCSEFQRQLYRSKKAVEESRQEVEWDISRLKDELKNVEGEITGLVASLGKAGGTGAEEYIIQQIDGLHKRKGEMEQRLWGLSLDAGNRELSDPEFQLLKQTLSSFQNVIGLMDVRQRRAAVRTFVDKVIWDGENVHLYLFGSKEFKLPEPQGDYSK

SEQ ID NO: 2698 - protein, 534 aa, unidentified
  source 1..534: note = uncultivated organism
MNIRNLCQEATAINGRVLKAGIYTRLSEEDRNKLSADDDSQSIRNQKTMLIQYATEQGWDIYNIYSDDDYTGADRNRPEFNRLLKDAQNRKFDIVLCKTQSRFTRELELVEKYIHGLFPVWGIRFVSIVDNADTANKGNKKSRQINGLVNEWYLEDMSENIKSVLTNKRKNGCHIGSFALYGYKKDPDKKGHLIVDEEAAAVVREVFALFAQGYGKTAIARLLNERGIPNPSEYKRIHGISNRASERPNSKLWKYFNIADMLVNEMYIGNMVQGKYGSISYKTKKNMPRPKEQWYIVKNTHEPVISRELWDKVQLIVSQRSKPFANGRVGLFSKKAFCANCGYAMMSAKSHGKNYLQCPCRHIAGDACTGSFIGVERLEGIVLDELRKLSDEYLDKSEAEKNIVAGNKYTERISILEKELAAYEKKISEYSRGIQESYLDKVRGIISEKDYIEIAASFRSEKERFERLYEDTRQKIEKLENVRNRSESRGKIVDRYVGTDHLSRDMVEILVDRVYIGRRIEGTRSVPLEIHWNF

SEQ ID NO: 2699 - protein, 584 aa, unidentified
  source 1..584: note = uncultivated organism
MARKAERYNAIAGRNGTADADNTMVSLTTGKQYRVALYARLSVEKNGQKSDSIESQFMIMENFIKDKPELSQYQKYFDRGVSGTTFTRPDFVRMMDDVKAGRINCIIVKDLSRFGRDYLETGNYIETILPFLGVRFISVNDHFDTVEDCNGNKGLGISLMNLVNDMYAKDVSKRITTAFESCMERGSVLGNAPYGYDRVKNDNGYQLVIDEPAAEIVRRIFQMAKDGMSLRVIAGELTRDGVRTPEGYRTTQLVHIGKDEPFCEWQHGTISKILSSEVYIGTLYQGKTKTNLCTGEKKHRIDKEDWIIHEDAHEPIVSKELFMEVRSIVEKRRDKMSCTFREDLPAAEDKYKGILKCPVCGAFIHRESSIAHTKQGDVRKYYYRCRHNSIPSEKREGMVGISEEQLDLLVFESVKKLMGEMAPDKKKLLEVLESQAEPVGSKMQAVILDLQKQKERLEYEGSLYYGSYVKGDITREELLLANQRQEETVKHVDEKLLQAEKDYKAFLRKKKEQKQFVNALLSVKDVSVLTAELVKVLIAEIVLNEDRCMEIKYRFRHGEDLNYTDSFVALGKIRRDAGRRRKDG

SEQ ID NO: 2700 - protein, 502 aa, unidentified
  source 1..502: note = uncultivated organism
MIRRADIATQTPAVRCAIYTRKSTDEGLDQAFNSLDAQREAGEAFVLSRKAEGWTCLPDRYDDGGFSGGNLERPALKRLMIDIEAGGVDAVVCYKVDRLSRSLLDFSRLIEVFDRRKVMFVSVTQPINTADSSGRLMLNVLLSFAQFEREMIADRTRDKMSAARRKGKWTGGHAPLGYRVHEDGGRLVVDPDKAEMLREIFALYEDRRSLISVAEELNRRGWVTKRVGTLGGKPWTKTHVHQVLTNVTPTGRVEHRGQIYPGEHEAILDIAAFDRVQELLAGNSVKGGARAKNRYGHLLRGLLRCAACGCAMSPSVTRRRGKVFRYYVCNHATKSGWKSCPHPSLNADRIEAAVVERIKVIGRDPSLVAETLAQLRQLKATRTPTLVAERRRLERELARLRDRNGDADRDHLARIESRLTEIAGELAVLQTAAVDRRDLATALALFDEVWACLFPREQERVIQLLIERVEFDAARETVAVTFRPSGIRSLAEEVQVAEGVPA

SEQ ID NO: 2701 - protein, 568 aa, unidentified
  source 1..568: note = uncultivated organism
MANAHPSSGKGGGILRCAIYTRKSSEEGLEQAFNSLDAQREACEAYIRSQHHEGWAALPARYDDGGLSGGTLERPAMQRLLVDIRAGRVDLVVVYKVDRLTRSLSDFAKIVEAFDAQGVSFVSVTQQFNTTTSMGRLTLNMLLSFAQFEREVTAERIRDKIAASKRKGMWMGGSVPLGYRVHERKLMVEPHEAATVQHIFAAYLQLGSVRLLQQQLEQAGTVGKSGQPLGRGPLYHLLQNRIYRGEVSHKGSAYPGQHEAIVDQALWEAVQRRLAEQRANTQNRPRASGQGPLAGLLFDTTGDKLVSTYASKGGRRYRYYTSRRLVTGLRADASDAVRVPAEQVERLVLQRVEMLLGDHAGLFGTLREKGLLPEGAQDQQRVLLGATDLAERWSSTGQATMLQGLLHRVTLHPEHVEVQIALRVLRALLMGDASAGKSGDQDSDEPEPLTSLSIPARLRRTGKEIAIVIDGSGGPTGADTPLARLIAKAYALRQTITKDGTSIDTLAEREGVGRTYILRLLRLAYLAPDIVEAILAGLEPQGLTVNRLMKQVQLPTGWAEQRQALGFG

SEQ ID NO: 2702 - protein, 569 aa, unidentified
  source 1..569: note = uncultivated organism
MSKKKIDVYRTGIYLRLSQGDEDIDGWEKQESNSISNQRLLLEGFIDAHDDLKLVDVFIDDGYTGSNFDRPEFQRMMKSMKAGNLDCIMVKDLSRLGRERIGVDELILRTFKEYGVRFISVSDNYDSLTANRGETHTIIPFKNLLNEQYNNDTSLKVRTSQQVKRMNGQFIGAFAPYGYKKAENNKNLLVPDPYAAGVVQGIFAKKLAGVSAMGIAKILNKNGVLSPSEYKTKCGEKYNTSFKGAGQSKWSAKTVIRILKNVVYTGTLAQGKRTTVSHKVKKEIEVPEEDWIVVENAHEPIISKMDFDAVQILMSRDTKAIAGQSEAYMYAGILYCGDCGSSMVRRKDSYKGQEYVNYICSNYNRNGKDNCSRHCIREDVLDEIVLGELQGYINSMCDCEKVLAHLDELNVNYDEAVAHDKEIATLKAELTRFSALKSALYQDLQDEIISKEQFTRYREEYTGREQELEQAIRQLEEIIRNIYENGIAVAKDLEQFREGLVLGKLDRMALVSFVDRILIFDDFRVEIVFKYRQEMEKVAGIFCMANEEFMEPDYTMVDGLPVLALKEAV

SEQ ID NO: 2703 - protein, 538 aa, unidentified
  source 1..538: note = uncultivated organism
MDKKKVRCAIYTRKSSEEGLEQDFNSLDAQREACEAYIKSQMHEGWFLLDKQYNDGGYSGGTMERPAFKELLKDIENDEVDIVVVYKVDRLTRSLMDFSKIIDVFDRHETSFVSITQQFNTTTSMGRLTLNILLSFAQFEREVTGERIRDKIAASKKKGMWMGGRPPIGYKKEDKKLVIHKEEAQKVRMIFDKYLDLKSVPKLMHYLKENEIKTRTDKNFSKGQLYHLLANKVYIGKITHKDKVYDGEHEAIISEGIFKEIQKLLYENKVNKTCGTKCSSNSLLAGLIFDDKNNLMTPSHSNSHKRRYRYYVSTALKNYNDNEVGTISKIPAGEVEKFVVETTREFLQDKGQIQKLVKDFKVSKQNKFIYTAQNIEDYSDPKLIRAIICKIVISKNLIEITLNENSLINVLNTLSNNQKFVIPDKREKFNPITITKKIKITQSSRNDNILILNAKEYDTPEPNPYLVNAIVKSYYYHKQIRNGKTIEDLQNEENLKDSKYIRNIMNLKYISPELAEQILNGTQPKELSLQKLIGIIKI

SEQ ID NO: 2704 - protein, 562 aa, unidentified
  source 1..562: note = uncultivated organism
MERPKSPIRRCAIYTRKSSEEGLEQDFNSLHAQREACEAFIKSQAGEGWRLVKTAYDDGGLSGGTMERPALQRLLADISQGLVDVVVVYKVDRLTRSLTDFAKMVEVFDARGVSFVAVTQQFNTTTSMGRLTLNVLLSFAQFEREVTGERIRDKIAASKQKGMWMGGLVPLGYDVHERRLAIKQSEAETVREIFRRYLELGSVRLLMEDLNRRGIRSKVRVAKNGKQSGGNSFFRGALYSLLSNPIYIGEIRHKGVRHPGLHQPIVDRELWDATQLLLRSRAVRSSPRATKSAPSPLTGKLFDESGQSLTPSHAVKGERRYRYYVSRNLIKGTSDSGRGGWRLPAPEIERTVASAAYTILGDEAATANAALAIGFAEHQIPSLVSLAAAWMKRLQSEVEVGAALNALVDRVELIDTGIRVSLKLPNSITEEQRGENATELTITRVFPMQIRRRGFEMRLVIQGSRAPAPLADLALMKAIARGRQWSDDLLAGRVESVAVIAKREGVLPNYVRRLIRLAFLAPRIVEAIAAGHQPAELTAKALTERIELPLIWSEQERAVGIG

SEQ ID NO: 2705 - protein, 535 aa, unidentified
  source 1..535: note = uncultivated organism
MTIAAIYARVSTTRQAEADLSLPDQIAQCRRYCEQHGWEVVETFTEPGASALDDDRPAFQEMIYKATRPERPFNFVVVHSLSRFSRDALHSELYVRQLRKAGVELVSITQDIGQDGSGEFIRKVLNIFDEHQSRENAKHVSRAMLENARQGFWNGLRPPFGYGVTVKEVRGAKEKKVLVVNEEEARTVRLLFELASGSRGRPMGVKAIATYFNERAITRRGVRFSTGGVYDLLTSTTYVGRHHYNRKDSRNGRPRPPSQWVELQVPAIIDEQTFNTVQALLQSRNPKRVPPRVVNGPTLLAGVARCGYCGAALIQNTGKGGAYRYYCCSRKLREGRLACRGIRMRMDRLDDIVIGEVVEHVLDLDRLRRLLDGYLRSGAERADRNRQQIDRLRQSQRDTQAALVRLLSLVEKGLMEAEDPNLKERLVGLKLQRDELAIEIAELQQRLSSNEPEITPEKIERFAALLRDRLLNGTPEFRQAYARIVMREVSLKDDEIRIRGSKAMLARAASQDVVKTPPAVLSFIRDWRTRQDSNL

SEQ ID NO: 2706 - protein, 543 aa, unidentified
  source 1..543: note = uncultivated organism
MSKKLIRCAIYTRKSSEEGLEQSFNSLDAQRDACESYIKSQKHEGWIVLKNEYDDGGFSGGSMDRPALQRLLADIGEGKIDTVVVYKIDRLTRSLLDFSKIVEAFDSKEVSFVSVTQQFNTTTSMGRLTLNILLSFAQFEREVTGERIRDKIAASKRKGIWMGGNVPLGYKVKDRLLLIDPVAAKTVRHIFEQYLEFGCVPKLNTYLEKNHIFGKQQKPFSRGALYHILTSRIYLGEIVHRKQTFPGQHQGIIDRDLWEKVAAKLKDNDPVANKQPRATESSLLAGLLFDAAGVRYTPTHAVKKGKRYRYYTSQSVIQHKEPSGIARIPARELERIVEARIQRLLSSPVELIKALGVENSARLSTLAARRSEQWAKLDSNEITKFVKPILKRVVMLPDSVELELSCNQLKAHAFGEKPPSDSEPGDQQIRLVANIGVRAHRGETRIISDFSEPDDDRQSLSLMKAICRAREWYERIVRGEFNSFEALATQNRVSTSYVRRIFRCASLAPEIVESLASNRPTLITLETFRRQPPLDWTEQRRTL

SEQ ID NO: 2707 - protein, 578 aa, unidentified
  source 1..578: note = uncultivated organism
MPATAAARVPCNTLSEPIVALYVRVSTGYQVDKDSLPHQKKELKNYCKYVLKIPEERIMIFEDAGKSAKNTKRPAYERMMQLVRAGKVSHVIVYKIDRISRNLVDFSLMYDDFKNNRVTFISMNEQFDTSTAIGEAILKIILVFAELERKMTSERVMDIMIGRARSGQWNGANVPFGYKWDPVIEFPVVDEKEGPIVKMMFDMYEKIQSSCKIRDYLNSHDIATKRGGEWTSKTVADIIRNPMYKGTYRYNYRESARGKIKPKEEWIVLDDVFMPIVTVEQWEHCNATMDSNAAARNNMCSQSKKKYSHVFGGLLRCGVCGSNMICDKDRPRDNGFFPSIYRCGNRWRKNTCKAKGITDVSLGPFIFNYIKNVVQATKQAESIATLEALEAVLLTGPEFKDIAGIDRAGLTAAFDALKGGPAATLQYKPIPLDTAAPVVDKAAILASEKEKNLKALERLKRLYLFDDNAMSEKEYLETKQGLEVRNAQIENELAEIRADESNPGTAVGFINSASSFLVAHKLNQAEHINYKEFAPLVDDAVLKEFVGTVIEKITIIGGKVDSITFKNGMEHKFLRKEE

SEQ ID NO: 2708 - protein, 550 aa, unidentified
  source 1..550: note = uncultivated organism
MIRLGCAIYTRKSSEEGLEQDFNSLDAQREACAAYIKSQASEGWKLVRDRYDDGGISGGTLERPALQRLLADIAAGHVDIVVVYKVDRLTRSLLDFAKLVEAFDKAGTSFVSITQSFNTTTSMGRLTLNMLLSFAQFEREVTAERIRDKIAQSKARGMWMGGTPPIGYRPDGRSLAIVEQDAAIVRHIFSRYADLGNVRLLAVELDERGIRSPARNTASGRAFGGRPFSRGQLYKVLSNPSYIARIDHGGRSHKANHPPIINQSQWDQVQAILAANINGTRGPAPAEASPLAGKLVDDRGVPMIATHACKGKVRYRYYVSRDLHHSGDASSAEGWRLPAREIEPLVRARIVALLNDPIELLARLNIEMPSADKLKSIVARGETAATNVRGSRVHSAKLIRDIVWEVRLGMDQVSIVLSPPKLASLLKITGMNEPVKLDVPARLRRSGHVMRLITRSGSAASPAVDRTLVKAIVQGRSWWRELQTNTTMTIEDLARREGITGPFVARIVRLAFLSPQVLASVIDGTLPTQVTVKRLTAPGAVPDHWDRPNF

SEQ ID NO: 2709 - protein, 521 aa, unidentified
  source 1..521: note = uncultivated organism
MATVTMIPAKARAGARDKTKESPKLRVAAYCRVSTDTDEQATSYDAQIEHYTEYIKKNPGWELAGIYADDGISGTNTKKREEFNRLIDDCMAGRVDMVVTKSISRFARNTLDCLKYIRQLKDKNIAVFFEKEAINTLDAKGEVLLTIMASLAQQESQSLSQNVRLGLQYRYQQGKVQVCTNRFLGYDKDEDGNLVINPEEAEVVRRIYREYLSGKSYYQIGQELSADGIRTAAGNDYWLPSTLKKILSNEKYIGDALLQKTVTTDFLNKKRVANKGIVPQYYVEGSHEAIIPRERFMQVQEEMVRRARLETGTGKRRVYSGKYALSHLVYCANCGDIFRRTMWFLKGENVPVWRCVSRLEKKKSGIDCPARTIFEKDMHAAVVTSLNQMIEQKDEFLPGMRMAVEMALAQSNGPRVAEIDARLEALQKELLKKANAKQGFDELADEIEDLRTDKEALLLEDANRQGVKQRLDELEAFLEEQQEPVTDYDEGLVRRLIERITVYDDRLVFEFKSGLETEVQM

SEQ ID NO: 2710 - protein, 541 aa, unidentified
  source 1..541: note = uncultivated organism
MSKYKAALYMRISNSDAKSGESESLANQRKLLMDFVAKNPDIEVVAEHLDDGVTGLVYDRPAFNELMKDIIEGKVNCAITKDLSRLGREYIDTGKYLREIFPKYGVRFIAVSDGIDTISETNLSEELGVTLKTLLNDAYSRDISKKTRSALNSKRENGEFVGACPVYGYVRSVEQKNLLVPDVYASEVVKDIYKLRKDGMSAAKIAETLNKQGVLSPLAYKKDRGLPTPKGGFADKDGSLWSATTIIRILKDETYTGVLMQGKQTTFNYKLKDKKYKPKDEWAITYDAHEPIIQRQDFDLVQKLMNIDTRIAPNEDSVHLFAGVLICGCCGNRMTRKIVPYKDKKYYYYYCPTGKKNGCTAKMMKETDIVTCVATSVKTYIENVVDLDVLLETLGTKKIAKQITDKFMVQINDVDKQMQSINTFKIKLYESLVSEVISKSEYNSYKKDYDKDLFRLKNAKDILISKYEQEKVTAEDKLRWTEHFKEFKDMQTLSRRAVVQLIHSITLHFGDEKHIHICYRYENEYENIVKLIQEKSQKEAV

SEQ ID NO: 2711 - protein, 558 aa, unidentified
  source 1..558: note = uncultivated organism
MDKKKIYHAAVYVRLSKEDDDIAVSGKVESDSISNQKSLIHNFINGHDDIVLTKEYVDDGYSGANFDRPQFQMMLADIKQGIIDCVIVKDLSRFGREYIDSGMYIERLFPSLGVRFIAINDHVDSLDDDRNDIILPFKNLMNDAYCRDISIKIRSHLDVKRRNGEYVSSFVTYGYMKSETDKHVIVPDPYAADVVRMIFRMKLNGKSHERIADYLNNEGILSPAEYKHSRGIHIQDHFKTHEQAMWSAMAVRRILGNDIYIGVLTQGIRSTPNNKVKQSFIKEKKDWVRIEDNHEAIIDKHSFSVVQKLLDQDLRTAHEEENVYPLAGVMVCADCGSVMVRQDIPAGGKMYSYYVCSRHKNEKNCSPHRISKHGIESMVLELLQTHIANVIDIEEICRNMDATPFQEIEIRELEKRKEDTEKDVHKYCVFREHLYEDMKDGLITREDYLEMYESYGKKRDRAEKILARISEEIEHLMENKTDRQEWFSYFKKYGNIEKLSRVVVVELIDRIRVIDKKHVEVVFNYEDNYKLLLKQLGMMGYDIGSEDGRLCIEKAEVG

SEQ ID NO: 2712 - protein, 645 aa, unidentified
  source 1..645: note = uncultivated organism
MNIEKDVPKQMIVGIYIRVSTEDQAREGFSLGEQQERLEELCKFKKFKVYKIYQDAGISAKDMEHRPSFQAMMNDMKKGKINCIVAYKLDRVTRSVKDLEALITELEENDCYLVCDRDEVDTSTANGRFFIRMLTVLSQLEIEIVSERTKFGLGGAIKAGHLPGTCPLGYYRDKDKKVRIDNATNGIVKRIFAMYLEGKSYYQIADILKEEKVLYPERKWTDSAIKQIINNQIYVGDYVRNKTDKDKSKRIVYTDVVAPTISRAEWEEVQKQKEKNQQAFCRDRVYIFFQKLLCPKCGSIMTCKAPGGEKKKYVYYNCSACHYNLNESYIEDKLLNFICSLVEYDQVVQKYFYPVLEEKDEFIPDSVNEQIEELKNQKARIKKAMILGVVEMEDFAEDMKLIEEKLNILETQKLEHMEVNNQKFSPMKIMADRDFEIESKINDKIFSADLECEWNMKSKIEKQEFISKFIESMIIEKDSHGQYKINKINFRSRYLEELNKLNNAMVIDLAKPSEDADSGVQVIKSTPTLTKKELNEYIENLKEHYDVKYYEDYYDWSYSYVREDNILNLPREKGNEKIMRAVLVDNNKNFPVKDKNKILKGKLGIVSYREKGTSDKNELHDYLKENSKLFLYKEENYIEDDSCEE

SEQ ID NO: 2713 - protein, 526 aa, unidentified
  source 1..526: note = uncultivated organism
MNRGPHTETAPLSRTAAGQLRCAIYTRKSTDEGLDQEFNSLDAQREAAEAFIFSQRSGGLVALPERYDDGGFTGGSMDRPALERLLADIQTGVIDCVVVYKVDRLSRSLIDFARIIEVFEKHNVNFVSVTQQFNTTNSLGRLTLNILLSFAQFEREIIAERTRDKISAARRKGKWIGGRPVLGYDIDRHGSRLTINADEALQVRAIFKLYLDYNSLAPVLPEIHRRGWRTKQWVTRKGVTHGGKLFTKGRLFRLLKNPIYIGKINFQKQTYDGEHEAIVEAATWEKVQQILQRNGRDGGVEVRDSYGALLKGLLRCATCHAPMIRTQSTKDSRRYRQYVCLEARPGGVNCQTKSVPEEVIKSAVIRQIRRLGSDSRIVARGLARAEEQRLSTIADLSLERQAAQRELASLENEQGTVTRMACRDQPMTNGMTNLQERIDSTGRRLTEISRELGSLEAYAVDDDGFRAELARFGSVWESLNSREQARIIRTLIEHVAYDGKTNKVTVSFRSARIREMCRGAAKKRRD

SEQ ID NO: 2714 - protein, 523 aa, unidentified
  source 1..523: note = uncultivated organism
MGRVLGVIRLSREREESTSVARQRAYITAWAEQNGHTIAGWAEDEGVSGSVPPWERPQLGEWLPTSLGGRADVARFDILCAWRLDRVSRRVLHLAALMDWCKSTGRAIVSTSEGFDINSPMGAVFVNILAALAEGELEAIRERARSSFAHLMKQGRWRGGFVPYGYRAVKAETGQGWRLEIDPETSKVAREIVRRIIAGESANSVVRWLNETATPSPLDAQRVRAGKATTGTEWRVANLLKMLRSHTLLGYAEMTETRTRPDGTRETFARLVRGEDGLPLQRAEPVVSAAQWEQLQEALRKNANPKAGNRVGGSPLLRVAYCECGEPLYRNRGRHGMYYRCGLRARAGRNCPEGMTSIPAHVLEQITEQTFLLVAGDLEVMRRVFVSGSDHAAELADVEESLAELREHLTAGLFRGERGKAEFAQMYSALEARREALEALPSKPDRWELEPTGQTYRERWATLTTAAERNREMREAGLKVIVYALPSDEELEAMNDPDEYKRVRVIIPEDLMERVQANAAKAA

SEQ ID NO: 2715 - protein, 554 aa, unidentified
  source 1..554: note = uncultivated organism
MRVREIKRTIVPAEIIPEVVKERKRVAAYARVSTDTAEQETSYEAQKSHFTKLILDNPEWDLVDIYADEESGTRTFKRENFMRMIKDCEDGKIDMVLTKSISRFARNTVDCLKYIRKLRALGIPIYFTKEGINTLDGNGEVLVTIMASIAQQESASISQNVQIGMRYHYAAGRVAAGVHRLLGYKRTSEGRLEIIPEEAEIVRRIYREFLDGYTETHIGQRLREAGIRGKQGEHRSWTICTIIYILTNEKYMGDLLLQKYYTVDYLNKVVAKNKGQVPQYYVENAHAPIVPKKIFYEVQAEISRRRKLDYYRYNHKIGLSGRVFCSVCGASYRRMTCANHLHTYWRCASKVDPKYKKGACEGQTVREDVLHAMIVNAFNMLPEERDELIKLRTIVEYGPLNQADAMLIQIQKQIDEYQSKDDLTDEEQGRLTLLQGQWTEVCEKRAEFAIRQRRINDLLDRIDFMLGKAPEECAKSAKCSEVEDFNKRTRRMYPLGKMTEYNDDDVIRFVEKVTIFPEKITVEFKAGVSVDVPMMKVKPGRKPKTRLRYLYGLQ

SEQ ID NO: 2716 - protein, 543 aa, unidentified
  source 1..543: note = uncultivated organism
MSERVYRTAIYARLSKDDGDKAESNSIVSQKSMCEEYIAKQSDLELVETFVDDGYSGVDFNRPDFRRMEEAVREKRIDAIVCKDLSRFSRNYIEGGRYLEKIFPALGIRFIAINDGYDTLTGDPSSDSFIIPFKNLINDTYCKDISVKIRTNLDVKRRKGEYVGAYAPYGYMKDPKDKNRLIVDEYAGDIVRQIFSMYKDGTSICRIADRLNELGVLSPMEYKISAGVHYDTAFRTGSTAKWSYKAVKRILTNEVYIGVLAQGKRGTPNYKVHTVQAKEEDEWIRVEDAHEALVTYDDFMSVKVMLGRDMRTTGADTEDNLFSGFLYCADCGQPMIRKMVPSGKKRYYYYVCSSNKRHEGCTAHSVSVKEVEIAVTNAVKDHVSDVLDLTESLEYIERLPSANRVVFNYEMQITKLEEEIERCRRMKLRIYEDLSDGVITKKEYADFRNQYTAMLDEKNATLERVRREKKDASVSGDTERAWVTLFRRYEGIDALTRRALMALVDKVFIYEKHGVEVSFKYGDEYRRATEFIGKNADLLPLAQ

SEQ ID NO: 2717 - protein, 528 aa, unidentified
  source 1..528: note = uncultivated organism
MLDNVNMTSIRKKPLRCAIYTRKSHEEGLEQEFNSLDAQREAAEAYIESQRMLGWRALPDRYDDGGFSGGNMERPALQRLLADVDAGKVDVIVVYKIDRLSRSLLDFMNLIELFNKKGVNFVSVTEHFNTTDPTGRMFLGILITFAQYEREVIAERIRDKVAAAKRRGKYCGGPAILGYDVDRENKKLLVNPDEAPLVQHIFRRFTQLASARKLARELNEQGYKTKSWVTKKGKHREGTEWNTGHIYRLLGNRIYIGEVVHKGESYPGEHQAIVDKELWEKVQSILSENTRAKLSKAKTKMISPLQGVIRCGHCDCSMGPTYTQKGERRYTYYICEKDAKRAVSRCPLKRVPAGDIEKAVLEQLGAVFRTPTLVAKTYFAAKEMEEAERERLVKQKEQLEEDLAAVRKRALELMSPDNNEPDREEKLAKVNQRAVTLTRHLANVSARLRVFEGDQVTERDVSEAFESIETFWEDLFPLERNRLVRLLVEKVEIRESGIDMELKTNGLTTLITELTGLACEVRERRNGK

SEQ ID NO: 2718 - protein, 524 aa, unidentified
  source 1..524: note = uncultivated organism
MPQVQVIEPVNTVYRYAPPKLRVCAYARVSSDSTDQLNSFSVQMEHYTSLIAGNDEWELVDIYTDEGITGTRSDKREEFQRMLSDCRKGKIDRILVKSVSRFARNIHDCLSTVRELKALGIEVEFEEDGLKTADMHDEMMIGAFSSIAQEESTSISNNMRWSYARRMQNGSFTCCCAPYGYDLVDNTLIPNPKEAPVVRRIFGSYLSGKSMDQIAAELNADGIPCKNGEVSWLYTAVSYILKSERYIGDALLQKSYTTDTMPFQTKRNKGERDRYYITGSHQPLISRSEFEQAQQLMKARNALCPSKGRGRQYAFSGKIKCGKCGTSFSRRVTNGKTYWVCHKHFRSKELCEIRQIREDAIIQAFLRMINKLKQNSRYILSSALTELMDLKSKITMSDAKVGSINKEIAELTKQSLVLNRLRTKGYMDSAIFMQKNNEINQQLDLLKRNRRRLLESDADDEMISDCRLLMELLGQEPPYLTQFDETLFQSIVNQIVVTEQDKLQFCLIGGFAFTEQLPKEVFGR

SEQ ID NO: 2719 - protein, 547 aa, unidentified
  source 1..547: note = uncultivated organism
MKKVRCAIYTRKSSEEGLEQEFNSLHAQREACASFIASQKHEGWVLLPNHYDDGGISGGTLERDGLKQLMRDVDDGLIDQIVVYKIDRLTRSLSDFAKLVDRLDAAEASFVSVTQSFNTATSMGRLTLNVLLSFAQFEREVTAERIRDKIAASKKKGLWMGGGVPLGYEPDGRTLKINQKEAETVKAIYDLYESHGTLDAVVRHADQQGLQSIAKHGANRGKATSFKSSQVHYILTNPVYAGKIRHKDKIHEGQHEAIIDPERWQTIQAQLKDGAARQRGTRSSKTISLLSGKLFDETGDHLTPSHANKQGKRYRYYVSNRLIAKQETHKSKGGWRLPAKALEQQIATSIVDHLEEHLVTGLFEEPDADQIEAAIAKLTELRDQIQMGQLATALSILRQACISAGTITVQLDADTFADLVEVSTDHLNPAVCTFDAAFQFRKRGSETKLVIGNKPMAEPDNVLIDNIARAHHFYNAIKAGMTFDQVAKANNITKRRLLQIIDLAFLAPDIVKSIMTGDQPDWLTSKWLGQNPLPSNWQSQQKIVARL

SEQ ID NO: 2720 - protein, 574 aa, unidentified
  source 1..574: note = uncultivated organism
MKNYQTVGNKKVVFYGRVSTEHEEQTYALGNQMQWYEELKKSYPNWNVIERYVDDGITGTQAKKRPEFMRMIDDAKMGKFDLIVTREVARFARNTVECLEITRQLKNYGVEVFFVQERIWTLDNEGEMILTIRAMIAQEESRKMSERIKAGQAISRKNGVLYGNGNLLGYDRVGDTYVINQEQAETVHMIFDLYESGLGVQAIRDELIKRERINSSGLIKWDSTRILRCLKNTIYKGIMAYNKSHRNNYLEQKVIVNHDETTFEYVAATFEPIISEEQWEHCKLIRESRRNLRIVNVDGKAKMQYLGIHKSGNVWTKRLRCRCGSSMRMDKWRLKLNGERPVGYKCYNQLNKGANKIVNRESEDFCDMRAICGWKLEMMAQAVFKRVWKDSELLEKSIKIFMNETVMEQQDIERIKNNYRLEIKKFNEKAERLIEMRLNGEIDRDTYLRLKVTVDADKKQAEQQLLDYENLPRVAQSHPFSKEEIKKHLLDFVSPNSTDIDENIIDKFVTQIKVESETEFSWYLCFDSKENFNTEKKLYCTFTISFKDALKYRNKRKQLLRQNQYKDLEVSLYI

SEQ ID NO: 2721 - protein, 570 aa, unidentified
  source 1..570: note = uncultivated organism
MKQENIKTIRCAIYTRKSTDEGLDKEFNTLEAQRESGLNYIKSQAYQGWEALADHYDDGGFSGGNMNRPALKRLFEDIKAGKIDMIVVYKIDRLTRSLTDFSKMVELFDEYQVSFVSVTQNFNTYDSMGRLTLNILLSFAQFEREVSGERIRDKISASKKKGMWMGGPLPLGYDLKDKKLVINPQEAELVRTLFEKYLSCKSPQYLADWLNDQGYRTKSKITKNGKNIGGKPFERAHLYRIFDNKIYLGKVFYKGETYEGQHEAIISQELWDKVHKLKDMPVREKAPINKTFEFKTLKGLLFCGCCGYAMVPTRAQKRDREYHYYTSLKALKKSFRFCEVKSIPALVLENYIFEKIKSIMRDPLLIHAMSEAFKKDSPDIDEYKVVKTMVDSDFCETISAETRQNLFNFFIEKITIWPNKINIRLKPKINKIVQKSLLENKIWFFNSELQTYEMTEEVSFLKRNQQTEIHVSGEAAERRQDKQLIVALVRAFGWQNKLDKGNLNIQELSELEQLERGYMGKIIKLTLLAPDIVESILAGLQPPNLTLISFLRSPIPVDWNEQRKKYGFSS

SEQ ID NO: 2722 - protein, 564 aa, unidentified
  source 1..564: note = uncultivated organism
MSEQTKFRCAIYTRKSSEEGLDQDFNSLEAQREACEAYIRSQAHEGWKLVPDRFDDGGYSGGNMERPGLSRLMSQLREGKIDIIVIYKIDRLTRSLTDFARLAETFDKHNVSFVSVTQQFNTTTSMGRLMLNVLLSFAQFEREITGERIRDKIAASKKKGMWMGGPIPMGYEGRDRHLFINEAEAATIRKVFALYLEAGNVPALVERLKAEGILTAPRLSANARRHGNRHFTRGHLYKLLSNPIYIGRIPHKKTSHPGRHEAIIDPKTWAAVQAQLFANTQGPRNRRRRAEAQTHLLAGLLTSAEGNRFIPTHANKGSRRYRYYVEETTSGKITRRLPAGEIETAAVLALQSYLADQHHLVSDLGEVTPDQVPAALQLARRHSELLGQRLDKAQHVLVRHLVSAVRYRDTQLELEISRAGLRQALEVREPTSSIEWPSNANAEADITKYFAPVAIKKRGPQMKIVVAGQDNNWPDQRLITAIVKARNWADRLARGDAASLTQLASEARVGPAYVSRILPLAYLSPRIVEDILSGKRSPNLLGRGGAGAIVDLNWQNQLDALDRC

SEQ ID NO: 2723 - protein, 607 aa, unidentified
  source 1..607: note = uncultivated organism
MRATSRRLAPVPRLSVRVGVYARQSVEDATSEFGSIEAQREAVAAYVTSQREKGWTPLANVYEDGGYSGKNTARPAFQRLLADVDAGLVDVVAVYKLDRLSRSLSDFVALMARFRERNVDFVSITQQFDTTSSVGRLTLNLLATFAEFEREQISERTHDKMIAARRRGMWTGGAVPLGYDLVEKRLVPNPAETEHVRWLFETYLTLGSLTRTLDAASKRGVRAKSWIGKSGKLVDRGALDKNTLTRILTNPLYVGNQSAGDEVVKGLHEATIDEKLWNAVAAQLRANHNDGGATTRNRYGALLRRLITCAVCGSTMQHTAGGGHVYYACKRVLKESANACPGSRVPVALIETAVVERLRSIGQDARLVDATLAAARAQHAARAPELEDDLARLERQIVSKERERANLVKALAQGLERDVAQIDGELATLHAAAQAVRDELALLRAHRIDEDELRRLFANFDELWGGMLVHERERVMRVLVRELTFDGRTGEVVLNGTRFTIQLRAPQPPRKKRSAPRRGIRGARMLALTYVVERGIEAGQLRDLVHAAELFGVSRARMTQVARLTDLAPDLQERLLTGDKNIHERHLRAALRSADWDQQRAAIGART

SEQ ID NO: 2724 - protein, 511 aa, unidentified
  source 1..511: note = uncultivated organism
MRVAIYTRISTDEEHQPYSLEAQDLRLAAYVQSQDGWEVTRRYSDRMTGSTLERPELQRALADARLHRYDLLLVYRVDRLSRSVRGLAQILEDLDQASVLFRSATEPFDTGTPAGRMMVQMLGVFAEFERATLVDRVIAGMERKAARGGWLGGPVPYGYRYNGPGVIEPDVTEATVVRTIFDLYVNKRLGTRAVANWLNSHGHRTRLGRPWSQVTVFDVLRNPVQVGRIAFRGSSHEAQHEALIEPSLFEAAERLLAERGEVAWKRRSNGTEYLLSGLIRCGHCGNRYLGTVAHGRKAAYRYYTCFSRNRYGQHGCKADRLPADALDQAVLESMVATYADTDLVESAVRAARVKAEASAPSIRGELRSVDAAIQKGEESLARYFNAFEAGTLAVPTFAARIEAIEEKLAGLRRRREELAETIEAEAVHLPTPADLSDAEDAIREAMAGGTAGQRKALLQALVAEIRVESRHAIFPTYRLPAGPVRVMSGVVGLGEQNSNRLLEFVWRRFEL

SEQ ID NO: 2725 - protein, 547 aa, unidentified
  source 1..547: note = uncultivated organism
MKRVMCLYRVSTKGQVDPQDDIPMQRRECMDFISRQLGWKFVGELMEKGVSGYKISASKRDAILEMRAKAERKEFDVLLVFMFDRLGRREDETPFLVQWFVEHGIEVWSTREGQQRIDNRADKLINYIRYWQAGGESEKTSMRVKAAHSQMTADGIWRGGACPFGYKLVHHGRTGKKNRPLYDLEIDEHNGPIVQEIFEMAINQDCGALRIANYLNRKYPDENKVWTRPTVMTILKNVTYTGRMHMNDVLSAPIEGLRLISDEDFDFVKHALEKRIPHRYDARREQENQSVEDGQTKTAVFGASLLSGLVYCGHCGCKLVGSYCVKNRKNHSYFRPIYRCFNGGINAKHCDGQTVYSAKRIEAEVNNVVHQYFDSICSTKATVWQDQARRQKKSKTTDTIVDLEAELEDLHAQKRALEKEIIKSIMGESAYTDAKKLNSIMHNLDDKIDEGERNLAKFRKEREEESSHLHFLANQYENIRQWADVFDNAELEEQKMILARLIERIEVTRDYYITVKFFVALDEFLKSTTSDKITVEEAENTYLSIAL

SEQ ID NO: 2726 - protein, 541 aa, unidentified
  source 1..541: note = uncultivated organism
MQKHAALYCRLSVDDGSFGGSVSIETQKILLEQYCQSHDITEYEFYCDDGYSGTNFNRPAFQQMLKDIHAGNINLVIVKDLSRFGRNYVEVGLQVEHFKEQNVRFIAADDHYDSTVNEDDLMFPMRNVMNEMYARDVSKKTKAAKKAKAKAGQFMGSKPPFGYKLDPNDRHHLIVDEPAAEVVRRIFRLTAEGIGYNKIAKIFRAEKVLNPIAYFNQHNPDYFKSDYWRKEFDWHVTSVRVILNNEVYLGKLVYGKQRAKSMKSKQVVKCPREDWIVVEHCHEPIISQELWDTAHKIMNAKHRPAKTGEVQMFAGLLYCADCGHALTYSQKKRKDGTYHGAYSCWMYKTHGKEYCASHYICYDTVYDLVLIDLRSVLWNYRHNKKQFKAFLERKFQTDSAKEAKKLQAEYEKKQSRVEEIDRILCKLYEDSVLGKIPESRYEAMSAQYESEQMEIKESLPDLRQRIEQLKAESDATDKFVNLIKKYTVIDQLDAAILNELIDKIVVHHKEVAEDGRVFQQVEIYYRFIGKLEHAAESEKAA

SEQ ID NO: 2727 - protein, 527 aa, unidentified
  source 1..527: note = uncultivated organism
MARNSTALAPAKASNGSADVKTVRCAIYTRKSTEEGLQQEFNSLDAQREASEAFIASQKHEGWQVITDHFDDGGYTGGNMDRPALKRLLAAVEARTVDCIVVYKVDRLSRSLLDFARIIEVFDRNGVSFVAVTQQFNTTSSLGRLTLNILLSFAQFEREIISERTRDKMSAARRKGKWIGGHPVLGYDIDPKGGRIIVNPAEAEQVRTIFGLYIAHGSLLPALQETQRVGLLSKHWTTEDGNVRGGKPFTRGALHATLTNVLYTGMVDHKGVLYPGEHDRIIDQETWDRVHETLQHNGSTKGATVRNKLGALLRGLLFCVPCGTPMMHTYTMRKSKRYRYYVCYNAQQQGWQNCETKSVSAQAIETAVLDSIRRIGTDPKLAEAVAAEALDQMARRRRDLDQEFDTHRRSLRQFNQALAREAGDTSVDSGARFDRIVGIQKEIETTEHRLTELAAERKSCDQDRINANDLRSTLAEFDSIWSSLTTREQEQMIHLLVAKVGYDGRTGKVTVNFRSAGAKELCQTNIQ

SEQ ID NO: 2728 - protein, 537 aa, unidentified
  source 1..537: note = uncultivated organism
MPTRYDDGGYSGGSLERPALKRLLDDVAANKINVIVVYKVDRLTRSLADFAKIVEALDAKGVSFVSVTQQFNTTTSMGRLTLNILLSFAQFEREVTGERIRDKIAASKKRGMWMGGLLPLGYDREGRKLVPNPKEAELVSKIFSLYLEVGCVRKLAERLDREQVRSKVWITQTGARLGGVAFARGALYDLLRNRLYIGEIRHRDQWYPGEHEGIVPRSLWDRVQAQLNSNLRKRRNGLRERASSLLMGLVEDEHGTRYTPSFTVRRGRRYRYYVSQLAIKNTASEGIGSTRVPAQELESRVMEKLLAFLKSDAEIFDGLGLAEEGPAVASRLVTAAKQLATRLVSMSSQDLRDLLASFLWRITIHENKIEIKIRSQELRQQLESRGKASSASVPVRNLVSPSDLISLTVEAKRKRCGGEVHLVVPPSASVPREHPKLPLIKAAARAYGWYEKVIEGKAFDMRSLALETGLTERYVGKVFRCAFLAPDIVEAILAGRQPQDLNFDKLCQNLPLSWVEQREQLGFSPFNTRRPRTPLVQ

SEQ ID NO: 2729 - protein, 574 aa, unidentified
  source 1..574: note = uncultivated organism
MKTENKDFRKFAIYSRKSKFTGKGESIENQIELCRQYIRLHNPETEEADILIFEDEGFSGGNTNRPQFKEMMKEIKANHIQAVVCYRLDRISRNVADFSLMYEVFEDMNVAFLSVSERYDTSTPSGRAMLSMCTVFAQMERETIAERIKDNMHELAKSGRWLGGNTPTGYKSTQIVGSVTVDGKERKAYKLDIIKEEAELIRTIFEKFLTNNSLTKTETYLIQNHITTKNGKDFTRFAIRSILANPVYMKADTEAWNYFESNGVEIYADKSDFDGKHGIMAYNKTIQKTGKANKMREMDEWIIAVGKHKGLISGADWVKVQNLLEQNRSKSYCKPRSNVALLSGLLFCGSCGDFMRPKLSKRLNKDGEQIYSYLCQTKEKSRCKNCNSKNPNGNELDKAICEQIKLLSENSSACVKGLETARQEIEANREDFEEKFARLKKEQQESEKQITALVSALAKSDGTAAFDYITGQINELHTKVESVKKRMADISNMTNQNKYSDSDFEMLKDLLVSFGKSFDTMEIEQRRAAVRTFVKKVIWDGENAHVLLFGYDENSIDFASFSEENEEPLRADSE

SEQ ID NO: 2730 - protein, 502 aa, unidentified
  source 1..502: note = uncultivated organism
MYDAIYARQSIEKADSISVESQIDYCKYETRGNEYKKYIDKGFSGKNTNRPAFEKMISDIEKGLVKKVIVYKLDRISRSILDFSNMMEVFQKYNVEFISSTEKFDTSAPIGRAMLNICIVFAQLERETIQKRIADAYYSRSKKGFYMGGRVPYGFKLENTIIDGIKTSKYVQVEDEAEQIKLMYSIYSQPNASLGDVLRYFSEHNIKHLRGKIWCTARISELMRNPIYVKADSDIYDFYRNQGSNVINDAADFIGENGCYLYKGETGNPKQYSLQDKHLVIAPHKGFIPSNQWLQCRMKCLNNRQVAKSYKAKNSWLVGKVKCGNCGYALVVRKWTNKQKKVWRYFVCSNKTASGLCDGCGTVRADELEQFMFKNIKRRLENFNVLKSGEDFTLNPSINECKIKISTIDKEINELLQKVLNANNILINYINERIEKLDEEKKRVNEELLLLTNRSKNTDIKQITNYVSHWEETSFEDKLLVVDTLIEVIHISDGNIKIKWKI

SEQ ID NO: 2731 - protein, 571 aa, unidentified
  source 1..571: note = uncultivated organism
MTRPPVIRAAIYTRKSTEEGLEQDFNSLDAQREACAAYIASQRHEGWTLVPERFDDGGISGGTLERPGLQRLLAAIDTGQVKMVVVYKIDRLTRSLADFAKLVERLDAAGASFVSVTQAFNTSTSMGRLTLNVLLSFAQFEREVTAERIRDKIAASKKKGMWMGGTLPLGYDSSTDPKNRSMVVNPEEAAVVRQVFDLYDSLQSIGLVEAETKRLGLVTKLHRYPSGRTRGGVPFERGQIHYLLTNPTYRGLIRHGDKVYPGSHPAIIEEVQWNRVQEALLAAKARPRRDEASTPPGPSAAPTSALTGKLRDETGDLLTPSHTVANGRRYRYYVSNRLITGGTDPSAWRIPARSLETLIATRIAGHLQALADRHGLLKTADARRAAELSKQVSDLTERLLKDPQGSLATLVLRGSIGPGTIHVDLDPAVLAAALGLTQDELSLDVLSMTTGFPLRRRGIETKLIAGEREPLPDPTLIRALAESHQHADARLRKVERPIASAKRIPPSGSRERRKAWLAFLSPRIQVAILEGRQPTGLSLERILATDLPFAWAEQEYLLGFMPPEGKVPADV

SEQ ID NO: 2732 - protein, 536 aa, unidentified
  source 1..536: note = uncultivated organism
MEKTEKQEKKIVRCAIYTRVSTTEGLEQEFTSLDNQRESAESYIQSQKSEGWIVLPDIYDDGGFTGANTERPALQKLLSDIKESRINCVIVYKVDRLSRSLLDFSQLLEFFDQNNVAFVSVTQAFNTNTSMGRLTLNILLSFAQFEREIISERTRDKMGAAKRKGKWVGGRPGLGYDIDKVSHKLVVNQDEAKIVRKIFDLYLEKRSLLSVTMALNEKKYKTKSYTASKGNKFGGIKFKSTSVQLIVKNALYTGRVSYRGQLYPGEHERIISDDIFKEAQEILVNNRRERKIAGSTKNVGLLNNTLRCKACNSTMYYAYSMKGKNKYGYYLCMNAQKRGYKNCPTRLVAAQTMENKFMEFLRKVIADPRIESKTWDALTLEEKIPILKSIVKIAHYDGNNENLEIVLQKGEISHKFALRLAELKHIPYHRRQAEIGNEPILRQDLVFAHQIDNIIKEKNCSLRQIVQWTAIPLPKICQIANMIDISPQIQEEILFSQDKRLYEIPEYKIRDIISEADWKKQEQIWHSLLKSTENKA

SEQ ID NO: 2733 - protein, 566 aa, unidentified
  source 1..566: note = uncultivated organism
MNGDRRFRCAIYTRTSTDEHLDQEFNSLHAQREASEAFIRSQSREGWQLLKDNYEDGGFSGGSMERPALQRLLDDIRARCIDIVVVYKIDRLTRSLMDFARIVETFDASGVSFVSVTQAFNTTTSMGRLTLNVLLSFAQFEREVTAERIRDKIAASKKKGMWMGGNVPLGYRVENRKLLVEEGEAQTVRHIFSRYLELESVRKLAEDLNGTGLVMRRGPPRDGKSHITEPFRPGNLRHLLSNPVYAGKIRHKDKIYDGQHLSIVDPETFEQVQARLKQQAPKRRHSTNTADVHLLTGILFDETGDRLTPTHASKRGVRYRYYVSKRIVDRGSSADDPYDGWRIPAGSLDKIVESQLLQILRDINQLAEWSGSEIGGKSVPAIARQAQARSETWSGKTAEQKRSDLQSFFAKIVVRPSWIRLEIDRIAFLNWLMDITPDEDTETSPSIIAIEQPMSVRQRGVEKRMVLSNGVPMPRPEASLIDLVVRANRYLAELTDGSPKSLSQVAREVGTNVSEVSRLLPFAFLAPGIVESILAGNQPLELGALRLGRIADLPLDWEHQSEILGF

SEQ ID NO: 2734 - protein, 560 aa, unidentified
  source 1..560: note = uncultivated organism
MARKSRVMIERTIQRFKIWRIAIYIRLSKEDARSLDESESVANQRKIIEEHIASFNDGDEYIIVDEYVDDGISGTTDDEREDFQRMLTDIERGRINCVIVKDLARSFRNYSDQGYYLDDWFPRHNVRFISLYHQPLDSYKEPQNMRSIAVPIQGVLNENHCAETSDKVREVFDMKRRNGEHIGSFAAYGYLKDPNDKNALIVDEEAAAVVRDVFQMFLDGMSKNAIVHHLNDHGILCPAAYKRERLGLKYQNPSIDPARRPLWCAGTLTGILKNRMYCGDMVQGRYRVKSYKVHVQEIVPEDEWYIVENTHQAIIEREVFEKVQRLLLRDTRTAPQKNNVYLFSGFLRCADCGKAMSRSQVGGTVYYYCRTYKDQSKSACTKHTIKHNRLEAAVLYAIQQQVYLAVDYSKTIERINKAPLVKSQSKKLVDAIEQKERELSKIARYKQAIYQDWKDGEITHSDYRHMKEDYERQAEDLNIVIDRLRAEQAELENGIDTENPFLAAFRQYQNIDKLTRDVLIELVDRIVIYEGGNISIVFRFADELRRIQDYIEVNTPNEAV

SEQ ID NO: 2735 - protein, 658 aa, unidentified
  source 1..658: note = uncultivated organism
MKIAIYARVSTEEQAQKHSIDAQLDLLRGYAQAREYKIYKEYTDPGYSGTLHQRPGYQKLIDDAIDGKFKLIIVYKIDRLFRSTRHLLNVVHELEVYGVDVCSATEPFDTGTAVGKFTMQLFASVAELERNIFLQRSELGRIKRLEKGMVWGSQPPFGYIFDKSNSNLKIYQPEAKIVKLIFELYCQADTSTNRVADELNRRGYRTRHKKAWYSDGVSVILRRTAYKGRQAYNKMTNDPKVCRDEKEWVWVDVPPIVSIGKFNTAQKLLDERRWRRPSTNISYLLNDKLYCGYCGTSMRGGIRGKRVRLKSSDKDYLYLYYGCGNSGGPRQKRKKGVKDGARLTCAMKLVPVEKIEELVWGQIKNIVTNPQIVLDAAERQKGKGNNKNKDIEKKIVMTSRKIEKVDIKRKSVITLYRENIINKMDLITQLDEIEIESSLLEEEKKRYVSQMEMWEQDEIVAMSLIDLCKEVEDKIGKLDYTERRKIIDLIIDKIVVGIDGSVEMHLALPTQKAGLRDSVITIRMDTDVLSRRKEVSKTTKQRRGTGMVERSGGFTNEMWQKIERLSLDKKVTAAEMIRQMVSRAAQHNLINVDEYKMELLSKRKINMGFTDKRRPIHFTQEQVDYIEGLSALLNRPVTDVIRLCVSKYFEVYKLKAID

SEQ ID NO: 2736 - protein, 527 aa, unidentified
  source 1..527: note = uncultivated organism
MSEKGRAAIYCRVSDRKQVDRYSLDVQDTMLRDYATQHEMIIADVFIEKGKSAKSLDRPELQRCLTGVTHGRYDALLCLESDRLTRSVPDMYRLMEILHAGRCQLIPILEPTPDFTTSDGIFTSTIRTAINERERRHTRERVLRGMTARLQQGRWNGGTPPYGYTSDTGALIPDPDEADTLRWIFAEYLQCHSLRHVATLLNAKGIPTKRGSRWHATIIRQILMNPVYVGKLTWGKRHRDPLTHELTPGEPMIVNGIHEALISQQRFDRVQAILQEKARPSPRATRLYVLSGLVWCGLCGSRCHGTSKVKRGRLYAYYRCRGVAMGACSCPTWRADELEQQVIDHLTALSDNMTFLEDRAALLQRVKAELEAHQPTQALRGLDTQIADHRQKLGILLEAMLNKGFDDPIARAKYDTLQRELVALEAEYDRHQRRIDTQWTAYETLESSLARLQHFGDLWAQLEDTERPEFLRNMVDRVVVTATTTDVYLLVEHPEQVVSIEYYTASRSVLSTHLLRPVSFSRGDPIT

SEQ ID NO: 2737 - protein, 527 aa, unidentified
  source 1..527: note = uncultivated organism
MARRNMSVVRQEPVTAPVVRCAIYTRKSTSEGLDMDFNTLDAQRESCEAYIKSQQGAGWTALAEQYDDGGFTGGNTERPAFKRMMADIKEGKVDCVLVYKVDRLSRSLFDFAKIMELFEKHNVSFVSITQEFNTSTSMGRLMLNVLLSFAQFERELVSERTRDKIAAARKKGKWPGGSPVLGYDIDPDARRLVINEPEVVQVKKIFELYLENQSIMSTVETLNDMGMRTKSWVTRKGVMRGGHPFDKARLHRLLTNVAYIGKVPHKDKVYEGEHDAILDNELWDKTQFLMITNAKTGGKHVKNKYGALLRGLVVCGSCGCSMIHTFTQKGNRTYRYYLCSNAHKQGWKCCPTKTVSAGQLEQFVVGRIRDIGKNSTILEETIKSVIGQRRDKRPAIIAEVERLRNEIERLKKEGRRLVEGFARCNSGTSPIIAEQITRVDESIAEKNRLMSEARERLLRYELETVDTADIRNALAAFDPIWDVLYVREKTRIVQMLVQKVVYDGVAGTVGITFHPNGIKQLAKEMVK

SEQ ID NO: 2738 - protein, 572 aa, unidentified
  source 1..572: note = uncultivated organism
MKKQPAKQYVIYSRKSKFTGKGESIENQIELCRQYIASHYGAEQAENALVYEDEGFSGGNLERPEFKKMMRDSHEMQFAAIVVYRLDRISRNIGDFAKLIEDLGERQIDFISIREQFDTSSPMGRAMMYIASVFSQLERETIAERIRDNMQELAKTGRWLGGTTPTGYQSVGVSKVTVDGKSRKAFQLEPIQEEISLVQLIYDKFLETGSLTKVDQFLLEHQYTTKRGKQFTRFAIKAILSNPVYMIADEEAYNYLTENHVDLFADRSDFDGKCGIMAYNRTLQRAGKANQTRPMEEWIVSVGKHPGVIPGSQWVQVQLMLEGNRSKNYRHPRSNVALLSGLLVCGKCGDYMRPKMTSRVTADGEPVYSYMCTTKERSRRKCCDIKNANGNMLDTKLIEEIKKLADDKALFAQFLSQTRKSISGNRDGYDAEMASLKQKINENENSIKALVNTIAKGTGGAAEQYIMEQIETLHSSVNAMKERYAELEKLTTQHRFANQEFAFYQQMIESFAASIDQCTVEEKRRFLKSIIRKIVWDGENVTVYLFAHDGEAVLPEAKPSEENEVPLSADSK

SEQ ID NO: 2739 - protein, 558 aa, unidentified
  source 1..558: note = uncultivated organism
MKRQDRKTELRRCAIYTRVSTEYGLEQEFNSLDNQREASEAYIKSQAHEGWKLIRDHYDDGGFSGGSMERPALKKLLDDVRARRIDVIVVYKVDRLTRSLADFAKLVELFDEHEVSFISVTQSFNTTTSMGRLTLNMLLSFAQFEREITGERIRDKVAASKKKGIWMGGAVPLGYRVENRALHIVEEQADFVRDLFRRYLEVGSVVRLKSVLDAENLRLPIRAAGSGRTTGGGLISRGHIYHILSNPIYTGRLRHKEQIHEGQHGAIVDEDIWNRVQVLLADQTQTRKPSSQDAHSFLAGKLFDDRGHRMGPSHAAKGGRRWRYYISRAVLKGRRQDAGSVARVPAAEIEKEVLEAVKRRLPALDRSRDGPVGSVGHSILRSSNNTLAADNPSSTDPASFDDRARSAIERVTIGKSGIEIQLSDAAVLEGDRIVTIPWTLRSPYRRREIFQGEGEASSTIRPMRVRDRAVFVEALGDAHRWLDELTRHPDDTTATIAIREDKTERSIRMTLSLAFVAPPLVAAAIEGRLPRGFGVKRLMDLPMVWPQQWTALGLAPPA

SEQ ID NO: 2740 - protein, 527 aa, unidentified
  source 1..527: note = uncultivated organism
MAITISNPMDYKVALYVRLSKEDGDKQESESVSNQRAILKQFAQDNKLNIFDVYVDDGFTGANFDRPDFQRMTKDIEDGKINMVVVKDLSRLGRNRVEQEFFVYKYSGNYNVRFIAVNDDFDTDRDDNELLIMMKNWSNEQFLRDTSKKIKTTKRLKQQKGLFIGGKAPYGYKKSPTEKNVIVIDEDTAPIVRDIFHLALEGKSCRQIAIILNERQIPTPATYARINLTKKGPYSGKWSSERISFMLQNEVYIGNMVQGRSQKISYSSKKCRKIPREDWIVVENTHEPIIDRESFEKVAMLIASRKFTRSRTYEYLLKGIIICHECRYPLGVINRKLAGNREMLYFICRTYQRFTKYETCTCHCVRVDDVTNVVLEQIHRVCRQYSEQLNLEQITDKAQKMLREEKRRQGKDIAGTKARLVEIQSKIDKSYEDRLSGIVDEEVFQRVYQKLKDEQTALRKKLQKLERSDHEIELDKAKVKALVERFLNAEEYSKELIVSLIDRIELTKEKEILIYFKFKELDVASRL

SEQ ID NO: 2741 - protein, 527 aa, unidentified
  source 1..527: note = uncultivated organism
MITDDYKVGIYLRLSREDERLGESGSISTQRDLLLNYIRDNNLLFVDEYVDDGVSGTTFDRDGFKRMIKDCEDKKINMIITKDTSRLGRDHIEFGYYVEKYFPEHGIRYVAVNDGIDTAKNSSANDMLVFKSAFNDMYVKDISNKLRSSLYTKKRNGQFVGAYAPYGYKKSEEDKHKLIIDEEAAKVVRRIFNMFANGSSLGTICDTLTNEKIPTPSQHKNMKIGQNNYHYGVWATRTVRDILACPTYIGNLTQCKQKKINYKSKKRIHTREDSWIVCENAVPAIVDKATFELVQNMFKSNKNRFKGDGITNSLLLRGLIFCKECGHTFGFRAQNRVTKKYGEVTRIYGNCNYWAKRKHQGVCTPHSVKYFEIEEIVLKELRRMCEEYINTNMLENALKNSDKLKNKKNKILYEINKLDNEIENLKRKIDVCYNDKLDGNITLEMYKRTYNNFTLDIKNKEKEINLYKEQLKNLENTNVTDDKYYAQKIVEFLKLEKPTRALITTLIDRIEIDEDKNIDIYYKFRLV

SEQ ID NO: 2742 - protein, 524 aa, unidentified
  source 1..524: note = uncultivated organism
MSNRKGVKPADPNLPKHVRCALYTRKSTEEGLEQAFNSLDAQRESAEAYVAAQRHEGWTLVPTRYDDGGYSGGTIERPALARLLADIEAGLVDCVVVYKVDRLSRSLLDFSRIMGVFDSKGVSFVSVTQQFNTTHSMGRLTLNILLSFAQFEREIISERTRDKIAAARRKGKWSGGKPLLGYDIHSSPQGSKLLVNEDEAGQVRGIYEFYLQHEALIPTVQAVATKGWCNKVWTTKKGIEKGGRPFDKGTIYKMLTNRTYAGTIHYGGQHYPGEHQAISDKTTFDKVQAILGRNGHTKGAAVKNKYNALLRGLLFCHGCRCGMTHTYSVKAKSTKRYRYYVCVSAQKKGWGTCASKSIPAGQIEKFVVEQVRRVGQDPAVLEATLRQVRQQGQKAILEATAAQRAAERELARHGAALKKAVVASDADALAIINEKIRVAEQKVATARSEVEKLKAEDIRPDDLRDALVSFEPVWEQLSPREQARVIRLLVARVDYDGGGGSVTITFRPSGIRTLAEQGIEEVAV

SEQ ID NO: 2743 - protein, 528 aa, unidentified
  source 1..528: note = uncultivated organism
MAAEKPQQKKLRCAIYTRKSTTENLDMDFNTLDAQREAAELFIRSQGWIIRPDRYDDGGFSGANIERPALKRLLKDIEDGKVDCVVVYKVDRLSRSLLDFARLVELFDEKGVSFVSTTQQFNTAQSLGRLVLNILLSFAQFEREMISERTRDKIGAARRRGKWTGGPPMLGYRVDRERRRLEVVPEEAERVRVIFQLYLRLRSVGSVTEKLRALGWKKKTFTTKDGRESGGGDWDENAVHRLLKNPLYIGKVVYNGEVFDGEHEAIVEVETFERVQKLLAAKACGRGPRRGRNPEYLLAGLIHCPRCGKPLTTSSGRGSNGSRKDYRYYVCRTRQAHGPDKCKGVYVPAADVEPAVIGRVREICADPEIRAEVGRRLDAGKTTIAEDLTRERAALELRIETLTAEGKALVASIKQMGGKGGTFLPARLGEIEAELDKLRTQANELDDRMRGLLEAVGRVSTAVGLLESFDELWDVLAPEERLDLVRLLVERIDVDLDEGKLELHLHDLAAPLEQAGGCRPEAGGEEPR

SEQ ID NO: 2744 - protein, 536 aa, unidentified
  source 1..536: note = uncultivated organism
MSPRLRCAIYTRKSTEEGLEQSFNSLDAQRESCEAYILSQAGEGWQCLPDLYDDGGWSGGNMERPALQKLLTDIKQGRVDIVVVYKVDRLTRSLMDFARIVEVFDASKVSFVSVTQAFNTTSSMGRLTLNVLLSFAQFEREVTGERIRDKVAASKARGMWMGGNIPLGYDLADRQLVINTEEASLIRHIYERYLTVKSLPALARDLTASGFMTKRWVSRAGVNHGGIPFNCSGLSLILHNRLYLGEIVHKGKAHAGMHDAIVDREMFEAVQAQLAANHHQRVARKTRAAASPLTNKLFDGDGQPMRPSFSYGRGRTMYRYYVSECLLPTGKPSNGGNHSGTRLNAVHIERQLAVSLAPLLPQGTPPECLFSAISKAVVYQGEITVSLQIEKLAQDEIDEDLLLRRARHEVGSKAARQGPNLLVSIPLRAQRRGRRAAIDGVVGSDAVADPELAALLRTAHAKLKALNASPLVEAHHSNMHAPADAWTRKRLAFGLLAPDIQKAILQGMPTATPDLPALLELDIPLDWREQRALFFH

SEQ ID NO: 2745 - protein, 512 aa, unidentified
  source 1..512: note = uncultivated organism
MPKVTRITPFASGTERKIRVAAYCRVSSASADQLNSYANQIDYFTKYIKKHENWELVEIFADEGKSGTKDTRPEFQRMIRACELGHIDLIITKSTSRFGRNTKDTLKYVRKLKALGVGVIFDEQGINTMSLGDEMLLSTFAAIAQEESVAISQNQRHSIVKRMQSGCYVDSNAPYGFRLENKQLVEYPPESRIVKRIFEDYLNGCSATEIARALMSEGIPTKYGNPKWKSTTITYLLSNERYVGDCLYQKTFRSATVPFKQSKNRNDEDQFYADNTHVGFIDRDTFAKVQALLAQRKERHLKTNTFNTYALTSHVHCAECGSSFRRRMVGGGISWACTKHVNDKNACDSHYYREERIYDAFASMVNKLRFGQNGILDGIEQNLLLAINAVKKSNGMARESSQKIAEINGKILMLEQLRSKGYLSLDAYQQQVAELNRELATLKNERSAQLDNEIERVYAEFKKTRRLIDEIAEPLQTFNEQLFSDIVEGVYISNKDEIRFNLKCGFTFTERL

SEQ ID NO: 2746 - protein, 564 aa, unidentified
  source 1..564: note = uncultivated organism
MSKQANLKKKLKAAIYCRISTQEQAITANDRSSTDSQEDICRKWLEVKGYKLYKVYTDTKSGRNIERPQLQKLLSECSHFDIVVSTRLDRISRSIKDFQNLIEILDEKGVAINFANEEIDTSTLMGKAMRNILMVFAEFESDMVSKRTREQRIAAEKEGFWMGGYVPLGYDREDGMLTKNDEEAVLVNYIFDLYVKFKSAEKVRDLINNEGFRNKEWTTLEGNERGGNIFTPDAIRRILKRRFYTGYNELDGELYKTRFPPLVSASKFSKAQEITENNRRNPKEYVVGKAPNLLQGIINCGFCESAMTNSHTNKSGTRYYYYKCSSKNKGIKLNDHNPKDLPYKTVDEFTICTLKAFLAEPEMMQAFMTRSEHDTGERIAQTKELIKQIRSNRLQLIRSKDNVTQNLMKDRNPALTKHWEEELEGLLNQISEIDSVIKEKEEELTSLENAKQLSGDQYHRILTEFHQIIYDEPQSTKQNLMRTLIRKVESKVEKVKTGNKGIGELRIDYVCDHHLISEWEDIKEGLKKNANSEKGIKVRTSLALGSPGWIRTNDRSVNSRLLCH

SEQ ID NO: 2747 - protein, 618 aa, unidentified
  source 1..618: note = uncultivated organism
MRDEKRLCGLYMRVSTEDQAREGFSLPEQKERLETYCKFYGYEIVEYYKDAGISAKTGNHRPDYERMLEDGRQGKINMIVCLKLDRITRSIKDWESLLDYSKKYNVNLAFVNDDINTTTANGKMVSRIMMSVSQNEIERTSERTKIGMVGAIKEGHIPAPAPLGYKRENKKLVPDILTKDIVIRIFNLYYEGNSYSTIANIYNSEKVLGKTNWRDTRILKILSNEIYKGDYVSGKTIGNPVYYEDVVEPIVSKELWDNCQAQKKKNQKNYVRTQTYIFLQKLRCPKCGRILAGGATHKIKVDKWYFYYRCENCKNNIKEEVIENSIKNTLSDILEYDNVVNEFFLPMLKNKIENNKDDYEKEIKNLEKKKNKIKEAFVNELFTLEEVKSKTEIIDKQINELKSKIIEDKTCEQLNFTVDDILLKRDIDFINKVKLPISYYAFNDCWDLLDRETKADIIMRFIDDIELEINNNRLEVKLINFRSTMYEDFKKLYELGYMDVKRNLTCETNDMCIDTKVRTSEYLPYKQILQNLYRLNTLYEVNFYIGTYYKIQEKLKFESLKNGEVPVRIFPLQKNNNGDKDWVKMGMFTTPNSPNDIKVNIKDLFDTIPDNIIEEDFH

SEQ ID NO: 2748 - protein, 549 aa, unidentified
  source 1..549: note = uncultivated organism
MYFKNQNSYLAAAYLRLSRDDGDKVESDSIRNQRSLLRDFVNQHNDITLAKEYIDDGYSGANFERPGFQQMIKDAKEHKINCIIVKDLSRLGRNYIETGRYLEKIFPVLGIRFIAVNDHYDSADTKNDADQIIVPFKNLINDAYCRDISIKIRSQFDVKRKRGQFIGNYACYGYKKDPENKNHLVIDEYAAEIVRIIFSRKMEGFSAQNIAAELSKMGVLIPTEYKRSCGINYNNGFRAGKNPKWDSGTVLRILKNEIYTGTMVQGKTRKINYKVKTCQRIEPENWVRVEGTHEPIISREVFETVQRLMALDTRTSPGEESIYVFSGLLRCGDCGQNMVRRSVKKNGKRYFYYHCSTYKRGEGCSSHNISDVKLQKTILEAIRNQIALIIRADEILSKIDDIPQQQFGVKILDTQIKKLHKEIQKYEELKNKLYEDMGDGIISREEYSELKQTFLQKMETSKRTRHELEEKRKRMMSSEMSTQQWVEEFKQYRNIQTLNRKVVIMLIEKIVVHSADRIEIHFNYQDEIAEFIECAMVQEKSMDRKVGNL

SEQ ID NO: 2749 - protein, 657 aa, unidentified
  source 1..657: note = uncultivated organism
MQRAYIYTRVSTAMQADNFSIEAQKTDIEGYCKYKDIQIVGDYSDAGYSGKNAAGRPAFMQMIQDIEDQKDKIDYVIVFKLSRFGRNAADTLNYVQLLEDYNIHLICTKDGTSSETGNGKLMINMLSSMAELERENIHVQTMAGRRQKAVQGGWNGGFAPYGYALIDGKLVIQEDEAAAVREMYRLYVETDMGFNGVAKQINETFGKKPRQNGYLTKFATNIVRQIIVNPVYKGTLAFGRRVTEKIEGERNVYHVIKQKDPTKIIYTPGAHPAIVTEELWDAANAKAAINGVKKEKIFKDHEYILSGLVKCPYCGDSMYGVPNGTKINKWGEKYRPSYSYKCRNRLRESGHVCPGKSQYSCKKVDEAVRDIIMDMVSQENFSEMLSSLLDKQVDRDSILAELEQVEKDIRRYTLARTKANNQLLNLDYDSPVADQEEEILNQRLMDAMVAISEAENKKATLNYRLLEIGNAEAARKSVYDFLSVFKDLYDQLTDAEKKETMQALISSVELHTKEYMARSGQWIKAIHFKFPISYHGEIVEDIELDENGHIFRPNQSTDETVALLRRKNVDDYLEFTWTDEEFGNNGCKASYEEIKFFILEKYELKVSHLNIAQIKRKCGIIERLNYNLPKTDNPKVPNCTPEKEAAIMDAFRHFKLI

SEQ ID NO: 2750 - protein, 513 aa, unidentified
  source 1..513: note = uncultivated organism
MANVTYIAPVKAESMIHKIRCAAYCRVSSSSEDQLHSYAAQVKFYSEKFIGSETEELVDIYADEGISGTGTAKRTEFQRLIRDCKRGKIDRIYAKSLSRFARNTKDCLNTVRLLRELGISIYFEKENIDTAKTNDELIITVMGSLAQEESTSIAQNMRWGIRKQMEKGAFKPRTAPFGYKSENGKLVIDEQESEIVKEIFRWYLSGIGTTQIANKLNEQYGRKGEKQIKWCHTIVRYILSNERYIGDLLLEKTYRTDTLPSVKKKNNGERDQFYVTDSHDAIISRDEFEKVQQLMSKMAVRYKPERKNKYIIGSILECGECGSGYRRKCNNGIYYWTCTNHDKNADNCSAKLIPEDIIKQAFISMCNKLIQHYREILLPLRRSLQELNMRRFSGNTKIIDIHKNIADIKEQRHVLSRLRKKGFMDEKKYNDKLTELESQLARQERELKKTAKADNEDDTLEQLDILIDTIEKQDNITTEFDEELFGIIVEHIIVRDKSLEFILISGLSLKEDI

SEQ ID NO: 2751 - protein, 553 aa, unidentified
  source 1..553: note = uncultivated organism
MEKLIKTKCYRAAIYVRLSKEDGDKVESDSIVNQKELIRQYLTDKPDIEVHSVRVDDGYSGANFDRPAFQQMLKDIRSGQIDCVIVKDLSRFARNFVEAGRFLDQEFPLYGVRFIAINDGYDSIQRKGGADDIVLPFKNLVNDAYCRDISVKIRSQLEVKRKKGDFIGSFAVYGYLKDPDDRHKLVIDEYAADVVRDIFKWKLEGLSQQRIAERLDDQGILSPMEYKRYCGMKYKSGFQINPKARWTAVAIDRILKNEFYVGTLVQGKRSTPNHKIKKLMQKPENEWVRIEHNHEPIIEREIFDTVNRLLMKDTRIAPQEQTVYLFSGLLFCGDCRRSMVRNNNNRGGKIYTYYMCGNNRNTKLCSSHRIKDTLLEQTVLASIRSQIDAVLDVDKMLKRIDDIPYRKSIASRTGTQAEQKKEEIERYKRLKKALFESKVEKLISEAEYFEMKLQYDEQQKSAEDDLHRLEKELHTATFSLKENNNWIEIFRQYQNITELTRPIVVTLIDHINIYEGNRLEIVFQYQYDFEQALKVISCAETADATSPEEAEVV

SEQ ID NO: 2752 - protein, 556 aa, unidentified
  source 1..556: note = uncultivated organism
MKHPIPAAVSPSMLPKRVAVYARVSTVKQAEADLSIPDQIAQAKSWCERQGYDLVQHYVEPGASGTDESRPVFQQMLTDARSQPRPFDLIVVHSFSRFARDNFAYAVAKRTLNKAGIAVQSITQPLADDPTGQMVESILVAFDAYTSKEIGKHTARAMKENARQGFWNGSRPPLGYDVIGAEQRGQKVKKRLEINATEAALVRRIFGLYLGAEGVQLGVKAIVTKLNAAGESFRGKPFMISSIHRILTNETYTGQHWFNVQDSRSGAIRPRDEWIGIEVPAIIPRQTWENVQEQLRERAPQKIPARVVNCPTLLTGIAVCAHCGAGMTLRTGKGYRYYTCAGRAQKGPTRCGGCAVSMPKVDQTVIETLSERIFTPSRLIDLVSGYLDKAKADAQQQRSQLGQIKADLTETEGALKRLLGMVEAGLMELDDPALRERLSALKTKRKTLTAQLKQASDLQPANRPHLTEAKIQSLSDTIRTALHTAPPEMRKAYIKLFVDKVVISKQEVELSGPKSLLARAALTDLPNTPAEVITFVREWRPQGDSNPCYRRERAVS

SEQ ID NO: 2753 - protein, 556 aa, unidentified
  source 1..556: note = uncultivated organism
MKGPVQKAKLRCAIYTRKSSEEGLDQAFNSLHAQREACEAYVKSQAGEGWVVHPVVYDDGGISGGTMERPALKQLLADIDRGLIDIVVVYKVDRLTRSLMDFAKIVDRFDARSVSFVSVTQAFNTTNSMGRLTLNVLLSFAQFEREVTGERIRDKIAQSKAKGMWMGGALPVGYDTPTDPLTRALVVNPQQAELVRHLFDRYLALGSVHELKRELDAAGEVTRVHTARTGSQRGGQPYGRGSLFHMLRNRVYVGDIVHGDKSYPGAHPPIIDPEVFDLVQAMLDSNVAARKERAVMPGRSPLMGQIVDADGLPMTPALAYGKLGRKYRYYVSHPLQVGGGKDLDRDVVRRVAAGAIEALVMGRLTELGLIPANSDWRAARQVFRKVHLNRQDITISLGKGDLGPAAIAGIRERLSAGQKLVEIGGKAARLDLIIPGRPVFRGGRTWLASPDGASMAKRTAADPTLLQGLKRAHKVLQDHHVSPVTTIDQNRTAKGIDDSYLRRIANIAFLAPDIQAAIVEGRQPAGLTLEMLQGMTLPIAWADQRTALGFSPASYL

SEQ ID NO: 2754 - protein, 521 aa, unidentified
  source 1..521: note = uncultivated organism
MTQVVSKGILPKRCAIYTRKSVAAGLEKDFNSLDAQREACEAYIQRQHNWVLVPDHYDDGGYTGANTDRPAFQRLLADVDAKKIDIVVVYKVDRLSRSLLDFAKLVERFDKAGAAFVSVTQSFSTADPMGKLTLNILMSFAEFEREMIASRTRDKVQAARRRGLWTGGPIPLGYTVQNGKLVIDEDEALVVREIFSLYLQHRSYLRIIDELTARGRSTKRRAGENKPVRGARLWTKDALLRVLKNPIYIGKTRIGKETFAGEHPALIEPHLWDQVQQQMSQKPTKKLRLNSAPFLLRGLVRCQGCQRVMLAVSSKRGRKLYRYYRCDTPSRQRVKGRCCPPLPAAPLEEFVVNVLREQVVAAHFQQQVEATLSSKLTTRHAVLERERSSLPRSIGVLANDLRGLMDLASQAPEGAKRALLDRMDQVNRLQEAQQLRLAAVEQEMVSLANLKARADALVATLKEFDKVWKHFNDDEKEKLIACLVGNVVVDEASGQAHLDIDLPLLDAIEALGAASTAEAAQ

SEQ ID NO: 2755 - protein, 575 aa, unidentified
  source 1..575: note = uncultivated organism
MNRTRCAIYTRKSSEEGLDQAFNSLDAQREAGLDYVKSQKHEGWEAIDENYDDGGFSGGTMKRPALEKLLEDIDRGRIDVVVVYKVDRLSRSLGDFARMMQLFDEKKVSFVSVTQQFNTTTSMGRLTLNMLLSFAQFEREVAGERIRDKIAATKKQGYWVCGQPPLGYRLQREDEERGLYIIPEEVETVRRIFERFIELKSPLAVASELSEQGFTTKRWVSSTDRVHGGKLLTQKYIHGVLTNPTYIGKVTHTRNGETTIYDGRHEPIIDQATWDDAQRLITTTDRNTLHRWSQPHLLKGKLRTGDGYAISPSSTHRPLTKRGATSKGRSQKRLVRYYVSQKAIKHGFKSCPIKSVNAEHLDDLVRGVVLGYLDCEPLNAQQTEIRDHWIRKLIQHVVLTENRLSIEIDKKHIEAVRSHDFASVADISQQHPHCLREPKCEEDDSTIRLTLDIQFKKIDGRRLLLSPDGNDLFLPSRPEPKQHIVEAIGLAYRWHNELISSGEHIKPFTESRGIARTRIMKLLPLINLGPEILRHALAGTLTPSVTLADLLEAAKHLDWTRQARSLGLDRAAATA

SEQ ID NO: 2756 - protein, 525 aa, unidentified
  source 1..525: note = uncultivated organism
MNRMNIQGTSALNPQKEIIKINALKSETVKLRVAGYARVSSDSADQLNSFSTQVNYYQRIINGNPMWQMTEVYADEGISGVSVNKRDDFARMLADCKRGKIDRIITKSTSRFARNTLDAIGVIRELKDIGVTVYFEKENLDTATLTSENLLTLYSLFAQEESMTISKNCKKGARMRMSKGTYVSSNPPYGYRLINNELVIEENEAEIVRRIFREYLSGKGYSAIAKELMADEIPFKNNKIKWRPQTVGIILKNERYVGDMLLQKSFAEDALPYNKRINKGELPQYYVSNTHEPIVERIQFELTKILREERRENINTDCKEYPLSKKIKCAECGTTYRRKETNNTVYWVCRQHDDSKELCGGRKLPEEKIYNAFIRMYNKLSKNYGNILIPLLTQLEKLQDLRTRNNLEIGTLNKQIAELAEQNHVMNGLLSKGILDSALFISQTDELQKKIRKLKSAKLKLLEEQDADDSIDKTEDLIDILESGPDKITEFNESLMEEIVAKMIAYDDKTIDFLLINGLVLKERL

SEQ ID NO: 2757 - protein, 559 aa, unidentified
  source 1..559: note = uncultivated organism
MEKVAALYVRKSKATEKGESIENQIQRSKDLCNYKGWPYQIYEDYDVSGKNLDRPSFKKLMYDIDQGMIHTLVCYKLDRVSRSVNDFSTLIDDLDKKDVDFISLKENFDTSSPMGRAMMMITSVFAQLERETIVERVRDNMIDRAKLGKWNGGPVPLGYTAISETIRENNKIKKASRLVIEENEASIVKFIFNKYMELRSIRGTALELNRLGYKTKKGASWNPNQVQRMLKNALYCVGDTYAFNYFNTSTEVQISNPEGMFDGNYGMMYYNRRRPNGTTSTQLPMKDWILSVAEHKGIIPGKEFATVQQLIQKNANVAPRTGQSQSSPLSGLTRCGECGSSMSVYYSRKTNRGNGAIDGYYSYFNCIKKVQQAQCDNRSIRTDKLENAVVEYLGYLLDNEDQLNDMLKRSTGADEQIENLASEKKRLRNRLDAIDNEINNLTAALARDILPESVIMKKYDELEKEKNLVVTEYNSVVNEINYNTNYKLNTEIFVNSMKQFNPKTYNKLPMNIKKTLLRSIVKKVIIHKDNIKVHLFVDLSYENHVVCPRTLKGSCLRQA

SEQ ID NO: 2758 - protein, 601 aa, unidentified
  source 1..601: note = uncultivated organism
MNKGESGAFGFLIAQLCYQEVKGLFYSKELQAPLNGQHWLCASYVRLSKEDEDAGNGGKDESNSITNQKALIRDYLADHPDLELVGEFVDDGYSGVNFDRPDFKRMMDEVKNRRINCIVVKDLSRFGRNYIEAGKYLEQVFPFLGVRFIAITDDMDTGRKQSDAEQFILPFKNLFNDSYCKDISTKVRSQLAIKRKNGQYVGSFACYGYLKDPANHNKLIIDPETSGVVQQIFYWKIQGLSADRIAERLNSLGVLCPMEYKRSMGMKVSTNFRTKGKAQWAPKSVLRILKNEIYVGVMTQGKMTTPSYKIRKLIEKPEEEWDRVEGTHEAIIHKDVFDVVQSLLLRDTRISPDEKQLYLFSGFLFCGDCGMNMIRSRRKYKDTVYAYYSCSGYKRKSGCNSHIISERQLYDTVLAAIKHQCSLVLDMERLLKYAQNLPDDPKSRHHFDAQLARLDEEIKRNQDMKVRLIENLNEGIISREDYQELSAIYDSRIRYSRQAKQNVEAERDGLKNLPLESEWLNAIKRYHTINELDRIMLAELVDFIEVHENKTLTIHFKFADQIERVQQYLSSIPALNIRDGGNRNGTKKPSSGTGCTKTEKQ

SEQ ID NO: 2759 - protein, 558 aa, unidentified
  source 1..558: note = uncultivated organism
MSRKIRCAIYTRKSTEDGLDQEFNSLDAQHEACAAYITSQRGEGWHLLPTRYDDGGVSGGTLERPALQQLMDDVDAGRVDMIVVYKIDRLTRSLSDFAKLVDRFEAAGSSFVSVTQAFNTSSSMGRLTLNMLLSFAQFEREVTAERIRDKIAASKKRGLWMGGVPPLGYDAHPDPNTRSLVVNETERGTVEALYALYDDLGCLRAVEREAASRGLRSKRHVFSTGREQGGGPLSRGQIHHILCNPVYAGRIRHKDKVFNGQHAAIIATDFWDRVQAKLQEASGRPRRGSCAIQKGRRSDVAVLTGKFRDPTGDRLTPTHTKKGSRRIRYYVSNRLLSRHDPAGWRLPAGRFEASVAARVADHLGLMAERHTLVTIPDIGAGPRLEDNARALINRLRNGENDLLSVIIHNAQIFTDHLSMTFDRDALADLLQVPPGDISDTVLSCTAPFETRRRGVETRIVIGDVKPAPDSTMLRALAKAHGWTAALKSGSSISEVARSENVSEAFIRTRAQLACLSPRLQRAILDGTQPVDLTLEKLVRGHLPLEWSEQERRLGLTVR

SEQ ID NO: 2760 - protein, 524 aa, unidentified
  source 1..524: note = uncultivated organism
MVGIYGRQSLFKRDSLSIEQQVNSALSLCNQNNWEYNVYSDAGYSGKDLKRPAFTELMADVQSGKVDKILCYKFDRISRNIADFCMLLEELQKYHCEFISISENFDTSSPIGRAMVYICMVFAQMERESISQRVHDNYYYRTELGFWGGGAAPYGYQLTRIKYKGKVHTVLEPESEQSKIVQDIYSWYLEPNESASTILDRLNNQLNIPSRNGAMWTSRVLMDILSRPLYAPNDMAMYNYLLGIGANITNTPEEFDGNASVDMYGKKVEASKYKRCRKAEDMYCNISSHDAIIDSDTWIRVQHKRQQLIRKPSRAGTGKNSYFTGLMKCELCGTGVSYTSSRGTMGYYICSSKKNRGYHSCSMKPAPLRTTDPAIIESIITHYSNPDIIELLKNVKLEARKEAPADIKRRNKLLAEAASIQTQIDNLMASITFGNDIMIKYINDKIVELDSKKGAVEKDLLEMDQKKSEDISENEILMKIGDTINEIPKILTDGAFDEIRDLCKLLVQEIIFKKDGNIDVKCTV

SEQ ID NO: 2761 - protein, 545 aa, unidentified
  source 1..545: note = uncultivated organism
MSEKIYRTAIYARLSKDDGDKAESNSITSQKAICEEYITGHSDLELVETFVDDGYSGVSFHRPQFEQMEQAIRAGKIDCVICKDLSRFARNYIEAGRYQERIFPKLGVRFIAVNDGYDSLTGNPQSDSFIIPFKNLVNDTYCKDISIKIRSNLDVKRRNGEYVGNYAPYGYKKSAEDKNRLVVDEYAAEIVQSVFSMYKDGLSVGRIAEKLNDMGVLSPMEYKRSQGIRFDTLFKTKERADWSYNTVKRILTNEIYIGVLAQGKTGTPNYKVRKVQPKDESDWIKVEGVVEPLVSYTDFMDVKTMLGRDMRCTADKDESNLLSGFLFCADCGQSMIRKTIPSKNKRYIYYVCSTAKHKKGCSSHCVSAQEVQDAVLHAIHDQVGLVLDMEKALKMIDSLPSADRKTFNFEVQETRLKEEIERLQGLKLRLYEDLSEGVIDRNEYTEFRNRYTAMIADKDEAIKRVHREWQDSKVTGNENRQWVALFREYENIEELNRRAMMALIDRILIHEEHGIEICFKYGTEYRQTEEFVSGYTGELAETEVR

SEQ ID NO: 2762 - protein, 602 aa, unidentified
  source 1..602: note = uncultivated organism
MKRNEDMIAIYSRKSKFTGKGESIGNQVELCKDYVRNMFGEEYVDRCVVFEDEGFSGGNLKRPDFQRMMADVRKRKFKAIVVYRLDRISRNISDFTGLIDELTKLDVSFVSIREQFDTSTPMGRAMMYIISVFSQLERETIAERIRDNMHELAKTGRWLGGTAPTGFKSEAVSKVTVDGKTRKSFKLVPIPEEAEIPKLIFDLYTETDSLTAVEAELLRRRIKTKQGKDFTRFAIKGILQNPVYMAADEDAYRYFMEREADVCFPKEAFDGTCGMMVYNRTDQEKGRTTIQLPVSDWIIAIGQHPGLVPSKQWIKVQESLERNKSKAYRKPRNNEALLTGLLFCSCGERMYPKLSQRKTADGEPIYTYVCKMKERSKRERCNRRNANGNILDASIIEQIKSLSEHGSSFITQLEKSRQFYTGNREQYKTKMDELRAEYAENAKKINGLIDSLSMVGDSIARPHVLGRIEELTQINRDVENRIHELEGLINVDALNDAEFDLLRQMLSMFRASIDDMSIEEKRAAIRTVVRKVIWDGVNAHVVLFGADEGEIEFPDMVDRIGHMDDEGSEEDPLEAFLDVDYEEFEDENSLAEPKTHWREDSK

SEQ ID NO: 2763 - protein, 545 aa, unidentified
  source 1..545: note = uncultivated organism
MSNKVYHAIIYCRLSKEDGDKVESNSIGGQRAYCEDYISKQKDIEIVHEPIVDDGATGVNFERAGFKKLEQLVRSGKVNCVVVRDLSRFSRNYIDAGRYLEKIFPSLGVRFIAINDNYDSLSSNAQSDSFTLPFKNLINDTYCKDISVKIRSSLEIKKKNGDYVGNFCPYGYKRDEVNRHKLIVDEEVREIIQMIFSLFKDGVSIGKIADRLNSMGALSPMEYKRSQGIKFETVFKTSENSKWKYNTVKRILVNDIYIGTLSQGKRGTPNYKVKAIKVKDESEWITKEDNHEPLVSFEDFEAVNQMLKRDMRSKVDDTENTLSGFVFCADCGASMVKTVSTSKGKKYTYYVCSGNKKKKNCKPHTISVNEVEEKVFNAIHDQVELVVNLEKALELIEKMPHKDRRVFSYEKQILSLEQEIERYQKLKLGLYENLTDEIISKEEYFEFRNTYTNILEEKETAKKRLEKECKQAVTTGTTTKNWVTLFKSYENIDTLNRRVLMSLVDKVLIYENHALEVVFKYADEYKQTMEYILSIEEVKKIQEVA

SEQ ID NO: 2764 - protein, 528 aa, unidentified
  source 1..528: note = uncultivated organism
MSKSRSRVLAPEKPTMRCAIYTRKSTEDGLEQEFNSLDAQRLSGENYIRSQEGEGWQIIPDQYDDGGFTGGNMDRPALQRLTADIEAGKADCVVVYKVDRLSRSLLDFSRILELFEKHHVSFVSVTQLFNTANSMGRLMLNVLLSFAQFEREIISERTRDKIAAARRKGKWVGGMPLLGYDVDPKGSKLVVNELEAKRISSIFDLYLDHKSLIRVIAELDKRQWNSKVWTTRAGTERGGKQFTKASLHKLLTNVTYIGKVRYKSEVHDGEHAAIVDTVVWQRVQATMQRNGRTGGVEVRNKFGALLKGLLRCAACDAGMTPSHTTKGGGKRYRYYVCCRAQKRGWSNCPSPSIPAAEIERFVVDQIRSIGCNPDLIRDVVTQVHNQGESHRSAFEAEQTSLQRDLTRWNSELRTVAAHAGPSGEDSPVAGKLADLQERIRQAERRLTEIREQIHEINSRQNSHREVATAMHQFDPVWEALTPREQCRVIHMLVERVDYDGNKGTVAVTFHPEGIRNFGDEVAVCEETI

SEQ ID NO: 2765 - protein, 514 aa, unidentified
  source 1..514: note = uncultivated organism
MKQTRKTNPKNRCAIYTRKSCEEGLELEFNSLHAQRESAEAFIASQQHEGWECLPDQYDDGGFSGGSLERPALNRLLEDIKSGKIDCVVVYKVDRLSRSLLDFARIMETFDKHGVSFVSVTQHFNTTHSMGRLTLNILLSFAQFEREIIGERIRDKIAAQRRKGKWSGGIPILGYDIDRSNPSPKLVVNAEEAVQVRRIFSLYQELGSLLPVVKAVHRLGWCNKEWKTKSGLQRGGKAFDKCSIYTLLTNPLYAGLIRHKDMIHKGEHEPIIESSIFETVQRQLKKNGRGRGNHLVNKHGAILKRLLRCSACDCAMAHTFTRKQEKIYRYYSCTNAIKNGRDACPTPNLPAAEIEQVVLNQIRTIGADAEIQKLVIAQINNSQNKQLEELQTHRQQLERQLSRDHAELSKRALAQDPTDATRARVADLHLRISKCESDLTRVISSIARLESQTIDRVTAAESVRDFDEIWDALTSREKSRMIRLLVSRIEFSAADSSISVSFLPRRDTFTSSHS

SEQ ID NO: 2766 - protein, 555 aa, unidentified
  source 1..555: note = uncultivated organism
MEEKISKTYQAAIYLRLSREDGDVDEGAKLVSNSISNQKALIMDFLKSHSEINVYSVYADDGYSGIDFDRPNFQRMLDDIRKGIVNCVIVKDLSRFGRNYIEAGRYIEKVFPMLGVRFIAITDNYDSLEAQGGYGSDMVVPFKNLINDAYCRDISIKIRSHLEMKRKKGKYIGAFAVYGYRKDEWNKNQLVIDGYAAGVVRDIFTMKLCGLSQQAIADKLDADGILSPMEYKKSIGINLETTFKKGAQAKWSYNSVTRILKNEIYTGVLAQGKQTTPNYKVKTRVIKPEEEWVRVENTHEPIVSGKDFALVQELLKQDTRMSPEKDALYPLAGMLYCGDCKEPMVRKTIPAGGKKYIYYVCSGNKKDKFSCSPHRIPEAELTETVLCLLQMHIEKVLTLKKAMEAIEKAPKMRADVAKYGERIRRKKEELEKAEKRKMNLYEDLKDGIISKKEYFQLKAEYDRRCAEAEASICSYEKEEKLLLESKSSLHEWISGFKEYRNIRSLSRNAAVVMIKKIFVYSADRIEVVYNFEDEFARCSEYAAAYVDVPERKEAV

SEQ ID NO: 2767 - protein, 502 aa, unidentified
  source 1..502: note = uncultivated organism
MYALYARQSVDNKESISIESQLDLCRQKALGHDCREYKDKGFSGKNTERPSFQEMMKDIRKGEIEAVVVYKLDRISRSVLDFSMILEELQKHNVDFISAMEAFDTTQPMGRAMIQISAVFAQFERETIQQRVTDAYYSRCKRQFYMGGRIPYGYKLEDYTIDGVKTSHYVENPDESEHVKLIYSLYADPQNSLGDIVRYLDEHGIKKRRGREWDTSRLSDILRNPVYVKADVDVYAFFSRSGTHINNSPQDFIGENGCYLYKGTKTSDNKRSHLEGKELVLAPHTGLISSEIWLKCRIRCKNNRQSAQTCKGKNSWLTGKVKCGNCGYALTIAKSNTKMGRYFICSQKSATKGAGCHGTGGTIYATILEEYILCRIRERLHEFSSLKSGNAQKTNPKLNELKVQLANCEERIDDLVKKIPKASDRTMKYINECLEQLDQEKCQLNEEILKLSDTPISDDFNVITKHAEQWETISFNDKQKVIDTLIDVIKIANGQITIDWKF

SEQ ID NO: 2768 - protein, 542 aa, unidentified
  source 1..542: note = uncultivated organism
MREQPLQNKAALYIRLSKEDAGEGESVSIGTQRDILRRYAQEHLLTIIDEYVDDGYSGTNFDRPAYKRMIADIESGKVNCVVTKDSSRLGRNGAKLLDLLDEYFPSRGVRYIAVTDGYDNASLSSGAATVMPLMAIVNEMYARDTSTKIRSSMYSKMERGEYIGNFAPYGYKKDVEHGDKNHLVIDPLVAPVVRDIFKMAADGLPPSQIAAHLNRRGVATPAEYRCMSRPYLDVNKYSTRKEWTSAGICKMLRNEAYLGKTLQGKTQKVSFKSKATKRNKRENWIVVEGTHEPIISEEIFRVAQNRRVSRRSPPNRGFVNVFAGVAKCADCGRGMSTATTRKKGATYNLCCGGYKTYGARECSNHAIDYDVLYHLVQQELKALITLSTEQREKVIAALLADAQKRQEIATDRQALAQMQRDEMSLTETMCKLYEDFAAGRITKTMYDSIAPKYEADMSALRQSISCIEERIRREPEEERAEAYRKFFALLDKVESVDELTKPLVHSLIDRIEVEQGEYIHGADGKKHKQQTVRIYYRFIGQI

SEQ ID NO: 2769 - protein, 579 aa, unidentified
  source 1..579: note = uncultivated organism
MGEAEYLLQRLYEEVIGGEQMKRVRMLLRVSSNQQLDADGDLDIQRQIVLDYIGEHADWVLDKKEYFEGSNSGYKNTVAKRDVLQEVLQDAQNGEYNILVVYKDDRVGRLMWEIGAYVMTLKKYGVDICTVKDGCISPKTDDIMGQMVLALRYGSAQKSSSDTGMRVKDTAKKLVQKGRFLGGKAPYGYSLEYSGEISKHGRALKHLVIIPERAELVLFIYSLALQKEYGSTKITKILNNHEKYKDMAPNDIWKTGTVTSILTNPIYAGYTSYNRRTRVDGVYHKLGSDNWIISDERNPEIAIIEVDIWNRVQDMRKRRAEGIVKTDEHKDANMTIMKSNMGTLVLIDVLYCGYCGRKMTNGSRYNYWKIKGSGEKRTKKIGLYRCQNSWSGAMHSGRWYYRADKVEAIVFNAISEYIGKLQENDDVFQEIEINKQREKKTARTELEKEKQELVKIKKKIGVMEENIPQAMTGEYPLALDDLVRLIDKQKETCSKQQEVIKQKEDKLKNMDMSISERGYLREQIPTWQQVFLEADPHTKRVLVNKLVEKIDIIEGQITIRFRIHLEEFISHPEKIVIRY

SEQ ID NO: 2770 - protein, 503 aa, unidentified
  source 1..503: note = uncultivated organism
MNYIALYARQSIDKDNSISIDTQLEYCKSMIRPDEKHLKVKAFSDRGYSGKNTNRPEFQALMKDIRRGKIKKVIVYKLDRVSRSLMDFVDMLAEFKNFNVEFVSSQECFDTSSPYGEMICKLLMVFAEFERTSIVNRIRDAYAKRSDLGLYAGGRRVYGYNLEDTVISGIKTKKFIPNKEEAEHIKYIFEAYSQPAVTLRMLQANLLENGIKPLYGADWTTGKLGTLLRNPIYVKADADIYDFYERHNTKIIGNIEDFNGIHNIQLYGKSTHDKNLSDWSDMKIVLLESEGLVDSQTFLKCQRKLQQNKQIGNAMSNNTSWLSGKLICSKCGHTMTTVRGSTRQYFLCAGKTHKKTCSGIKQTIYVEDIEAMIDDCIMKKLNSLKLSRVHHSKENTAQINLIKLKVKDVEKNLSTLSDAILSGSLNEEMIALLNEKAKMLTNEKRKYMDKIDDLLVSNNDVMETVNFSKKWSKANFKERKAICNVLIKSIIMYDDSSEIIWNI

SEQ ID NO: 2771 - protein, 586 aa, unidentified
  source 1..586: note = uncultivated organism
MTIQTKIKGADPSDIVVLQQVVRVAVYGRVSTDNQAKKDNSLPNQKERLEALAKYKGWEIVGYYFDEGESGAKENRPQLDRLMEDAKMHKFDIVAVIKVDRFMRSCRHLHNAVHTFDELGIGFYSESEGINTLDKSGMGRIILSLFGSLAEYELEQIHERIKSGRGRLARKGQFNSGRPPYGYQFDHDDIFYKTHDKSEPKPLIAFEDEAKAVRFIFGKFSEANGRLGIGKVAEMLNLDTDFTPPQTPGRKNKKYHFWIPGAVGRIARSSVYYGAPNEGYKYAAEPLISKEVWDKTQYRIDHNGDIKGAGEKITKYQGHIKCGICGLSVRPGYNHGLTGTVVYVCAGRNKDAHLDGKTEKCKLNRFPAAVVDAAIEAKIHELRTNPEVLKSTLEKSLAELKADLATISLKVKPLEERRVRIRRQIEGYNALVTAGEMDADDYLKKIEPLKKDEKDLERREKVIDPNLNTDIEFKKMQINEFEKGMDILFNGDLEHRPGVNYEVAETIEILQRLFKKTDFTNVTDEKQKKMPFLPFLMAIVNDETPDNFTAILTNVDGDKKAVDVELRIGKTSAHSDCMSVRSRRFR

SEQ ID NO: 2772 - protein, 509 aa, unidentified
  source 1..509: note = uncultivated organism
MYALYARQSRDKKDSISIESQFEFCMREVPEGIEVRKYEDKGYSGKNIERPAFQRLLEDIEKGLIEKVIVYRLDRMSRSLLDFAKIIEFFKKHNTEFISTTEKFDTSTPIGKAMLSIVMVFAELERETIQQRIIDNYYERGKKGMFLGGNVPFGFKLSPTYIEDKKTNMLVPTDKINYVIDLFNKYANTNTSLKSLALELNEKNIKTRFNNYWDSAKISRLLKNPVYVKADVEIYNYFKNMGCIIHNDISDFIGENGLYVYGNNGSASTKFQNLEGYHVVLAPHNGVIDSATWLKCQYRLRKNKQIKNSGKSKYSWLSGLVKCKKCGYAMNVNKAKLSKKNNTEAIYLRCSGRANKNICDCPSIRVDEIEELIKNDIFAYINNLSNILKVDVIEKSDQINDLKMGISKRENEIENLIDSLAQANGVSIKYINKRIAKLDEEIKELNEELRKVSQNNNLDKEKIVQFKELLPLWDKIELEDKKEFAQALIETIYVQKIDGRINYEIDFKY

SEQ ID NO: 2773 - protein, 553 aa, unidentified
  source 1..553: note = uncultivated organism
MTQKPVIRCAIYTRKSSDEGLDQAFNSLDAQREACAAYIASQRHEGWKLVPDRFDDGGISGGTLDRPALQRLLVEIDAGRIGMVVVYKIDRLTRLLVDFGRLVERLDAKGCSFVSVTQAFNTATSMGRLTLNVLLSFAQFEREVTSERIRDKIAASKKKGLWMGGTLPLGYDRHPDPMRRELVVNQAEAEVVRTLFRLYDDLGNLRLVELEAKRLGLRSKSVTQSSGQVRGGALFLRGQLHHLLTNPVYIGRIRHKGQSYPGQQIAIIEADLWDRVQAKLIAAAARPRGRNETPTDSSILMGKLRDETGDPLTPTHTLRHGRRFRYYVSNRLIAGGTDPSAWRLPGPALEATIRQIVVGHLRRLAASHAILAKPDASGAADLLRRANAMADRVEADPSLVGTFISLGIIGQSQLELHLDPGGIAGDLAVPEDGLAVGFLKLSHPFTLRRRGIETKIIAGEMVPAPDPVLQRTLAEAHQWARDLKDGVQLIEIARRTGHSKPYLRARIGLAFLAPDLQAAILDGRQPASLSVARLIRDDLPMDWAAQRRIFSVV

SEQ ID NO: 2774 - protein, 509 aa, unidentified
  source 1..509: note = uncultivated organism
MIAIYARQSVDKKDSISIETQIETCRSKILSSNTEKPEVFSDKGFSGKSSANRPEFQRMMAEVRKKNISKIIVYKLDRISRSLIDFINMREEFQRYNAELISCAEDFDTSTSTGRLMLNMLMMFAEMERETIQKRIRDNYYARGEKGFYLGGYAPFGYSKTDTIVDGKKTYMFEENKEESVILKQMFDDYLSGKSIGDLSRELNHKKIPTRKGKAWSNPSIARILRSPVYVKANADVYNYLVGLGAKMNNGIEEYAGENGCVVYGNAAERKAIKFSDLSTDFVTLGLHKGIIEPSLWLGVQYTINQKKDHSNIGTGSLTWLQGLVKCNCGYTHYVKRCKSGKKQTEFKYFYCRGRRNDSCIYPRNMIQVGKIEEIVETEIISHLKDLKNIQPNKINADNPELNYLKIEISKIDEQIERLINQVANGTDITINYLNQALEKLHGDKKILIDKLNDIQLKINRGNEININIDIDEVVNNWFDYEMNVKKAVAKKIIEKVILEGEAISIIFY

SEQ ID NO: 2775 - protein, 518 aa, unidentified
  source 1..518: note = uncultivated organism
MAANVTYIPPKAAKPAILRVAAYCRVSSDSSDQLHSYAAQIHYYTDMIQNHDGWELVDVYADEGITGTRMDKREDLNRLLTDCRKGKIDKVLVKSISRFARNTRDCLASLRELSRLGVSVQFEKENIDTGTLTTELMVSVSGSLAQQESVSISQNQRMSYQRRMERGEFITCKAPFGYRLIDGKRLEVISDEAKLVRWMFNAYLSGHSLEWIAEQMTKTGVSTTDGKPYWQCTTVLYTLTNEKYMGDSLCQKTFTTAFPFTQRQNHGEADQYYIENTHPAIITKGTFEKVQELLRQKSNRQKIPRQIYPLSRKVYCGQCGTPFARRVGKSGLVVWVCRKHDKGASKCTMGRIPESALYAAFVGMYNKLKQNAGIVLLPALKQMEELRDALQRDDPAMLAVNRAIAQASEQSHRVSQLQAAGLLDADACAAKFNEINARLTQLRAERRRLLKNEDIDDAIDALQRTADLIQCGPERLEGFGEGLFHDLVERIVVESQTCVRFCLRGGLELTEQLREVRR

SEQ ID NO: 2776 - protein, 610 aa, unidentified
  source 1..610: note = uncultivated organism
MSRAVGYVRVSTEEQTQHGYSLEAQTEAIKKYCEIQGWELLRIYRDDGYSGASMERPALEQLLADLHLRHFDTVVVWKLDRLSRNLKDTLYLLDDVFEKNEIGFTSIQEKFDTTTAFGKAAMQIVAVFAQLEREMITERMKMGKYQKARLGQFPGGHVLYGYKKNPSTCEFEVNEEEARIIKLIYHWYVYGDESGQPLGMEAIADKLTQMGILPPSAVRGVRVGVRGKRGQKGEYVKHWSNATVRQILTHQAYIGKNYFGRDGKNAEPDKIEDDWIVIPFPPIVDEYIYQLAQERRNRAKFWQRKHETPLLTGIIHCGICGLQFRGTYDHGTTAVYSCYGRLKRYHRDGSPTCDSPRIPADWLDQQVVLKVLEALQKPEQMKEAIMAHLESWERRKRELELLVGPSVKQMKEFEDEQERLNYLFRKGRISVSEYEKEASTLDKKIAELREQHKHQTNELRHLQKLEKDLDFIKQALENGYWKVEYEALQSEIKMIWDAALTIDNKTGEVVVTTPREEKKVTIDFSNADEQVQEQEELLTLAMHGGGKIAIRQLFDKLHITVHVYHDRVEVRGLIPIGNINISSFQFLIGRLKTIKSSVSNVYNETSFNSL

SEQ ID NO: 2777 - protein, 547 aa, unidentified
  source 1..547: note = uncultivated organism
MKKIRCAIYTRKSSEDGLEQEFNSLDAQREACASYVASQKHEGWVLLSTAYDDGGLSGGSLERPALQRLMQDMREGHVDQIIVYKIDRLTRSLADFSKIVDVLDAAGASFVSVTQSFNTATSMGRLTLNMLLSFAQFEREVTAERIRDKIAASKRKGLWMGGLVPIGYDADGRTLSINEAEAATIRTLYDLYEHHQTVRAVKEHADLLKLQTKVRTAADGTVRGGSPFARGHVHHILTNPLYAGRIRHRKLVHDGQHPALIDPARWERIQDMLQDGAAKDRRTRSKSQSSLLCGKLFDETGDRLTPSHTKTRSGKRLRYYVSHRLIAKSGEQHLDGWRLPAPELEAQVAALIRKTLTDASAATRLMIGASSDDIGNAQTTLTNWLATATQADLVCLAKKITIEPGQLAVQIDQSQVANILDTSAETLNEDALSIGRVFQIRKRGVETKLIFADMPIGQDDALIRNIAKAHSWFEQMKAGKSFAQIADAEKTSKRRVQQMIDLAFLAPNIVRDVLEGKQPIGFTSDWCLRHALPSDFEEQQQLLKSLK

SEQ ID NO: 2778 - protein, 557 aa, unidentified
  source 1..557: note = uncultivated organism
MNKTNCYLYTRVSTAMQVDGYSLDAQRDKLVKYAEFQEMNIVGEYTDEGKSGKSIEGRPEFQRMLADIEAGTDRVSYVLVFKLSRFGRNAADVLSSLQRMQDYGVNLICVEDGIDSSKDSGKLMISVLSAVAEIERENILVQTMEGRRQKAREGKWNGGFAPYGYKLVDGYLEIAEDEAEIIRLIFEKYVTTSMGLGGVAKDLNSHGYHKKMRDNGKLDVFTSSFIKRVLDNPVYCGKLAYGRRKSEKVNGTRNQYHMVPQADYPVYEGVHEAIISEETWLAARAKRQQTGKKTEKVYSLDHSHLLSGVLKCPVCGGCMYGSVNRKKKKDGSFYADYWYYACSHRRYANGSRCTFSRQIHQKELNTAVEEFIKRIVHNMQFDSAIKERMSEKTDVDQLSREAENIRKTIRRLTAAKEKLGAQIDALDCTDPHYQQKDTDLQQRLNRMYDEIAEANAAYEEVCRQIQDIREQRLSGKKVYQFLELFDIMYEKFTDSEKKEFLASFIREVEIWPERQNNGQILKSLLFRFPLYYQGHMTYKIFPNKETTVETVVLMSRR

SEQ ID NO: 2779 - protein, 563 aa, unidentified
  source 1..563: note = uncultivated organism
MSAKIRCAIYTRKSSDEGLEQEFNSLDAQREASESYILSQRGVGWAASSKRYDDGGLSGGTLERPALRTLLGDIEKGKIDLVVVYKVDRLTRSLADFAKIVDVFDAAGVSFVSVTQQFNTSTSMGRLTLNMLLSFAQFEREVTSERIRDKIAASKKKGMWMGGLAPLGYDVRDKKLVVNKTEAEIVRTLFRLYLEHGTVKKLVEESGRLGLSTKRRIRSNGQSTGGQSFTRGHLYQLLTNPTYVGEIGHKGVTYPGQHDAIIDRKVFDAVRSRLDNNAALRQSPTNAKAPSLLTGLVYDETGDRMCPTHANKKGRRYRYYISKRLMHRTASTDGGWRLPASELEGAVTRAIGDFLRDGIRVVDALELTGIDPDRLRTVLRRAEAAARDMEDEQREHQVRLLRRLLHRVTLHPGSILIALTRSGLARLILEKNPDSAAHQEGQIDLTVPVALKRRGVEAKLIVSAQGEVAAPDDSLVALLSQAHRWRDQLTAGEVSSARQIARDDGISPSEVSRIIRLAFLAPDIVKAILDGRQPIELTSRRLMRIGELPLEWHRQRRLLGFPA

SEQ ID NO: 2780 - protein, 516 aa, unidentified
  source 1..516: note = uncultivated organism
MSKPRQRASAPAPEAKRCAIYTRKSTTMGLEQEFNSLDAQRESCLAYIERQQGWTLVDERYDDGGFTGANIDRPAFTRLMADVEAGKVDVIVVYKVDRLSRSLLDFVKVMERLSTAGASFVSITQNFSTADAMGRLTMNMLMSFAEFEREMISERTRDKIAGARRKGKWTGGPVPFGYSAKDKKLVVNDAEAHIVREAFALFLAHRQMAVVARELNKRGLLPRSSKRGRKGGPLWSKDGIARVLRSPLYAGRMMYGDDLFDGEHPPLIDDVTYRQAQRLLGAAGRELRVTGTNPEYVLRGLLRCGGCGEAMCPASTTKKSGKTYRFYRCSTRDKYGTDRCSGRPLPAGALEDFVVDRIMEATADGTLAERIQTKLSARVAKERATFVEVRRALAAQIAEASATTAKLTDEVVRLEGRARELVEAKLRAEAARLDDAERRLRALEDDALDLELVESQREWFVGALRNFGKVWGGMTPENQGRLLRALVAKVSVDEKTGMCRVELVNFDAVTSAKEAA

SEQ ID NO: 2781 - protein, 527 aa, unidentified
  source 1..527: note = uncultivated organism
MTRGTKNAKPGKAAVRCAIYTRKSTEEGLDQDFNSLDAQREAAEAFIVSQKAEGWEALPDRYDDGGFSGGNMDRPAVERLLRAIARGEVDCVVVYKVDRLSRSLLDFAKIMETFERHGVSFVSVTQQFNTTHSMGRLTLNILLSFAQFEREIIGERIRDKLAAQARKGKWIGGMPVLGYDVDRTGPSPRLVVNAKEAARVREMFRLYLVSESLLPVVKELARRGWVNKRRITRKGKKLGGRPFDKSSLYVLLTNPVYTGKTRHKGELYEGEHEAIIDQDLFDQVRKRLKLNGRAGGAGARNKYGALLRGLLRCKCCGSAMTHTFSGNGRGRFYRYYRCTSAIKKGHDTCPAGTLPAAEIERVVVDEVRALASDADLLARVVGEADAAIEAELAAVRRDLKDTQRERKRHHHELQQLALAGETSSDATARMADLHERMSDADRRVPEMEARIAELEGQTISKAEAEEAFADFDGLWESLAPREQARMLNLLLSAVEYDGEAGTVSVTFHPTNIRALMKYTEEAAVCQP

SEQ ID NO: 2782 - protein, 543 aa, unidentified
  source 1..543: note = uncultivated organism
MSEKVYRTAIYARLSKDDGDKAESNSIIGQKAMCEEYISRQKDLELVETFVDDGYSGVDFNRPGFRKLEEALRGGRVEAVVCKDLSRFSRNYIEGGRYLERTFPQLGVRFIAINDGYDSLTGNAQSDSFVIPFKNLINDTYCKDISVKIRTNLDVKRRRGEYVGAYAPYGYQKDSNNKNRLVVDEYAGDIVRQIFSMYKDGVSVCRIAEKLNSLGVLSPMEYKISMGSNYSSSFRMNESAKWSYTAVHRILTNEVYIGILAQGKRGTPNYKVHVVQDKDESEWVKVEDAHEALVTFEDFMSVRRMLGRDTRSVGEDSEENMLSGFLFCGDCGQPMTRKVVPSKNRKYYYYICSTHKRREGCTTHSISAKEVLGSVTNAVKQQIGNVLELSETLEYISSLPMADRIMFNYEAQIEKLTEEIMHCKKMKLQIYEDLKSGDIDKKDYADFHEQYTLRIEEKSEALERVRRESRDASVSGPAEKAWVSLFREHENIGELSRRVLMALVDKILVYEGHVVEVLFQYGDEYTQALEMVEKAVEKLPQVV

SEQ ID NO: 2783 - protein, 528 aa, unidentified
  source 1..528: note = uncultivated organism
MNRTKPRATTPAKRTVRCAIYTRKSTEDGLEQEFNSLDAQRDAGENYVRSQVHEGWEIVADHYDDGGFTGGNMERPALRRLMADIEAGRVDCVVVYKVDRLSRSLLDFARMMETFEKYKVSFVSVTQQFNTASSMGRLVLNVLLSFAQFEREIISERTRDKIAAARRKGKWVGGMPLLGFDVDPRGSKLIINDDEAARVRAIFDLYLEHQSLLVVIHELDARGWCNKRWTTRKGIERGGKPFTKKSLHKLLTNVTYVGKLRYKDEVHDGEHAAIVDAAVWERVQALLQRNGRSGGAEVRNKFGALLKGLLRCVPCDSAMTPTHATRDGTKRYRYYVCCHAQQRGWQNCPSPSIPATEIERFVVDQIRAIGRDPDLIRETAAQARQQAEAELAALEAERASLERELARWNAEVRDVVAHVGPSDADSPAVARLADLQERIRGAERRATEVREQIHAISARSVDQKEVAQALARFDPVWNSLTPREQARAVELLVERADYDGARGKVAVTFHPNGIRDFGEQFANAEDAA

SEQ ID NO: 2784 - protein, 605 aa, unidentified
  source 1..605: note = uncultivated organism
MKKNNDCIAIYSRKSKFTGKGESIGNQVELCKEYIAAHYGAEALENLVIYEDEGFSGGNLNRPDFKKMMAAAKERKFKAIIVYRLDRISRNISDFSSLIEELARLDIAFVSIKEQFDTGTPMGRAMMYIASVFSQLERETIAERIRDNMHELAKTGRWLGGTTPTGFESEGEETVTVDGKKKKTFKLKLIRQEAEIVQQIFDLFVETNSLTMTEAELMKRRVMTRNGNYFTRFSIKAILQNPVYMIADQESYDFFIEKEADLFSDRAAFDGKHGIMAYNRTDQEKGKTTLNNPVHEWIVSVGKHPGLIPGKTWVRVQDALEQNKSKGFRRPKCNEALLTGLLYCRCGNRMYPKLSKRRTADGDIIFTYVCKLKERSQRSLCNNRNAQGNTLDMAVVEQVKRLEDHGSEFIDQLEKSRKFYTGNRVQYEEQLAALQKDKAEVEKKIEALVDSLIDLGDSAAKVRVAKRIEALTAESDALEARIQELIALTSQHAMSDMEFDVLRQLLSVFKENIDDMPLEQKRAAIRTVVRKVIWDGVNAHVVLFGASEDGIEFPDMAPLLADADDETESLEPFADVDYEEDLEEESMENGKSPNAPKTHWGEDSK

SEQ ID NO: 2785 - protein, 514 aa, unidentified
  source 1..514: note = uncultivated organism
MKIKLDDNEPAKRKESKMTNAVIYARYSSDKQNEVSIEGQIAECRKYAKENDIVIVQEYVDRAQSATTDKRPSFLRMIDDSRQRHFEIILVYQLDRFARNRNDSGYYKKILADNGVKVISAKEQIASDSSGVITEGMLEVFADYFSKQLSEKVQRGMYQNAEKCKHNGSTVPFGYVTDAEGHYQLDELAAPIVKEIFERLASGESASSITKDLCDRKVKNSLGRLFGRTTIYNMMRNEKYKGIYIYDNYRVEGGMPKIISDELFDAVQDRFKSKKHNPRPSSEDYLLTGKLYCGHCGAPMTGTCGTSSTGKVYRYYFCVESPMKGGKCDKKNVPKDLIESLVLNICRESLTDEFIDSAVNAIILQNEEDQRLPTIIRLTDNIKDVESKIEKLLDQVESGISTERIAARIKQREVELTDLKWQLKREQLKLKKIDPVLARRYLISLRDDVSKDNIDYRALLINLFIDKIILYDDHFRILMKNSTGSSESTQSQQKEIEQYFDVYRSDECPNGTPV

SEQ ID NO: 2786 - protein, 577 aa, unidentified
  source 1..577: note = uncultivated organism
MKDREQKRFVIYSRKSKFTGKGESIENQIELCRQYIAVNFGQTEADSALIYEDEGFSGGNLERPQFKKMMNDSQKIDFAAIVVYRLDRISRNIGDFAKLIDDLGRREIGFISIREQFDTSSPMGRAMMYIASVFSQLERETIAERIRDNMHELAKTGRWLGGNTPTGYASESITSVNMNGKTTRACKLKIIPEEITLVKLVFDKFIETGSLTKTDEFLLSNGYTTKRGKRFTRFAIRGILMNPVYMIADDDAYNYLSENEVDLYSEKKDFDGEHGIMAYNRTLQTKGRGNQAKPMNEWIVAVGKHKGIIPGATWVKVQKMLELNRSKNYRKPKSNVALLSGVLFCGNCGDYMRPKLTSRLNADGEYTYTYLCTTKERSTSKLCAMKNPNGNLLDRMVIEEIKKLGSQSTDMARMITQTKKQIGRSRDDYNAQLDEARKQFDGNEKTIKALVGKLGAASGTSAEQYILAQIDELHTKGEALKSRIRDLEAVTTQNALTDIEFDLIRDMLSNFGENIDNYSLEQKRAAIKTFVRKIVWDGENAHMYLFGNEGKCELPQIGEAKTEPKGNNCRPLSEVIE

SEQ ID NO: 2787 - protein, 520 aa, unidentified
  source 1..520: note = uncultivated organism
MANVTVIPARRRRIQTNEVQEIPKIKVAAYCRVSTDSDEQATSYEMQVEHYTEYITKNPEWELVDMYADDGISGTNTKKREEFNRMIEDCMAGKIDMIITKSISRFARNTLDCLQYIRKLKDKNISVFFEKENINTMDTKGELLLTIMASLAQQESQSLSQNVKMGIQFRYQAGKVQVNHNRFLGYTKDEEGNLIIEPDEAETIKRIYREYLEGASLKDICDSLMADGILTGAGKKNWIPSTVHKILTNEKYIGDALLQKTVTTDFLEKKRQINNGLAPQYYVEGSHEPIIPKHIFMRVQEELVRRANLRSGKDGRKKRVYSSKYALSSICSCEKCGDVYRRIAWNNRGKKSTVWRCCTRVEHGPGVCDAPTIPEEALQAAVMNAINEVLGRKSEVIKNMEKLLEQTVSTDYDEQLEDIDVRMKELQLKLVDLNTTKFESEDLSRDVNALREEKERIMIAIAEDKGRQLKKEEMIRFLQEQTAELDEFDDALVRKLVEQVVVHGDGTFTVEFKSGELFEL

SEQ ID NO: 2788 - protein, 538 aa, unidentified
  source 1..538: note = uncultivated organism
MPEPKRKTRCAIYTRKSTEDGLEQDFNSLDAQREACAAYILSQTHEGWEGTSELYDDGGFSGGSMDRPGLKQLLQDVIAGKVDVIVVYKVDRLTRSLADFAKIVDILDEHNASFVSVTQSFNTTTSMGRLTLNVLLSFAQFEREVTGERIRDKIAASKKKGIWMGGPVPLGYELGDRKLVVNKKEAETVRHLFRRYTQLQSVPQLVDELAAQGYRTKIRPYKDGRKIGGVVFRTGALSQLLKNPIYTGMVRHKDKIYEGEHEAIIDQELFDEVQSVFAVNRSENALGKKSRNPSLLVGIITDPDGRPMTPTHASTGSKRFRYYVSRLEPGDDKNGVWRLPSGEIERLVMDTLAMAIANSVSASSEANVIQDQMAAHHDVADQLRSAAIHEKRKILLDHRVKVQIQKEQVIIGFKPHVEAERAEVCIDAKLAKQGSELKFTIPPTNANIKPVPNATLQKLVAQAFAAQELLLTGKPNPALSDYSSRYLGQLVRISWLAPDIIGAIMDGTQPVDLTGRKLTRANAIPLDWPSQRKMFGFA

SEQ ID NO: 2789 - protein, 505 aa, unidentified
  source 1..505: note = uncultivated organism
MAVALYARKSIEREGSISCETQLEYCRAMLKPEERRQKIHTFVDNGYSGSNTDREGFREMMKLVERGKINKIIVYRLDRISRSLSDFVTILDTLKRNHVAFVSSQESFDTSSSYGEMIVKILMVFAEFERNSIIERVTQAYHHRAEQRFYMGGRRPYGFLLTETTIGGIKTKMLSPNPSEIDHVKTIFENYAVPGVTLRRLMDDLTQNHLSSDEEPLSTAKLSAILKNPIYVKADNSIYEFLVRHHTKIISDISEFDGIHGVQIYGKTKHSAEDWSDMKAVVMTHEGVIPSDIWLACQKKLQSNKQIGNAISNSTSWLGGKIACKKCGRTMTVTKGGKRADGSQTRYFSCTGKNGRVCKGPKVTVYAESLEGLIYDLISEKLRSLKACRGKISTDHSAKINALKNRISEIRASEEKLVSLMLDGNVGGDMMGLLNEKARKFAEEKRELAEKMEALQETENETAHAINLSKKWETADFEEKKSVCHLLIDKIYIAEDGAVEVVWKI

SEQ ID NO: 2790 - protein, 534 aa, unidentified
  source 1..534: note = uncultivated organism
MKPVLRRCAIYTRKSTEEGLDQAFNSLDAQREACEAYVKSQAHEGWKLMKGAYDDGGFSGGNMERPGLQRLMAEMKQGLIDIVVVYKVDRLTRSLADFAKIVEVLDSHGASFVSVTQQFNTTTSMGRLTLNVLLSFAQFEREVTGERIRDKIAASKRKGMWMGGTPPLGYDIKARQLVVNETDAEIVRLIYRRYLELGCVRSLAMNLRGNGIVSKVTVSKRGRQHGGQPFGRGALYHLLRNRLYRGEITHKGHAYPGQHPAIVPAELWDEVQRTLTTNRSQHLRARAERSTHLLAGRLKDDAGNSMIPTYSCKANGQQYRYYVSQGLLDPAKGPIGSVTRVPAEAVERLVEEEFIRRLSPTEQKRWQSSALADRAERLRMLVAKVVVREREIEISLSEDADGALAETVSGSGPEGGERVIKLPVAVRVTAGGKSIVTLDGRGPEESRFDRALLRAVARANHWRELLETGAARSAYDLARREGCHVSYVQRHLPLAFLAPDIVEAILAGRQPRSWVLADLVTDKASMNWAGYRPA

SEQ ID NO: 2791 - protein, 517 aa, unidentified
  source 1..517: note = uncultivated organism
MKVAIYCRLSSEDKNKIHKTDESESIQNQKTMLIRYATEQDWEIYGIYCDEDYAGSDRSRPEFNRLISDAENRAFDIVLCKQQSRFTREMELVEKYIHTAFVEWGIRFVGLVDSADTSNRGNKKARQINGLVNEWQLEDMSESIRSVFKSKRKAGVYTGSFALYGYMKDPEHKGHLIIDEEAAMIVRDIFKLYTEGVSKQGIADILNKRDIPNPTLYKQLHGIKFRSPKGIYDSQWCGAVIGNMLVNQMYIGNMVQGRQCKASYKSKKIINKPESQWDVVPDTHEPIIDKETWEKTQTMIKRKYKPFTAGDPMLFKSKVYCKECGYILSGRRERGKDGYYNCRRRIKGTPSCNVHIPQKILVNVVTRKLEGLSKYYFDVDDIQRSIVINRKKSEELALVVKSMREENKKIKDTDLYLKNLYVDKVKGVITEEQFVDFANDFNNTKNQALSNLEKLKFQKANIERDMDKDIDLKALLEKYSKKTELDRESIDAFIDSIEVGRKAPETKQREIIIHWNF

SEQ ID NO: 2792 - protein, 577 aa, unidentified
  source 1..577: note = uncultivated organism
MAEIITPQRCAVYTRKSTDEGLEKDFNSLDAQREAAENYIASQKHRGWVCLETDYSDGGFSGGSMERPALKRLLNDISSGKIDVVVVYKIDRLSRSLLDFAALQTVFDEHKVSFVSVTQEINTSSSSGRMMLNILMTFAQYEREIITERIRDKVAAAKRKGKHCGGPAPLGYASDPQTKKLMSVAEEVEVVRRIFEVYLRYGSARDVAEELTKEGVLTPAKVSRKGNSRGGKPFTPAAIYAVLSNPVYVGLVRHKEKSYPGEHEAIIDQKLWDEVHEVLRMNTVHDGRMSRRLSPLRGLIRCGYCDGLMIENFTKKSQGALYRYYICEKDVKRIVRSCPVKSVPVAELEKLLLGEIGKLLQSPTLIAGVMGVAGGALKSDEVIGALRNLRNVWEVMFPGEKHKFIHGIVKRMTVKPDEVRIEYNAEGLRQILREAGIATADAPEGKIEVAIPVRLKYNGARTVLVVAEEMEDEDNLSPLQKALIQGFQYRDKLESGAVKSVSELSRTEKIERAFLFRSLSLANLAPDLVGAIMAGNEPGGLTVSALRKGIPEDWEEQRRLFAIGKPRVRIPHGCDCC

SEQ ID NO: 2793 - protein, 570 aa, unidentified
  source 1..570: note = uncultivated organism
MSKKQIDVYRTGIYLRLSQGDEDIDGLEKKESNSISNQKLLLEGFIDAHDDLKLVDIFIDDGYSGSNFDRPEFQRMMTSMKAGNLDCIIVKDLSRLARERIGADELIQKTFKKYNVRFIAVSEGYDSLTASSSETHTIIPFKNLLNEQYNGDNTSIKVRTSQDILRRNGLFIGAFAPYGYQKAEDNKNHLVPDPYAAGVVQGIFAKKLSGMSASGIARILNKNGVLAPSEYKAKCGEKYSTSFKGAGQSKWSAQTVSRILKNVVYIGTLAQGKRTTVSHKVKKEIEVPACDWGVVENAHEAIISRMDFDAVQVLMSRDTIAVAGKNESYMYAGILYCGDCGSSMVHRKESYKGREYINYICSNYNRNGKDACSRHCIREEDLNQIVLGGLQGYINSMCDCEKVLAHLDELNVNYDEAVAHDKEIVALKQELTKCSAFKASLYQDLRDEIISKEQFTRYREEFSAKERELEQAIREQETIIRDIYENGIGVAKDLERFREGLVIGNLDRVALVSFIDRILIYDDFRVEIVFKYRQEMEKVTGLFDVANEKDAEPVYTMVDGLPVLELKEAV

SEQ ID NO: 2794 - protein, 527 aa, unidentified
  source 1..527: note = uncultivated organism
MRNRKPRQTYSATTPVAAGKRIQCAVYTRKSTEEGLEQNFNSLDAQREAAESFVASQRHEGWNLLQDHFDDGGYTGANMDRPALTKLLAAIEARQVDCVVVYKVDRLSRSLLDFARLMETFDRHGVSFVSVTQQFNTTTSLGRLTLNILLSFAQFERELISERTRDKMSAARRKGKWVGGHPVLGYDIESSGGRRLAVNPVEGPQVRRIFDLYLKHNSLMPVVQELADLGWCTKRWTTDAGHQRGGKPLIKKSVYMLLTNPLYAGFVNHKGKLYPGEHEALVDEATWNLVQSTLHHNGHTNGGGNKNKYGALLRGLLFCVPCGAPMIHTYTPREPKLYRYYVCYNAQQKGWKTCETKSVSAPSIENAVLDSIKALGANPKLRIEVVAAIEAQSRKRRASIEQDRADNYGKLEGLNADLANEAADRESAGRFDRMLALQRQIEATERKLADLAIEYRAIQEYAADGEGLRRTLERFDPVWESLTTREREKLIRCLVSKVGYDGRTGKVTIGFLHAEGKDLCRGNDNNK

SEQ ID NO: 2795 - protein, 567 aa, unidentified
  source 1..567: note = uncultivated organism
MAKPRRPQARQEGQKVRCAIYTRKSTEDGLEQEFNSLDAQREACAAYILSQRHEGWVQLPELYDDGGYSGGTMERPGLKQLLTDVEAGKVDVIVLYKVDRLTRSLADFARIVEVLDGAGASFVSITQSFNTTTSMGRLTLNVLLSFAQFEREVTGERIRDKIAQSKAKGMWMGGVVPLGYDVSERKLVINEVEAATVRMIFERYAALGSTGLLTDELRATGVVTKQRVFSDGRRFGGIPFEHGSLAHLLKNCAYVGEVRHREKVHPGEHPPIIERDLWDKVQALLAGNTRERRTTSRATEQSLLTGMISDGRGRPMTPTHSTRGTRRYRYYVSRHKGGDDAHRVWRLPARAIEQLVLRRMAQAIGKGEALAERLPETSAETLELIRRRGGELGTGLSNSSAFEASEVLRELELRVQLHDDRLELRLNPKVLLDLALGGDRRWVEVELQDATDMVLNVPMKMQRRGQELKLVSRQADPTAPAEVDTKLVELIIKAYRACERLERDGASLPRSEVPNLTRHSRLAYLAPDIIQAIVDGKRVGNVSPRSLLRSANLPVCWQAQRELLGFV

SEQ ID NO: 2796 - protein, 503 aa, unidentified
  source 1..503: note = uncultivated organism
MPQAAVKGADEMTAIYARQSVERPDSISIEQQIVLCRYEARGDAFMEYTDRGYSGKNTNRPQFTQMMNDIREGLINTVIVYKLDRISRSILDFSNMMEVFARYGVQFISATEKFDTSSPMGNAMLNICIVFAQLERETIQKRVADAYLSRSRNGLYMGGPVPYGFRKIPTVIGGIHTSMYEAVPEEAKAVELIYDMYCHPDTSYGDIVECLKELGIRKRGSEWSRPRIREILINPIYVRADREVYDFFVRQGAEVTAPPSDFTGVNGCYSYKSKAEKVSVGERIVLAPHKGIVDSYVWLRCREKCMSQKQMIPSQKAKNSWLCGKIKCGECGYALIAKRFSTRHHRYLLCSNRLNSKACCGAGTLYTDEIEELVQNEIKNKLAQLGKLSAAEYYVPDTEQTEVESELAGIDREINGLIERVGDSDNALFKYINERINALDKRKKEIADRINEIRQKKEMASGEIEDHPDVWDELSFDHKRRVTDILIRVIYVTEKKMTIQWRI

SEQ ID NO: 2797 - protein, 517 aa, unidentified
  source 1..517: note = uncultivated organism
MKPILRCAIYTRVSTEHGLDQEFNSLDNQREAAEAYVKSQSHEGWRCLPGRYDDGGFSGGSMDRPALGRLLDEIRSKRVDVVVVYKVDRLTRSLADFAKLVELFDAHGVSFVSVTQAFNTTTSMGRLTLNVLLSFAQFEREVTSERIRDKIAASKRRGLWVGGMVPLGYASRNKKLVVIDEEAERVRLIFRCYLEAGSLGLLLAELRQHGVVTKVRQLSGGRVIGGIPFTRGPLAYLLRNRFYIGEITFKGAVLPAEHPVILDRELFEAVQGRLAEQRNGEQRGRGRSGALLMGKLFDERGHRMTPSHATKAGVRYRYYVSAALAQGRASEAGAVRRVGAPEIERIVLDAIRSHANRGDLDDRILIETRLDNAELGADVITLRLLPDPSSETASLQIAWRPASTTRHREIVPPPDRHAPVRPMRAETRATLLGTIARARRWLDEIVDGTATPDAIATREDCSPRQVAMTLSVAHLAPDIVEAAIAGRLPHGVGMRELRDVSPLWSRQRISIGLDRIG

SEQ ID NO: 2798 - protein, 552 aa, unidentified
  source 1..552: note = uncultivated organism
MANRTKRCAIYTRKSSEEGLEQSFNSLDAQREACEAYIRSQQHEGWTVLPQHYDDGGYSGGTMDRPALKQLLADIEAGTVDIIVTYKVDRLTRALTDFARIIETLDKHGVSFVSVTQQFSTTNSMGRLTLNVLLSFAQYERELTGERIRDKIAASKRKGMWMGGFVPLGYSANDRTLAVNETEAELVRTIFGLYLELGTVPAVEAELLRRSVVSPTRVTASGKIRGGRPFSRGHLFKLVSNPIYIGQIAHKGVRHRGQHPAIIDQTTWDAVQQRLEANTQGGKRTRSNVKESALLAGLLFDEAGHALRSTHTVKHGRRYRYYTTQPDDGDKAPFRLSASEIEPVVVHQVRAFLEQPARLIDALALTNAAPDALNSVIAAGRSLADTLQASADQRDPLSDLIDRVTVGEDALLIALNREGLAARLGVDVPASPDGAPVLIQAPLRIARRGVETRLIIEGHSAEPARAPDPVLVSAVARGHTWFEDLTSGRANSIKQIADREGMSDRYVKRLLDLAFLPPALVEDILDGRQSPDMTVERLAQGDLRIALGAWSK

SEQ ID NO: 2799 - protein, 521 aa, unidentified
  source 1..521: note = uncultivated organism
MTKNQGPIGVATHRKRQKARLRTGPIVDSDDTDSQYGPNTPVAIYTRVSTEEQADSGLSLSAQKRVSSKFAQDREWDVVHIYEDPGFSGKNDERPGFQEMLSDARQGRYKVLLVHKLDRFSRNIGNTLKNFRELNECDVTLVSVTEDFDYSTPMGRMFFHMMAVFAQWYLENLSAETSKGKKERVKQGLHNGQLPFGYKNVGPKKPGVVVPEEAKAIKKAFELYSTGEYSDRKVGNYLNENGFNTRNRRRWSKDTVREFLQNDYYYGVVRYKDEIWPGKQEPIISEELFKTCLAVRKKRASRKKSYSASSKRIYILQRLVRCDHCERNLRIQATPKYRYYKEASRSRGLTCAHAGTSIRMDVADSQVQDALNAIRLPDDWQKQIDQLASDLTKSNKIEKERKSIQEKLRRLGHVYADRIISEQEYERERDALQAKLENLFVPDKAVVFDYGLRLENLGPYLEAASKAEKFELFHLILDAVYANVQTDQVTRLKPKPEFLHLFRLAAEETGWEEKEPGIFSL

SEQ ID NO: 2800 - protein, 540 aa, unidentified
  source 1..540: note = uncultivated organism
MIVALYARVSTARQAEKDLSIPDQLRQMREWCKTRNHQIALEYVEPGASATDDKRPVFQQMMAEAYQNPPAFDSIIVHSLSRFFRDAIEFGLCERRLKKFGVSVVSITQETSDDPTGQMVRQIFKLFDEYQSKENGKHTLRAMKENARQGYFNGSTPPYGYRVKEVESQSNKGKKKVLDVDTPEAAIVNTIYQLYLNGHNGRSLGVKSIAAYLNDRGITMRGRKWKLTLIAKILSNRAYLGEYVFNKKDSRTLKIKPESEWITIAVPPIIEMNSFDQSKTKRENQRPSKMTAMNNSPTLLTGLLRCGCCGERMTIATGKSGRYRYYKCSSRIRNIGEKSCTSSNVPMEKLDAIIMRTLAERVFTPERVETMLKELQARLKADREDHYEELKKLSRELEEIRKGTDKLYEAVEKGMLPINDSLTERVHKHQARRQEILIEMARLRGQKEMRLSKLGKNHIVAFCKALKERFQDKGSNFGKEYLKLLVDEIRIVKEKVHLTGSYAALAGALCFGSELGSLAGVPSPLLYWLPSADSNHGHAG

SEQ ID NO: 2801 - protein, 557 aa, unidentified
  source 1..557: note = uncultivated organism
MSRKSRYADDGGKQLIKCVPWKAGVYIRLSREDEDKKDGSSQSVVSQRKIIDRFLSYHKDIEVFEYFIDDGYSGTNMNRPSFQRMKDAFERGTINCIIVKDLSRFARNDEEAGRYIYVIFPFYKIRFISVNDRVDSVENPSSIETLEIPFKNIMHSEYSRDLSKKVRSASDIRRRRGEFIGSFCSYGYKKDPNDIHHLIIDEEAAEVVRFIFQRYIETENFLKIAKELSAKNILTPLAYKVVHGQNLKVPKKQHNPTLWRNGTVKRILENKTYLGHIIQGQHRTISYKNKKTIPVDESEWVIVENTHDPIVTQEVFDRVKAMILKNKKVTNKRTSRKHLFAGKLFCGECGASLSLTQNTTSQFNYYYCENAYLKKGFCSPKRTRNDKLEKAVLDTLNGQLKVCSDSLQLLNILNSHRKRLLKENVSITEQRRSVIAKLQNDKTELYGKYKEALLTKEQYISEKARIETSIQELENLIAELNREEDIKDFVYEQPIFTEFIKSGKFVSLTREIIEKFIDKILVYSPTEIEVHFTFSDEFEKINEFIKTNADWFASKAV

SEQ ID NO: 2802 - protein, 567 aa, unidentified
  source 1..567: note = uncultivated organism
MAKPKRPQARQEGQKVRCAIYTRKSTEEGLEQEFNSLDAQREACAAYILSQRHGGWIQLPELYDDGGFSGGTMERPGLKQLLADVEAGKVDVIVLYKVDRLTRSLADFARIVEVLDGAGASFVSITQSFNTTTSMGRLTLNVLLSFAQFEREVTGERIRDKVAQSKAKGMWMGGVVPLGYDVSERKLVINEAEAATVRMIFERYAVLGSTGELTDELRAKGVVTKQRVFSDGRRFGGIPFGRGALAHLLKNCAYVGDVRHRDKVYPGEHPPIIDRELWDTVQALLTGNTRVRRTTSRATEQSLLTGMVTDGLDRPMTPTHSTRGTRRYRYYVSRHDGGDDVHRVWRLPARVIEQLVLRKLAQLIGEGEALAERLPETSAETLELIRQRGAELGTRLSNSSACEASEMLRELELRVQLHDDRVELRLKPAALLERALGADQRWVDVELQDTTDMVFNIPVQMQRRGQELKLVSRQADPTAPREVDTKLVELIIKAHRAREQLERDGENLARSEVPNLTRHSRLAYLAPDIVQAILDGEWSGNLSPRSMLRSANLPVSWQAQREVLGFT

SEQ ID NO: 2803 - protein, 631 aa, unidentified
  source 1..631: note = uncultivated organism
MKQPPTPPQTINAAIYCRVSTYEQGKGDFSSLDSQEKMLRQYCETKSYAIYEVYRDTESGTTLERKFLQNLLVDATARKFNVLVVTKLDRISRNVKDFLDLDETLNKLGIDIIVTTQNIDTTTPQGAMMRTIMVAFAQFERDMIAERTREKLYNQAKSGYWGGGHVLLGYDAIDKKLVVNHEEAELVRKTLEQYLHLPSTKKVAAWLSEQGYRTKIRTTKSGKTTGGKEFNHQLIHDLLRNRIYTGQITFRGEHFKGLHEAIVTEDLFEKVQKRLDQSARDPYATYEDSPLLLLGLTRCGFCDAQLTTYFPGRKKSGPSYYYYQCTTNSKSGPRRCQSRNLPARELERFTEQLALHTAKDQGFFDAVVRQVKGNAQTSLGEKRIERDAVVLNQVSIKKQLDTFISNLTLAHVDVSQSTEVKSKVESLTTRIKELDGNLNELDREIEMLKNQQIDRTQLKQVFDGFEEMYVEATPEIKRRLLNTIIEEIRCSVKHGEKTGEIEFRLRGDGSIMKKWELAKKKEHGEPGKPPERHFDSPCSLAPRQAPYLELYFGQNPYRNLQSGPRREAHVHGFGAASSRAGAHRHRRSAPIRERALPSQAPEGAYESASRLRGPAADLRRNASRRWFRKRF

SEQ ID NO: 2804 - protein, 550 aa, unidentified
  source 1..550: note = uncultivated organism
MGKISTTNTYKNPIGKTAKAEDENRVLCLYRVSTVQQLYRNEKEEADIPMQRVRCRAFAQSMGWSIVYELQEEGVSGHKIRAENRDKIQLIKEYADQRKFDILLVYMFDRIGRIADETPFVVEWLINHGIRVWSAEEGEQRIDNHTDRLLNYIRFWQADGESRKTSLRTANSLHILTEQGLFTGGVCPYGFSFVKLGRMNKRKQEVNDLAVCASEASVIRLMFNLAYYSGYGAQRIANYLYANGYKNRNGDNWHPSTIQGILRNPLYTGILRSGEVYSEPQEHLRIIDDKVFSSVQDMLKKRSRQYESTRTDPLTTKADTLLSGNIFCGHCGARLCVTTSGKGRKRADGTEQKRTRYCCQTKTRKHGSCDGQTGYTAAKVDASIDKILRQIFSRIKGIDQQDIIRQKCANDESTQIEHLKTLKKNLEKACAEQEKLQHEIVRAVMGESAFTPEMLRTAIEAQKNKIDELSQMIDTAKQELSNHEKRIKTLTDSLQSILEWSDLYDMADPGVKKMVAARIVERVEVRRDYELTITLNLGVQQFIDSIEGCN

SEQ ID NO: 2805 - protein, 629 aa, unidentified
  source 1..629: note = uncultivated organism
MAAVRPIVIYSRKSKFTGKGESIENQIEMCRQYIRLQFGDDAAEQALVYEDEGFSGGTLERPQFKKMMADAKEKSFRAIVVYRLDRISRNIGDFAKLIEQLNKMKIDFISIKEQFDTSSPMGRAMMYISSVFSQLERETIAERIRDNMHELSKTGRWLGGNTPTGYESESVSHVTIDGKTKRACKLKILPEEIGIVKLIYDKFLETGSLTKTETYLLQNGYTTKNGKQFTRFAVKGILSNPVYLIADEFAYDYLTKSHVDLFAEQSDFDGVHGIMAYNRTLQQPGRAHQIKPMEEWIVSVGKHQGVIEGKAWVKVQTILERNKSKSYRKPRSNVALLSGLLVCGNCGEYMRPKLSKRRNTKGEFIYTYLCSMKERSRGHVCNMKNCNGNMLDADIIEQLKHLSEDGSDFIRQLEQSKRALLGNRQSYDAEISNLESEIAANEEEIKGLVSALGKSSGTSAESYIMQQIDELHAKGEGLKRHLAELKELTSSHALADIEFDLLAQMLSTFKDTVDKMTVEQKRAAIRTFVKEIIWDGRDAHVVLFGSEYEYEFPKTPAGIGKQVAGSKTEENLEGAAEGGLAEPSGEDSKRDSHALPGPEEAAGGGIPHRDAGIGRGWKFPFPDGCDRCG

SEQ ID NO: 2806 - protein, 522 aa, unidentified
  source 1..522: note = uncultivated organism
MDKNNTAAVEEQKKTVWVAVYTRKSGDENLVGAVTSIENQKEICRNYIGIFKEMGWKEYPVPYDDPAESGKDLERPGMQRLLEVVRAGRVQAVIVYKLDRLTRNSKDFHGLVDLFEKNNVGLVSATENLDTKSPQGRLMTYIMAQFAQYDRELDQERAKDFHLARAKKGLWCGGHPPLGYTSKDKKLIVNEEDAKLVRRIFDLYLEFRSPVRVAEELSRLGFSRPSYTTKKGRHYGGRPFDDYSVTRTLQQKIYVGKIVNNRTGMEFPSQYPSIIAPEIFDQVQKLMEEHERHERTEYCTNKHGFLLKHLPRCGKCGSALVGYVRPKKNKVYRYYRCMANVEGCPVSCDFLSIPAEKLEEMVLGRLDNVSWDRTALKLSVGEAEQHSKKKIAELEAEKKDLDVNLCKTRQELKNFRLNAKDCGHIETVQKELARLETVEKELAVYIPKLEARIANLKTAGYDANSAQKVFQQVNRKLKYLPVPQQIKIIRALVKGVKVWKDRVELDLNELSETDLKQCLVQI

SEQ ID NO: 2807 - protein, 597 aa, unidentified
  source 1..597: note = uncultivated organism
MENEEKQLRVALYLRVSTEDQVEKYGLEAQREAIEGIIKSKGTLKDGKTPAMVLAGKAYEYIDDGISGTKKVNQRPAFARLKEDILNAEDNQKPFDSVAVFKIDRFARKLSILIDIIDFLSAKKIEFISATEAIDTSTPFGRAMLGIMGVIAELELETIKERTTRGRNVAKEKGKHMGGQVKYGYRADEDGFYIPLREEAEIVGKIFSWFTIDKLTVQGIADKLTGLDILSPSASALKYKKVKKLKKKKNKLGFWRAERVRDILSDEIYTGVYYYNKHKGNARRPKNEWIQSPRRHKGIILKHIFEFAQQRLEEISERKTLTRKKEDGHLYLLSGLIKCNECRKLVNETEMRNWTGAKKILSKDPLQYSYYYYCNRKNTKKSTFICPTVPIPAGQLEDYIVSFIKRLLENPRAVYEYQKNQAASQMSIKQLEDDLRRYNELLDDLPNRIQSYKEQHMEKIITIDELKRGIAECQDKEKEYKSRINEIDFRLSEIKLSRGYEESLKLYAEKYGDSLQRALLDRKELYELIHMLINQIVVRSRPVKRGDKIAGRKKEGQLIPERIDIHLNLPQNLLRQFYSLKFGVKSDDLYRVGDSNP

SEQ ID NO: 2808 - protein, 527 aa, unidentified
  source 1..527: note = uncultivated organism
MTVRVLGARRLSRVKDNSTSFERQELAITTVAGEIGGRVVGWADDPDVSAEKVAPADRPGLGPWLLRPNEYDAIAWWRQDRAVRSMQDMAWLAAWARKHKKRLIFAEGPGGGRLELDMASPISELILMIFAFAAQMEVQAIKERTEGSTQYLRSVGRWGGGRVPFGRKPVPHPEENEGYWLGRHDETAEIVEDMIGLALAGQSYHAIAAWLNTTHPGKTPANHRRELKAQKMRALDPDSEPAIVDTKAKWNPGMVSAFLRQQSLRGYKVVGNEVVRDEVGEPILCGDPLISDDDWRRLQALMDAREQTPSANRSNLHPLLGVLHGGTCGGRLYQGWLAPGPNRKVAIRQYRCAAKAHGKACGHPEYVVAEPVDRYVEEEFLKRFGSFEVIEQVEFPGVDHTAEIEELKATVADLSARIATLRGPAADALMGQLQGRSDRLERLQAQPVIPARVEQVSTGKSYAEVWEASNQQERLKMLLAAGVKVYVGQTTRGARDVTKRLSFTVGQHDDPMAAAQEAIDAEESYYQ

SEQ ID NO: 2809 - protein, 569 aa, unidentified
  source 1..569: note = uncultivated organism
MEDTKRAVAYVRVSTDMQVDGYSLDAQKASIERYARAHDIEIVKVYKDEGRSGKSIAGREAFISMLNDIESGAVTVDYIIVYKLSRFGRNSADVLNSLQRIQLHNVNLICADEGLNSAHAYSKLMLTVLSAVAELERDNIVEQTMSGRKQKASEGKWNGGFPPYGYGINEDDILVINDKEAEAIRIIYKKYLEGLGFNAISKYLKRQGIDKIPRKNGTLTQWSAKLIKDIIDNPVYCGKIAYGRRTKKKKKGTDNEYQTVKQVKDAYIIAQGKHEPIISEEDWIKAQQRREETGVASPSSIGRNRVHLLSGILRCPECGGPMYTNKNAWVRKDGTPVERHYYVCSRAYHARGIDCKYKASLREDVIEQDVIKAIKTLSADQGFEDEVKAKIGKTFDTAEIDKELTQYEKALKQATAVKDTLEREIDTLPYDAPHRDRKLQDLNKRLDKAYDDLIEVEQLIDDLKMRRAAIRSNALSVEQIYTLLEHFDLLFDKLTAEEKRQVISALVKEVEVTKEPSGRKKSDIKSRLRSITFNFPIYYDGNVGDKLLWEKDTHVECIVQIKRAESRMK

SEQ ID NO: 2810 - protein, 564 aa, unidentified
  source 1..564: note = uncultivated organism
MSKRAALYARVSSEDQGKGYSLPTQLEACRKHAGDKGHVIIAEQQDDCSGTLLSRPGLDVLRELAHAGSIDVIVVYEIDRLSRRVVHQLLIEEELRKCQVTVEYVQAHYEDTPEGQLQKMIRSTLAEYERAKIHERMERGKKGRVQAGNVSLGDQAPYGYRYVSEPHRGWLEIDEEEAEVVRLIYHLYLDGNGDGRRLGTPAIAQRLSELGIPTRRDTIPGRNGWLHATRKLPGYWSQPSVYRILSNETYCGVWHYNKRRKTSEGAEVRPKEDWIGVDVPPIISRETWLSARERAAENKTHRKHTKKEFLLEGRLRCDRCGMAFWTATASQYQHLQYYQCGGHTKRTSPDWSEHTCKWSYRREELDDLVWSYIAKLLKHPDVLLEGILRISEEQANQVKALQERIATIDDMLAALDQQRAKLLDLYLSSDMFTKDMLSEKQAELTRRRSDFEKERRTAEAQLDAMSMPEEEIEEIRFICRLAAEGLDHFTFARKKATLELFDVRVVLLRGETKKEDRLHISGRIPATDLDVVLPVTNMETQRSIRNPVVFASILSLTAAATRTL

SEQ ID NO: 2811 - protein, 563 aa, unidentified
  source 1..563: note = uncultivated organism
MTNDSRQYAIYSRKSKYTGKGESIGNQIELCKNYLKTKYNASSNDILVYEDEGYTGANTKRPEFQKMLKDIKAKKIKTIICYRLDRISRNVLDFCNLKDQLSDYNVSFISIREDFDTSTPMGSAMLLITSVFAQLERDTIAERIRDNMLELAKTGRWLGGHTPYGFQSDEIEKVSVDGKKRKLFQLKSIEAEEQAYHLICNKFMELKSLTQLETYLIQNDIKTRNNIYFSRIALRSILTNPVYATADEDTLKYFQEKNADIFNEENFNGKHGLMVYNKTIQKTGKSKQMRSIEDWIVAVGKHKGFITGRQWVEIQALLENNSEKRYRKPAINTALLSGILYCGNCGSYMRPKLNYATFEDGTRSFSYMCELKEKSRCQKCNSKNILGIDLDKQVYEIIEEITSPNGELYQKIKRMSNGEFQDEGTDTKQELEALQKTKAQNEKAISSLVKRLAIVSDDLVESITDEIHRIKEANKKIEEQLSALADASDKSEKEINCAKLVLYIFDNYFQSFHKFDLVTKRSLIRLIIQSIEYKDDNIVINLVGADPDKPEIKWVSLPELHRK

SEQ ID NO: 2812 - protein, 524 aa, unidentified
  source 1..524: note = uncultivated organism
MVIAIYARKSVYRDTSDSISNQVDMCRDFIERSYGTGHTILIYDQDEGISGATTKRPCFQKLMNDIKADMIDMVVCYMIDRISRNIKDFCNIYFTFQEHDCRFVSVKENIDDTTPMGRAMLYICQVFANLERDNIRERIIDNMTHIEQLGYWSSGLPPLGYKIEKIVQNGKKHSILAIDEAKSPIYLRMVELFTPVSATLSSVEKAMMAEGYRTDKGSIFDTSRIWKILSNPDYMCADENAYHYFAKMGCKMLHDIDRFDGTYAIMVRGRFRREGSRMLITDKSEWKIYVGFHKPLISSDDWIKIQERFQGNRYYRPSHRAIYGICSGFLFCKCGYTMRSKRQSYGKKNPTYYASYLCTRKDNRGRGYCDSHMVKCELIDEKVIRKLKELSVDQQTLSEYINKDKVVTSIDLKMMQKQNLDLSKQIQALTLSLSEANGSAARKYIIAEIERLDEEKNAITGKVTAYKVEQMRQEQEAVNILHLLDKIHYLLSHLDSLTIVEKNALLKEIVKKITVSDDTIEITF

SEQ ID NO: 2813 - protein, 524 aa, unidentified
  source 1..524: note = uncultivated organism
MSRNEVDHVRSSSKLRCAIYTRKSTEEGLDQEFNSLDAQREAGEAYIASQQSEGWVCLSERYDDGGYTGANMDRPALKRLLGDIEAGHVDCVVVYKVDRLGRSLIDFARMMETFEKYRVSFVSVTQHFNTTHSMGRLTLNILLSFAQFEREIISERTRDKIAAARRKGKWSGGMPVLGYDVDPRSLKLLVNAKEAERVRAIYELYIEKQSLIRTAEDLNERGWTTKRWTTRKGHERGGRPFDKNNLLKLLTNVVYLGKVKYKTEVHEGEHDAIVDEDVRRRANQILRVNGRTGGMHIRNKYGALLKGLLYCAPCKLAMGHSYSVRNGNCCYRYYVCYTAQKRGWHACPSKSLPAEQIERFVVDRIRSMGKDPELLSMALDQARQQEQERVSELESENRILERGLKRLNNEIRQAATDAAGNGRAAARLADLHERLRETERRVTEVRDELARVRRRMVTKDEVDSALDAFQPLWETLSPREQARVLRLLVKRVDYDGQKGTVSLTFHPSGIKALGQNPSATEVKA

SEQ ID NO: 2814 - protein, 670 aa, unidentified
  source 1..670: note = uncultivated organism
MARKKLRCYIYTRVSTELQIDGYSLEAQKERLKREAKHRGMQIVGEYSDEGKSGKNINGRPEFKQMLADIKSSKDDVDYVLVFKLSRFGRNAADTLNSLQYMEDYGVNLLCVEDGIDSAGAAGKLIISVLASVAEIERSNIQEQTMAGRKQKARDGKWNGGFAPYGYKLVDKEGEKAKVLVINEEEAELVRLIYKLYLQGMGLSRVAKWLNDNGYTKKIRQNGSVSLISSAFVKGVLDNPVYGGFIAYGRRKNEKIDGTRDEYHVVKQDKDSYKLYEGQHDAIIDRETWFRVQAKRELNAFKREKVHSKEHEHMVSALLKCPVCGASMYGVVDRKKKKNSDEYYPDIWYYTCKNRKLVSGHLCDYKKHVRQDELNVEVIQLVKYVFGGENDMKDQILQKLDSDDSLRELLAEKERLTKEREKLSSKKSKLMRRIADLDIDDKLYDDLMKTYRESVNEVNEQINIMENQLYQNDLAIENAEGENLSTEVYKRIIDEMLDNIDDMNDADKKTLMNLLIEKIEIYPEKQKDGRWIKSVQFKIPLNIDGKAVDTLFFDDEEDTENSLPTGKHVETVVLLSQQRPDDTIEIDLNLDELDATSAETKATYQEIKDYVLKEFGLKVSSLYISQIKRKCGIEVGENYNLPKSENARVPQCPKEKEDAIKAALKYFAMI

SEQ ID NO: 2815 - protein, 518 aa, unidentified
  source 1..518: note = uncultivated organism
MAGNQQLRAVIGARVSSYRDTSKTSNVTQLESGERHAQAKGWKIVGTFEDLDVSATVNPFDRPDLGPWLTDRKEQWEAMIFSKVDRVFRSMGDCAEFAKWAEQENKILIITDDGIELDFRPEAQADWMPSMMAKIFLTLAAAFGEMELRRIKSRLRDAHRALRRTDRWPGGAPPFGYQIVDHVKEGKALAKHPETSDIVHRSGIRVIKGASLWEAAQALNEEGAITPSQHHARTNPDRPKRKRPIGEKWSQTQLGRILQSPACVGIKMQGTRWGPDYRPVRDENGMPLRIAEPIFTEQEWADLQEAIAKRRKVKERRHGAAPLLGVVFCRGCEQRLYRSKYKTPAGVEHTYYRCVRKGDKPACKHYTFRESYVQPLLDELVADELASIPNVRKILIPGEDHTVELERIKKAMAEIRQDRVDGLYDYPGGDADYQGMMRPLVAQRKALAELPHRADEWVTEPTGESLADVYHRLGAPERRELLMNAGVRLFLAPGEFHFWIPPDLRDLAQEFALNLTTR

SEQ ID NO: 2816 - protein, 537 aa, unidentified
  source 1..537: note = uncultivated organism
MTSLSKPIRCAIYTRVSTDAGLDQEFNSLDAQYDAASAYIRSQAHARWSLVRTRYDDGGFSGGSTDRPALQRLLADVRARKVQIIVVYKVDRLTRSLADFAKLVELFDAHGASFVSVTQQFNTTTSMGRLTLNVLLSFAQFEREVTAERIRDKVAASKRKGLWVGGMVPLGYELKDGKLSIVEDEADRVRLIFERYLRLGSVNRLVLELRERNIRTKIRRLSNGNTRGGVAFTQGPLFYILRNRFYLGEVVYKGEICPGPQPPLIDRALFDAVQRRLTEQRPHDVRTRSRNDAPLRGLLFDSAGDRMVPTHATKHGVRYRYYVSQPYLRGYAKPPPGAIIRVPATDIERAVTNGVEEHRQQILAPKSTADRTSLLADVARIEVRKDALALWLKAAGEEQQGVDADQSAAARAPSLLIPWTKPPSKRFKDILLPATIERHRVWPIKFERRAALLKSIARGRAWLDEIISNSATVEAIAARQKCSVRHVNMTISMAFIAPGLVKAAVEGRLPRGIGVAALRDMPAEWSLQFKRLGLAQN

SEQ ID NO: 2817 - protein, 545 aa, unidentified
  source 1..545: note = uncultivated organism
MPYDTVHVAVYSRKSRFTGKGESIANQVEECKKYCLYMLHEKEENITFTVFEDEGYSGKNLERPAMKKLLSELSQYDFFVCYRLDRVSRSVSDFSNFMKKLEAAGVEFISVSESFDTTKPMGRAMMNITSAFAELERDTITERIVDNMTALAKTGRWLGGTTPLGFRSEKVLFERQGKSRSCFKLVELPEEISIVKTIYNKYLELGSLTKLSGYLMNCGIQSRKGVDFSNYTLKFILMNPVYCTADQEAYEYLKQNNYTVYPDKEIFSGTHGLIGYNKTNEHHRNGSQRLNDKSHWIIAVGEHVPVIPGKQWIQVQEKMKYQSKYSFRHARTNHALLSGLVYCSCGSPMRPKSTGTKNENGERRFSYLCEKKSHSKGGLCSQKNIQGNKLDEKVVSCLLELYRQMENGDDNFREVVKSELDSTSSMDSEELILERAIESNDKKLNRLVQSIENAASDEVESVLFQRIEKISLDMKKQKEKLEELQKKNVTPDRRKICEYLDTLLHFDWKLWSQLSYDTKKNIVTLLIDRIVWDGKTATVFLRGVS

SEQ ID NO: 2818 - protein, 531 aa, unidentified
  source 1..531: note = uncultivated organism
MSRRRVTQTDELAKAPVRRETKRIRCAIYTRKSSEEGLDQEFNSLDAQRESAEAYIASQKAEGWVCLADRYDDGGFSGGSMERPALERLLRDVDAGNIDCVVVYKVDGLSRSLIDFSKIMETFESKGVSFVSVTQQFNTTTSMGRLTLNILLSFAQFEREIIGERIRDKLGALRRKGKWAGGVPVLGYDVDRSNGSPRLVVNAAEAARVRETFALYLEKGSLQKVVSELTRRHWANKRRVTAKGKVVGGRPFDRCSLHVLMTNPLLAGRIVYKGETYQGEHEPVVEPELFDRVQKLMRYNGRTGGLEVRNKYGALLRGLLRCKQCDASMTHTFTGGRGKPFYRYYRCCKAIKTSACPGSSLPAAEIERLVVEEIRALGRDRPLLDRVLAEARQAGDDRTAELRRERGDLKAELARRERELKELVAVGSAERGATERLATVHDRLTHIRQRLPEVEKELAALESEAITREDAKAALAEFDEVWSNLIPREQARLLNLIFERVEYDAATSSVSVTFRPTGIAALCKRRVEEAA

SEQ ID NO: 2819 - protein, 553 aa, unidentified
  source 1..553: note = uncultivated organism
MQVDKDSLPMQRKDLIAYSQLILNTDSYEIFEDAGYSGKNTDRPEYQRMMSQLRTGAFTHLLVWKIDRISRNLLDFATMYNELKDLGVTFVSKSEQFDTSTAMGEAMLKIILVFAELERNMTSERVTATMISRANNGQWNGGRIPFGYDYDPIEHIFSINEPEAEIVHFMHDWYEKERSLVRLARELNDSGSRTRLGYTWTPTSIDIILRSIFYCGDYLYNVHKDASRQKVKDESEWVTITDHHPAIISREQKDRIVAILTENQRLRKERGQFDYRVKHTHIFGGILYCAKCGGMMYSSPVGKRDGWEHSLYHCNNRRKSINLCDQQTISDTKVGEFIFNLILNMLNAQSAFTPETTIEQLQERILCGEPFKGIIGIEQEDLEHLHSLLLSGRLHGSIYGKADDIKSPVKQTAGIGKLKSRRNKVVRALDRLRNLFLYDDNAMSEKDYILQREDLEKELDEIDQQIAVYEHDPGEAADDEIFIQKSSEFIIAKNLQGRNYIYYKRLAQSVEPQVLQSFVRQILTKVTLSDEQFLSVTFKNGIHLRFTHKKEPS

SEQ ID NO: 2820 - protein, 514 aa, unidentified
  source 1..514: note = uncultivated organism
MSALWHELASTSPAKEAGSKRCAIYTRVSTAEQADEGVSLEMQRSRLEAFAVAKDWPVYQCYEDAGLSGATIERPALGRMMDDAEAGHFSVVLVYKTDRLSRRPVDLFTLCDRLETHDVGLISTTEPFDTTTAMGKMVLGMLAVIAGFERNLIIERTVDAEARMKELGTLVCGPAPFGFKHEDKKLLYDPETLPVAKEILRRSGSGEPERKVAHSLGLTRDQVRSVLHNSLFAGKIAYDKRGKNGTRVGYNKWTYVDYAGIEPILEFDDWLRLQQELALRSDRSEGSTLPLFGRMIYCTKCKHLLSAHGSSKRNKTEYACQSAGNGQKACGAQLLEHNLLPVFVSKLSEELCHFVPKFDGADRLVEIDRKIAKYDRDITQLEGRLAIPEVSVEKVRERIAVLRTLKHEALQERAEIGKEKAQLEEVKNVLANFEPFFLSLDRASQLEVVHRFARRIDLGVTNIVIHWRFSENECKVPRLEVSPRARKAGVRGRVVEIGGLEPPTSCMPCRRSPS

SEQ ID NO: 2821 - protein, 541 aa, unidentified
  source 1..541: note = uncultivated organism
MQEIRKRAAIYIRVSSDEAKKEGYSPETQEEKLRGFVMANNYELNEKHVYNVDLGCSGSTDKRPGLQKLLKDANNKEFDIILVYRQDRFFRNLRLLLNTVADLRELGIEFKSLTEPFDTTTPTGRAMFANAGVFAEWMREVGLESRDEGMKKAMADGKWLGGTPPYGYKFNREIQKLEIDEEESKVVKMIFEWVVLEKLSKYKVRQRLNEKKVPTKWDRLGREKKVNGQGWWNARTVERILKYEIYTGEFYYRKYKCPRGMRKEPRPREEWIEIETPAIISRELFEKTQEQLKANQKLSPRRTKRTYAFQHKISCGLDGFSYHSMYRAPQKPQWNGAKVYFCGGKIKHCHENLCSSKHVTESRLLPTVWQNLKDLLVNPEIVMENFQEYLDRDSKSKSIEEELERANKALLDCQRQKKKAFKIHLEGYVDEESYKAEFEELKKKELGYQKEIERLSQLLLSEQEKENRVLSVRELYARLKDSINNATYEIQCWILQKLVEKIIVTGNSLEIEYNLPSRENLQEMGEITPALEFCDDNRRMD

SEQ ID NO: 2822 - protein, 543 aa, unidentified
  source 1..543: note = uncultivated organism
MARVSRRNNNHKAGLVSERQDIFRTAIYVRISKEDGDMDSIDNQTALLKDYVGCQADMALAETFVDNGFTGTNFDRPDFKRMMESVKVGEINCIVVKDLSRLGRNYIEAGNYIEKLFPFLKVRFVAVNDRFDTKNGYDTSALIVPIKNMVNDVYAKDISKKIISTFRAKQKNGEYIGLAAPFGYDKDPENKNHFVIDHNAAETVRLIFHMRKEGKGTGLITKYLNEEDISCPRRYRCEKGLASSGRYKETRWTDSTVKRILTSEVYIGNTIQGKQRQELCNNIPKHRTKESEWIVAENTHEPIIDKELFYEVQEIMRKSYENMKKRIKNVFPEEEREENILIGHVKCGCCGKALVLKQYLCHGHIHREYACRTAQHEGESACKNRLGFDKHELERIVLETINSSVLSIRDILDDRKVRAKERDFTHRLTATELERERLKLREKFGNLYEDYSEGILEQSEYEFLKKDYCDKLSQLEEHIRIEKNMAENDAEWLSEKLDSFRSGKALTRPMVQAFLDNVVVYGRDRVEVELNDTDAVFQALKGE

SEQ ID NO: 2823 - protein, 532 aa, unidentified
  source 1..532: note = uncultivated organism
MARALRIARGMAPVAAVSTPIRCAIYTRKSTDEGLDRDFNSLDNQREAAESYVKSQIHEGWEVLSERYDDGGFSGGNLERPALRRLLADIEAGKIDRLVVYKMDRLSRSLLDFARLADLLEKHEVSIVSVTQHLDTSTSMGRLTMNMLLSFAQFEREMIGDRTRDKMSAARRRGKWTGGMPPLGYDVPPEGRRLIVNREEAEQVRAIFRLYAENPSLLAVSQELNRRGWRRKSWTTKEGRQRQGKAWDAANLRRVLKDPIYIGKAKLGGEVFPGEHDGIVPKAIFQKVQDLIRENRRTGGAAARNKHGALLRGLLRCSACNAAMVHGWTRKGRSLYRYYVCDKAHKRGWETCPTKSVSADRIEEFVVNQIRVIGRDADVRRETFKQALAQLATQSRELAREAKGLTKEAARVRAEVGRLVDAAAKSSGGANQALLDRLAKDQERLNGLERRLSEIREQRAGLEAIRIDEQELGRVLGRFDPIWNVLLTPEKERILRLLIERIDYDGATGTLSFAFRLPGVASLTAKAAETAP

SEQ ID NO: 2824 - protein, 560 aa, unidentified
  source 1..560: note = uncultivated organism
MKENRFYAAMYLRLSRDDTASGGSAKDSRGQASVKTESESIGNQRELIRAYIHEQQDIELYDIYVDDGFSGSNFDRPEFKRMMSDIEAGRVNCVIVKDLSRFGRDYIEAGRYIQKTFPALGVRFIALTDNYDSFSADTGTGSIVLPVKNFINDSYCRDISTKVKSGLEVKRRNGECISAFAVYGYRKDETDKNHLVVDEYAAGIVRHIFEWKIAGMAVSAIAEKLNKLGILSPKEYKKSLGLNYNGGFQGAGKSLWGNASVKRILTNEIYLGHLQQGKSQKVNYKVKKIVEKPREEWVCVENTHEALVTEDDFQIVQNLLKSDSRLGPGMEKSGLFSGLLFCGDCREQMVRRVVRYKGKKKIYYICSTKNRGDGCSRHSIEEEVLKELVENTVKKYANAFFEGKRLFDKAKEQETGSFSEVSAYDRELRRLKEEQDRYYSLCAGLHDDLRKGVVTKEEFGRLHAGFEKKAIELGEAQERQETLIREMFKKGILSAGRLKAFQDCVELKEIDRHTLSSLVKRIYVYEGRRIEIEYYFMDQYEVMLGISMRQPVQHGAERGA

SEQ ID NO: 2825 - protein, 541 aa, unidentified
  source 1..541: note = uncultivated organism
MRTAAFIDFGDTNSKQSVVSLCVERRRSMANVTYIAPVKAESAIHKIRCAAYCRVSSSSEDQLHSYAAQVKYYGEIFNDSNTEELVDIYADEGISGTDSEKRTEFQRLIKDCKRGKIDRVYTKSLSRFARNTKDCLNTVRLLRELGITIFFEKENIDTAKTSDELMITIMGSLAQEESTSISQNMRWSIRKRMENGTYEPSSIPYGYIKKEGKLVVEPSDARVVKMIFEWYLSGMGLSKIANELNSRGVPPIIRGTKWYTYPIKYILKNERYVGDMLLQKYYSTDTLPYKKIANKGEKNKYLITCSHEAIISREDFNRVQRLFEEREKKYYNDDRNISVFSSVIKCANCGASFKRKNDKGKYYWVCRNHDENSEICAMKQIPETSIKQAFVSMCNKLIQHYREILLPLRRSLQELNMRRFSGNIKVLDIHKNIADFKEQRHVLSRLRKKGFIDEKKYAEKLNELESQLARLERELKKITKSNYEDGILEQVDILIDCIESQSSIIPGFNEKMFGMIVENVVISDKTMEFRLISGVALKENI

SEQ ID NO: 2826 - protein, 565 aa, unidentified
  source 1..565: note = uncultivated organism
MISTALPRNEDEAPVVATARAALYLRVSTGRQAESDLSIPDQRRQIEGYCLSRGWEVAAEFVEPGNTATDDRRPAFQAMIDAAMQKPSPFNVILVHSFSRFFRDQFQFEFYVRKLAKNGVRLISITQDLGDDPMSVMMRQIMTLFDEYQSKENGKHTLRAMNENARQGFWNGARAPIGYRTVVAGQRGAKIKKALEIDPIQAETVRRIYRMALNGVGDRGPMGLKSIATWLNENNIRTRNGGRWGLGAVHMVLTRTTYIGQHRFNTRDHKTRTPKPESEHAVMEVPAIVSEAEFEAVQRSLKARSPKMMAPMAVGGPTLLTGICFCACCGGAMTLRTGTSSAGREYRYYTCSTKARKGATGCPGITVPMDRLNEAVVNHLQDRLLDPARLEALMDQILERRDEWVNQRRQHVADLERRATEAEAKLKRLYDAIENGVIDVSDPSLKDRIAELTATRDQAKGDSERAMSHIVKIGPAITPESLRAFAAALRRKLRNGDGTFARDQIRAVAQRVEVVSRKEVRIRGLRSELLRTLTAASGVEAAGLGVRAFEPKWRARQDSNLWPPD

SEQ ID NO: 2827 - protein, 664 aa, unidentified
  source 1..664: note = uncultivated organism
MIREKAYAYLRVSTLQQVDGNSLEGQEAEIRRYCEYQNIDIIGVYTDGGKSGKSIAGRPEFQRMLRDVEEKREVRYIVAWKMSRFGRNACDSLNALKLLQKNNVNLITVEDHIDTSNQMGRLFFTLMSALAEMERENIREQTANGKKYNALAGNWNGGQAPYGYTLENGRLVINEEEADIVRKIYAWFMESEDAGYSTVTAKLNEAGIKPRQKLRLDRKTMERSGTDEKIYLPVMEDWYTTSVKKILDSPVYCGKLRYGYYKIKDTADGKTKREYSDNPTIVDGKHEAIISEELWNKVQEKRAKVKKPKGRTDSTLETVNNVFNRIAKCPQCGGNMVSASSSYKTVGGKQRIYYQYICGYWNNHKKGKCSKNPIKAEFLEGTVVDAILEYVKRPNIVQEIAQYMDREMDTTKLDSEIAEIESKLKDLDKAENKQYEILSNIGIKYNNIRPEKIEENLDKINTQREEMLAQLENKQTQVEAVKLNKMDFEMIKELLVKFNDVYWAASKELRKRLVQSLVKEVKLGYDENGKVIPVSMTLNFTGEQIELMKENKEIFGLKDSSSETVVLLSKGEIDSKKVRVEFSLEDMDMSGFQKGATYEQIKAYVLEHTGVKVSSLYISQVKRKCGLDVGHNYNLSKKENAKVPKCPPEKEKAIMEALKHFQMI

SEQ ID NO: 2828 - protein, 621 aa, unidentified
  source 1..621: note = uncultivated organism
MSKENLGILLRVSSDIQQNEGGGLEVQKKMGLEMSKKLGYKPIIFNEGSQSSFKVEINERVKLVELLDEVQRGTIKNIWVFNTDRLGRNTQSWMSIYKVLIEYGVKVFVGTSPKPFDLDNPLDNLNMNMLSLISQYDNQLRRMRSVMGKRNSLKNGNTFVGGTKPFGYDVKKKSLVPNEGEKKVLNKIFRMYRDGKSTVEIKNYLDSHTEYLPKRSKSGWNLGTIQKMLGSPLYKGSQKWEWKEVIGGKTKVVDTIIIKTPQIVPTKLWEEVQLKLIENQRNRNVEKKNISLLDGLVYCKSCGVRLSVKGGKSRTNHLYTCRSVEYKWKDPIKWGDKHNNCSLKKSLRMKETDELILHHLINIIKESKGIRENYKVKNLNPKFDEVKNLKKELEKRTKYINEKKRVYKGYEKNLIDIEVGILTNQYEKNRGKLMIDKISKMMEDVNGEIQKLERELSVYQNSTDWIDWLNQMFLEVESVKGYSLENQQRFLNQYLEKVNVEYLETVKSHKLEFEFKYPIVDDKLSQFGVDKEGKRTYQVEDGSKTSTFLVPVSNSYKSKVGNEKKEELDRLISKLKVEDSLSLNEISKELNDRGYTTPTNKTWNKSNLSIYIKRMKVDVGK

SEQ ID NO: 2829 - protein, 522 aa, unidentified
  source 1..522: note = uncultivated organism
MRKPRTSARRPRAVIYTRISAADDDSASTASQDAELRALAAEEGWDIVRAFNDEGVSGGVQRAQATEALNMLQDGAADILGVYAYDRWSRQGVEYLAELLKVLRLRREAGNPARFVAIRENIDGDGSEDDFELRLSISADMARRERERAKARMRAAAKYRHENGRHTGGPPPFGYRTQDAPGGGKVLVIDPDEAEIVRGMASRFLDDVGVSTLARELRTDGVPTPKSAARIARTKGLPEDGLDRGVWDATTVRRILTSDRIAGRVTHKGRLVTDADGLPVTFWEPVLSPDVVERIRARLAPASRPIPPRRAERLLSGVAYCATCGGRLWAGTVRNGVPVYRCPGRGCARPAFMRAVPLEDFVTARFLSMVGDWPEVEVVESVDTSVASALADIERAIDQVLADMRERDADRLALAERLDALYARADALRALPPEVTREVRPTGRTLREAWDAAKDDHERRRALTHALDHVAVAPNAAPTGRRVNFDRVAFYWNDGPEVNVDPDEGESRGPSRRRAPEARRAQ

SEQ ID NO: 2830 - protein, 520 aa, unidentified
  source 1..520: note = uncultivated organism
MKKTTAKPTTAPRLRVAIYTRQSVATDLEFGSIQAQREAVEAYIAGQRGNGWVALAERYDDHGFSGGNIERPAYQRLVADVDAGLIDVIAVYKIDRISRSLGDFTAFMAQLERSNIGFVSTTQSFDTRTSMGRLTLNILASFSQFEREVISERTKDKIVATRRKGLWTGGRPVLGYDVVDGALVINPREAEQVRAIFRTYLDLGGLVSTTAELARRGIRNKSWSNQNGVAVVGSEFDKGGLRRLLTNPLYIGRLRAGDEIVDGQHEAIVDNAVFDEVARTLRQHQRPSRVRPTKWNALLGGILRCGRCGAALAHTTKLKNGRTHRYYACTTLQRRGADACPGSRAPAHEIEDVVLRRIHAVGTDSSVLMATLSGAQRARQERLPELQGELRRVAEDRALATAQRSTLLDAIQTGSAPAETVGGRIAELDIRIATLAARAQTVQDEVTGIENTRIDETLVREALSHFDAVWEALDGDERQRVMRLLVREVAFDAVAGEVRIVFHENGITALAREATERRSA

SEQ ID NO: 2831 - protein, 562 aa, unidentified
  source 1..562: note = uncultivated organism
MNLNGNGPIRVATYARVSTQEQAMEGTSLDFQESQLTGYCQLQGWSVINSYSDPGYSGKDGNRPGLERLLADAKIGLFDKVLAYKLDRLARNLRLLLEVEQKLKACGVTITSVKESVDTSTGTGKMVFQMFGMIAEWEREAIIERTKSGRLQRYKDGCWAGGSVIYGYAYNKGTKKLAIDEAEARIVRRIYSEYREGKTLNGISEGLNKDKVPGRTKASQGWRQTVVRDILLNPMYKGTQIVNRHARISNINKIDLSKAIQIKVPAIVDEQVWQIAQERLKNNKHVKPMKQGDFLLQGMITCGACGYAFRAERVHSARYYCCRGKMKDHHLDGSPRCKSHYLNAEWLEKQVWQRIEDIINDPDRLFAVLKDTIESLRLKEADLNARIRPIDDRLREIAEQKAKLADDWVVRHMNNEKFKELKDNLDREESRIRALKAEIAPSQIADLESTRGVLRFWENQIKSMAWNTENEDGSMVRLVDRPHQVALKVVGFEDKKLSETLGFPASKRELLDKLQVKLVVFSDRIEVNGLFPIQPINIQSLVSTKGDTRGIKNIWQKKSPYP

SEQ ID NO: 2832 - protein, 518 aa, unidentified
  source 1..518: note = uncultivated organism
MLVSNTKVYNCALYCRLSRDDELQGESNSITNQKEILKQYAKENNLNIYDIYVDDGISGTTFDRPDFNRMIKDIEDKKVNMVIVKDTSRLGRDYISFGEYIEKYFPEHQVRFVSIIDNYDSEIDNGIADTLPFRAVLNDLYARDTSKKVKATKHRNAINGLFNGKFAPYGYMKSPENCHKLIINEEYAPNVRRIFDLYLEGKSSIQIAYIFNEEHIPTPSQTMGQEYRLSSLWKTDTIRRILKNEMYIGNMVQGKQTQINYKLKKPIRNKKEDWIIVPNTHEPIVDKEKFYAVQELLKSRTRTRTKTLNLKLKGLLYCKECGKKLGAGTSHYKNGKWNQIYLHCRTYQSLPNLKLCTPHCMNYTKLENAVISELQNICRKYLDEKKCKQIIDDNNNNVKNEIQLNKEKSNLAKAIEVLDFQIEKLYEDKLKCLINDNDFSRMYEKKVNERDSKNKKLEELSTVKFERNVIDYEKIIQDFLKKENVTAYMLNSLIEKIEINQDKQVTIYYKFADLNTLS

SEQ ID NO: 2833 - protein, 596 aa, unidentified
  source 1..596: note = uncultivated organism
MLERTKSKTFHCAIYTRKSSEEGLEQDFNSLQAQREACEAYIASQKHEGWKAVSTPYNDGAYSGGTMDRPALRQLLADITAGKVDIVVVYKVDRLTRSLMDFAKIVEIFDRQNVSFVSVTQQFNTTTSMGRLTLNVLLSFAQFEREVTGERIRDKIAASKKKGLWMGGFVPLGYRPDERTLVIHKKEAEVVRTIFTLYCEIGSVAKVEAELVSRGIQRPKSRAVTSGRAYGGRPFTRGEIYKLLSNPIYVGEIGHKGQRYDGQHPAVIDRNTWAMARTRLTTNAHARHIQLGARDPSLLAGLLYDEKGTRLTPTHTNNHGKRYRYYAQQSSQGRKRGRPREGEHRWRIPATEIENAVIDRLIKQLADHQWLLKYCCTVDTIAARRSVLAKAKELAGRIRSESRGALREILLTLLSRVTLGEAEMQIDVRRTGLTAAFGTVENIRSADEKPDLQSGAHIRTAEADGSRLKDALAISIPMKLGRRGVEMKLILDPLGHTSETPKPDKVLIKMIANAHQWWEDLITRRFPTMRALAQAYDKDERYVARVLQLAFLAPTMVETIVVGTQPVEMMAQRLITQPDLPPSWTDQSNFSGSLGS

SEQ ID NO: 2834 - protein, 516 aa, unidentified
  source 1..516: note = uncultivated organism
MKVAIYCRLSDEDRDKISVTDDSASIQNQKSMLITYAINRGWEIYSIYSDDDYSGADRNRPEFNRLLQDAQARKFNIVLCKSQSRFTRELELVEKYIHTLFPMLGIRFVSLVDSADTDDRGNKKSRQINALVNEWFLEELSDNIREVLTSRRQQGYHIGAFAPYGYMKDPNERGHLIIDPEAASVVREIFTLFLDGKGKQLIARTLNERGIPNPTEYKRRHGQVRNKNKSESGLWSYFSISNILTNEVYIGNMVQGKTGVVSYKNQDKVVYPEEQWIVVKGTHEPIIDHQTWDKVQALIEKKATGSAPRTEGIFARKLRCLNCGYRLHSVKSGDRRGFKCDRHSLSHDSCIGAYISLNKLQRIVLAHIKHLSGELLDEDDLEQGIEPFPDLSQMKAEMEQEKIALKQKIDAKPSMMKELYIQKLRGTITESEYVEQMQRLNSDHNEAEARITEITTNILEINRTLNLTSDKKAIIAQYTGSTSLTKEMVDTLIDFIEVGKKDPVSKMTPVIIHWNF

SEQ ID NO: 2835 - protein, 514 aa, unidentified
  source 1..514: note = uncultivated organism
MNELRNTQIKELIPAAIYLRYSSRQQKSVSLDIQEENIRAWANVNGYKVVATYQDAEKSGTNTEKRDGFQRMMQDSSGGIFKAIIVAAIDRFSRSVADTEAALKVLKDNGVELLSVSEDIASSKIARLVHEGEAEQFIDKLSQRVFDGHMKKAEKMKHNGGTPPLGYDIDHNTDKMTVNENEAEAVRLIFDLYLQDKGYSEIAERLNEKGFKTKAGKPFAKNSFFDILRNKKYAGYYIYNKTAKASSKGVRNKHKYKNEKDVVCIKDESLEIISEETFNKAQEKMDSRQRAAGSYKATHNYLLSGLIKCGECGRSMHGSSRKSGNGYYTYSYRCAHNKLTCKNREIGQEQIETYVLNIISRIIFTDENIPVMIDDVKSAFASEKHAETDEIKRIDNVIRGHKKSLDNLINAIMKGFAEDVLKAKMDQLTNDIKILEDAKSRIDPVKTIPEITEQMINEIVLGFPEKVRASGSVNGRNLVYSLIDSVVVFKDRVEIKLKLPEDSQELTFSHTEGS

SEQ ID NO: 2836 - protein, 502 aa, unidentified
  source 1..502: note = uncultivated organism
MNKVIAIYARKSVERVDSLSIESQIETCKYEARGNNFKVYSDNGYSGKNTERPAFNDMIKDIKSGKISTVIVYKLDRISRSILDFSTMMELFQEHDVSFISATEKFDTSSPVGRAMLNICIVFAQLERETIQQRVADAYSARCKKGLYMGGKIPYGFSKVPIVLQGIHTSKYVRVDSEAEDIQKIYEMYSSPTVTLGDVLRELNKDSPYNKRGKPWSTARISELIRNPVYCKADYSIYEFYKSHGANIYNEPDDFQGINGLYMFKGDNPNRKTWDLKDREIVIAPHEGLVDSDLWLKCRKKILGNHQVRTSKPKNSWLCGVVKCGNCGKAAIIKKSNTKAGRYFCCSYASSSKICSGIGRTIYADIFEQDILKEIENKINSLSITSPVGSQNEKDKKIERLKMEISKLDDKISSFIEKVEEADTVLMKHINNRVSELEKEKQQLTQELDEIERSEPDLTVDEITDSMSVWDIMSFDDKRAIVKILIKRILVSSTGYSIEWNI

SEQ ID NO: 2837 - protein, 534 aa, unidentified
  source 1..534: note = uncultivated organism
MFQTLSFPFFSLPSQDEITTKKGDKNNNMKTAAIYARYSSNSQTEQSIEGQLDVCNKYAKDNDLQVVAIYIDRAMTGTNDNRPDFQRMLKDSEKSSWDAVLVYALDRFGRNSVEVAVNKQKLKKTGKILISATQRTSDNLDGTKNLDGIILENVYIGIAEYYSAELSQKVLRGLNENRKKGLFCGGSIPYGYTVIDKKLTIVEDKAKIVRFIFEQYAMGLIVPEIITKLNNLGLMHDGKPFTQNCIYGILKNKRYSGICEIHGVVYDNIYPRIISKEIIDNVQIRLARNKAGRGNKTAPYLLRFKLFCGNCGCPMAGESGTNAKGNREFYYKCYGKKKLHNGCQKQQIRKDRLEEIVLNSIIDAIKDSKTLNTMVDRLFELQSKQIESSPVLTSLLAEKSKTDKALDNLVTAVENGLMSNTTNKRLRELEQLQQELEEKIATEKSKQQITFSKEELKAFYIDNLKNDPQILIDNIVHKVILYDESVTIFFNSPISTGLDESQGFLFYEKKHHIDSKKYRYAKTERIPIIVRAMI

SEQ ID NO: 2838 - protein, 538 aa, unidentified
  source 1..538: note = uncultivated organism
MHVAIYARVSTNRQAENDLSIPDQLRQMNEWAKDNGHIVVHQYIEPGATATDDKRPVFQRMIADALIKPSTFELIIVHSLSRFFREAIDFGIYERKLLKNKVKVISITQPTSDDALGVMFRRMINNYDEYFSKENSKHVTRGMIENARQGYFNGSKSPFGYMSVETEVTSKHGRAKKKLAINEAEAGIVRLVYDLYLHGLDGRVMGCKEIAKHLTGKGLLMRGSAWNTLKIHKMLSDSLYMGEHFTNIRDSKAKANRPPTEWIKTTVPAIIDASTFESVRIKRESRAPTKTPPRRVSSPTLLTGLLKCGVCGHGMTLVTGKSGRYRYYKCTSRHNQGNHACNSGNLPMETLDSLVLNQLAEKVFAKDRLQILMSELRKRMKSSKDDQQERINEINRQIKKIEERQARLLDAIETGTIELDEITQRRAQQLKAGREALFIELASVRRDASLPAVEHLKASQVDVFGKVLREKLLANGSPLAKSYLNILVDEILVKDKTATIKGSYAALAETMQQIKMGDLSKQVPSFIPDWCARRDSNS

SEQ ID NO: 2839 - protein, 526 aa, unidentified
  source 1..526: note = uncultivated organism
MKATKPAAPQQVRCAVYTRKSTEEGLEQEFNSLDAQREAGELFVRSQAGEGWTLVPDRYDDGGFTGGNMERPALRRLMLDIEAGRVDCVAVYKVDRLSRSLLDFSRMMQTFERHKVAFASVTQQFNTATSMGRLVLNVLLSFAQFEREIISERTRDKIAATRRKGKWAGGHPILGYDIDPAFKLAVNPGEAERVRALFELYLRHGSLLPVVRELAERGWCNKRWTTRDGKTRGGKEFTRTSLHKLLTNVAYAGKVRYKDEVHPGEHPAIVDAELWGRVQAQLDRNGRAGGAPVRNRFGALLKGLLRCVPCGAAMTPSHSTRERGGTQRYRYYVCSSAQKRGWHTCPSKSIPAGQIEELIVKQIERVGKDPRVLAGVLAEARRQDGERAGELRAEQRELEKELRDRHAEVKRLSGQIPKEKDAGALIARLAEVQERIASQEQRLKGVRQAIAGLGRRTLDEKEAAKALSVFDPVWGALAPRERVRAVQLLVERVDYDGAAGKVAVTFRPAGIKALAAELGEREEASK

SEQ ID NO: 2840 - protein, 524 aa, unidentified
  source 1..524: note = uncultivated organism
MATGRRAAIYARVSSEQQEQDGTSLDTQLAACREYAAKQGYEVVAEYREVFTGVNLWDRRELTALRESMRRGEVDVVIAYAIDRLSRDPVHLGVILSEADHYGAAVEFVTEPLDNSPEGQLIRFVRGYAAKVEHEKFRERSMRGRRARAEAGKLIHGPRPLYGYAWADAERTRYVINPETAPVVQRIFREAAEGRSLRSIARGLTDDGIPTPTGKREWTMTTVQKILKNPYYTGDARAWTWKSRGGYVRAYDAGVPLPEGTVPPLVDRATFEAIQVQLERNRARAARNNRNPEAALLRGGYVRCGYCGRTMHVHKNSGKPAYRCGGAQFRPGSCPMPVIAVHVLDEAVWERVEAILTRPEIVADELARLQADDPTAADLAAVDRLLQQVDRQRANLTQAIGLTDDPDAVAALMAELERVAARRRQLEAEREGILHRREAWEAARANLADLMSWCERVAERLGELTYEQRRLALDALGISVQVFQAKDPDNPRYIITAKLPLDDIVSPSTVRYWPRSRWRRPRRR

SEQ ID NO: 2841 - protein, 544 aa, unidentified
  source 1..544: note = uncultivated organism
MNEKRNGENAVAAPAPDVRCVIYTRKSTTEGLDSNFSSLDAQREACEAFIKSQSGTGWSTLPVQYDDGGFTGGNMDRPAFQQMITDIKDGKIDCVVVYKVDRLSRSLLDFAKMMEIFDRYNVSFVSITQQFNTSTSMGRLILNVLLSFAQFEREIISERTRDKIAAARKKGKWVGGYPVLGYDLDPLNRRLVVKGEEKKRVCSIFNIFMETRSFIETLEKLNGMGLMTKTWTTRKGKLIECRTFNRARLICLLSNPLYIGKVPYKGEMYDGEHEAIIEAETWSRARNILSNGCAVGRSAAKTKQNGLLTGILRCASCDAPMTRTYAMKKGKKYSYYVCSNAHRNGWKSCPVKSVNADDVENFVAERLREIGGSEEMMDEIASRAADEHKSKKESLENEKCKLEKQIVKLNIEIARLARKGAEGKSNGNGENSERLAEIRQLLVTETARVAGINGELLRLEGSVASEKEVERAFSLFTTIWDVLHPKEQSRIAHLALDRVDYGGQDGSISMSFNPSGIRALAAEMDMKKGRRAVNNHARERKICC

SEQ ID NO: 2842 - protein, 564 aa, unidentified
  source 1..564: note = uncultivated organism
MEKIQEVKQKAVYTRKSKFTGKGESIENQIDMCKKALIGKFGKEIENNIVVYQDEGFTGYNTNRPEFQQMMDDIRNKKIDCVIVYRLDRISRNVSDFCNLKDEFVKYDVSFISVTENFDTTSPMGLAMLMISSVFAQLERDTIAERIRDNMYELAKTGRWLGGTTPLGYKSKKIENIDIDGKKRSLYKLDIISDESEKIKLIWNKMNELKGLGKLESYLLQQGIKTRNNNNFTRFSLITILKNPVYVIADKNIKAFFESLGSTIYASELDFDGKHGLIAYNKRLEVAGKTKTIKDVSEWIISVGKHDGIVSSEKFIETWQLLDSNKNKRFRKPPENTSILSGIIRCKHCGSFMRPRLRNSYASNGERNFTYLCELKDKSRKQLCTCKNINGIETDKLVIEKIKELTLPTSQFMTRLKEIASGREKETTKRQNELQNLNATYTRNKMKIESLIDRLAIVDTEIINDVAIQIKELKAKNNDIEKRLNILKQEVESETDQRKIAELALDMINKYMESFDTLDLIQKRTLIKLLVSSIESDGENVYINYIGSSLGTKCPRGDGSRSYT

SEQ ID NO: 2843 - protein, 502 aa, unidentified
  source 1..502: note = uncultivated organism
MKNGKETPPNTLTPKVRCAIYTRKSTEEGLDQEFNSLDAQREACESYIASQRSEGWVVLPDHYDDGGFSGGTLERPALRRLLQDIEDRCVDCVIVYKLDRLSRSLLDFTKIIEIFERQGVTFVSVTQQFNTTTSMGRLTLNILLSFAQFEREIIGERIRDKVAASKRKGKYMGGMPVLGYDVDRLAKKLVVNPIEAKLVRHIFKRFTQIGSATLLAKELNQQGHRTKEWVTKKGTTHAGVAWNKMHLYRMFNNRLYIGEIVHHDQHYPGEHDAIVPSALFDQVQSILEQNCRVRGNKTRAKTPALLKGILKCGHCGGSMGPTFAKKNGKTYRYYLCVAASKNGYDSCPVRTVAAGEIESAVMEQLRAVFRSPEMIAETYRAARFQEREQVSALESERMELEVKLAGNLVQTEKQEFQSRVHEINRMIRGLDKHALDELQVAEALNQLDPIWDELFPAEQARIVQLLIERVVVNPDGITVRFRLDGLSTIAAEFEADEEAANE

SEQ ID NO: 2844 - protein, 551 aa, unidentified
  source 1..551: note = uncultivated organism
MKQSKYKAAVYARLSKEDGDLDGVKAESNSISNQKSLIMNFLKGKKDIEVVSVHEDDGYSGSSFDRPAFQDMMDEVKEGKVNCIVVKDLSRFGREYIDSGRYIERLFPALGVRFIAINDGYDSADASDQSSEIVIPFKNLMNDAYCRDISIKIRSHLEVKRQNGEFVGSSCPYGYPKDKDNHSRIMPDEFAAHVVRDIYSWIKSGMSLDSISRKLNEQGVPSPMEYKNNKGQRYRTSFKTHGQTKWYPVAVRRIATNPVYMGVLIQGRYTTPNHKVKQVVMKDSDQWAVVENNHPPIVTDRDFMVVQKVLGMDTRTEPNHGEVYMLSGFAVCADCGSTMTRRIVKAKGKRYSYYVCSSNKKDKSCCSPHRIREEILEERVTLGLRDMINTLLKADDVVKAAGEQRNHRYDMEVCMERIKENEEEINRYNKLLVEVFEDYREGIVDRNDFRIIKESFEEKKKLAEKAILTLQDEMQNFSERIDRDDSWIEVFRDNKNIDSLTRTILAELVNKVIVHESGDIEIVLDCKDQYEEIIGRAENIVSAGTEKRRAV

SEQ ID NO: 2845 - protein, 527 aa, unidentified
  source 1..527: note = uncultivated organism
MAVEITVNFGEAAQRIICVADTEELLHMHSCREGSRIMKKAALYIRVSTDEQAKEGYSIPAQRERLTAYVTSQGWEIADYYIDEGVSAKNTNRPELQRMLNDIHCGLIDVVLVYRLDRLTRSVLDLYNLLQEFDRHNVTFKSATEVYDTTTAIGRLFITLVAALAQWERENLGERTKFGKVEKARQGKRPGGKAPFGYDKVNGELVVNEKEAETVRMIFRLYAKHANLNKVTEELYRQGCRTKNNAIFSVNTVQKILKNPIYIGTLRYNYTTQTGTITTVKPEEDWIIVEDALPPIIDKEEFYFVQKILDAQAMKKPRSVASGYLFSGLVTCPNCGSTLNGTTYHSKGKKTPGQPIRYYRCSFTKPGACHHFQIREDKLERLFLAELRNRTDQIRREVTGDKNACLKAANLDDYKRELESLKQKRKRLQQLFITDLIEMDELREQLEAFNTRQAELEQLIQTESEQLENRFSNEQLLSLYENLQQSWEELSLEEKKQFVSILVKSITAQRHPKEPRGYVLESLVFHG

SEQ ID NO: 2846 - protein, 504 aa, unidentified
  source 1..504: note = uncultivated organism
MPTCAIYARVSDELQMKGESVVHQVSFMREFARRRGEETHDPWLTPDHFIYQDQAISGTSIIKRTAVQQLVNDAKARRFDVVLFKGISRFARDTVDALVMLRVLQACGLRVISFEENFDSARDSAELIFTMHSAVAQYESEKIGIRVRIGNFEKAREGKWSGQAPDGYVLNRETRKLEIDPVRSPVIEKIFRYYERGDGCFKVAERLNEEGIMTPGGRLWSLTKIHRIIRNPAYCGDVVYGQREQGYAPPSDEDPLARRKQTRRQSDPEAIAVCRDAHAAIVERERWTKLQETMERRRGMPGRVGHAHLLTGLLKCKCGSAMGIKTNHVGVRYYRCLAKYTKGKHLCDQKYIRADILERHVVERLKSDIRAHLDLDKLVRTANSRPRKKDPSAAQLERVTKELEREIQKSMSLFDRHMDGQLSAEQFDAMNTLVRGRIGTLTRTKEDLLRRSAMHQQSQDVDAQLAEALQIFLTAPLTREALRRLVQEIRIKADNELVLAYTWG

SEQ ID NO: 2847 - protein, 530 aa, unidentified
  source 1..530: note = uncultivated organism
MKFAIYSRKSVCTEEGESIENQIKMCKKYIQSRIKTDVLEEEIQIYQDEGFSGQNINRPQFKLMIGDINRGKFDYLVCYKLDRISRSVSDFSSFIKSLESKRIEFVSIKEQFDTSTPIGRAMMYICAVFAQMERESIAERIRDNLLLLARTGRCLGGSYPTGFSAVREESFIVDGKAKKASYLMPNKDIDTVRLIFSKFLEIGNIMSVSRYLFENNIRTVNNKHFIPVSIRHILTNPVYCTADKDSLDYFRRNGSHVYFDEKDFPKKLGLMSFNKHFNNSQNAPVSDWIISVGKHEGIINGKDWVNVQSILSNNKSHSRTRKSFALLSNLIICPLCGSKMITKTGHIPEVYYYICRFKRHFGSNSCNSKNLNGKQTDNLIINYLMNYDENQLKNDLNIETQTTKVSKLLDNIDDINSKIYSLNYDKEKYLDYLKTITSASPLFKDIEIKFAKINDQIKNLELQKRKQQLELSIAQTQKADVQQILKNLRYFKSNFFDLDLLAKKSLLRLIVEQITWSDEKLTIKFKGEST

SEQ ID NO: 2848 - protein, 526 aa, unidentified
  source 1..526: note = uncultivated organism
MADRSTQVRTFRCAIYTRKSSEEGLEQDFNSLHAQRESCDAYIKSQKHEGWTALPRHYDDGGYSGGSIERPALLALLSDIESRKIDVVIVYKVDRLTRSLADFAKIVEVFDAAGVSFVSVTQQFNTTTSMGRLTLNVLLSFAQFEREVTGERIRDKIAASKQKGMWMGGWVPIGYDRKDRTLTINQPEATTVRTIFDLYLKLGSVNLVKAELDRLKLTTKRYVAETGRQMGGLTFARGHLYKMLSNPLYIGEIEHKGMRHPGLHPPLIDRGKWEEVQALLQRKRQSSQTRQYAKSASLLAGLIFDENGRRMISTHAQKNGKRYRYYITTDGNGRTETDQKKVRLPAATIDKLILTKLSQYFLDANHLARLLRRCRLGPDAIKRGIESSAKLASALTEDENASLDIVRYLVIRIDARSDRADISVDLNKLIRRIVGEMKIGGTKAIANETISVSISDIVISGAAEKLIVHTSLSEPKNERGLKAYARGYSWFEELVSGQVSSIVEIARREKLTERYVSRLINVAISF

SEQ ID NO: 2849 - protein, 565 aa, unidentified
  source 1..565: note = uncultivated organism
MTIAARSRIRCAIYTRKSSEEGLEQTFNSLHAQREACEAYIASQRHEGWHAVATKYDDGAFSGGNMERPALQRLLADIAAKKLDTVVVYKVDRLTRSLADFAKIVEAFDSQGVSFVSVTQQFNTTTSMGRLTLNVLLSFAQFEREVTGERIRDKIAASKKKGMWMGGNVPIGYDLKDHKLIIDPVGAEVVRKVYDAYLRLGCVRKLKEYVDRVGIHSPVKTSIKGRKTGGAVLSRGTLYHILSSRTRIGEIAHRGEIHAAAHEPIIDREIWKKVEAKRDENRITRHTRYNRPNGCVLMGLLFDVQGNRYLSTSSSKRGRRYRYYVVTTHRDQQPFQFPRLPAHEIEQLVFARIRAFLDSPEELLNACQRTDKADLRLVTAAAQRKLLWLKSKTQRESGEFLRSIVKRIVIKPDEITIEIDVLAFLNTLSAQKSSPVSPEAIPENGAVMQLTSPIKMKRRGPELRLIIPGNQQPETSPVPALVKAVARAHEWAERIYSGEISRIEDLAAETGFTNRYISRTIRSAALAPDLVSRILKGQQPPDLTVRKLLVGFPSDWESQKSSLDA

SEQ ID NO: 2850 - protein, 549 aa, unidentified
  source 1..549: note = uncultivated organism
MKIAIYSRKSKFTGKGESIGNQIQLCREYIASHFPEARDEEIFVYEDEGFSAKNLDRPQFRAMMKSARKSPFDCIVVYRLDRISRNVGDFASLIEELNGMHTSFICIKEQFDTSTSMGRAMMNIAAVFAQLERETIAERIRDNLILLARTGRWLGGVTPLGYVGEKTEIIDSEGKKRSAFKLKQVPAEVKTVKLIYEKFLEFQSMTKVAVWLIQHDVKTRSGCEFRLRAVKDILKNPVYCIADEAVINYFTELGSSVCFELSETDGKRGIMPFRRSAQSGKQQHRTSPDEWIIALGKHTGIITSEIWLKVQSLIGENAYKAFYHPTRNEVSVFSGLVRCANCGSIMRPRINSNKRRNSDGSQTFCYMCEFKERSRKSKCTMKNVNGNVFDKLICDEILNFNQPNSTVGKQLDMLMKQSGNTAESNTENLAKLQEQIETKRKMISNLMEVLAKSENSAAMLDYTTKEVERLDSEIKDLQSEIDELNIIGDENTERQKQIGNILKSLELFKECFDTLTVIEKRDYMHQIISRIEWDGENAHIFIRCADGDT

SEQ ID NO: 2851 - protein, 509 aa, unidentified
  source 1..509: note = uncultivated organism
MKIRKIDAQPQERKKLRVAAYCRVSTDYDDQKESLDTQKKHYESWIKIHSNWEFAGVFYDFGISGTKADARDGLQALLYECRIGRIDYILTKSISRFSRNTTDCLSLVRELLDLNISIYFEKENIDTGSMESELVLSILSSMAQDESKSISENNKWAVKKRFEKGTYKFSCLPYGYMHDNEGNMIINPHEADTVRFIFQSVLNGIGTEKIANILETRKVPTRKGGKWTSSSIRTILSNEKYYGAATFQKTYTDDNYHRSRNCGEVDSFFDPEHHEPIISKSTFDRAREIIKQRASEKNLIQGNGKYQQRYAFSGKIFCGECGDKFKRKIHDSGKEIAWSCSTHIRNIEKCSMKYVRDDRLKAAFVNMMNKLIYSRKRLLLPLHESINTQKSDKNVNRIHFLQAELQKISDKKETLRKLRATDIIDSIVFNQEMNRLENLSEEYRNEMGGLYNENSDYTELKNLIQFTDREMLTKFNDEIFERFVSKIVIINRNMAEFHLKCGLKLKENL

SEQ ID NO: 2852 - protein, 544 aa, unidentified
  source 1..544: note = uncultivated organism
MKIAIYSRKSRFTGKGESIENQISLCREYISRTIPDASDSDITVYEDEGFSAKTLDRPQFRRMMESAAKQPFDYVVVYRLDRISRNVGDFAKLIEKLNSMHTAFICIKEQFDTSTPMGRAMMNIAAVFAQLERETIAERIKDNIVFLARTGRWLGGVTPLGYSAEKTEIRDEEGKNRSAFKLKQNPDEVKKIKTIFRKYLEFQSITRVRSWLIQHDYKTREGCDFGTYAIRMILRNPVYCPADKAAFEYFKNLGSTVCFDEDEIDENAGIMPFFRTVQDGKDNLRTPPESWFIAKGKHKPVVTSEQWLKAQELLQENASKTFYRPGRNTVSLLTGLVRCTECGSIMRPRVNSSSRTLPDGTRTFMYMCTLKESSKKSKCTMKNINGNELDKLVCDEVLKINEPTGILNSQLDEMTKSQEKNSSENNEKLAELQRLIKEHKEQIANLVKVLSMSQDSAAMLQYTTKEIERLDKEITMYEKEMQEIADVGEQNLKRNQLIDEIIKSILDFRDNYKNMSFAEKQDFMHRIINRVEWDGDNAHIFLNR

SEQ ID NO: 2853 - protein, 561 aa, unidentified
  source 1..561: note = uncultivated organism
MAYHVRWHHPLPYFRRMFSHRRTYCVWRRDVREHQTSAPYIPEREGTPSAAAGASQGLHRQDQRRKKQHPHRVTPMVDAVYARQSVEKKNSISIEGQIELCQRSAGQELQVYQDRGYSGKNTERPAFRQLMKDIQSGKIGKLYVYRLDRFSRSVADFGNLWETLQENNVEFVSVSENFDTTTPMGRAMLHIIMVFAQLERETTAERVKDNYYRRAALGSWPGGPAPYGFSNSRTVGADGRQVPCLAANEHAETVRRIFELYAEEDASLGSVAKVLNQEGTPAPKRETWDNVALSRILHCPTYVCADEQIYLHYKSLGANVTSPIEDFDGVHGVLLVGKRDRAKKRYSDVKGHSVSILNSEGFIPSALWLACQNKLLLNQQLKNSGKGTATWLTGLLKCGKCGYSVKILKDGSIRRLICSGRYNLSHCDATLRVKLEELESAVAQDIEKLLKECPQDDTPVTQEKDEYKAELEELDRRAERLLDAFAQSSDLTTGYLQKALNKLEQERQALLDAQKRRQSRPQIPDKLIFLALSFEEKKIVASQFIRRINLYENDVEICWNV

SEQ ID NO: 2854 - protein, 513 aa, unidentified
  source 1..513: note = uncultivated organism
MSRRKAKTPEKVVRCAIYTRKSVARGLEQEFNSLDAQRDACAQYIHSQRAAGWRALPESYDDGGFTGANLERPGFQRLLEDVDAGKIDVVVVYKVDRLSRSLLDFARVMERLDKAGASFVAVTQNFSTADAIGRLTLNLLMSFAEFEREMIAERTRDKIAAARRRGQWTGGVVPLGFDKVDKKLVVVEAEAHLVRQVFDLYLAHRSVVVVARCLNDAGHRTKQRVYKSGRVKPGQRWTKQSVLYTLRNPLYAGWVPYDGELHEGKHESVVPREQFELVRELLEAHGGRKTATRNPDYILRGLLRCGGCGAALTPGSTRKGGREYRYYRCTTRDTQGAGACPRGPVSAEQVESAVVEQLQRAAIDAPDLPRLLQQRLRDKVEAERARLESERAQLPGQIAQLAAERARTVDALLHAGPRGRTALEERLGELARAIETSEARQHRVLHELEALRRQEVEAQWVADALAEFDQLWAVMTPENRGRLVRALVHEVTVEPGGEIAIAIGPLGASEAAA

SEQ ID NO: 2855 - protein, 568 aa, unidentified
  source 1..568: note = uncultivated organism
MADILRNLQHQKVAIYIRVSTRYQVDKDSLQVQRRELTAYSEMVLGIQDYVIFEDPGYSAKNTDRPDYQRMMDRLRTGEFTHLLVWKIDRISRNLLDFAAMYQELKDLGIAFVSKNEQFDTSNAVGEAMLKIILVFAELERQMTSERVTAVMLSRANNGQWNGGRVPYGYNYDKETKTFSIHPDEGKIVCKIYDLYEEYQSTLYIARYFNDLGLRSRAGKEWSATQVHKILTNIFYIGDYRYNVHRDGKGHLERDKTEWMEIRDHHIPIISRDKFERVQFILQRNKRGGAHRGESHMRQNIHIFSGMMKCGICGSNMSATLDRRRADGWRPSIYACQKRRNDSGNCQNKYISDITLGPFVFNFIANLIRAKEGISESVDLLSLEKKLLRGPAFKGVSGIDQESLEKTKSFLLQGKSGVEYVPPSIEDDNFISEKDVLEDRRRRLESALSRLKALYLYGDKETPESEYIVEREKIATELAEVEAKLSKLQSEEPHPINNDEFIKKASYFIMAEKLLTDRYVDYEKYIRKIDPSVPRSFLLNIVVSIEATNGKVTEIAFKNGVSYRFSYT

SEQ ID NO: 2856 - protein, 622 aa, unidentified
  source 1..622: note = uncultivated organism
MARTKVKPETDNRKIAVYTRKSKVTESGKSIEIQREKCISLAQAQYDVSADEILIYEDEGKSGFYADRPGFRKMLGDIEQNKIKAVICYKIDRISRRTIDLLNLVQQMDQKGIAFISVSDHDLDTSTRTGKIMISLLAAIAEFERDIIAERITDNMYELAKEGRWLGGECPIGYYSKKERLTANGKKTTVNHLEPIEEEQRVVKRLFDLFLQTASFTGTATTLNKEKFRTKKGKDFTLIAVKNILQNPVYAIADQDTQSYFKSFDVPIWADDKDFDGVRGIMAYNKTEQIKEIDQDSRALDPKYVQKTTRRDITDWVIAVGKHKGIISGASWIRVQDIMSEISYNQSARPKESSKSLLSGLVRCADCGSRMFVRAESGRANPDGTLRFRYVCDVKYRKKGDCQNSPNVKGFELDNFVIEQICSMSTGENAFYSELMNTKNILMIKSRETEKELNALRKRLSRIETDIQSQISNLRTAPDGVKQAIYADIEELNKEQEEKKSRIDAIYADLQTQDSQIAGIEKARQTITDFPRLIKLVDYEGKLQLLRRILECVIVKDAKVHIFLKGTDSDSFFGRTHERSDLCHIEQNSIFNTSASISRKAGALFIVKGGGGFDEANGSNGD

SEQ ID NO: 2857 - protein, 559 aa, unidentified
  source 1..559: note = uncultivated organism
MADKLLRCAVYTRKSTEDGLEQEFNSLDAQYEACAAYALSQRHEGWVVTKERYDDGGFSGGNLQRPGLKRLLEDVKAGKIDIILLYKIDRLTRSLTDFSKIVEVLDEAGASFVSITQSFNTTTSMGRLTLNMLLSFAQFEREVTGERIRDKIAASKKKGIWMGGPVPLGYEVRERKLVVNKDQAEQVRHIMRRYLALHSVPALADELTRAGYRTKVQHRVSGPHRGGCIYRRGTLYHLLSNRIYRGFIVHHGQAYPGEHEPIVDQELWDAVQSCLTNNASGSSRRLTHRHPSLLIGKVIDGEGRAMSPSHATKSRKRYRYYVTRPDQVDGTRAWRVSAHDLEQLVCSNVAERLIDQQFVMGIAGSGDAEQLQSAINEADIMAATLRSGSTQAKAELLSALLRQVRLHEDRIEVEVDQAAAQERWGIDGNAGARSEASIITIPSVRVRRGHQLRLIVPGAETSHSNPALRDTKLIGIIAEAHQARQLVLANPRHSLAQIAREHGRCRTRLGKLVSLSCLAPDIITAIVRGKQPAHLTVSKLTSKPLPLSWTQQRRELGLA

SEQ ID NO: 2858 - protein, 539 aa, unidentified
  source 1..539: note = uncultivated organism
MQETRYKTLKYIRLSSADDQKNGESDSVANQRRLIDEYLKNHPEMEVVGEFVDDGVSGIVFDRPSFNAMMAVIQDGGANCIITKDLSRLGRDRIETGRYLRRIFPAFGVRFIAINDNIDTLNDSTDGLYISVKSIINDEYCRDISIKTRSALDVKRANGDYTGGCPVYGYVKDENDKNKLVIDGYAAEVVRDIFRMKIDGYSSAGIAKTLNERGILSPMEYKKDRGLPHPTGGYADRNGAKWCPTTIIRILSDETYAGTLVQGRYGTPTYKLREVVERPEVEWHRIENAHEAIIQRHNFDLVQKIMRLDTRTAPNGDKVYLFSGILICGCCGNRMTRKTVPYKGENYYYYWCPTGKKNGCTESVMVKESALIDCVTANVKAHITNIASLEMLLSGIDATSIARGLADRLAGQIAENESRLDKIRGYKASLFENMMNGNLSKEEYKSLKGKYSQDADTLMAANAKLRNETEAVLSCRHERMAWTGHFTEYQNLETIDRRTVIHLIHSIRVLGKRDIEISFNYQLEYDTAAELFSKEKGAA

SEQ ID NO: 2859 - protein, 603 aa, unidentified
  source 1..603: note = uncultivated organism
MREQSTNALHVEDFMNQIANNNQKRVAIYLRVSTDEQAKEGHYGLKVQEDRLRQFCASQDFYLNEEHVYRDEGFSGSLEAKDRPGLKTMLEAAQNKEFQILIVYRLDRLFRNQRKLLNVLQQLVDYGVAFQSSTESFDTNTPSGRLMLQILGSFAEHERETIRDRMMGGKTRAAKDGKWVTGVPPYGYRVDEKTQKLIIQKEEEVVVQKFYEWLVYEKCSLREITKRAIEQNLPTPKHKNAKGKNRVGGKWYKRTINRILVNEVYTGQFYYNKYKRPFQYLNAVLDEQHQRPQEDHILITVPAIISSDLFEKSIQQLQDNRRFQKRNEKRVYLFAGLLYSGISGRKLQSGYQTPKKDKTTPILGKYYHVYVPDIDRKPTDCDKNNPEGQCAESRLVPIWDTLVAILSDPKNVIPQLTEYTFKTSDEAKVRKELNQIDRQFETLRVKKQRIQEVYLDAQMDKDDYNSRMKQVREDEKDLTIHKQKLSQLLLKQDEQKDRDKIIQSLYGKLKTRLHNVTYEEQQYILRLFVEKITLHHKKEYAEVAFKFPLNTNVPTTAPASMTEGKHMRLVLHVKILSEHQRRVQIIKSNPKMYKANEIAPVAG

SEQ ID NO: 2860 - protein, 536 aa, unidentified
  source 1..536: note = uncultivated organism
MFRIKTAAIYARRSKIVETGDSIETQIQLCTNYLKNIGITNTIIYVDEGFSGKDIDRPKFMELLNDAKNKKFQVLICYKLDRLSRNIGDFSNLINDLEKYNISFISVVEQFDTGSAMGKAMMYICSVFSQLERETISKRVSDNMYSLAENGYWLGGEVPFGYTHKRNVITDSGGKNRTFTELIPIEDELPIVKLLFDKYLELGSISKVEKYTLQNNIKTRRNKDWSKATLSYFISNPVYVKADESIVEYYKSIGITTYGNVNGSNGMLIYKKRKGKTSELRNTSEWIYAVSNHEGIIEAETWLKAQKLAEVNKVRAPNMGCSNIALLSGMIRCAKCGTFMRVAYGKPSKSYPKKKHYYACSMKHNSGGARCDNKNADGPELDRLIINKLKEMSIDKSSLVKKLKEYKASLESSSENILYTSLQKNIAQNKEQIDNIINNISLTKDAMVVKVLLDKLATLKDEEAKLNKNLSDLNSEMEQQDALIANCDDIISKLKNFSKLIDSLNVEEQKKLVSSIIDKVFVNGNTGAVKIKFKYL

SEQ ID NO: 2861 - protein, 519 aa, unidentified
  source 1..519: note = uncultivated organism
MSPQQNTAPTIRCAIYTRKSTEEGLEREFNSLDAQRESAETYITSQRFEGWTILPDRYDDGGFTGGNMDRPALKRLIQDAEDGRIDCIVVYKVDRLSRSLLDFARIMEVLERNNVKFVSVTQQFNTTHSMGRLTLNILLSFAQFEREIIAERTRDKMSAARRKGKWVGGMPVLGYDVHPNGGKLLVNEAEAARVRGIFELYLQERALIPTVKELAARGWTGKRWTTKKGKERGGRLFDKISLYKLLTNIIYLGKVPYKEEVFDGEHDAIVSQDIFDRVQSLLRENRRNGGSNVRNRYGAVLKGLLHCRACNAVMVHAYTVRGDKRYRYYVCSKAQKSGWHTCPTKSLPAYEVERFVIDTIRGIGKDDTLAAEVIRQAREQNQGRVDALQSERRFLETELANLDKEVRRLIHSMGPGKVGNVTTSRLAELQDRMRETEQNATRVRQELMELERLSVDEEQLAAALSLFDPIWENLLPREKVRVMQLLVERVQYDAGTGRVSVTFRPSGIRTLSAEAGLER

SEQ ID NO: 2862 - protein, 572 aa, unidentified
  source 1..572: note = uncultivated organism
MKGQSPRKYAIYSRKSKFTGKGESIENQIELCRQHIQLHHDHVTEEDILIFEDEGFSGGNVNRPQFQAMMKQIRANQIGAVVCYRLDRISRNVGDFAKLKDEFDYYNVEFTSIRDDFDTTSPSGRAMMMMVSVFAQLERETTAERIRDNMHELAKSGRWLGGTTPTGYKSTQITGSVTVDGKERKAYKLDIIQEEAEIIQLIFSKFLETNSLTKTDTYFLQNNIITKNGKNFTRFSLRSILQNPVYMIADQSAWEYFDRLGVEIYAQQSEFDGKHGIMAYNKTIQKSGRSNQMRDMDEWIVAVGKHKGLIAGADWVKAQDRLRQNRSKSYHKPKSHVALLSGLLYCGNCGSFMRPKLSQRINAQGERIYSYLCETKERSRCQLCNSKNPNGNELDKMICEQIQLISEDSAHFLRELNSVQRKLEGQREEYDQSLNTLKKELQENERQIANLVEILAKTPNTPAFDYITEQINTLHETNEKIKDRMGELESLMKPPLYSPEEFDKTKELLKSFGQSFDTMSVEQKRMALRAFIRRMIWDGKNIHVVLFGDRESEMDYTDWLKEKAGPKREDSE

SEQ ID NO: 2863 - protein, 520 aa, unidentified
  source 1..520: note = uncultivated organism
MIPVASYCRVSTDQEDQANSFEAQQRYFREYIDRKPDWELYEVYADEGITGTSTKKRVQFNRMMNDAFAGKFRLIITKEVSRFSRNLMDTIAYTRELKELGIGVLFMNDGINTLDPDAELRLSIMGSIAQEESRKTSTRVKWGQTRQMERGVVFGKSMLGYDVTDGKMTVNPEGAELVKLIFQKYGVEKKGTSTIAKELREAGYHTFSGNPNWSSSHIVKILKNEKYVGDLVQKKTITPDYLTHSKKYNHGEEELVVIRDHHEPIIDHLLWETVQEELQKRNRHGRLGAGHSNRYVFSGKIKCGECGASFVSRTKKRKDGTSCRRWACYTAANEGRKHLDAKGNQVGCDIGKMIRDDAAKDMLTQAIGSLQMDRASIIENITALAMDAIQRTAHKTQENAGQLDSEIGQIKKKKAAVLDAYFAKTISKDDMQMMNAQYEKQLKELSQKHTSRNKQAQTDAQTEQLREQIRQEAADLMTGKTESEVFLKSILEKMVVYKDHRIELRLHLLPQRWEFLMQKG

SEQ ID NO: 2864 - protein, 594 aa, unidentified
  source 1..594: note = uncultivated organism
MKVVSYIRVSREEQVEGWSLDAQRDQCAELAALRGWDLLQVFEEPGRSAKTDLRPEFQRMMSRAEARQFDVIVVHKLDRFSRSLADVVRNVARLKEAGVGLVSVSEPWLDTTTPQGEFMLYLFALLAQWDNENRARETAKGKEQRAKEGYWNGTLNFGYVTIRDLRKELWTLGEQHDAQEISEEVYATRSDQLDNYLDQWHDRTEGDAVPHLKNAAGALLAFTYYSAGNVSDGEVAIMLNEAGYRTSGNWGENLFEADTVRPMLQNRFYLGEVPYKDKWYPGRHPAIIPESLFEKCQQARAARRGRTVRGRSKKRTYPLSRLALCARCGKPMRGQANHANERYYRDPRRSTNICDQKMVRAEDAERQIVEYLANIKLPDDWRERVMQLSQLDQTEVESNDEKRRRWEGQLERARKLYLMGDMEENDYRAMREDLKGKISALEPMHEPDLEEAAATLETIGSLLEHANPKELDDVFHALLNSVYLDSGDQGPVVAIEPKPFLKLLMDVSIRPFQSEDDDDDPEPTPPQTPLPDDDGPGDGDHRSHSRFPVEGDDHRSSEVVEGENRDTILADAGQEIVVADKGAMPVAPVLAARH

SEQ ID NO: 2865 - protein, 531 aa, unidentified
  source 1..531: note = uncultivated organism
MENSIVYLTALYIRLSREDGDKEESDSIGNQRKLLMEYIVSKEELVLKDIYIDDGYSGTNFNRPDFKRLIHDIEEKEVNCVIVKDLSRFGRDYIDTGRYLERFFPEMGVRFIAISDGIDSKRQTYDMMLPIKNIFNEQYARDISKKIQATVKIKQHSGEFIGSFASYGYKKSPVDKNKLVIDEYPANIVKRIFDMYVSGIGKQRIARILTNEGILCPSAYKQLNGQQYKNSNYRENSYWTYSTINSILHKEIYIGNMVQGTKHQTMRGKQNRVAKEDWIIVSQTHEPIIDQETWNRAQSLLKRRTRQLDLVSNQNIFAGFIRCGDCDAAMAKVSWSRADGTKSDSFYCGTYKRYGNKYCTPHTLPLNILEQIVLDDLKKIIHSISDLEKLAKQKPADKKKNVDGKIQEQITKADAELSKIQRWKQSLYEDYKEEMISREDYMAYREDYTNKEKLLIKQIDSMRQIRASDEEKFLEAPWVTRLLQLKDVEKLDRTIIVEMIDKILVYDNRRIRIIYNFSNELECLFETQVRS

SEQ ID NO: 2866 - protein, 551 aa, unidentified
  source 1..551: note = uncultivated organism
MSAKPRLRCAIYTRKSSEEGLEQDFNSLDAQREACEAYIKSQAHEGWTLVRDHFDDGGFSGGNMERPALKALMRRVDAAEIDIIVVYKIDRLTRSLTDFARLAETFDAHKVSFVSVTQQFNTTSSMGRLMLNVLLSFAQFEREITGERIRDKIAASKKKGMWMGGVPPIGYDIVDRHLLVNRQQAATVQATFRLYLEAGSVPALTKRLVDEGITTTERVSTRGNAYGGRPFARGHLYKLLSNPIYIGRIPHKGQSHPGMHKPIIDQDVWNATQSLLAQNTQGHRTHRAQQAEWLLDGLLGTEAGSRLVPSHATKSGRRYRYYIEPPDAAGEGKAIRLPAVEIETATILGLRSFLGDRSALLAAYSGLPNMKPDTLLFQAHTWAAALDQHPAQLRELVQSVIYCWDRLELTIRADRLTESRSTTSSEPFRTVRNTVPLLHHRRGRQMKLVVPGHEHQRLPNGPLVTAIVRAWDWARQLTSGEVSSIAEICRAEGFSDTYVGQLLPLAFLAPDVVESILEGAQSPELSADWLIWEAQLSAEWSVQGKTLNARD

SEQ ID NO: 2867 - protein, 508 aa, unidentified
  source 1..508: note = uncultivated organism
MAIVLYARKSVERENSISCETQLKYCRSMLKPDEQDEQIIKIVDNGYSGGNVNRDGFQKMMKLIHQGRISKVVVYKVDRISRSLSDFVNIMEDFKEHHVEFVSSQEAFDTSSPYGELIIKILVVFAEFERNSIIERVTQAYAHRSEMGFYMGGRQPYGFELIPAIINNIKTKKLSGIPSQIEQIRYIFNVYAQENVSLRRLLDMLLSEGKNPLNGSEWTTAKLSSILRNPIYVRADSDVYDYYESRGVQMISDISEFKGINGAQLYGKTKHKHDDPDWSDMKLVLMPHRGVVDSDVWLKCQHKLIQNKQIHKSVSNKTSWLAGKIVCEKCGHTMTTIKGKVNKQGVMRRYFNCTGKSHKRKCTGPNMTIYAENLENMVYDCITEKLREMKDAKVTTAKTDSTKVNELKLRIREIEKKEKNLAENLLEDQLESALLEIANNKAASLKQEKQALIKQIESIKTTVQTGTVINPAKSWKNADYDRRKAVAGIMIQKIIISENGNVKIIWNI

SEQ ID NO: 2868 - protein, 530 aa, unidentified
  source 1..530: note = uncultivated organism
MEAKNRAALYLRLSKEDKDKLNKGDDSASIQNQRLLLTDYALDRNYQIVEVYSDDDESGLYDTRPDFERMLTDAKLGKFDIVIAKSQSRFSRNMEHIEKYLHRDFLNLGIRFIGVVDGADTDNIGNKKSRQINGLVNEWYCEDLSNNIRSAFKAKMKAGKYMGSSCPYGYKKDPKDHNHLIIDEYAAEVVRKIYRLYLSGYGKGKIGSILTEEGILIPTLYKREVLGLNYHNSKEMETTRVWSYQTVHTILNNEVYIGNVVQNKVSNLSYKDKRHIQQPKENWIRVENMHEPIIDRETFQKVQERQKIRTKAVDNEPNQSLFSGIVVCADCKHAMVRTYARRGKREFTGYCCKTYKVHGKKMCTSHAIKKEVLETAVLMSIKEEARKILTPEDIENLNKMEFVSRTEQEYEQRIIQLEEEKVRKESYKRKTYQNYMDEVLSKEEYLSYMEDFQKDIKRVNTQISNLKEKLEKQEQLSQKYDEWVEKFKNYIDIDELTREVVLELIEKIEINADGSISIFYKFRNPYIETG

SEQ ID NO: 2869 - protein, 547 aa, unidentified
  source 1..547: note = uncultivated organism
MSKRVAIYCRVSTVEQAEEGYSVDEQRRRCIEYCEKEGHEVFKVYEDRGISGKNISGRPGLKDLLKDANEKKFDLVVVWKLNRISRRLIDILNIVDTLDKNSIAFRSLTESFETETPAGKLQLNIMGAIGEFERGTIAENVKMGMMARAREGKWNGGKVLGYDVVEVQSEGKKRKETKLVINEKEAMTIRRIFELYSEGHGYKATVNRVNKEGHRSKRGNAFSTASIKEILKNPVYIGKIRYNVRQDWNEKRRKNINPNPILVDGEHEAIIDNETWEKVQIILKDRSKTHNRVYDSEFPLTGLLKCPVCGASMTISRSYHKRKDGTKVVSEYYVCGNWKNKGTAVCNSNSVRAEVVDEVVINKLIETVNNELLLKKVVNNINHNRSSKLKPKLDEMNVVSKEIDRLSSKKNSSIELFEDGILTKNELAERIKKLNEEIDTLKFRLDELKQDVMLAEGEPVPFELVSQVMNKFGEIFKESSTRQQRKQLLNLLVSKITIDKSRNIDSIELQINKDVIRYLMKEESSKKDGSSFFHTSMLNCTCLKFVI

SEQ ID NO: 2870 - protein, 513 aa, unidentified
  source 1..513: note = uncultivated organism
MAKVTRIEPTIDTSLVRKLRCAAYCRVSSGSEDQLHSYAAQVKYYSEVLSSSETEELVDIYADEGITGTCEDKREEFKRLMTDCRRGKIDRIYVKSISRFARNTKDCLKNIRELKELGITIFFEKENIDTAQVNDEMMITLMGGLAQEESTSISQNMRWSVQKRMKNGNYEPPSVPYGYRKENGKLVVEPATAKIVKMIYSWYLNGTGVTTISMKLNELGVSPSQHGKRWGNFAVTYILTNERYIGNMLLQKTWSTDTMPVIKRTNKGEREQYLVEHTHEALISDEDFYKVQELLADKVREYYRPMGGRSVFSRMIKCCNCGCSYKRKKDNGICYWVCQNHDLKADNCPSQQIPEESIRQAFIRLFNKLILHYRELLLPLQRALQDLTAKKFGSNTKVLDIRRDIAALNEQKHVISRLRTKGFLDEKKYNEQFTALENKKSRLERDLNKLSKADDEDETLEQLDTLIDCFEERTAMITEFDDELFGMIMERIVVRDNILEFHLISGLKFNEEI

SEQ ID NO: 2871 - protein, 527 aa, unidentified
  source 1..527: note = uncultivated organism
MITNTIYKVGIYLRLSREDERLGESGSISTQRDLLLNYIRDNNLMFIDEYVDDGVSGTTFDRAGFNRMIKDCEEKKINMIITKDTSRLGRDHIEFGYYVERYFPEHNIRYVAVNDGIDTFNNSSANDMLVFKSAFNDMYVKDISNKQRSSLYTKKRNGQFIGAYAPYGYNKSKEDKHKLVINEKEAEIVKRIFNMFASGNSLTTICNKLTDEKIPTPSISKGMNMGQKNLHYGVWSTRTVNDILKCPTYIGNLAQGKQKKINYKSKKRVHNKEENWIIKENVVTPIIEKDVFELVQNMFKSNRNRQGDGITDKLLLRGLIYCKECGHTIGFRAHKQLTKKNGEVIRIYGNCNYWTKRKKQNVCTPHSIKYNDIETLVINNIKNMYIKYLSESKLKNILLLSDKLKNKTTEIKMQILKSENNIEVLNKKIDDCYNDKLEGNITLDMYKRICNNLILQIKLNETKIEEYRKNLFELENNKIFEQDYYKVKLKEFMSLKNPSRALLTSLINKIEITEENNIDIYYKFKLI

SEQ ID NO: 2872 - protein, 532 aa, unidentified
  source 1..532: note = uncultivated organism
MKQRAPTNPTGGINGTVAGEKRRIRCAIYTRKSSEEGLDQEFNSLDAQRDAGEAYVASQKNEGWVCLADRYDDGGFSGGSMERPSLEQLLRDIEAGKIDCVVVYKVDRLSRSLLDFARIMEAFDRKGVSFVSVTQQFNTTSSMGRLTLNILLSFAQFEREIIGERIRDKVAAQKRRGKWAGGVPVLGYDVDRSGGSPRLVVNPKEAARVREIFQMYLDKGSLQPVVTELTRRAWPNKRRITRKGAAKGGRPFDRATLYAFLTNPILIGKIVHKDQVYDGEHEAIVEPTVFERVQSQMRENGRTGGKEVRNKYGALLRGLLRCKVCDSAMTHSFYGKDGRFYRYYRCVKAIKSGSDTCPARTLPGAEIERVVVNEIRSLGEDRDLLDRVLAETRTSLDEESASLQRERDELKASLKRLEGNLQSLVADASPTTDVTGKLAHAHGRITTSRQRLGEVEARLAEMDATAISRDEARKALKGFDGVWANLSPREQARVLKLIFTSVEYDADAATVAVTFRPTGVAALCRGKLQEVA

SEQ ID NO: 2873 - protein, 542 aa, unidentified
  source 1..542: note = uncultivated organism
MIKAAIYCRVSTALQEQEKTIESQKAELEEICRKQGVQIVKEYIDNGWSGGTLDRPALDQLRTDASKGIFERVYFHSNDRLSRDLTNQGIIVEELERKGIEVFFYDKPIADTPEGKFLFQVLGAAAEFEKAKILERTRRGKLYKVKSGILVGGISPYGYSYIKKTKERDGYYKVNEEEAKIVNLIVDLYLQLGSVRAVAKELTKRNIKPREGLQWRTSTLHRILRNESYIGTTYYNKTYGIERDNGQKYRKRIKNGRKLRKKEEWISITVPPIIPKEKFYAVQSLLANNHRSFDNRKHSYLLSGLIKCGNCGSTYSGEINHGHSYYRCNNRHATFPLSNKCNAKMISTSKLDTVVWNTISEAIKNPKILINYIFHAVEEIQKNENKETLAKQKQELITNIESLKSKKSRILELYADGTITDKSQIAEQIEIYNKQTEELERQIKDIDTKLDQNIDRPLQKQDIEYFCQLAAARLENLSFEERRFILTRLIEKIIFYSLEGRVKIIGRIPLLEGKKVTLDEILNEQYGTMSMSSRHYGHRKQR

SEQ ID NO: 2874 - protein, 564 aa, unidentified
  source 1..564: note = uncultivated organism
MDKNNSFKSYMAAVYLRLSKEDEDLSLKTEKSESNSIANQKALILKELKSMPDVTLFDIYIDDGFTGLNFERPAFRRMRNDIYEGKINMVIVKDLSRLGRDYIESGRYVKKIFPSLNVRFVSVLDHFDSLTASQSDMNLLIPVKNFVNDNYSRDISGKVRSHQEVMRENGLYVGAYVAYGYKKAENDKNRIEPDEYSADIVKRIFAWKLDGMNAGAIADKLNQLGVIPPSEYKRLMGINYKSGFQKNSKAQWTAVTVTRILKNKIYIGVLEQGKREKVNYKLDKVVEKPESEWAVIEGSHEPIISRTDYENVERLLCRDTRTAPAKKTLYLFSGLLFCGECNRSMVRRQNKYKHSSYVYYICSTYNKGKGCTRHSIEESTLKEIVLDSIRRHIEQIAELDQILQMTDSMEIQCEDVIANDTEILAKYDELNKCKKMELTLHKDLFDGMISKEEYIQFSQIYSERAETIEKSIQALRQEIETIFQNGLLSNEWIRKFASNRNIDELDRTILLLLVEKIIIHEDCRIEIIFKYDDKYKTACRIAENLSEPARQGVNGSWQEPQTGI

SEQ ID NO: 2875 - protein, 529 aa, unidentified
  source 1..529: note = uncultivated organism
MSHRTTTARDLAPPSAKTRCAIYTRKSSDEGLQQDFNSLDAQREAAEAYIASQKAEGWVCLPERYDDGGFTGGNMERPALRRLLADIDAGKIDCVVVYKVDRLSRSLMDFARIVETFERHNVSFVSVTQHFNTTNSMGRLTLNILLSFAQFEREIIGERIRDKIAASRQRGKWTGGTPILGYDVDRTAGGPRLVINAAEASRVCQIFELYLERGSLLQTAAELERRGWRNKVWTTRDGRERGGLTFDKCRLYNLLTNVLYVGKVRHKSDVYAGEHEAIIADELFARVQRQLQRNGRNGAVEHRNRLGALLRGLLHCKACNRVMSHTFTTRGQRRYRYYTCTNAVKRGRAACPSGSLPAIEIEAAVVDQIRCIGRDPGLLADTLEAAQRQTDEAIGRLEAERRAVERGWRRIQAEIRRASATTMDQEGAVSVLANRNEQAAVAERRMTEISERVRELQAERVEAADVTAAFADFDNVWQSLSPREQSRLVQLLVQRVEFDAADSTIEVAFHAAGIWSLADDVTMEAEEAA

SEQ ID NO: 2876 - protein, 552 aa, unidentified
  source 1..552: note = uncultivated organism
MSMKRVLCLYRVSTKGQVDRITDDIPMQRRECMDFIARMDDWTFYDERVEKGVSGYKVSAENRDAILDIRALAEKKKFDVLLVFMFDRLGRREDETPFLVEWFIDHGIEVWSTREGQQKIESRSDKLINYIRFWQAGGESEKTSIRVKAAHTQMTSDGLWRGGIAPYGYKLVLNGRIGKKNRQLYDLEIDEVKGPIVREVFDLIVNEGYGTLRAANYLNEKYPDPDKVWTPQTIRNMIRNPMYTGRFHMNDTLSEPIEKLRIISDETSQFAQYVLGQHIPRKYFSQRQAEDEALPEEAKTKTSVYGASLLSGILYCAHCGCKLIGTYCTKQRKNGAYHRPIYRCYNGSVKAKHCDGQTVYSAAKIEAAVLEVVHQYFRNITKTVSGVWEEQARIQLKSKIAYQLKAAKAEREKLVAQEERLRQEVMRSIMGESDFDTELLKEMLEKNKADLAACEARLVELEDEKGAEESRMKYLSTQYELINDWAAEFDAADNDTKKMILARLIEKITVDKDYHLNITFYVAADSFRTQIAQEKPLIQIDEAERCIPAIAV

SEQ ID NO: 2877 - protein, 703 aa, unidentified
  source 1..703: note = uncultivated organism
MSANATERLDNVGSPEWLEAELNRLAELKRAGLRQRWSLVVGRPAPACLPGVLLHKVLAYRVQADALGDLDRETARALKRLAAVTDKMIAKPERRDIVPGTLLVRDWKGSLQRVMMLEHGFAWNGQTYDSLSRIAREITGTAWNGPRFFGLRAARERRLDRGSGRLQLAKKVSAYQDACNTTSTEHVDRGSSARILRCALYTRVSNEHGLAQEFNSLDNQREAAEAYVKSQAGEGWRLLPGHYDDGGYSGGSLERPALQRLLAEIGAGRIDVVVVYKVDRLTRSLADFAKLVELFDQHGVSFVSVTQAFNTTTSMGRLTLNVLLSFAQFEREVTGERIRDKIAASKSKGIWMGGQVPLGYRVENRALHVVPEQADAVRHVYDRYLEIGSILRLKADLERRGVRVPCRIDGAGRVLGGVPFGAGYLRGVLTSPLYAGRLRHKDKVHDGQHAAIVDRETWDAVQAMLAGNTRRYKQQQIGFNLLTGRIRDGAGNTLTPCSAQKGAKRYRYYVSQALLRGKAGKASRIRRIAAPEIEDVVIQALRSNVPREEQPADDAALVRRHLALVSVYPKRLELRLAGASTVLTQPWARLSTLRRCAIIEPPPTLTDRRPMTVEDGTRILKAIGTARLWLDELTTGRIDDMATIARREFLSKRAVKMMLSLAFLSPRIVAAIVDQKLPRGVAARELAKLSPAWAEQHNALQLT

SEQ ID NO: 2878 - protein, 567 aa, unidentified
  source 1..567: note = uncultivated organism
MVERKIVRCAIYTRKSSDEGLEQDFNSLDAQREACATYVTSQKHEGWVELQERYDDGGFSGGNMDRPGLKQLLSGIQAKRVDVIVVYKVDRLTRSLADFAKIVEVLDAQGVSFVAVTQQFNTTTSMGRLTLNVLLSFAQFEREIAGERIRDKIAASKAKGMWMGGNVPLGYDVQDRSLVINPVEAKKVRSIFQRYLKLKSVHLLADELRAGGIKSARRTTQDGKLIGGHPISRGNLYGMLRSPIYIGQVVHRGKAFPGLHQPIVERDIWDQVQSLLNANRVTDRRKVRARVPSPLSGLVFDSTGERLSPTHSSKNGVRYRYYVSSSSVRGRPRKDEVGRRWRIPALELEQIIVGSLRFLLEDESGLSALMGLERMTPAEAKASLDAAVTFGEALNVEDPAKLREQMEQVLQRVEVGETSIEITVSIGVLRTALGLQNTGNVGREKHNIIVPVRVTKRGVEQKLIVGADFVAPHIPDEALLTAIARAHVWVNEISSGRIADVNAIAKRESLPASYVRSHLPLAFLAPSIVTTVLEGRQPADLTLKHLMYRTQLPADWALQRRQLRFDR

SEQ ID NO: 2879 - protein, 529 aa, unidentified
  source 1..529: note = uncultivated organism
MARTVTAIPATRRLHTGTPLGQTTIRKVAGYARVSTDHDDQVTSYEAQVDYYTRYITDHAGWQLAGIYTDEGITGTSTKHRTGFQSMVADALAGKIDLIITKSVSRFARNTVDSLTTVRQLKDAGVEVYFEKENIWTFDAKGELLITIMSSLAQEEARSISENVTWGHRKRFADGKVTIPFSRFLGYDRGEDGNLVINQEQAKLVRYIYTLYLDGGSLTGIARRLQAEGHQTATGSKQWSASQVRNILTNEKYKGDALLQKSYITDFLTKKQVKNEGEVPQYYVTGNHEPIIAPAVWDFVQAELAAHGTGRRSTSRQRTFSGKIRCAQCGAWYGSKTWHAGSKYEKRVWRCNHKYAGNTPCATPHVSDEQITAAFLDAVHTLLASRSKVDEVIGKAVRAELDTTDLHIEADQLFARVGAAAEAIDQLIARNARVAQDQTEYQRRFDKLTSDHARLLADYDKLLTQISDLENRQAAYRYYKEQLAALDLASIEFTPYLWHTLVDHAEVGTDGTIMFTFRDGRSQAISLNK

SEQ ID NO: 2880 - protein, 540 aa, unidentified
  source 1..540: note = uncultivated organism
MKIAALYARVSTGNQEKQETILSQVAEIKERIVKDGLMLGENLSFCDEGWTGSILARPELDKLRDAVKNKLFQVLYVYDLGRLSRDFLNQLILKKEIEETGIKIVSLHDINNETPESGFAQNVMGLFHDYERIKIAERFRRGKLYKARNGILFGWNAPYGYRYIRGDKKTIPGSFAIVKEEAETVKMIFSWFVDKQMTIRQVILRLFEQKILPRKNKKGYWSTSTLSRLLRDETYIGKTYFNKRVAVEAINPHKKDGYRKIKKSSRKNRPTEEWCPISVPPVIDEDIFIRAQQQLKTNSQFCMRNKVHEYLLSTLVRCTCGNTRAGEGIKNHLYYRCTDRVNRFPLPKECFMPGVSATILDTKVWNEIYNLLTDPKQIEKQYSRWNLKVASVEENHDYVDAEKLNKELDELKEQEDRFVKAYGAKVISLEQLQSQLSDIKLNKSRITSKLTSSRNNISPIQRKIILPDLRQFCDTMKSEIKELDFKERQYVVRQLVDTVVTDGAIASVEGSIPLVIPEENTNNNYEQSSNYRYRRSSQCR

SEQ ID NO: 2881 - protein, 557 aa, unidentified
  source 1..557: note = uncultivated organism
MAKKLKAAAYMRYSSAAQDDGFSIEAQQRAIRDFAGKNNIEIVEEYIDRAKSGTNANRPEFQKMFADCELGLYNMVIVHNLDRFARNAGDSRKYRDKLKDLGIALYSIKDDINETPYGKFMTSIKEAYSELYSDNLSQEVQKGLKEVALRGLHTGGSPPLGYDVIDRKLVINETEAEIVRIIFKQYARGKSYNDIAKELNAKGYTTKAGNEFSKSSFNAILQNRKYNGEYIYNRRAGKDKNGRHNSHKNKSEDEMIIIPNGVPRIIDTKTFNKVQAKLSKNKRGTSSYRTSSTYLLAGLIKCGECDFSYQGNTRKSGKGVTYSSYRCGKRAGHANIGCDNPEIEKHRLENFVIEQVFKYLFTDEGIKEIVKQINIYHKEIQSTKGKDIKLYDKQLKNLKKQQSNIARAIANGADSEAFIAEINKIMQSIKDVEQRIERESPANLPSITEAQVRNAVNKLEEEMRNETDIDRKKEFINAYVESVVIYKDRVAVTLKVASSTFYACGYDDTTGALLIHNSIERDELKKRSKQKQKTPKKLSINDDKHFDGFEVVNNPLL

SEQ ID NO: 2882 - protein, 509 aa, unidentified
  source 1..509: note = uncultivated organism
MSIKPAEIESKIKRVALYLRLSRGEGLDDLNTHERRLVRKCDEHNWSYEMYKEIGSGSTIKDRPVMQQLLNDVERELFDAVVVVDLDRLSRGSGADNDRILYALKTSNTLVVVESPYQILDANNESDEDMIVFKGMIARMEFKQIVKRLKVGKRMKKEQGLWVSSATPYGYKVDRETKKLTPDEEESKVVVLIKDLFLEGYSCADIAWELNKRKAVTRGALEWRSERIAAILHNEVYVGTIVYNKTEGSRKKEENKQYSITKPFRNIPKEEWRRLYNAHPPLFTHEEFEEIERRFEQSPKSKRTTEKNTTYALTGLCITPEGDTMSIRKNRRTGLPGTLYPKTINNRPTKYRGCSYDMVFDVVRQVLIQTKDYLDKVLTEEEKANQINELKKCITEKENELNLVIQSKNKIIDGFLIGLFDENKSIELNKEKDEEIDRIEKEIQAIRNQIDNFNKVNDSIRKTKIERVLEKIDDTSLDREKNEFLKTIIKEIIVDRTEENEMKVKVNFL

SEQ ID NO: 2883 - protein, 569 aa, unidentified
  source 1..569: note = uncultivated organism
MKSNDILRVAIYSRKSKFTGKGESIANQIEECKKYCLYMLHKPEENIKFTVYEDEGYSGKDLERPAMKKLLSELAQYDFFVCYRLDRVSRSVSDFSNFIKKLERADVEFISVSESFDTTKPMGRAMMNITSAFAELERDTITERIVDNMTALAKTGRWLGGTTPLGFKSEKIHFERQGKARSYFKLTEKPEELDTVRQIYKKYLELGSLTKLSGFLMNHDIRSRNGVHFSNYSLKFILMNPVYCTADSGAYDYLLANEYSVYTDKEAFTGEHGLIGYNKTNEHHRNGKSRFNEKSNWIIAVGEHIPVIESSLWIQVQERQKSQSKYAFRRARTNHALLSGLVYCSCGSPMRPKSTGTQTETGERRFSYLCETKSKSRGGLCGQKNVQGNILDEAVVSYLFEMYRQIQDEDGAILDAIKTELGSPVLADSEEMLVKHGIETNCRKLDRLVKSIENATSDEVESILFQRMEEISAEIKNQKLELETLQKKKETPGTSKLREYLNTLLHFDANLWSRLDYDTQKSIVQLLIDHIEWDGTTATIFPSGLSFLTGEEFSSATHLATPDASTMNF

SEQ ID NO: 2884 - protein, 513 aa, unidentified
  source 1..513: note = uncultivated organism
MNKPLIKRRCAVYTRKSTEEGLEMAFNTLDAQREACEAYIMSQRPEGWVLVADRYDDGGFSGANLERPGLRRLLADIEEGRVDVVVVYKIDRLSRSLMDFARLVEVFDRHGVTFVSVTQSFNTTTSMGRLTLNILLSFAQFEREVIGERIRDKFAASRQKGMWMGGFPPLGYDVRDRKLIVNAVEAETVRMIFERFLKVGSVTVLARDLARDGVRTKRGKPIDKGSLYKLLANRVYLGLAVHKGTAYPGEHEAIIPRALWDKVHAIMAESPRKRAANTRAQTPALLKGLVFGADGRAMTPTHTRKRGRLYRYYVAAGLLKGEVPPGTVKRVPAGEIEGAVVDQVRRLLANPEVVVATWKAVREQEVRETDDRLDKQGVGEGISEAIRPDVRGPDGGPSRHVARKSDGGDVEPAGCRQRNAVSERRARGGGGRLAEPDIGEGTRGLTENDVRDALQNLDPLWDELFPAEQARILELLVERVEVDEDGLDIRLRVDELRTLVADLRGQQEKRRAA

SEQ ID NO: 2885 - protein, 540 aa, unidentified
  source 1..540: note = uncultivated organism
MNGTKPTVIVIPANPEAISSSKRQLRVAAYCRVSTDDEEQLTSYEAQKNYYTDKIMTNKEWTMAGIFADEGITGTSARKRPEFLRMIRQCKQGKIDIVLTKSISRFARNTVDCLNYVRALKELGIAVIFEKENMNTLEIDSEILITMLGAFAQSESESISTNVRWGKRQAMKEGKAIINYKHLYGYRKGADGRPEIIPEQAEVVRKIYDLFLSGTPIRGILKYLNANSIPNISGGSQWAKNAVNSILINEKYCGDVLLQKTYIDDCINKKVKKNTGQLPMYLVQNHHEGIISRETFDAAQAELARRSAGKSPSKKNAPTGRSRYSSKYALSDRLYCGECGTRYQRCTWRNRDGSKRIVWRCVSRVDYGNKYCHDSPTLDEEPLHRAILAAINSTVKDKNNIVYNLKAAMEKELAPAAGQQLSLSEIDNQLEQLNIEFSKVLAEASESGDQSAYSGRFREIMQKQATLKAQRDEIQRMLAESGKAAAHIEQCRQAAETTPATITEWDEALIRQVVESVTVETGGGIVVALKSGASIHQELM

SEQ ID NO: 2886 - protein, 574 aa, unidentified
  source 1..574: note = uncultivated organism
MNAGGAKQTVSIYARVSSQEQAAEGVSIEAQVAALRAYARSQGWEVIDEYIDGGYSGGTDERPALKRLLIDASQRRFNIIAVCKLDRFFRNLRLLLNHLHRLEQLGIKFVSTQEGLDTSTPYGKFAMQIMGVIAEFERDRIGERVKDSRRYLISGGNWPGGRTVYGYRWLPGQRLWVVVPEEAKIVQRIYDLYVNNKKGIESIAAILNKDGLRTRDGAHWHLSNVRQLLSHPGYKGRHKIGIPMPVIIDENTWQLAQQKRENARSVLADPKGWLLQGMCFCGQCGHVLKCMRKKPREPRYYACRGRVQHRMTQDSDKRCNLPYIRADWLEWGVWKKVEAVLNNSDKLAECVNKALIELEKRKSQIGAETLTIDNKLEAIRTKEERLGMVFADGAISESAYKSKLSQLKKQEAALLKCRHNIDPLELTEMAALEARIAMVKDVLSQGTLSVGEFGIFGEIGNEYIPAGFNAWRECDGELAIGEVTEMDTFRIEGTDRVMRGIDAPLGFWECEDPQLQEEHIKKNMRAILQLFNIKVLVFPERVEIKGTIPAQVLDKLTNKEEHETARIISSPSLI

SEQ ID NO: 2887 - protein, 561 aa, unidentified
  source 1..561: note = uncultivated organism
MTVRRKGQGGDREVLERPKTKLRCAIYTRVSSDAGLEQDFNSLDNQREAAEAYVKSQAHEGWTLLRDRYDDGGYSGGSMERPSLQRLLAEVEEGRVDVIVLYKVDRLTRSLADFAKLVERFDARGVSFVSVTQAFNTTTSMGRLTLNVLLSFAQFEREVTGERIRDKIAASKRKGLWMGGVVPLGYRVENRALCVVEEHATLVRDIFRRYLDIGAVVPLKAALDRDDIRLPLRIDGSGKRSGGRLIGRGHLYKILSNPIYVGRLAHKGQVHEGQHQAILDAEIWDRVQTQLRSHAQRRRKSGGAAESWLTGKLFDDRGFRMSPSEASRGQRRWRYYVSQAILQGRKQDAGSIARVSAPEIEARVTEAMQAAMGGDGGGASLVRAASGATGVSDTKDARDSVESLRAAVERVTIGRAGLLIRLSRQAPEDESGEPTTLSVPWTPNPTRRRREILQGEGAAQPDVRPMRIEARRAFLAAFRSARLRLDQLVAEPEISVASIAMRERRTERSIRQTLSLAFLDPSLVVAAIEGRLPRGVGLKRLMDLPPDWSSQWATLGLFPPA

SEQ ID NO: 2888 - protein, 521 aa, unidentified
  source 1..521: note = uncultivated organism
MVNKKIRCAIYTRKSCEEGLEQDFNSLDAQREACESYIKSQMHEGWTLIPTHYDDGGYSGGTIDRPAFKRLLEDIKQDKIDIVVVYKVDRLTRSIMDFAKIIEIFDSHSASFVSITQNFNTTTSMGRLTLNILLSFAQFEREVTGERIRDKFEATRQKGLWIFGKPPYGYTKNEHNILIPEEPFATNIKQIFSSYLELKSVDKLQNKLKELNINSRTGKPFARGHLYKILSNKVYIGKLQHKDKEYDGQHKAIIENDIFKKVQELLQDNAVIKKHSLYSKEGSLLMGLLFDDVGNKMSPSHSNKKGKKYRYYITYKNRVENMGKITKLPAGEIENFVIEQLLKLIKNKTFLQKHLSDKSIETQELILKLLKTFEPDKLFIRNSINRIDLQTEEIKITYDTKYIVDYLESIVNNKEFKSTSNEKLLEQVTYKVKITLTPSRKNKIIIQGENNYDMRLINAIVQSFWFNNKCANGELTRKEKLNGNNNRFKNLRFLPPNIIEDIINGKNDPDITVKDLLKIAG

SEQ ID NO: 2889 - protein, 518 aa, unidentified
  source 1..518: note = uncultivated organism
MPEVRVIQPITIQAADKLRVAAYARVSSDSADQRNSFSTQVKYYTQFIQAHEDWQFVDIYADQGITGTRADKREEFLRLMRDCRAGKIDRILVKSVSRFARNAQDCIKAVRELKDLGVTVAFEKERINTAVMSNEMFLSMMSAFAQEESLSISQNMRKGAVMRMQNGTFRLSQPPYGYRLDEGGMLVIQPEEAEIVRRIFESFLSGKGIREIALELETEKIPKRNGAPVWSYTGVLYILSNERYMGDERLQKFRTIDTVPFQKKANNGQLPQYYLENSHEAIISRELFQTVQELLTKKAEQYGRPDQGSIHFFTGKLICAECGTSFCRRIEKNNRVVWSCRKHFMGKQLCGMENIPEIELQQCFLTLCRKLAWEDSSILHTYLHQMEELKGREFLIHSDVMELNRQIAILSEQNHALHSLWAKECIDSAFFIAQTNELEQKIVRLRKDLQQYRDGNDYSGIIEGTKKLIRVLSKPSQEFDGSLFRSIVMQATISHQSIRFQLCNGLELEESRRKGEVS

SEQ ID NO: 2890 - protein, 542 aa, unidentified
  source 1..542: note = uncultivated organism
MKNLPKHAGIYIRVSTINQVDKDSLTTQEERLISYCKGQGIESYTLYRDAGVSAKNTERPALNQLMKAIKNNEITAVFVTKIDRITRSIKDLINLVDFFEKQNVKFISIADNIDTSNAMGRFMQYLLGIIAQLEREMTAERVSTDMHHRAQKGKWNGGIVPYGYATQAFLYNKYKSQDDNLEQAFTKTSKICPEPKKLYIYSEESKYIEWIFNHFLQTNSVRKTAIELNNRGVKTRKGNHWPSSTIHRILRSPIYIGKISYGKRKTSPNGKLVPQDKSTWTVVDGEHEAIIEDEIYNKVQNKLSEIHRKPVKQGRTYLLSGLLRCGKCKGRMSGQTFTKKQSNKSYSYYKCANRLQKGTAACEGLSLPAIAFEDFIIQSLMKQSDNKEFLSDKEKMIEMIKSGIKTKEKESDIVEMKKAISKNQQKLNRLLDKLEDGIITDEDFTPRYNSIKSEINRIEIEVAKIRVSNDSIQSEIKNLEISFEEICSFGKNWEYLDDKGKAMRIQSIVKEIHATEKEVTMETYIDVAKVSHTDKDSWPPPA

SEQ ID NO: 2891 - protein, 547 aa, unidentified
  source 1..547: note = uncultivated organism
MNEQPQKRCAIYTRKSREDGLEQEFNSLDAQHEACEAYIASQRFNGWTLVPTRYDDGGFSGGNTDRPGLRQLLKDIEAGEINAVVVYKIDRLSRSIRDFGTLFDAFEKHNVSFVSVTQQIDTSTPTGRMVLNILMSFAQFEREMTIERVRDKVAASKRKGIWMGGPTPFGYRIENHGLAIMPERADTVRWIFSRYLQLGGTKQIADELNDRGDAPRPNGKRWTPRHVYTILGNPTYIGKLRHGAELLPGRQPAIVDDDVFRKAQTLLKENAPVPESRRTKTQAPLKSLLRCGECDCAMMPLFSTKKGKRYMYYRCGADARHTKQGCPVGSIPAEDVEKIVFGLLARFLSDNALMADPRTKAALRDVGSLWNSLFPAERDRIVHLLVAKIVLTERELIVTIKTSGLDSLGLEISGATVDVGGNIELHEPVHFENFSGRRRLLEGVTPAVAPGGEEGNALRFSLLGAISHARRWLSDLASGRASNATDLAEAEGVERSYFRKRLSLASLAPQVLDAIFDNRIDGRLSIAKLEKVGDLDWPAQCKALGIA

SEQ ID NO: 2892 - protein, 583 aa, unidentified
  source 1..583: note = uncultivated organism
METETKNKIRVALYLRVSTGEQISGYGLEVQKEKLLAFVQSQDYSLEEKHIYSEEGFSGTLPVDSRPQLKQLFTDAQNKEFDVVLVYRLDRFFRKTTLLLGAIELLGNYNVGFRSTTEAFDTTSSTGKFMTTLLGAVAEMERETIRERTSNGKLCAAKAGKWVTGVPPFGFKVDKKTKKLLLVPEEVKIVQKLFKWLIDERLSLNELERRMNQMKIPTPYFTKVKKRTTNNYWYKRTIGRILTNEVYTGVFYYRKYKRPFNNLTSITDKNKLRPKEDWVQIETPVVISPETFELAKQQLMRNREFSKRNQKREYLYSKLIYCGKCNYKMFSGFQPPRKNWEHGNGRYYHGIYRKDDAVGTTKRCEWCPQYSEARLEPIWYCLKEILKNPQNMFHPLKQYIYKTENPKLTKIRLTEIETESSSISEKRDRANELYVNGQISKKQYEMYVSQYKNDEQKLKDETIHLHQLSTTKKEKEEREVSLKKVYEQIKNRLENVSYEEKQKIVFLFIERITLYAKEDYVNVVFRFPSYTKTTNISLVNGVSQEQKESFPLILDLKTISETERRQQIIKLNPLMYFPKTFVL

SEQ ID NO: 2893 - protein, 528 aa, unidentified
  source 1..528: note = uncultivated organism
MKQNTVFNRVTPRVAIYVRLSDEDKNKGDKDEKSESIKNQIALATKYSNEKNWHIYDIYIDDDWSGLDRDRPEFNRLLRDCEKGNIDIVLCKDMSRFSRDKIITEEYLETKFIEWGVRFIGLSDGVDTADKANKKSREINALVNQWYAEDISMKVRDALKIKRETGNFIGSFPPYGYKKSPHNKNKLEIDEVAANIVRLIFQLYLEGYGTTSIANILNDRKIPNPCTYKELTLNNYKNPLKKNSQSLWSKTSVKRILRNEVYIGVLQQHKNEKVHFKTKRRKQIPPEQWTVIENNHPPIIEKSIFLTVQKMMNARIRGSGHGKIHLLAGKVFCKDCKSSLIKSSSGKYTYLSCGLYLSSHASCTRHSIRLDLLLKLIEDRLKQQLLKLNVKKEKVIQDLFEKIKISNEKQNYQTLRASILFKINELNKAIKQLYIDKANKKIDETTWKDILSQLLQEKEYLDQELSRLRDKQECIVLTKEELEKEFNDLLFLNQFNHALLNSLIDYIEVGEVKDNTQEIIIHYTFYNQ

SEQ ID NO: 2894 - protein, 585 aa, unidentified
  source 1..585: note = uncultivated organism
MPQRKFAIYARKSKLTFKGESIANQITLCKNYIGAMVLNITDDDILIFEDEGFSGKDMHRPQLQQLLALVNQDKISHIVVYRLDRISRSVYDFLGFYRNLKQHNVEFISTSDKFDTTSKMGEFILTITIAFAELERNIISERISDNLHELSKTGRWLGGTPPTGYRSAPTMMGNKQAKMLEVVPVEADTIKLLFTKYIELGSLTSLETYCLQNSIKSKNNKSYNNCTLRTILTNPVYCTADQTAYEWFTEQGYGMYADEALFDGTHGLIGYNKIDQNMSNDDTPINPQAKKKSNQKYAQPHRYYTKPNNEWIVTVGLHPPIISSALFIQAQEIMKRNASKSYRQSKTHIALLSGLLVCPDCGSYLRPKKYRTKKDGTTPYAYTCELKEKSNGVNCHCPNVQGNILDSEVWNAITHLAYDPDNLVQQLQNQLTSHHNDTDSYTAIINELQSERRDLNNQINNLTNNVALTNNQQVVQVLLTKISELVSQTNDIDTKINHYNQLIEKSKQNNTVYDEFIDLLLQFEPDSYDNLSHEQKCSIIRNIVNKVIYDYNTKTITLFLTTDQNIKLNPQNPLIRLQSDTMHSK

SEQ ID NO: 2895 - protein, 597 aa, unidentified
  source 1..597: note = uncultivated organism
MTESTKRCAIYTRKSSEEGLEQEYNSLDAQRDAASAFIRSQKHEGWKALKDAYDDGGISGGHMERPGLQRLLGDVRSRKIDVVVVYKVDRLSRSLADFAQLMKLFDEHGVSFVSVTQQFNTSSSMGRLTLNVLLSFAQFEREVTGERIRDKIALSKQKGMWMGGVPPLGYDVVDKKLIISQPEAETVQACFRTYLSRSGLIETVLELNRQKLATKSFVSRKGRVQQAKPWVAKELHRVLSNPVYRGMIHHKGHEYPGAHEAIITEDLWAAVQTKLREHQPEFRKGAGHLNEAAIAKSRLIHPLKGVLFGIDGQALTPTYTNKSEKAADSTKARKRYRYYVSQQAIRQGYDSSALKTLNASLLEDAVRRMLFHALPELAEFVSSEKLSKDEARHRLNMHARHLAGLNTPVDYAKWLTGASPRIIVSPGSLTIHLTRENLSKLMACPPLDGTEHKTALVPIPTNIDREGERLIISAPICFKPRRGRCEIVDGRTGKEITVRRSTPSPALIQTIAQAEFWRAELNQHQDKSLQEITEQHGIKPAYVRRLLNAAYLAPAIKKAIFQGIQPANLQVQDLLAPRSLGWREQMIELGFEDKTAA

SEQ ID NO: 2896 - protein, 531 aa, unidentified
  source 1..531: note = uncultivated organism
MRAAVYCRVSSAGQEDNSSLTTQEASCRAYAAERGWSVASVHRDVFTGAAVFERPGLTELRAAMRAGAFDVLLVHALDRLSRDQNHLGLVLSEAEHAGVAWASATEDIDDSPVGKMLRSVIAGVAEIERLKIKERTQRGKRARVEAGRYNPGCRAPFGYRWADPVAKDRLDIDPVTGPILRGMFEEIAAGGSLRGVANRLNREGIPTPSGRGCQWFPTSVKVVIENPVCWGEARGFRWQVEPRKGGSGRVKARTPETHVVLPSVAPALVPPGTAAVVRERMELNRQDATRNNKSPEDALLRAGFAVCGYCGRPLTIFHKQHRRNPVYRCNRINADRFGCPSFGIAAHVLDAAVWERVEAVLRDPGIIRREVEALRAADPTKDDLAAIDRRVAEIVRRRDNLTRRLALFEDDEDAAPLVAEIKSLGAQRSALAAERDKLEAERAGWELEQEQLADLERWCRVQAESLARLTYEQKRLALGALGVRATVWATDHEPRYEIKLSLEVTEPPIAYTTPKPSTTATPWWTPRGSTG

SEQ ID NO: 2897 - protein, 501 aa, unidentified
  source 1..501: note = uncultivated organism
MIGIYTRQSVDKKDSISIESQIDFCKKEFIDEECKIYTDKGFSGKNTNRPAFEQMLTDIKAGLIKKIIVYKLDRISRSVLDFATIIDAFKKYDVTFISSTEKFDTGTPIGNAMLSIIMVFAQLERETIQKRITDNYYARGKKGFYMGGRCPYGFTKIETKINGIKTSTLENNLEQMPSLIEMYDLYANTNMSLGKVSNYLNENNIVAPNGGSWDSCKISRILRNPVYVKSDAEVYSYYKNKGVIISNDLNDFIGINGSYLYGKRELNERKFTNMENHVLSLALHEAPIDSKTWLLCQYKLDSNKQIKNSGKGKHSWLSGYAKCGYCGYAVSVVTSGHTEYKYFNCRGKTNLKNCNGHSIPIIVSEIELEVEVELLRKIQELKNTKLSVQTNDDLVVNKIKLELLQIENQIENLLNQLAEANNVVMKYINGKITELDNKKNILLKEMQKLVLTNSKNLPIEEVWDQVDKWDELSIEEKKAICGYFIEKINIKDDEISIDWKL

SEQ ID NO: 2898 - protein, 596 aa, unidentified
  source 1..596: note = uncultivated organism
MEEQGQVQIIKAKKLAKEVADSGRKLRVAAYCRVSTTSDEQIDSFNSQMTYYKTLIESNPNWVNAGIYADEGITGTAAEKRPDFMRMITDAMQGRIDVILVKSLSRFARNTVDTLNYVRALKEKKVYVRFEEEHIDTATEQGELLITVLSSVAQQEVQNTSEHVKKGLSMMMSKGDLVGFNSCLGYNYDEKTKKITINEKEAEIIRYIFKRYLEGIGTTVLARELGQHGWKTKYGSAHWCDSTILGILKNEKYKGDLLQGKTFTVDPITKKRLDNRGESDKFYLTNHHEPIVSVDEWERANAMLQKRSYVRRLNPDGTRSRFSRTYPFSSLLECGFCGKPLSRRSWRSGKNYEKTIWQCMGYAKDGKHTCPNSKGIPEEEIGNAFVDAYNRVVGSDSTFLEDFIQKSEDYLRRSNLKTLFGQNERKLKDCQTRMDQIAGLLVDGQLSQEAYDRKFKEISIEKGKLQKEKEELDYKGDTEANAIKNLEAFRKAAVEHNGKKMDSFMPEIFDACVEKIIVGGKDDAGNPDPYMMTFVFKKGFGPTLQSEKGDLQGKSHTPILTFDHFWRHVTFVPMGDAERQKVQKDFIRIVVAVDFS

SEQ ID NO: 2899 - protein, 541 aa, unidentified
  source 1..541: note = uncultivated organism
MTQRLRCAIYTRKSSEEGLEQDFNSLHAQREACEAYVLSQTGEGWSALPNVYDDGGFSGGSIERPALKRLLADIDQGKIDVVVVYKVDRLTRSLADFAKIVEAFDARGVSFVSVTQAFNTTSSMGRLTLNVLLSFAQFEREVTAERIRDKIAASKAKGMWMGGTPPLGYDVQERKLKINPVEAGVIRQVFERYLASGSAKDVVRELKDAGIGSKAWTTQAGRAMGGYVIGRGGVYHLLQNRLYIGEIVHKGTAFPGLHEPIIDRETFEAANALLSHKAARRRDQPTKVGTAPLKGLLFDAAGKPMTPSFCYGRKGRLYRYYIAPKRDDPEQIARLSAPLVEAWLSQVTCRLLGLANVPVEDLKAHIRRVEVRSDAVHLILHGQAFEDRRADLALIEIGRRLAPGEHAVEEPSSTFGLRIILPQRLVLRGGRCTLKGATIELKPAAKLALAKLLKRGHAELLHRKSSPFTPPGEQKQASAPITQHERNICRLAFMDPQLQRQILQGDTPYRVRPKAVITNPMPLAWADQRKWLEDLAETDPC

SEQ ID NO: 2900 - protein, 511 aa, unidentified
  source 1..511: note = uncultivated organism
MAQVQVIKPYQPQSDALEKVAAYCRVSTDSSDQLNSYRTQIGYYTNFIAQHPGWELADIYADEGITGTSLEKRDEFKRMLQDCRAGKISRILVKSVSRFARNTLELLETTRELKDLGVVVVFEEQGIDTAQMLGEMQLTLLAMAAQEESTSISKNMKWSIQKRMDAGTYLGNTAPYGYRLEKGQLKIEETEAAVVRRIFERRLSGMGQVAITQELNRQGIQPRDGKPWTVYRVRYILSNERYIGDSLFQKKYIADPLSHKSVRNHGERDQYYIHNTHEGIISRETFQKVQESFQSRTSPQKKKPHLFVHRIQCPQCGCHYRYIRSSGKSYWGHASQSDIEPPCKDIRLSEESIKAAFVNLVGKLYTYGDSLLSPTLSLLEEIAARQEQGNAKLVELDAALADLNEKAHTLQRLHNKGFIEDADFREQSDALASHRRKLSDQRTQAIHGSKALETLDKLRDLQRQLESLPEIPWEFDMDLFDQLVEKIVPISNTELLFKLKCGLELKEVLPK

SEQ ID NO: 2901 - protein, 543 aa, unidentified
  source 1..543: note = uncultivated organism
MQETTKIWNATLYLRLSRDDGDKEESNSITGQRELLRDFLANHSDIREYTIRVDDGWSGSTFERPGFQKMMEDVKAGRTNCIVVKDLSRFGRNYLDAGEYIEKIFPFLGVRFIAVNDNYDSLGGKKSSDDLIIPFKNLINEAYCRDISVKIRTQLEIKRKKGQYLGSFATYGYLKDEQDKNKLVVDEFAADIVRDMFQWKLEGVSPQDIANTLNRLGVLSPMEYKRSLGMKFTTPFKTNPKAVWSAATVIRILKNPVYTGVLIQGKATTPSYKVHKRVTKAESEWCVIENNHEAIVSQMLFDNVQKVLRLDTRRSPEDEAVTLFSGMVFCGDCGASMVRKTVPAGGRKYVYYVCSANKQDKTACSPHRIRDNALEEIVLDSLKVHIQDVIDMSDLLAMTDTAPLRTAEAQKIQRQLDKKREEYETLQKLLMSLYENLVGGILDREEYIRLKESFSSRASEAEKQMDALRDTLTNIREHGTENAWMEEFKRHRGITALDRSIVVSLIEKILVHEDDTIEIIYRWQDEFAWQLDVLRRAQIREAV

SEQ ID NO: 2902 - protein, 521 aa, unidentified
  source 1..521: note = uncultivated organism
MASITMIPAKKRVGTRVVQNEVPKTRVAAYCRVSTDTDEQATSYEAQVEHYTKYIKQNPAWESAGIYADDGISGTNTKNRVEFNRLIDDCMAGKIDMVVTKSISRFARNTLDCLKYIRQLKDKNIAVYFEKESINTLDAKGEVMLTIMASLAQQESESLSQNVKLGLQYRYQQGKVQVCTTRFLGYDKDENGKLIINKEEAEVVKRIFREYLEGYSYNIISKGLEADGIKTAAGKTKWVATTLRKILRNEKYIGDALLQKTVTTDFLTKKRVENKGLVPQYYIENNHEPIIPRDLFLRVQEEMARRASLETNVMRRRQYSGKYALTNIVYCAHCGEVFQRAPWNIRGNRRTVWRCISRLKKKRSKIDCPARTVNETDLHAAVLKAINEVYAKQDNFLPQLKANIAKVLGISNLKAVAEIDEKINEKQQEIIRLTKARQNCDALGDEVIRLREEKYRLQIDDANREGARIRFAEMESFLSGQGSEVQEYDDALVRRLVETITVYDDRFKVKFKSGIEIEIAA

SEQ ID NO: 2903 - protein, 563 aa, unidentified
  source 1..563: note = uncultivated organism
MRDRGQPQRVRELRCAVYTRKSSEEGLEQDFNSLHAQREACEAYVKSQVHEGWRVIPTAYDDGGYSGGSMERPGLTRLLADVASGLVDVVVVYKVDRLTRSLTDFARIVEVFDQRGVSFVSVTQSFNTTSSMGRLTLNVLLSFAQFEREVTGERIRDKIAASKKKGLWMGGCVPLGYEADGRTLKVNEGEAETVRTIYRLYLELGSVDFLREALERQGVRTKVRTGQEGSRGGGIFSRGHLYRVLQNPLYIGRISHKGQVYDGQHAAIIDVDTWERVQATLSERGREHRVRGKARQPSLLANLLFDEEGVRLTCTHAVKDGKRYRYYVRAAREGEGRGRAWRLPAHELESVVLDQLRERLADQHWISTVLSPWQPTPGELHEAFGRAGDHLSILQGPTAGLRESLLTMVRGIEVSAQEVRIEMRASALLARAGEGERAGEEQSLEIVAPAALRRSGNESRMIVPGVPRGSSADPALVKAIARGHTWFEELATGRAATVAEIAAREEVSDRYVSCLLRLAFLPPAAVERLINCQVATGISTKHLTLDLDLPLDWVRQEALLRLH

SEQ ID NO: 2904 - protein, 511 aa, unidentified
  source 1..511: note = uncultivated organism
MIAIYARQSVDKKDSISIQTQIDTCRDQIGSTGFCGQPVREYADKGYSGKNTDRPQFQAMMQDICKGAVSVVVVYRLDRCSRSVVDFANFIQTLKKHGTDFISCSEKFDTSSPMGRAMMDISMVFAQMERETIQQRVTDAYRDRSRQGFYMGGPAPYGYAAEEIILNGIHTKRFVENPAESEHIRMMYQMYADPKYSLGDIVKYFSEYGIQHARGKHWSTSRISDTLKNPVYVRANADVYRYFASHGTEIASPPEQFNGVNGCYLFQPRDDNNSRKRTSRFDDKYLVLAPHEGIIPADLWLQCRKRCAENRQSTRTNKPTRSWLLGKVKCGNCGSRLDVARSQTKRGRYFMCGLMRDTKKASCQGTGSTLYADVLEEQLSARIKEKLSMFKGIQPHMNPDETNALEINTLKNQINQLEKKQNDWIQRIPLATDAVMLAINENVSRIQQRLTELQGQLAKLTQSADAQIIAALSNFADCWDALSFADKQAVVDALIEIIYVKNGEITVKWKI

SEQ ID NO: 2905 - protein, 565 aa, unidentified
  source 1..565: note = uncultivated organism
MNPARSPNRCAIYTRKSSEEGLEQSFNSLHAQREACEAYVLSQRHEGWQLLAAKYDDGGFSGGNMERPGLKKLLDDIASSKIDTVIVYKVDRLTRSLTDFARIVETFDHQGVSFVSVTQQFNTTTSMGRLTLNVLSSFAQFEREVTGERIRDKVAASKRKGMWMGGPVPLGYDLGERVLLVNESEATHVREIFQQYLKLGSVFDLYEHLMRGDIRSKVRLGPAGRASGGAVLSRGTLYHLLGNPLYMGKIAHKGVIYPGLHQAIVDEKIWQKAADLLKENRVRRTKSRNLPSERLLLGLLFDQDGNRFTPSHASKKGRRYCYYISRAAVERKRSKGIQRIPALEIEQVVATRVRSLLSNQVELSQWFGSLAVRETRLLIAAGQHRAELLSDLASPGARLIIRGLLKRVVVSESEAHIELDQDALKVELLGEGSVSPGPNSESGCPRLSCPFTIARRGQQVHIVISAGDLNQSKPIASLMKAVARSRDWAEMIISGKARTLDDLVKASGLTRAYVRRILPCAVLSPQLLDAILSGRHPVDLTVVRLTNHLTLDWSGQSLGTTMEQP

SEQ ID NO: 2906 - protein, 530 aa, unidentified
  source 1..530: note = uncultivated organism
MFRDQPIRAERVAVYIRWSTDDQSEGTTLDVQRDACRHFILSQGWEFRADLLFVDDGYTGANTARPGLERLRHLCRQGDVDCVVVYKLDRLSRSVVDTVKLVMEEWEGGVCLKSAREPIDTSTPMGKQIFYLLVSYAEWERNVIKERTLSGKWKRAQEGKCPGFPAPYGYRNAGTGVFAVDPAEAPVVKRIFDAAAGDRSAKTIAADLNRDGVPARKGQGWSNATVCRLLRNPSYMGVLEYGRTSVTGRGAGGSRRVTHAEAPVKVPGVFPVLVDAATFATVQAALTARQPSRVAPRSLASDALLTGLAVCGRCGQAIVSHRRWGGKYRYYRCSAQFTKGDAYCPCGFIPQQVADAEVRRRVLALDAGQERLEQHRTLCLRAGRLELERLTASLGQARVRLDEAGRREARVQRSFMTGEIDARRFNELMALVEAERREATATVGKLEAGLAAQAATWADQAARQAHQEDKPDIGETAARWDDLAPAERKSILRALLARVLLFRDRETGAVTLELQWRADQQIPAPEGENV

SEQ ID NO: 2907 - protein, 511 aa, unidentified
  source 1..511: note = uncultivated organism
MTTQSPDNRRAGIWIRVSTDEQAQGDSPETHLRRARMYCELHGWQAVEVYDLSGVSGKTVIDHPEAQRMLSDLAAGRITGLIFSRLARLARNTRELLDIADRFKATGAALISISENLDTSTPAGQLMYTLFGALAEWERAEISARVAASVPIRAAAGKPTGGIGPWGYKWESTPAGKRLVIDTDAADNIRKVFAVAIEERGNVRRAAARLNAMGMRTRKGAMFCNTGLKRLLDDPVYVGRKRANYAKSTGDGKHWTPKPENEWVFHEVPPIIPQEQWDQLRVLRVARQAGCNMSAPPKESRYLFGSVLWCQCGAKMYMYHAMKNSGDVIYRCRKCGRKAHESALSAMMQEALEAVVIRPAALVPVDALDGARPDDLRAQGLALIEEAEKLKRKKAALFDLATLDPLVKHELVTQLRELVARIESLQAEALRLGEQADRAELTRAGYGPLLEQAATLSTLWPELIYDEQRRVVNRLFERVEVCDQETVFTAYWLPALCKGLHTVRDSSPPPT

SEQ ID NO: 2908 - protein, 504 aa, unidentified
  source 1..504: note = uncultivated organism
MRRKAEIQEAVRCAIYTRKSTDEGLDQDFNSLDAQREAGEAFILSRKHEGWVCLKDRYDDGGFSGGDIKRPALKRLLADMEAGRIDAIVCYKVDRLSRSLLDFSQLIEVFDRCSVTFVSVTQPINTGDSSGRLMLNVLLSFAQFEREMIADRTRDKIAAARKKGKWTGGLPVLGYDIHPNGGLLVVNEAEAETVRQIFTLYQERGSLMETAAELNRRGWRTKSWVTRKGVLNEGSEFNKGILSRLLTNPLYVGKTRLYGNVYDGEQPGIVDQRLFDQVETQLTGNRHQGGAHVKNRYGHILRGLLYCTACGAAMSPSATRRKGKAFRYYVCGNAARTGWSNCPCPSLPAKEIEDAVVERIKCVGQDPDLVAATMAELRTTKKKRHPALVAERRRLEREVARLHDGGQDADAAHAVSIEARLAEIAEELMVLESKNIDKREVAQALAMFDEVWTCLLPREQQRILSLLIERIDFDATKESLAITFQSTGIKTLSNEIAEAQEVAV

SEQ ID NO: 2909 - protein, 549 aa, unidentified
  source 1..549: note = uncultivated organism
MALPKKLYRAVGYARLSKDDYDRKEKRGQYKNESDSISNQRKLIREYVAKHDDIILVREEHDDGYTGTNFDRPGFRAVLNAIQDGKVDCVIVKDLSRLGREYIETGKYLEMVFPDKGIRFIAINDDVDSEHHSQSDDLLIPVKNLINETYCRELSRKLRSQFELQRRNGEFLGAFAAYGYRKSPDDKHTLVIDDYAAQVVRDIFALKMQGYSQQGIADALNKMGVLSPLEYKKQSGLNFKTGFRKAGKSLWSAVTIRRILTNTLYIGELVQGKRGTPNYKIKVMKERKRDDWVVVEHAHEPIVDELMFSVVQQILRRDTRTSPDGETVRPFSGFVFCGECQRPMRRRTVTRNGKKFHYFICERHVGERTSGTHNFSEKKLEAAVLHAIQAHIRTVIEVDSLIQEVSQDNLLAVKLKQFDAMIEEKERQINRIENLRVRLYEALSDKLIEREEYQAMRERYSAQLDAVNGEKRELLDRRIQMEEGNTPRRAWVEQFARYQNIQSLSREVVASLIDKIYIFGDQHIHIDFNFRDEMADAYGLLEAVRKEAV

SEQ ID NO: 2910 - protein, 523 aa, unidentified
  source 1..523: note = uncultivated organism
MPKVAIYCRLSIEDKNKPASDNSQSIVNQKSMLRDYCRERDWEIYDIYCDDGYSGIDRSRPEFNRLLYDCEKGNVDIVLCKDQSRFSRDTIVIEQYINDKFLEWGIRFIGVADNADSDSESYSTMRLFTSAYNEMYVKDISSKIRRTLAYKRVQGQFIGSFAPYGYKIDPDNKHHLIIDEETAPVVKLIFNMYADGEGYRKIVQKLNDDGIASPTEYKKQTGSRYVNFNAQASNSKGLWTQSTIARMLANEMYTGTLVQGKSHHISYKNKKRKKVDKDDWIRIADAHEAIINPDIWSRTQERLNSHTRVGKRSQELSPLSGKVKCAVCGRPMKRNVYYNKYKTKKYYGLQCATYKTGAMNCQNKSSISGLVLEQKILDELNTIVENYCQSEDICLADIHTEQLKTLEKKLSPLNNQYNSAKERLVKMYKDKLDGIISDEDYSLFRQSLYDEEQQLSELIAEVKQKISECHKRQENAAEQKLLIEKYTRFDKLDCTIADEFIDYIEIGTKDENGSREIHIHWKI

SEQ ID NO: 2911 - protein, 523 aa, unidentified
  source 1..523: note = uncultivated organism
MSNVTIIPARKKTNLNNPIPIADVRKVAGYARVSTDHDEQLTSYEAQVDYYTNYINKHDDWEFAGIYTDEGITATSTKRRKGFNQMVEDALAGKIDLIITKSVSRFARNTVDSLTTIRKLKEHGIEIYFEKENIWTLDSKGELLITLMSSMAQEESRNISENVKWGHRKRYADGKVSVSYGQFLGYEKGEDGKMVVNPEQAKVVKYIYGWFLEGMSYHAIANKLTEMGIPTPGGKTQWRQAVVKSILMNEKYKGDALLQKSYIVDFLTRKSKKNEGEIPQYYVENDHEAIITPEQFQEVQDEIARRDAKGPSYSGAGLFASKIVCGECGSWYGSKVWHSNDRYRRVVYRCNHKYENGKKCSTPHVTEDEIKDGFVKAVNTLLDDRTEVLENAKLIKATVDVTDRLGQERDEALQEMEIVAGLIEKCIGENSRKAQDQKAYEKRYQKLADRYEKAREKSETLTVQLAETQRRLREIDRFLKGLEDAYIIESFDETMWRTLIQQVTVYAKDDIRYIFKDGQEIRL

SEQ ID NO: 2912 - protein, 509 aa, unidentified
  source 1..509: note = uncultivated organism
MLGAARLSKDADESTSIERQGSGINGWADLRSNTTGDDYRVIHITEDSDVSGSVSPFDRAGLGPYLREPLLSTWQTLVVFRLDRLTRSIADFEAIWKFLEANRKTLVSVAEQIDFDTTAGRLMARQLVIFAEYEREMIRARVKNAYDAARAAGKYPGMQFPFGYIPVKLSGKGWGLEPHPDHGPIVAQIADKVIAGESLSSICRWLDAEGIPTPRNAVREYKGKKALQEDAKWNPTSLTAILKSPAVIGGSVVNDEYGSGEKAMRADSGIAIKRAEPLISRETWEKVKEILAQNAARTGPNVRRAPLLQVALCANCKTPFNMTSASWNGKQYRYYRCPNERLKRGCNAKRIPADELESTAENMMLETYGTFPLTEVVEIAGVDYSTQMHELAEAIGALSTKIALARVGGEDVSGLEEQQGIHEQNLAALADQKVRLPVRNERPTGRTFADRWHSLDWNGRNDLLRQNNIKIYAAKQADGDLSVVSGPDLETFTGGEYFKALHDLTIVHV

SEQ ID NO: 2913 - protein, 566 aa, unidentified
  source 1..566: note = uncultivated organism
MSLKSHVKRQGPHKAFIYLRLSVDKENGNAQSIEAQRHAIQAFAASRDIEIVGEFVDSGMSGQTDRRPGFQQMLAQATSDARPVDLILMYAISRIARNISLFLQTLETLAEAGVEVISTTENFGTGKGQRLANIVTALIAEEQARDAAVLTRKSRRENARQGFFNGGPVAFGYRTYVARQDGEKSRMRLEVVPEEADVIRRIFDWADQGRGGRWIVTTLNSEGATMRGAKFSNSNVAAILTRETYIGQYRDRTADDDGNRPEIEDAIIVPCPAIIEREQFERVAATRIARSPRNTAPHVAAGTTLLTGIARCGMSDCGSGLTIRTGKGGRYAYYSCNARVNRGEKCACPNIRREQLDGIVLELVEKKILAKDRLRQLLAEVLDLSDQQRERRAAELAAARSEQTRAEKAISQLLILVEEGVMAPRDPQFAERMAANRAKLAAVTSRIQTLEVQLAHGRRRITEAHVDRFGALLSEKLRDEDPALRSAYLRMFVSEVSVSEHKIVVSGPMAALERGATAAALRPKAVVPTFDRKWCPRPDSNQHALRRSILSRMRLPFRHWGTRGEP

SEQ ID NO: 2914 - protein, 592 aa, unidentified
  source 1..592: note = uncultivated organism
MGILDKIRSKKHIVRAAVYARFSSDNQRDESIDAQLRAIKDYAKKNDIIIVAEYIDRAKSAMTDNRPEFLRMIQDSKEGQFDVVLVHKLDRFARNRQDSIGYRMELKRHGVSLVSVLEYLDEESPESIILESVLEAMAEYYSKNLSREVRKGMNENAIKGLHTGGLPPLGYDVDPETKKLVINEKEADAVRLIFKMFNEGNGYIKIIKELNRQGYKTKTGRSFGKNSLHNIIRNEKYIGVYVFNKLVSKDMDGKRNGNAYKPDDEIIRIEGAVLPIITKEEFEMAKRKIERRKGVRACNRAKEIYLLSGKIFCGECGHVYAGNKKMTGRNKKLHVTYRCTGRQMKHICPNKEIRREYIEAFVLDMLAQYVFDEKIIPKIAAEYKKYQVNKNADIVRTRDNLSKRLNELKKEINNLVGLVTKTGSAALAEKLTEIENEKIEVECRYNQICDECDVKEVSVEQLKESFQKARKLLENGQLSTTKKLIELYVDRVLIFESRVEVFFNFHPDLTLPELPALAANFNKKEERGDDSKSIGSINESKASDGDIADINRNGGTDCVCVRGDTPLASTKMLSQYRCKSILTSNHAGLRGF

SEQ ID NO: 2915 - protein, 514 aa, unidentified
  source 1..514: note = uncultivated organism
MIRAAVYCRLSDEDRNKKSRMDESESIQNQKSLLLTYCREQNWEVAGVYCDEDMSGADRDRPQFNQMILDCEKGYIDIVLCKTQSRFSRDIEVVEHYIHNRFREWGVRFIGLLDHADTEDFANKKSRQINGLVNEWYLEDLSENIKKTLRHKKENGIFTGAFAPYGYKLNKDVKGKLFVEEPAAETVREIYRMYAGGHGYVKIAQELNRQGIPCPSEYKRLCGSKFQTHGGKPTSKIWTESVIREILTNEVYVGNLVQGKTATISYKNKKRKRVNEQDFIRTKNAHEPVVDMNLWNEVNKKIGSHRRMQKAEGKRHVFAGRIFCAVCGSSMWKMSYQLKNGRYEYLKCKATKCGVSVCTNTNSIRFDAVFEAVEMEVKKLFLNNYNPAKINKNSLIYNDKKTEMKEETLIKENILKQNLNIKQLYKDKLDGIIDNKVFCDIYGDIKADIVALEKRLSVLEQKKDKTEDFNFQEYIDSFPRTITLDEFAVSKLIDKVFIGEPENGSRKITICWNF

SEQ ID NO: 2916 - protein, 548 aa, unidentified
  source 1..548: note = uncultivated organism
MERATVLWLEETLPMKRIRCAIYTRKSSDEGLEQDFNSLDAQREACEAYIASQRHEGWVPMPDHYDDGGISGGHLERPALQRLMAEVDAKQVDQIVVYKIDRLTRSLADFAKLVDRLDAAEASFVSVTQSFNTATSMGRLTLNVLLSFAQFEREVTAERIRDKIAASKRKGLWMGGNVPLGYEPDGRTLRINPDEAEIIRKVYNLYDDWGAMNMVREAAARLDLRSKSRHAPDGCLRGGNLMSRGQLHHILTNPIYAGRIRHKGQVFEGKHPAIIDPALWDALQERMSGGAAKVRRSKQHLNPSPLAGKIVDETGERLTPSHTKKGDKRYRYYISQNLVTGVTRADEKQRTWRIPAGQLEGAIANAVQKRIKQLSEVANVQQFPGTETPVPDAKEALNIVERVRIAPGQLTVDLNAISLHKLIRSELNCDPDDLAVSLPFTERRRGVEMKLVVGNGAVGVDEKLLANIIRANQWYQRLKEGQSFEAIAVEVGTSKRRVQQLIDLAFLAPDIVRDITNGTQRMGLTSDWCLRHDLAADWQAQRQRIATL

SEQ ID NO: 2917 - protein, 572 aa, unidentified
  source 1..572: note = uncultivated organism
MKKIRCAIYTRKSSEEGLDQEFNSLHAQREACAAYIASQKHEGWVALPEHYDDGGISGGTLERAGLKRLLQHVDEGMVDQIVVYKIDRLTRSLADFAKLVDRLDAADASFVSVTQSFNTATSMGRLTLNVLLSFAQFEREVTAERIRDKIAASKKKGLWMGGAIPLGYEPDGRTLKIVPEEAETVRTLYDLYLEHRSILAVVDHAKRLGLRSKAKVRKRKESDKQVKELRAPDSIPSSGPDACGVPFERAALHYLLTNPVYAGRIRHKKTIHEGQHPAIIGRDVWDQVQEHLKESAARKRGEGKGGAIISPLASKLVDEVGDMLTPSHANKKGKRYRYYVSNRLLNIAGKNDSDTKVGGWRLPAKALEDQIANATLSHLRNRLPVDLLVNPAADAISKIGSNLDLLDALSRTKGPSRILNCFEQGTIRPGAVEIGLNPEAIADAFEISEDELKPEALMFTLPFQFRKRGVETKLKIGTDHAKPIDITLIRSIAKAHQYYDAIKNGQTFEEIAESENLSKRRIMQVIDLAFLAPHILKLIVQGDQPLGLTAKWIGINPMPSDWQAQRRIVAAL

SEQ ID NO: 2918 - protein, 523 aa, unidentified
  source 1..523: note = uncultivated organism
MTTTKPTAAPTRVRCAIYTRKSTEEGLEQEFNSLDAQRESGEAFILSQKSAGWELVPDHYDDGGFSGGSMDRPALARLMADIAAGRVDAVVVYKVDRLSRSLLDFAKMMEVFEKHRISFVSVTQQFNTASSMGRLILNVLLSFAQFEREMIAERTRDKMGAARRKGKWVGGMPGLGYDVVGGKLVVNEAEAALVREIFELYLKEQSLLRVTEILNGRGARLKSWRTKKGTPHGGGLWTKGTVRRLLASPTYIGKVEYRGEVYPGEHKAIVDAGVFKKVQDRLAAARADSKGSSSNRHGFLLRGLIRCTRCNSVMTSVCSRKGRKVYRYYACNAVHHRGTSACDVRSVPAEAFEKFVVDKVRGMAKSREVLERLPAQLEAQRLKDVPALTAEKHLLAQDLERCRAEAKALLATLAGQTGGDGRFVGERLGELEEQAKQIEVRLAEIAERLHSLERSPAGQEEVAELVKLFDSVWDHLTPLEQARIIHLLIEGIAYDGVVGDLEMALAPAGVALLDAPKNTKEAA

SEQ ID NO: 2919 - protein, 512 aa, unidentified
  source 1..512: note = uncultivated organism
MKKAAAYARFSSENQTDDSIEAQLRAIIEYAEKNGYEIVEKYIDRARSAKSDDRPEFQRMIRDAKSKKFDAVIIHKIDRFARNIKDAAWYKAELNQYGVDLLSVSEDLTGASGDLIFNIMASVADWYLKNLKNEINTKVRITAEKAYFLGGIPPYGYDVEETYEEISFGERVKKIPRKQYVINEKEAEVVKLMFELAAKGYSSIKIEKYLNKNGYTNRKGNKWSYSTIYDILRNPKYKGTYVWARGNHRTSHIKRDDAVVVKNAIPAIISEELWNKAHAEMKKKRKMRKSKHKYLLKGLIYCGVCGAHMTPYGGTYPRYVCSEWQKAKNNREKGDHFTSISKQKVENFVIDFLLNDVFGGLNTNELLQRIKAMMQLKEQKHKDEIFEERKRMNSLKEKKKRLEESFIDAVENGVNPESIKNRIKKLDDEIKALRLKIKRYNEDVVEIDDETIKNMIDTAISILNSDDQVLLEDFLHQVIDKIEIRPSGRSNKNYVAIKLRGLSKYISKLQNI

SEQ ID NO: 2920 - protein, 565 aa, unidentified
  source 1..565: note = uncultivated organism
MKHRIAPAASASVLPKRVAIYARVSTVKQAEADLSIPDQIAQAKSWCERLGHELVRDYVEPGASGTDESRPVFQQMLSDARSQPRPFDIIVVHSFSRFARDNLAYAIAKRTLNKAGITVQSITQPLADDPTGQMVESILVAFDAYTSKEIGKHTARAMKENARQGFWNGSRPPLGYDVIGAEQRGQKLKKRLEINDAEAAIVRRIFGLYMGAEGVQLGVKAIVTKLNAAGESFRGKPFMISSIHRILTNETYTGQHWFNIQDSRTGAIRPREEWIGIEVPAIIPRGIWEGVQEQLRERAPRKTPGRLVSSPTLLTGIAVCAQCGAGMTLRTGKGYRYYTCAGRAQKGPTRCGGCAVSMPKVDQTVIETLSDRIFAPDRLTDLVSGYLEKAKAEAQQQRSQLGQIKADLTETDGAIKRLLGMVEAGLMEVDDPALRERLSALKTKRKALTAQLEQASDLQPTNRPHLTEAKLHRLSETIRAALHTAPPEMRKAYIKLFVDKVLVSKEVVELTGPKSLLARAALTDLPNTPAEVITYVREWRGSGEINAGNSPPDRRIRASAKCWKL

SEQ ID NO: 2921 - protein, 522 aa, unidentified
  source 1..522: note = uncultivated organism
MAQIKNVAQGAYVTIIDANDAPKAKLRVAAYARVSSDSADQLNSYLAQVDYYTRFISSREDWELVDVYADEGLTGMETRKRDDFNRMIADCREGKIDRILVKSVSRFARNQEDYIYYMRELLRLGVTISFEKENLDTGKMNSEQVADIYGAFAQIETTGHSANMRISNRIRMEKGIFVPAKAPYGYRLIQNNLVIVPEEAEVVRRIYQMFLSGQGIFDIANELNQEGVQHTNGTGKWYQYAINYILTNVTYTGDQIWQKTFATDVIPFRKVRNRGQKPKYFAEDCGPAIIDKQEFKAVQELILKKREKWNLHPPLETLYRDRLYCAGCGALCRRKACNGKTYWVCRRHDSGKANCPLRQIEEQQITKTLCSFYHKIWMGRDTVLRPMLSQLEELRERELRFNQKVGDIDKEIAKLAEQNLVLERLKSKGYVDPALYLSEQDAINGKVKDLRKLRRSLMESTVEDEQFRKTEAMLEYLEDSPEWADTLDGELFDQLIERIRLSDDALHIVLHNGLELTERMAS

SEQ ID NO: 2922 - protein, 532 aa, unidentified
  source 1..532: note = uncultivated organism
MIEKVGVYCRLSDEDRDKLNKNDDSNSIVNQRSMCLKFANQNGWNVVDIYSDDDFSGAGTYRPDFERLISDCKSGKINLVLCKSQSRFSRDMEVIERYLHNKFIEWGVRFVSIVDNADTNIESNKKSRQINGLINEWYLDDLSQNIKKSLKNKREDGLFMGSFAPYGYERNEDGHKLIVDPVAAEVVKKIFELYANGYGYYKICEYLNNNNIPTRAIYKKQKGSKFVCSNCDLKNPRWTSDTIAQILKNEVYIGNLVQGKITSMGYKVHKFKKVNEEDWCRIENTHEAIIDDETWNKVQKRLKSHSKPIKTGEVHFFTKKVYCSCCGKPFMRNVYNVKNESTGKRAYMQCKGNKKYHICENNKSIRMDKLEEIIQNAINDLLDNYYDKNNLKELYENRKMQDTNNNERINILEKEKTNLEKKIDDNKCYYRNLYEDKVKGTINDDMFSMMSKDYLKEIEIMTKRINNIDDEIKSLEVVKETRKQAEDILKKYKHIKELNKIIIDEFIDKIYIGEIDKETNSRDIEIEWNFEF

SEQ ID NO: 2923 - protein, 560 aa, unidentified
  source 1..560: note = uncultivated organism
MGKPGDMMKGAVHMGKEVQYNAAVYLRLSKEDGDVAEGSKLVSNSIANQEELVRDYLKSHDDIRVHSIYKDDGYSGVNFDRPQFQRMLSDIKAGSVNCVIVKDLSRFGRNYIESGRYIEKIFPMLGVRFIAVTDHFDSLEDNAGNEMIIPFKNLINDAYCRDISVKVRSHLDMKRKNGEYIGAFVAYGYQKDPQDKNRLIVDDYAAGVVRDIFDMKQKGMSQHAIAKKLNADGILSPLEYMRSRGINLDTPFRRRAKTKWSHSAVLRILQNEMYVGTLIQGKTGTPNYKIKKRTAKPEESWVRIEDAHEAIIPVKDFELVQELLLRDTRIPPEGDRLYPFSGTIFCADCGSPMTRKIVSSGGRKYVYYICSGNKRDKAYCSAHRISETALETVVLQAVTEHISRVLFLEEAMNVLENMPRTLANVKKYEERILAKSEEMERVKKRKLRLYEDLKDGILSRDEYEMLRAQYSDQIEDSEKVIENYEEERQKAIDNRTEQHSWIEDFKLRKGISRLSRNDVIHMIDRIEVADAKHITVHFRFIEEYEALAKSVEEMAEKEAI

SEQ ID NO: 2924 - protein, 564 aa, unidentified
  source 1..564: note = uncultivated organism
MTQRRRCAIYTRKSTEEGLEQDFNSLHAQREACEAYIRSQRHEGWQLIEEAYDDGGYSGGTMDRPALARLLEAAKAGKVDIIVVYKVDRLTRSLMDFARMVELFDGNGVSFVSVTQQFNTTTSIGRLTLNVLLSFAQFEREVTGERIRDKVAASKKKGLWMGGLVPLGYDLKDRALIINESEAEAVRTLFRLYLELGTVRRLKEEADRVGLKTKRRPQPSGTVLGGIAFTRGHLYQLLSNPLYAGEVRHKGATYPGQHKGIVDQQTFAAVQQHLAENAVERNSQTNAKAPSLLTGLVYDETGDLLCPTHSNKKGRRYRYYISKRLMHPSGPKTGGWRLPARELEAIVFRGLADFLKDDVRLGDTLQMKDASPDRLHQLKRLAEALAGDLVEGPPQRRRGLVTRLLHRLVLRATAISVEVKLAGLAELLDPRKSCVAAGGDSVLELPIRIELRRRGVEAKLVVHSATATPGAPDARLISLLADARLYVDDLAQGRATSLRDLARQYDCDLSDLCRILPLAFLAPDIIEATLEGRQPIELARRQLLRSGPLPIGWDEQRRRLGCKA

SEQ ID NO: 2925 - protein, 504 aa, unidentified
  source 1..504: note = uncultivated organism
MKKAAIYTRYSTEHQTENSTQTQIEACSVFCNKNDFEVVAIFSDEETTGTNTDRPEFVRLLDAAKKHLFDIVVIYDITRGSRDVIDWFVFRKQMHAFGVEVMSVHDNIGNILDPSNFLTELITVGIGQHQVLQSRQKSIDGSYTKAKQGLFMGGNAPLGYDIVERQYKINKSESKAVELIFNMLAKDYSPSNVVEALKINGYKSKNGNDIKLPAIYDIVRNKRYTGTFEWAKKQNREMHKFVGRTNPDSKVVRIENIIPAIVTKEVFDKANAKLGTKLRKQGSKEHHDYILSGLIVCPKCGAIFHGLTNKSGKGIVTMSYVCPNKAEKKCNAQNISAILLETEVQRAVKKWLLNLDLNSIVEKFIKGRDLNSDYIQTKKELKKVNNEIDNILSAIKKGLVFDEMKNDIEMLKKQQITLNDNISRFENNQNTQTFKNKMQKLILTAKTKAQGKELAEVVRMYCKKITPTSAQNFELQMGVVGEQWLPKSVSNYTYDNLIIKLKKR

SEQ ID NO: 2926 - protein, 526 aa, unidentified
  source 1..526: note = uncultivated organism
MNIQNIQGTDALTPQREIIRIKSTADESAARLRVAGYARVSSDSADQLNSFSAQVSYYQRLIEKNSTWALAEIYADEAVSGVSTEKRDDFARMLSDCKKGRIDRIITKSTSRFARNTLDAIRVIRELKEMGVTVYFEKENLDTASLTSENLLTLYSLFAQEESMSISKNCKKGNRMRMERGTYVSSNPPYGYRLVNRQLEIYEPEAEVVRRIFAEYLAGNSTLRIAEGLTADNVPFKNGRTKWRYQSISIILKNERYSGDMLFQKTFSEDALPYRKRRNKGELPKYYVKHAHEPIVERIQFELANILLKERGEHVRGECGEYPLSRKIQCRECGTAYCRKITNQIPYWVCRKHNEGKEDCGSRRITEEAVHQAFARLYNKLKKNYSTILLPMLSQLEWLQELQTRNNPEISTINNQIAALSEQNHVMNGLLSKGILDSALFISQTDELNRKLRALKVAKARILEEQESDGLLEKTEDLVELLENGPDRIRGMEEALFGEMVESIIAHDTQTVDFILMNGLVLTERL

SEQ ID NO: 2927 - protein, 557 aa, unidentified
  source 1..557: note = uncultivated organism
MRLRCAIYTRKSSEEGLEQTFNSLDAQREACDAFVASQKHEGWTILREMYDDGGYSGGTIERPAFQRLLTDVGEGKIDVVVVYKVDRLTRSLSDFAKIVEIFDKRNVSFVSVTQQFNTTTSMGRLTLNILLSFAQFEREVTGERIRDKIAASKKKGMWMGGLPSLGYDIKDKRLVINEVEAKTVQHIFRRYTELKSVRLLKADLDARRIVSKPRNASDGTRYGEKPLARGALYLMLQNRIYRGETVHKDKSYPGEHEAIVDEALWSEVQSILTENRADRMLGTAEKQISLLTSILFDARGERMSPTHATKNNNRYRYYVSRPLLAGAAKDSGQRIPASSLEALVIGRIQNWLGDRAAMLDIIQSHTSDAVTQKRLMIGLEQCLATWAELKADDVREFMLSIVARIQVHADRIDIFLNPISLARWFGRTDSQAEPIAATRHDTEGFATLSIPARLKRVGKEMKILIEDGSNPASPDASLVRVLIRAHMIRDRFLADKSLTLDEIAKSVDIVPSYVTRLFRLTLLAPDIVSAILGGKHPPELNARKLLDDTRLPLDWNE

SEQ ID NO: 2928 - protein, 549 aa, unidentified
  source 1..549: note = uncultivated organism
MGSERRILRCAIYTRKSSEHGLEQDFNSLHAQRESAEAYIKSQAHEGWKLVRARYDDGGLSGGTMERPALQRLLADIATSLIDVVVVYKVDRLTRSLTDFAKLVETFEAHGVSFVSVTQQFNTTTSMGRLTLNVLLSFAQFEREVAGERIRDKFAASRRKGMWMGGNVPLGYDVAGRRLVVNEAEAKTVKLIFERYLELGCVRALGTELDRLGIVSKRRVAETGRMIGGGAFSRGALYYLLRNRVYRGEAVHKGVAHPGEHEAIIDEDLWEAVQAKLSGQATKQGRGRAESGALLIGLLFDDRGNRMSPSHTTRKGGRYRYYVSQAVLQGRKKEAGSIARIGADELEGTVVEAIRRAFPDEDRGANGTAVPDVASIEQVPSRYPGGPYDQSARDLVRAHVERIVVHATEVEISLQTRDIASPSLGADGEQVLSVPLERRPRDRKEIIVPGDVGTPPRRLDRSLVLAVARGRAWASALRRGEYADTAEIAGKCDLSEAYVRRILRLAFLAPDIVEAIAEGRQPRGLTLQRLLGPVPFAWAEQRRRFGFSV

SEQ ID NO: 2929 - protein, 551 aa, unidentified
  source 1..551: note = uncultivated organism
MTPPNRLRCAIYTRKSTEEGLEQAFNSLHAQREACEAYVKSQAGEGWVLIRTIYDDGGYSGGSMDRPALQRLLTEIDGGHVDVVVVYKVDRLTRSLTDFARIVERFDKRGVSFVSVTQSFNTTTSMGRLTLNVLLSFAQFEREVAGERIRDKLSASRKKGMWMGGTIPTGYDLHRRKLVPNPEEAETIRQIFRRYVELKSTDQLRRELKAKGVISKIRTTEKGNRLGGNPFSRGSLNHLIRNRVYVGEVFYKDSIYAGQHEGIVDRELFEQAQAVMETNRRVKLHRPSTTQKFPLTAFIFDDRGNAMAPSQSQKGGNRRYRYYVSRALIDKDRGEPGSIPRVPAQAIEDIVLGALDRLLGQANSDQGTSKTADLIRATVRRIEIGASSMVLCLDSGALDVTDHEHTTSDDLAGLRARIGAAGALAWDRDNLVLTIPIRAKFRGGQHHIIAPSSGEVRSFPKPDLTLMRAIVRAHTWLKLLLDGHVLSMEELARHVKHERIYVRRILRLAFLNPDFTSAVLDGRQPEHVSLTDLIETDLPNSWREQAQLTLL

SEQ ID NO: 2930 - protein, 550 aa, unidentified
  source 1..550: note = uncultivated organism
MKVSKRVAIYCRVSTTEQAEEGYSIDEQNVKITEYCNKEGHEIYKLYEDRGISGKNITNRPGIKQLLHDATENKFDLVIVWKLNRISRKLLDILNIVELLDKHNIAFRSLTESFETETPSGKLQLNIMGAIGEFERETIAENVKMGMISRSRQGSWNGGIVLGYDSVELPNEGKKRKNTVLKINENEANTVRKIFQLYSQGHGYKAIVNKINKEGYKTKKGNQFAVSTVKTILQNPIYIGKIRFNVRQDWAKKRRQKINENPILVEGQHEPIIDVETWNKVQVILKERSKKHNKVYDSEQPLTGILKCPACGASMTISRSTTKRADGSKRVIETYSCGNWKNKGTAVCNSNSIRVEKANAYVMNKVSELVNDESILRKVVDNINKNKSTKLKPTLDQIEQVNKEIKKLSIKKDKNLELFEDGILAKSELSTRIKSINDDIEKLKLREQELKQEVDIAEGEPVSYELVRDVMTRFKEVFLSMGTSQQRKQLIHLLISKITMNKEREIDSIEIQINNDVITYLKKDGLPNKKGNPSFLHLFRMNNINLKIAI

SEQ ID NO: 2931 - protein, 588 aa, unidentified
  source 1..588: note = uncultivated organism
MNSKQTVPLRAAVYLRVSTDDQIEKYGIPLQKAAVDAVINSKGKLDDGSPAMVLAGEQYIYKDEGVSGADPLDERPAFLRMKEDIENAPEGEKPFDIVAVYRIDRFARKLKILLEVIEYYEAHDIQFISANESIDTSTPFGKAMLGIIGVIAELERETTKARTQAGKVQAIERGVYMGAQAPYGYLKDKDKHLQVFAPESKVVEEIFELFVSQKKNTQQIADYLASKKILTPLPSAVHYGKRRKGRTKVNDEYFWRDSTVRGIVKDEIYLGIYYYNKHEGKKRLDKSLWKKSPTEHDSIIDYGTFSMAQQRIKEDVALRNSAKAVENHLYLLSGLLKCHACYDPYSGRDPLNWSGTSKVIKKNGKRAYYYHCGAKNSKKYSTVCKAIPFPADEIEAFVTQFIKDLLSDPENVYRHINTLQSTKMDKRKLLKRQVDITKMLNRIPGSRQNIKRMYGKGDITDADYDERMANVKKQEADLRKDLLVIQGQIGEDKISEIYASTFKLFAKKYKPFLDGLMTDRQEVSDLIHLIVDRVNVYTRKATKKDKIAGRKKEDQVIPYQVRIDLRLPQDIMQRLARQGKFEVRNDNL

SEQ ID NO: 2932 - protein, 604 aa, unidentified
  source 1..604: note = uncultivated organism
MTNQKPEDIQKKVAIYLRVSSEDQVEKYGLQMQEEAIKGLIKSKGQFNDGTDKYVLAGNSYIYKDEDVSGTVKLQERPNFARLIEDILLAPEGKKPFDVVAVYRIDRLARRLTYLLDCIELLENYKIDLISANESIDTTTPFGKAILSIVGVIAELELETIKERTKGGRKEAYKVGVVMGACAEFGYKKDAEKKREIFDNEANIVREIFHYFVYERRTAQEIADIFIENKYITPDVSSIKYGKRKGTTKKKHKLSFWRSETIKEILKNEVYIGNYYHHKTKNKKNLPKSEWKLSPHRHDPIIESATFKIAQDRLAKISNKSDLSSKRRKQHTFYPLSGLLKCNHCKNISPDEKMTNWIGGRKKISSDPIKHTRFYACGRKNRKKYPQICPTLPIPAQTLENYIFDFLIQLIKSPKATYEHQMKLKSNQLRVDILKKNKKDLTKLQNELPQRIKRLKEQHELSYIDTDELKKKIKRIREREIKSKQKIEELTFEINQQSVSMGYIKAFDVFNDKYSKAIDEISKDKEKMAEIAHFLIDDIVVYSRSVTDEDKVAGRKKQDQQIPYSISIVLRLPIEILYDVVTSKEFRDKPKPQTKQFGVKNGNW

SEQ ID NO: 2933 - protein, 505 aa, unidentified
  source 1..505: note = uncultivated organism
MDRIIAEYDRISQDRRGAAEGVETQHFENAESAAELGLTIAETFADNDLSAFSGVERPEYERLLASIAAGKIGTLIIWHANRLHRNTDEVNHFTRLARTHGVRLYSTTKGGYYNLDKASGRKELRDDTSEAEYESEHRGERVTIARKRQARNGDYGGGVRPYGWGVDTGRVRSVCVNPKAPAMERVYQDRPVLDMTRHNAEEAQEIRRWKSELFSGVTLAHLLRDIAERGVLTVSEKEGKEHKRKGKPVRHRGWNSQTIRQILTHPRTSGHAVYRGTIVRRNAFPAIIEDDERQALTDMFADPARKTSPGNTPKWLGSLIYRCGTCDDGTTMTVRKDGQGEFCYRCRTKGHCSWRAHRVDLYVESVLTGLLSRGDIADLLPSAGNPVAVAALREEIVALDAQKRNAAQRWTLRKIDDAQLDTITETADQRIAEIRAEIAVATEESPLSPFAVSEDAERTYRDMTLGRKRELLRYMLTVTLLPVGRGGRASTALIRIERRKPTRAA

SEQ ID NO: 2934 - protein, 510 aa, unidentified
  source 1..510: note = uncultivated organism
MCRKIAIYARKSVFREDSISIESQIEICRYEARGQEYLVYQDNGYSGKNTDRPDFQRMVSDIRAGLISKVIVYKLDRVSRSVLDFSGLMELFQQFGVSFVSATEHFDTSNPMGRAMLNICIVFAQLERETIQQRVIDAYSSRSRKGLYMGGKIPYGFRKAPIVIDGVKTSMYVKQPDEAEDISLIYQLYSKPSATLGDVLRELEARESATNRRGRRWNTARLSDIMRNPIYTTNDISIYEFFRLQGSNLINPPEQFNGVTSQYLFSGTNTNRKTWDLTDQNVVIAPHRGFIEPEKWLACRRKLLANHQVRTCRAKNSFLSGRIKCGCCGYALVVRFSQRSKGHVRYFIDTGRTQYHCCTQKLPTIHADDLEAVIIERLHRKLSGLTIRSAGNAEGEISEHISRIAARSAELENEIEKLVDRMMLPDTDKTAAKYINSRIAKLDTEKSELSHQAARLRADRQKKDNAHCTVLHNVMDKWNELSFDDKRSVIEVLIEKILVYPDRLEICWKI

SEQ ID NO: 2935 - protein, 532 aa, unidentified
  source 1..532: note = uncultivated organism
MEQYLIYLRKSRKDRDLELQTGNFDTLQRHRDTLMDLAKKRGYLIAHVYEEVVSGDTIAERPEMQKLLAAVETGEYAGVLVMEVPRLARGNTRDQGTVAETFQYSGTKIITPDKIYDPADEADEEYFEFGLFMSRREYKAINRRLQRGRMASLNEGKFIAGTAPYGYRRVRIQHQKGYTLEQVPEQADVVREIFQLYTVGEPQADGTMAPVGSYGIANTLNARGIPSPGGVKWTASAVRDVLKNPTYAGYVRWSYRPNRKQMVDGSLVVTNPVNKDSVLKNGIHEPIVSEQTWNAAKAAMSSRSHAPVPGRKQISNPLAGILYCSVCGRSMVQLPQGSHGEPMVMCPTAKCPTVGSRRDVTEAALLDAMRTWLKSYQVSSKAQESAKGNDTTPSVKSVESALSRARKGLDGLKQQKSRLFDLLEQGVYTNDVFMDRSRVLAGRIAEAEKHVEALREHLIAMRKAELARKSIAPRIKNVLDVYDTLETPAEKNALLKTVLDHVVYSKTVGGRYRENNLQLFVYPKITDINDHL

SEQ ID NO: 2936 - protein, 523 aa, unidentified
  source 1..523: note = uncultivated organism
MPKAGIYCRLSVEDKDKLKCDNSQSIQNQKEMLRDYCKERNWEIYDIYCDDGYSGIDRSRPEFNRLLHDCETGKIDIVLCKDQSRFSRDIVVIEQIINDKFLEWGIRFIGVADNADTDSESYSTMRLFTSAYNEMYVKDISAKIRRTLAYKREQGQFIGSFAPYGYLIDPKNKHHLIIDPETAPVVKQIFSMYTEGNGYRKIVQALNDQSIISPSEYKHQKGSNYVNSNADASNARGLWTQSTVAKILTNEMYTGTLVQGKSHHISYKNKKRKHISRDDWIRIPEAHEAIIDSETWTRTQERLHSNTRVGKRSQELSPLSGKVKCAICGRPMKRNVYYNKAKTIQYYGLQCATYKTGAMNCPNQKSISGLRLEKKILDELNLIIENYCQSEEIQLTDIHQEQINNLNQHLSTLEERHKSAKNRLVSMYKDKLDGILSDEDYALFRENLTAEEQAISRQIDDIIHQIEDSRKRLENAESQKALIQKYTHFDNLDRSIADEFIDTIEIGIVSETGEREVHIYWKL

SEQ ID NO: 2937 - protein, 561 aa, unidentified
  source 1..561: note = uncultivated organism
MTKRRSVGIWLRVSTEDQARGESPENHRLRAESYAEARDWDVEEVFDLSGVSGKSVMDHPECKRMLNAIRTGRIDALVFSKLARLARNTRELLDFSEIFKKANADLISLSEAIDTSTPAGRLFFTMIAAMAQWEREEIVERVNASIPIRAKQGKHLSGVAPYGYKWNDHQLELVDSEAAVRALMFDLFLKEKRLKTVASILNERGYRTRKGSEFSDTSVRRLLIDPMAKGLRRSNYTTTRNGSRVVDRYKDESEWEWHQCPAIVDEAVWNAVQDIFAERAANKKPQTKKTVRLFSGIVRCSCGHNMYVRTKTRKYDCPECHNKIVDADLEKVFVEQLKSFFFSEEEISKYMEGYDTEFAGKQQQLSALETQRSKLQSQMDRLFDLHESGEVPTKGFGERYRPLEQQINQIDREVPRLQAALDVQRIGHQNRDYVVREARDLYTNWFELEQEIKRTIIETITEEIIIGDEDIEIRLNYMPEAPPGPFDSSLSPADPLSQSGCERATHSQGFIAAISWNRAGYFTCRFAREIVISHPQGVGEGYPELVLRTPALWSKLTINSV

SEQ ID NO: 2938 - protein, 564 aa, unidentified
  source 1..564: note = uncultivated organism
MVGTAVLRNALVKKLRCAIYTRKSTEEGLDMAFNSLDAQREACEAYVTSQKAEGWVLVPTAYDDGGFSGGTMDRPALVQLLADVRARKVDVIVVYKVDRLTRALSDFARIVDVLDAAGASFVSVTQAFNTTTSMGRLTLNVLLSFAQFEREVIAERVRDKVAQSKARGIWMGGNVPLGYDVQDRKLLPNPTEAATVVHIFRSYLNQPSVRALKEALDTQGVRTKVQQGKTGPRGGVSFSRGALYWLLSNPIYIGKLRHKDKLHEGQHDGIIPRDLWDATQAKLRASAAERGNATTGNGTALLTGMIHDAAGRPMSPSFTVKEGRRYHYYVSSISKDIDRGLSGVSAAPVTRVPARQLEATVREALRALLMDELRLAALFINSDAATTRRRLATAAELARHVAPYAIDGARALLARLNFSLKVHGDRVEASIARSALLASLDHHIGTAANDDRRIPVIVDTNITHRKRGARLVIAGKSPEENTPEPKLVALVRRAHQARAALFSNAAPRGNRHIERLARLAYLAPDITSAILDGTQPATLTSRTLLKVPGIPLGWPEQRKMLGFT

SEQ ID NO: 2939 - protein, 512 aa, unidentified
  source 1..512: note = uncultivated organism
MKRTDVLSKKICAIYTRKSTDERLDMEFNTLDAQREACESYILSQRSEGWRASQDYYDDGGYSGGSLDRPALTRMIEDIKSGKINIVVVYKIDRLTRSLADFSKLVDVFDDYGVTFVSVTQSFNTTTSMGRLTLNVLLSFAQFEREVSGERIRDKIAASKRKGMWMGGMAPIGYKIENRRLSIHKKEARLVQKIFDYYQEVGAVKALKQKLDDEKIKTPKRKTLKGKSYGGKHFSRGALYALLKNPVYIGQIVHKDITHDGLHDGIIDEEQWREVQKILHDKNHQRQKQTKQRYMLQGLIFDNDDTIYSPTYTKKKDVLYRYYISQNLLQYKDHPKGIMARVPATEIEQFILKHLRQQIDTIIQGEEPLARDYILKHKSEISDTDLINTILQKIVVGQHELTLFLKVGTFIAFINERFELSVTVQDDYSVSLPFRLSKTNNGAVTIEQPVLKKPKLHQQSDSELEELVKGIVWRERHFDGKPIMTIAKEENVSDFYISKLIYKSFETLINYQ

SEQ ID NO: 2940 - protein, 545 aa, unidentified
  source 1..545: note = uncultivated organism
MQKIQCAVYVRKSSDRGLDQEFNSLDNQELACKSYIASQAFQGWEYFKTYSDGGVSGGTMARPGLQTLLTDIHNGKVQVVLVYKIDRLSRSIYDFKSMMKKDFEPHKCDLVSITQSFDTSTAMGKLTLNMLLSFAEFEREVASERVRDKMRATKSKGLWVGGVPPLGYDIQFGKLVPNETEIPMVKAIFQAYLDSSSLLACRDKVAAMGIHGKAWTTKKGESRGGGTMTANIVERILKNQIYLGKLPNKSTGEVFDGQHAAIIAQDLFNAVQEKIRANNNHIGSGYCLGTALLHNKIMTSDGTVLKNKVGRRNCNSHRRYRYYYGGGVSLPMGDIDSIVSDTIKQFLDSDMNCLGDDKRISFKQTEFSPDLIKPMVEKIVYYNNKLAIFINIADLGYLTPFQKDNYMNSRMNPMPCHISEDGNYVIIETEVILSSRTCINYRNSGGSRDLLTKAENATMLIKALGYAWKYKQQYENGVGIKTISAKEQRDQRTIYKYLNLAYLAPRIINDIMDSKIPPHINLQTLFAIASKYEDFEEQEKDFYRR

SEQ ID NO: 2941 - protein, 570 aa, unidentified
  source 1..570: note = uncultivated organism
MNMNQRTRIAIYSRKSRFTGKGESIANQIEECKKYCGYMLHAEEKNMEFTVYEDEGYSGKDLERPAMKRLLSEIGQYDFFVCYRLDRVSRSVSDFSNFIKKLELAGVEFISVSESFDTTKPMGRAMMNITSAFAELERDTITERIVDNMTALAKSGRWLGGRTPLGFRSEKKEFERQGKMRSYFRLAEVPEEITTVKLVYDKYLETGSLTKLSGYLMNRGIRSRNGVDFSHYSLKFILMNPVYCTADETVYEYLDRNGYALYSERELFTGTYGLIGYNKTNEHHRYGSGRFNEKSDWIIAVGEHIPVIESKKWIQVQGQLRSQGKFAFRRARTNHALLSGLLYCTCGSPMRPKSTGTASEDGERRFSYLCEKKSRSRGGLCNQKNVQGNTLDDVVVSCLFDMYRQILPGDGEMIPAIRTELEDSFPADSGEMLLERSLEANRKKMERLVNSIEHASSEEVESVLLGRMEELSLEMKRQRQELEELHDKKAAPGTAKLKEYLDTLLHFDKKLWDCVDYDTKKNILGLLVDHIEWDGTTAAIYPCRRSAVRGEEPFSGAHSATSDVSTMNCS

SEQ ID NO: 2942 - protein, 530 aa, unidentified
  source 1..530: note = uncultivated organism
MRASLETNPAKNAGVATVRCAIYTRKSSEQGLEQEFNSLHAQRESGEAYVASMKHEGWVVLPDQYNDGGFTGGNTDRPGCQRLMADIEGGKIDCVVVYKVDRLSRSLMDFARMMSVFEKHHVSFVSVTQQFNTTQSMGRLTLNILLSFAQFEREIISERTRDKIAASKRKGKWFGGKPILGYDLAPQPAGGSKLVINAAEAGVVREIYQLYLEHRSLTKVTQILNARGCTSKRWTTRKGAAVGGRVWDKHLLINVLTNPAYMGKVKHKKELFKGEHAAIIEEPLWKQVYGIIKHNGRTGGMNVRNQHGALLKGLIHCGPCGHAMGHTYSVKDGKAAYRYYVCYVAQKQGWHACPSGSLPAEQIERLVVERIKHIGGDAALVAATFRQLQSGVRTRTAQIEKDQAAGVREIQKIESELRKVAATAGTDANAAARLADLHERLAKVNERVRALRVEAERVDDETITRDEVAAALREFGATWDVLCPREQAAVLANLVKRVDYDGAKKTVSITFHPAGLRTLGQTPVEDEEAA

SEQ ID NO: 2943 - protein, 526 aa, unidentified
  source 1..526: note = uncultivated organism
MQKKIRCAIYTRKSTEEGLEQDFNSLDAQREACEAYIKSQMHEGWVLFDKQYNDGGYSGGTMDRPAFKELLKDIENDEVDIVVVYKVDRLTRSLMDFSKIIDVFDKHNASFVSITQHFNTTTSMGRLTLNILLSFAQFEREVTGERIRDKFEASRKKGLWLSGTCPYGYEKDEHHMLHPQQPYADNVRIIYESYLEIKNVLKLKKYLAEQKILTRAGKELAKGSLYHILSNKVYLGKITHKNKEYNGLHEPIISEELFNNVQNLLKANSVQRKHATNAKTGSLLAGLLYDDKGNKMSPSYSNGNNKHYRYYVSVAVKNPIDYERGEITKISAGEIEKFVQEDLTKLLKNTHRIQDYLENYPIEQQKLILEKMQNFEADKVFLRTAVKKVDLKTDCISINYDITYIIKYFATMALNAEFKYTDDNEQLITNQIAVQISLTPQRQNKIIIPGKANYDMKLIQAIVKSFWYNKLGAERRLPIEARNGNNKRLRKLRFLPPEIIESIMNGTQDPELNVKKLIEMAEKCCK

SEQ ID NO: 2944 - protein, 562 aa, unidentified
  source 1..562: note = uncultivated organism
MATKKTKQGNNPDTTLHIYTRVSTVVQADKGTSLDSQLELGRKKAKDLKFSVEHWNEGGKSSHHDDIQGRPKLYELFQAIKAGEVKHLWVYDQSRLSRNDQVASILRYEFNKQGVTLYTKDGQFDLSSPSDKLLKQMLDAVAEFENSVRAERSRIGKLMKVKAGYWHGGPPPFGYQITNTRLVENKAESKWVKFIFKQALKGTSTASIKKELDSNGVMARRGGLWTLGSINSLISNTHYLGRYVYTDGVSGEQVEVSCPKIIDEVTWNSINLERKLRASRRDQQNATIKNFYLLRDFMVCGHCGRKLSGRIKPAKKEYMYYCPNKERAWAKEGESTTHYQRGTGCGFERAMNIQLTDKVVFDTVVKLHSNSSILKEEVKKRVYAEHGIKTTVATAEEMKDFGRQLRKFELLFQNIQESIGNLEANRVLKRMDDKAYKTAVARMNDEADRLKTEITNLRLKLRGEAEKKQWVYWVDHFGVEMEQNKKLTDEQRQLYLKGLIEKIEAKFNPKTRDHELEIHFQHPIVGDGIKWKDPKKKTLGYKVLNGSKTTSVRVEKRDGRGK

SEQ ID NO: 2945 - protein, 508 aa, unidentified
  source 1..508: note = uncultivated organism
MKTAVIYARYSSERQTEQSIDGQLSVCNDYAARNDILVVDTYIDRAMTGKNDNRIQFQKMLKDSKKQAWDIVLVYKLDRFSRNKYEIAVHRKTLLDNKIKIVSAMENIPDTPEGIILESLLEGMAAYYSAELSQKIKRGATESRKKGNFTGGRLPYGYRSENKKVLIDEDTATVVRFMFEQYATGTIVKDIMSALNEKGILSCGKPFKRSTVYKMLKNEKYSGIYRFGNEVFTNIYPQIIPTHIYEIVKQKTELNHMGRNSIETVYLLKDKMVCGYCNKAIYAETGTARNGETKRYYKCATRKLGQSCRKTVIKKETLENLIVDTTCQILNSPENVNMIACMIMKANEKRLHDQSFLKILFKDQANNVKSIENVMTAIEKGIVTNSTKRRLEELELLQEEINAKIAIEKSKLSKQLSKDEIINYIKTAFKKEPRLMIDLLINKIVLYDDKIEIYYKYTDRSPDDDEQRDFSLYKQIITIKQNNTNLEQSKFVLFFSYYGFKTEIILNR

SEQ ID NO: 2946 - protein, 662 aa, unidentified
  source 1..662: note = uncultivated organism
MTKKQKYNTEDNRGVAIYARKSRITNKGDSIGVQFKQCAEYAKRELHLDEDYTFLEYEDKGLSGYYSDRPDFQRMLHDIEMGKIRAVVCYKLDRIGRKTSDLLRLLDFLEKHKVNLLICSNNINTASGVSKIFIQIFAVVAEFERDTLTERITDNMMELAKDGRWLGGNTPTGFTVKRVKTGSGKNKSAYSYLESIPEEKAMIQKLYEIFAATRSIKKTADKMNELGYRTKVGSKFNSSTTRLLLKNPVYCTADESAYNYFLEHNGGLCGDISDFDGQHGISAYNKTDQEKFEDADSTFISPKFVQLMSTKPLSEWIISVGRHEGFISSQKWIDTQNMLDDIAKKYNRPHRKTNALLAGLVYCPHCGKRLRVISESNRWTNGKPRFKYVCPGYRVGECTFRAVDGVLLDEFVVQQLSHLADEDSEYFEKLLNQKASDIFSSSQNEKELSDLRKKKAQLETAIANQVKNLREADNSLKRFIQEDVKALTDELSETETLLQKLEDSRQSQMYAIRDIEEIKERLLSFGKYAENAAPVVLVTLIQTFVERIYITDENDERHCHIFIKGCSKEDYDDFFRATGYIENTQETGTVTSVLSVCDSDECCKIKEFSQKNILFLIVVFLKKFRRKLFHPFIDMIIGSNNNLHCGRHIFNVAVFISRFRCF

SEQ ID NO: 2947 - protein, 517 aa, unidentified
  source 1..517: note = uncultivated organism
MARKKDEARLVRCAIYTRKSTDEGLEQEFNSLDAQREAGEAYIASQKGEGWTCLQDRYDDGGFSGGNMDRPAMRRLLADVEAGKIDCIVVYKVDRLSRSLLDFAKVMETLDAHHVSFVSVTQQFNTTSSMGRLTLNILLSFAQFEREIISERTRDKIAATRRKGKWSGGRPILGFDVDPRGGRLLVNEDEAARVRAIFELYLERQALIPTVKDLEARGWTQKRWVTRKGREAGGKSFTKASLYRLLTNVLYIGKVTYKDEIHDGEHPALVEGGVFRRVQETLKHNGATGGASVRNRYGALLKGLLNCKSCGCAMVHAYTTKRNKRYRYYVCLNAQRRGWHTCPTKSVPAQEIEKFVVDQVRCIGRDPSLLGETLKKARELGRERIQELKAEKKALDRELRRHDRNLRDLAGKLGTRIRVTDQVADLQERIRATEQRSTQVREELIALGREMVDEKEVAQALALFDPVWDSLVPREQARVLRLLIQRVDYDGVEGTVSVTFHPAGIKALAQELEEGDS

SEQ ID NO: 2948 - protein, 500 aa, unidentified
  source 1..500: note = uncultivated organism
MKMTVIEPTVAPQMKRKIRVGAYCRVSTDESDQKHSFNAQKIYFSNLYAHSVDYELVDLYADMGISGTKAEIRPEFMRMIDDCRHGKIERIVCKSISRFARNTKDCLTALRELKHLGVTVSFEKEGIDTAQVSDEIMITIMEGLAQEESASISRNVRWSIRRRMANGTFKVARVPYGYKKNEKRELVIDSEKAAVIRRIYSLYLSGYGMRKIAVLFNVEGLPSPTGKQWNNITVKKILKQEKYIGDIRWQKTYGVFMGEQWKINNGDVDSFYIENAHPAIIDRETFFMAQKIREEAAEKSKPKNEIVDRLFRGRIKCTCGRSYYRISAKNDYWECTGRRMLGGNCDNYIFYHEELINAWERMCRKLREHADEILTPIMIQLEMMKDTMYRTEIASLKERADDIQQRRYMLSKLCTEGCIDREDFMSAENEMNSELDEITSRIEKISIYTDDTAELIEMIYRAVNTTVPERLVNMILEYAEINGRNIIFHLIGGLYFREVL

SEQ ID NO: 2949 - protein, 521 aa, unidentified
  source 1..521: note = uncultivated organism
MKLPVTAQLIRCAIYTRKSTDEGLESDFNSLDAQREAAEAYITSQTEANWKAIAKRYDDGGYTGGNLDRPGLKSLMADIESGDVDCVVVYKVDRISRSLMDFAKLLELFERKKVAFVSVTQQFNTSIPMGRLVLNILFSFAQFERELISERTRDKMSASRRKGKWCGGLAPLGYDIAPEGRRLIVNSDESRRVQIIFELYLDVGTIRQTVAELDRRDWTNKLSTTRSGKERGGRKFDKSSLFKLLTNIIYIGKTRHKGESFDGEHQAIITQELWDRVQKKLKHNGQSGGVMNRNKHGALLRGIFRCVCCDAAMTPNHTTKGKKQYRYYICTSAQKKGWSTCESKSIPAQQIEDFVVEQIQSAQYPPELLAKTLQSLSGKNDHRRALLEEELRLLGRDTDRWNSELYKLTPELQSSRHDSQAVARLADLQDRIRLNERRVAAIAEEIDAINTQIRKSQGDEATGSHAITFWESMTIRDKLRLIHAVIKRIDYDGASGRVTIIFKPIDPNTFSEATTKDLSEP

SEQ ID NO: 2950 - protein, 505 aa, unidentified
  source 1..505: note = uncultivated organism
MKAIYVRQSIVKEDSISLDTQVEYCKRELKDGEDFKVYRDQKSGKDTNREQFQDMIEDIKAGLIDTVIVYKIDRISRSVYDFGNIMRTFEKYKVEFISVNEKFDTTTPMGQAMLQIVMVFAELERKTIQMRIIDNYYARAKEGRYLGGKPPYGYDKEKILMGGKKTYQYIENIEQSELVKSLFEMYYNDNDTSFGKMAQWINTDTDYKTSRGNEWSSNTISRIIRNPAYTYATAEIYLYLKEKGYIMNNEVEDYLGENGLYWYTPGGRENKKDEENPAPTYITVAPHTPFIDADIWLACQIKADENVQIKNSGKGTYSWLSGLMKCGYCGLAATVATRKDGDHKLICNGKKRHSCNGISTSILLKEVEAHVEVQLLQHLQNKIANSLTGISENENVDNKDLNKLNIELIKVNEEIDNLVEVVATAGVSVAKHYNAKIEKLDKVRERVTKQIISLKVDNKATLSVEQIQECVDNWDNYDFDRKKEIAQLFIKVVTITDDEIQIIFN

SEQ ID NO: 2951 - protein, 577 aa, unidentified
  source 1..577: note = uncultivated organism
MSKLIRKNCAIYTRKSSENGLEKEYNSLDAQRDACENYIKIKAHENWKMLPDRYDDGGISGGTLERPALQRIMEDIRAGKVDVVVVYKIDRLSRSMFDFLGMIKFFDEHNVSFVSVTQDLNTDTAMGRLVLNVLQSFAQFEREIASERIKDKIALSKEKGMWMGGTIPLGYDAEEGKLSVNEDEAKIVQHIFDEFIKTGSATEVVKDLKTQGYQTKARKSRRGTYYPAKDFTKSSLYQILNNKLYIGKIEHKEKDKVYEGLHKAIIDMKNWNQVQAILSGNTRAKISLDPGERSFLLKGILQDPDGYAITPSTTKKKNKKYRYYVSIQAVKKSYSVCPLKTISAPLLEEVVLDQTRRVLTSTEWVNRMLASHPNEKASMHDVTAALKNFGVVWEELFPAEQARIVQLIIHKITVHPNKLIIEFHPPGMASVLHELLPELTIENGQNQNMHEPMTLEIPIDFKKRHKRKIITAPNGEDLVTAKQPKFDNALLKAVVRAHEWQDMLDNGDVRSIRELADQEKLPSSYVANVMQLTDLAPDITTAIVNGRQPQSLQLKTLMTSQIPYDWDKQRQALGFAA

SEQ ID NO: 2952 - protein, 542 aa, unidentified
  source 1..542: note = uncultivated organism
MVTNRTESFKEGLIVSGEYINVINQQKVVNNVEQVNTTTSQITPKGIDVRMRCAIYIRVSTDKEEQKASLKYQKELFYRYIQEQGWDIYEFYVDVQTGTTAKRKNLQKMIQDAQEKKFDIILAKELSRLARNGELSYKIKNLCENQGIHIITLDNAINTIAGNTNMFGLYAWMYEQESQNTSNRVKETLRTRAKKGLFKGSNPPYGYGVSEGKLFIKDDNTPNIVRRIFDEYLAGSGRESIAKKLYNEGIPTPAETAGKKNANDKWNDSTIKLILTNPHYSGDLVQNRSTTVSVTSKKRKTVEKENQIVCKDAHAAIIPRDVFNAVQQQMKIRTKFITAPKKHLFTNVLFCADCGKGMWYRSNRKGFLCGNYARHGKKACSSHLIEEDLLKVTILEDIRNLVNQLDKEQYLKELEAQTKKSMQNLQKQLERVEKQIENIKGRKKKYINMLAEEIITKEDYRESVEANNIEINELTEKKNDLLTALESEQTVENIELLKEDLLHFLNFDELTPESLHRLIDRIEVKADGTPIIHYRFSAPKIK

SEQ ID NO: 2953 - protein, 541 aa, unidentified
  source 1..541: note = uncultivated organism
MKFFVYSRKSVATGKGESVENQIEMCRQYIRSKFPDDTGTEVAVYEDEGFSAKNTDRPQFQQMLRDIRRLKPDFVVCYRLDRISRNVSDFSALIEDLNRRGISFICIKEEFDTSKPMGKAMMYIASVFAQLERETIAERVRDNMLMLARTGRWLGGATPTGYTSEKVEEFVLDGKIKTSCQLKGDPEELSVVNLIFETFLELHSISGVSKCLIRREIKSRGGKYYSLPGIKEILQNPVYCVADRDAYRYFTAKHSDVCFTEKDCSKEYGLLAYNKRDYKKDRAPRQPMAQWIIAIGKHKGIIPGKKWAAVQKILADNIPTGKKPAKIHNGYSLLSGLIYCGECGGRMFAKHRSGKNASQEAFDYICSNKLRGGTRLCRCQNISGPQADDAVCLALADHMTESPGFGKGLEKLKRGLQAAARESPVRELESSIQKCAAETERLIRTLSQGDFSAAFLQQVSLRIENLQEEQARLTAQKEDAEKAAGENPDREAKISAMAEGLSSLKSCFSTLTVPEKQSFIRSCIEKIVWDEGGLHVFLSGR

SEQ ID NO: 2954 - protein, 540 aa, unidentified
  source 1..540: note = uncultivated organism
MRYQANKTASYLRLSREDGDKLESDSITNQRELIREYVTGHEGLSLVNEYVDDGYSGSNYDRPSFKRLLEDVNAGKVNCIIVKDLSRLGRNYIETGRYLEKIFPAIGIRFISILDHYDSANENSEADQIIIPFKNLINDSYCRDISMKIRSQLDVKRRNGKFIGSFASYGYQKDPKDKNHLIIDPFAADIVRMIFRLKLDGYNSQRIAETLNNMGVLPPAEYKRSQGLNYDCGFKSSKNPKWEIVTINRILTSELYLGTMVQNIQAKISYKVKQYRRVPKDEWIKVEGMHEPIIERSVFDTVQKILQYDTRTAPDQDAVYPLSGFVTCGDCGQNMNRRQVRKGGRIYPYYHCSTYKSGNGCSSHLINADKVVSIVLETIQTQISLVLEAEKILSSIDNIPENQTYVKTVTAQIREVEKETEKYEKLIAQAYSDMKDGIISEEEHAFISGRFSEKLEEAKAKVGSLKETKKRALKNQLHSRPWIDTFRKYQNIKKLERNIVAVLLEKVIIHDKNSITVVFRFQDEMQELLSLAGLGEEVDA

SEQ ID NO: 2955 - protein, 555 aa, unidentified
  source 1..555: note = uncultivated organism
MRWYVMARTSRRYEIQKEEISKSVYRAGVYVRLSSERHEEWREKSSSPKAQAYICEEHAKSKGIQVIQVYEDYEYSGTNFERPAYIQMMSDVRNGKINCIIVRDLSRLGREHIEMGQLIDKVFPFLGVRFISVTDNLDTIDGLDNNKSFEVMLKNIINDMYAKDISSKIISVKHTRAKEGYFIGSVPPYGYKIEKTPKGQKLVINEDTAPIVRKIFDWTFEGKSQYEVTLELNRLRIATATYYHKTGEIYRPEDGQEWSKGTVAKMLINETYTGTLIQGKRRQSLVKGESQHSTSPEDWIVVKNAHEAIISDEEFQQIQKIRRERKDNHYFSFERNDLVRDHENRYLGLVFLKDTERALYRRTRIYGKNEKRLLYCFQPDNFTGKSLEKVNIFITEENLDAMVLQTIQGIASQLISEKSFLEKIKNEFLRRKEVAETGLKELSMKKDLSEAAIARLYERYATGSLDKAKYITFKEDESRKHASYCSEISRLEMMISNLKKDERKSRKVARTIFQARKETKLSAEVIKELIERIDVISKTEIEIHFLYDFSENGGI

SEQ ID NO: 2956 - protein, 595 aa, unidentified
  source 1..595: note = uncultivated organism
MKKSAGIYIRVSTEDQAREGYSLKEQLIKLKDLCKYRDYNVFKIYEDAGISAKDTNRPAFQEMLDEVRKNNINVIVAYKLDRLTRSVRDLENLIVELEKYDCALECAVDDINTSTANGRFFVRMLTVLSQLEIERVSERTKFGLVGAIKDGHIPVRKTLGFTRLDKKLVINPIEKDTIIKIFDLYLKGNSYQTISNILNEENTLNKKWYDTTILKVLSNPLYKGDFISGGRNGTPVLYENVVEPIISKELWEDCQFQAKKNTRNYTRRNDYIFFQKIVCPHCNKIMACKAPGGTKKKYIYYQCNTCKTFVREDKLIELLIEQITTIIEYDISVRQFYAPLLKHKIENTNEVINKEIIKLKDKELRLKEAYLDKVIDLKEYNEDKKILQLKIKDLEDKRNKEKELDQFNFTVEDIMLKRDLESIKCLVNPFYQTNFEIKWDELNLKEKQDLIMSYIESIEVIKKDKDIEIKRISFRKTFIEEYANLFNKGAINRFLEVNANGENIQIEVCAPMTKEQINKHVERLEFNYPIAYHEIKKEKYNDHQISLKYNRINKFNEPLKIIPILNKKGFNKIDSYGVIEVPVPPVTFVNVDRVV

SEQ ID NO: 2957 - protein, 519 aa, unidentified
  source 1..519: note = uncultivated organism
MKSIRKSNAKNRCAIYTRKSCEEGLELEFNSLHAQRESAEAFISSQQHEGWECLPEQYDDGGFSGGSLDRPALNRLLEDIKSGKIDCVVVYKVDRLSRSLMDFTRIMETFDKYGVSFVSVTQQFNTTHSMGRLTLNILLSFAQFEREIIGERIRDKIAAQRRKGKWSGGIPVLGYDVDRSSASAKLVVNAEEAVRVRRIFSLYQELGTLLPVVQDVNKRGWLSKEWKTKSGLLRGGKPFDKCSIYTLLTNPLYAGLIRHKDVIHKGEHEPIIDAPMFDAVQKQLKTNGRGRGNQLINKHGAILKGILRCSACDHAMVHTFTRKKEKIYRYYSCIQAIKSGRDACPTPNLPAAEIEQAVLDQIRSIGADAEIQNLVIAQIQSGQNKQIEELETNRQQLQRQLSRDHAELGKLAILNDPTGATASRIADLHIRIAKCETDLARVVSASTSVENCTFDRVAAAESVRDFDEIWNALTSQEKGRLIRLVVSKIEFSAENSSISVSFYPDAIRSLQDTRKEVSA

SEQ ID NO: 2958 - protein, 536 aa, unidentified
  source 1..536: note = uncultivated organism
MTLPTLKRCAIYTRKSTEEGLEMDFNSLDAQREACAAYIMSQAGEGWEPVHELYDDGGWSGGSMDRPALKQLLDDIQAGKVDIVVVYKVDRLTRSLADFAKIVEILDARGASFVSVTQAFNTTNSMGRLTLNVLLSFAQFEREVTGERIRDKIAASKRKGMWMGGTVPHGYRVEDRKLVIEPKEAEEVCYIFSRYLELKSVPALVDDLARRGMRTRIRHRKAGGTIGNVCFGKGPLGFLLKNPVFIGKIRHKDSVYDGEHDPIIDRDIFDRVQTILASNNRDKLISRHAKSPTLLSGLVTDPDGRPMSPVRGQKGSKQYCYYVTRFKTDEDRSSIYRIPAGSLDKIVINSFASYLRKPAQTNESTCKVDWQTRRSAGADLADSLLLISTSELRSILIDHNVTVHITNDCIDVKINKDEVTITTSAQLVRRGNELRIALPPDGASTNTNNTDPALVRLVVQGFAAREHLLNSTEIPTIAHYDKRHLHRLARISWLAPDIITAILEGRQPVQLTARHLLRCADIPLEWQQQRHFLGFS

SEQ ID NO: 2959 - protein, 549 aa, unidentified
  source 1..549: note = uncultivated organism
MSKKEIFDTALYLRLSRDDTDIDGSSKMESNSISSQRDMLRAYVQSHEELQIFDIYIDDGVSGATFDRPEFKRMMSDVEEGKVNCILVKDLSRFGRDYIEAGRFIQKTFPALNVRFIAITDGYDSASADKTESSLVLPVKNFVNDSYCRDISMKVKSHQQVKRLEGKCISAFTVYGYQKNPDDKNMLIVDEYAADVVKRIFAWKIAGMSLSMIADKLNASGILSPMEYKKSIGMKYYTGFESSGTAKWAAMSVKRILTNRVYLGHLEQGKQEKVNYKVKKRIEKSPEDWVCVENTHEAIIEEHQFQAVQELLKYDGRASATSDAANLFSGILVCADCKAPMIKRVNSYKGNKKVFYICQTKNKSLGCSRHSIEEEQLKRIVFSEIKTFLDMMCTYSDVVDYMNEINVNYEQVIEYDSQIANLRNEYNKYYGLKSSLLGDLKEGLINKNEFDEFHSLYERKCSDLEKAIDGQKKLVKDMFHNGIAAKSQLDKFRQNAEITELSRELLVSTICKIYVHEDKRLEIEFRFANEFEKLGIMNQLYQSQMQEVR

SEQ ID NO: 2960 - protein, 513 aa, unidentified
  source 1..513: note = uncultivated organism
MSEVIVIQGNYTKDEPVLKRVSAYTRVSSASDEQQYSFHNQVQHFTSLIQNTPEWEYVDIYADEGVTGTREDKRSEFNRMIRDAEDGLMDIIITKSVSRFGRNVSECLRTVKHLKDIGVTVIFEEEGLDSGKPADFTMISVKAAMAEQESISTAENGRMANRQRMKMGTFVQSNPPIGYTLNGTEFEVNEEQAEVIKRIFAEYLSGSGTSKIADGLMRDKIPNKYGKVHWTPQSVSYIINNPRYKGGALFQKSFKTGFPYKKKKTTGELPMYYAENANIPIVSAEDFDRAAELMQTRREKHAKESNENASIFTKKIYCRYCGSTYGHKNGTDTWVCRTHDKGTDKCQAMPVSEEMLKKAFVQMYNRLKANYEHILLPFLTQVEAMKINKAEQDRIADINMQIAQNTEQVLSLRRLKSQELIEPAFYIQELNRFDKQTMELRKKKNAILHNNRYDDIISKTRKIIREMESACAIGKFDVESFKNLVSRIEADNEVITFILINGMGLEVSKKEVL

SEQ ID NO: 2961 - protein, 523 aa, unidentified
  source 1..523: note = uncultivated organism
MNAVIYARYSSDNQREESIEGQLRECMEFANSTGVTVVGNYIDRAFSAKTDNRPEFQKMIKDSYKHCFDMIIVWKLDRFARNRYDSAHYKNLLKKNGVKVVSAKESIAEGSEGILLESVLEGMAEYYSAELSEKILRGMTENALKGKMNGGQSPFGYFVDEDRKLQIDPKTAPIVQDIFTMYADGKRMQEIVDWLKAKNICTQKGKPMRVNVIQYMLSNRKYIGEYKYRNVVIPDGIPAIISQELFGRVQERLVKNKKAPARHKAEDDYLLTTKLFCGKCGAYMVGESGRSCQKNVYRYYKCITAKRKKLCDKKPVRKEWIEQVCVEKALKVLNDDALLDALTDRIYELQAEENPRLPYLKEQLSDVEKKITNILSAIEQGAFSDAINERLSSLEKSKKDIETAIIQEQIKRPFLTKEQIRFGIEKFKTLDIDTQDGRQRLIDGFINAVYLYDDKITIIFNYKDSTTTVSIDEYKSSDNKTKTAPKKKSTFRGCYFFWSNHGGNRESNSKGEFCVRKTVDNRF

SEQ ID NO: 2962 - protein, 528 aa, unidentified
  source 1..528: note = uncultivated organism
MKAAIYCRLSKEDEEQEKKDREKESESIQNQKSMLINYAIEKGYDIYHIYSDEDYSGIDRDRPDFNRMIEAASQQKFDIILAKTQSRFTRDMELVEKYLHGKFVEWGIRFIAVVDHVDTADEANKKSRQINGLVNEWYLEDLSNNVRSVLTHKRREGKYIGTFALYGYIKDPADNNHLLVDPEAAEVVRRIFTLYLSGNGTTRIARILNEEWIPSPTKYKREHGFNYKKNVRCPNEDLWGKATIYRMLTNQTYAGNLEQGRHKKVSYKSKKTVWLPKKDWIVVPGTHEGIIDSESFARVQQMLREHARGGGQGKVNPLAGKVFCGNCGSAMEQTGSGYVSKNAGKALKYFRCRTSQRDKKRCPGQDYMPMEQLQELVLERVRHHIAGYLEPGKPGQELASFPRKNRNRAKRTELERLQGEIVRRRKAMQELYLDKSSGIISSAQFMELNQTFLHDVEDLEKRCAKLEESLGEAGDTDGQREKLKQYISDVREVKVLNRELACLLIEKVVIYPIDATENTRKIEIDWKF

SEQ ID NO: 2963 - protein, 534 aa, unidentified
  source 1..534: note = uncultivated organism
MANVIEIPATKSYLGHGAKRVLNVGAYARVSTEAEQQAKSFETQVEHYTKMIKETAGWKYVDIYGDEGISGTSIYNRPEFQRMMKDCRKGKLDLVVTKSVSRFGRNTAESLQCIRELKDLGVGVLFEKEGINTLNYTTEMFIALHTIFAQAESESMSENIKMGRSYRYREGKCCYNFNGVYGFSQDAEKNISVQIGEAINVKFIFDCFIKGMSIEQIVNALAEREIPSPRGKERWSPGSVERVLKNEKYAGDVLTSKTLTLDPISKKKVKNTGQAPQYYIRDHHPPIVERDLFDSVQEEISRRGCIKKFDKKQSYGKYSGKFPYNDLIFCGECGAKYRRTEWKTRSGDKKYVWRCLNRIQNGQDCCQHSPSINNNFMDEITLEAINTIYTSRKRVKDILKSSIASLLGDTEQPKISANTEKLNLMSDRVREAIYKNANGEISPDELDRICLEVKMESQRLRQENKEYEIERKMKSTESSKLKLIFKAIDGMDDKVCEIDTPLIRSIIERYEVVSKKKMIIWFIGDIPYEVDLPQ

SEQ ID NO: 2964 - protein, 568 aa, unidentified
  source 1..568: note = uncultivated organism
MNDNRKVAIYSRKSKFTGKGESIGNQIELCKQSIHLSYPDLSDDDILIFEDEGFSGGNTNRPQFQEMLKQCRQRQIRCIVCYRLDRISRNVGDFSALIDELNRLDITFNSISEKFDTTSHMGRAMMYIASVFAQLERETIAERIHDNMLELAKDGRWLGGNPPTGYRSVETVGSVTIDGKKRKARKLEVISEESEIVKLIYAKFLEFNSLTKTETYLIQNNCLTKTGKYFSRFAIKNILTNPVYLIADETAWNYFEIKEVDVFSERSEFNGQYGIMAYNKTSQQVGRANEIRDMKEWIIAVGKHKGIIRSHDWVEVQKLLEQNKSKSYRKPRSNVALLSGLIFCGKCGSYMRPKLSQRKNKDGELIYDYLCELKEKSKSQKCDMKRPNGNELDKLVCEEIKKLTEDKSAFMTMLKKEQKSLNINDVSYQEKLKSLRKSKSDSETKIKSLVLSLTQSENTPAHSYILQEINELDEKAKALQAQIKEYEDLAKTSVMSDAEFEGLADMLLSFSESFDGMPIEQKRSAIRTFIRKIVWGGENVHIYFFGSDENEIDLSDTGGSEPLRIGCK

SEQ ID NO: 2965 - protein, 533 aa, unidentified
  source 1..533: note = uncultivated organism
MEKPKQEKKTIRCAVYTRVSTTEGLGQEFTSLDNQRESAESYVQSQRSEGWTVLPDRYDDGGYTGANTDRPALQKLLADIKESKIDCVVVYKVDRLSRSLLDFSHLLESFEQNNVTFVSVTQHFNTNSSMGRLTLNILLSFAQFEREIISERTRDKIAASKKRGKWVGGSPPLGYDIDKVNHKLVVNQNEADLVKEIFDLYLEKRSLLSVATALNEKNYTTKKYATFKGKKSGGVKFKSTSIQSIVKNPFYIGKVHHAGVLYQGEQERIISDEVFQKTQEILANNRRERKVAGVITNIGLLNSILKCKACDSTMYYIYSRKGASKYHYYLCMNAQKRGYKSCPTRLISAQSIENKFMEFLRTVCQDPRIETKPWDALTLEEKIPILKSIVKVAYYDAINGALEIMLHNGEASHRFELKLAELKHIPYHRQQAEISKEPLIRQNLILAHQIKQVVSERKCSLKEIAGWIGVSHTRIWHVANMLLISPKIQEEILLSNNKALFSIPEYKLREVSTEMDWSKQQEIWNRLLKSQQT

SEQ ID NO: 2966 - protein, 567 aa, unidentified
  source 1..567: note = uncultivated organism
MARKSRKHTGQEIQAAKPAEQIYHCALYARISVENERKRESDTIGNQLQLLRDYASEQSDLQVFDVYVDDNISGVDFVRPEFSRMMNDLRDGRINCVVVKDLSRLGRNYLEAGEYIELVFPFFQCRFIAITDRFDTKYQQADFSVQLKNLANEMYAKDISRKITSAKRTVQEQGKLTTGRAPYGYLVDPADKQHLIVDEESAPIVKELFEMVAAGNTLHAAAVSMNERGVPSPGRLLHDRGMVTTGKFQDSKWYMPTIRRILMDEVYLGWMVSGKHRSAYLTTGQKGTIKVPREEWIIIKGTHEPIVTEDLFQKVQEYFVKTKEKHGLASLYNMKKRKASVLTGHLRCGECGKGMYLRQKKNGNTEKSGWYYCPMHENYNSSYCTKKAVRQEDVESLVLKLIQTQIKLFTDSRELCLSLNRQQSSKTKFRIYCDHIREVKGQIAKCMKNKAALYEDYSDGTISQKDYLAMGQQYAQKADDLRILLAELETESRKYSQTYRASSSWTHLAQQYQDIDTLTEEAVDAFIDNVTLYNNGHVEVTFHFRDEMDEVIHLAAIRRREAERYVI

SEQ ID NO: 2967 - protein, 537 aa, unidentified
  source 1..537: note = uncultivated organism
MPKYYATDYVRISYTDDKTCESDSITNQKKYIEEFVKNHPDIELVNTRVDDGYSGIVFDRPAFKEMMEDIRCGKINCVIVKDLSRLGREYNETFTYLRRIFPTLGVRFIAINDNIDTAKESVSNDLSVSFKGVMNDEYCRDISVKVRSALDIKRKNGDYVGATPVYGYKKDDENKNQLVIDEYPARVVRDIFKMRLDGLSADRIDAELNRLGILSPREYKKDRNIPMPKKGYCDKENSKWSATTILRILKDEIYTGKLIQGKQGTPNYKIKEIINRSADEIFVTENAHEAIINKRDFDLVQRLMQVDTRISPLKDKLHLFSGMLICGCCGNRMTRKTLSYKGNKYFYYYCPTGKKNGCKGSNMIKEADLITCVTDSIKAHIRSVASLQELLDSIDSNLVNKDMCKKITAQIAEVQKQLKKANDYKSSLYENYVAGIIDKDDYKTFKESYSADIKRYESALTELEAELDECMNNTSTKMKWIEHFKKFENISQIDRNTVVQLIMSIHIYDKTHLQITFNYEDEYEKALATLEEIKEAV

SEQ ID NO: 2968 - protein, 550 aa, unidentified
  source 1..550: note = uncultivated organism
MENTKQIQYHAAAYVRLSKEDLNSVSGLKAESNSISNQKQLILDYLKDKTDINLVSIREDDGYTGTDYDRPDFQRMMDDIRAGVVNCVIVKDLSRFGREYINAGKYIDRLFPYYGVRLIAINDGVDTITRSSADDFNIMVKNLMNDNYCRDISIKIRSQLQVKRKNGEFIGAFAPYGYEKSPEDKNKLVVDVYAAEVVRDIFGWKLSGINQDAIARRLNEQGILSPLEYKRSKGMPFKTSFKTKSKAQWTPVAVRRILTNPVYVGTLVQGIRTRPNYKIKTVIVNEQDKWAIYENAHEAIINPRQFVLVQRLLELDTRTSPRENGLFPLAGLLCCGDCGGAMVRKTQTSGNKRFCYYTCSNHKNTGECTSHRISQKQLEDAVLRLLQEHIRMLAELDGCLQTIRNAPVHRLSIRKAEDRLAAVEADIDRYRKLKISAYEDMRDGILSKEDYLDIKEQYEMRISEAQLAEEQIRHEIDLYIENGNAPQRWIQEFLDHRNIQSLTRIVAVECIDHIMIYEGKRIEVTFAHMQDYEALLSRVKDYYINQRGVG

SEQ ID NO: 2969 - protein, 555 aa, unidentified
  source 1..555: note = uncultivated organism
MEKNNLKTYQAAIYLRLSREDGDVDEGMKLVSNSISNQKALIMDFLKSHAEIKIHAVYADDGYSGVNFDRPDFQRMLEDIRKGIVNCVIVKDLSRFGRNYIEAGRYIEKVFPMLGVRFIAITDNYDSLEAQGGYGADMIVPFKNLINDAYCRDISIKIRSHLEMKRKKGEYIGAFAVYGYRKDEQNKNQLVIDEYAAGVVRDIFTMKLCGLSQQAIADKLNTDGILSPMEYKKSTGINLETSFKKSAQAKWCYNSVTRILKNEIYTGSLAQGKQTTPNYKIKTRVVKPEEEWVKVENTHEPVISARDFTLVQELLKQDTRISPERDALYPLAGMIYCGDCKEPMIRKTIPAGGRKYIYYVCSGNKKDKSSCSPHRIPEAELAETVLCLLQMHIEKVLTLEKAMEAIEKVPKMKADAAKFDERIRRKKEELEKAEKRKLNLYEDLKDGIISKKEYLQLKAEYDRRIGEAETSICSYEKELDLLLESKSSLHEWIREFKEYRNIQTLDRNAAVVMIKKVFVYSADRIEVVYNFSDEFERCMEYAAAYGEAPERKEAV

SEQ ID NO: 2970 - protein, 518 aa, unidentified
  source 1..518: note = uncultivated organism
MTVPAKPDKILRCAIYTRKSTDHGLELEFNSLDAQREACEAYIKSQASEGWQALAERYDDPAYSGGNLDRPGVQKFMKDIEAGRVDVVVVYKIDRLTRSLADFAKLVEVFDAKAVSFVAITQQFNTTTSMGRLTLNVLLSFAQFERELASERVRDKIAASRKKGKWTGGSVPLGYDAKDKRLVVNPAEAKTVRLIFERYLALQSFQKVIDELNAQGIVGKRRSVKDHVAGGAPFSYGPLAYLLKNRTYLGETGHGGKWFAGEHEPIIDRSTFDAIQELLKTNTEGRAGRRQQTGALLTGLIYDDRSNRMSPSYSVKNGIRYPFYVSSCLLKGRRAQAGSVGRVSALAIEQAILLGVRNKVGAHPGFGGLTPRELVESTVVRVVVHSEGVTVTMRPDISTDLLEVPWTARNGASAAEIEGETDSGGKGGEALVQAIVRAHVWLDLLSTGKHESIEALATAAGIHPKVIRNRIRLAFLSPAVTRAALSGEPSKRLGLADLNGSIHLSWHEQNRLLPVGAA

SEQ ID NO: 2971 - protein, 1215 aa, unidentified
  source 1..1215: note = uncultivated organism
MDQIDKSLWINKLWDPLEKIEDSPLHSKREGIKVAAYCRVSLDSLGLSHSLESQVSHYTHVINSRDNWTFVGIYFDNLVTGRKASLRRGFTRMLRHCEEHRIDLILVKNVSRFSRNTKELIEVIERLKEINVAVYFEAENITSTRSETAYLLKTYASIAQGEIEATSQAIEWGHEKRMMKGKVNIGHTYGYDKTKVGNETVITINEEQAQVVRQIYQMHLDGMSNNAIAGELTIRGVRTYFGKELWGPKTIASILSNIAYTGNAKTRKLTRDLMSNKRRSSEGIRDQYLIENHHPAIISQEVFDRVQEERNKNKRESKPQQIRPNPLSRRIHCGNCGQNFRRNRIKPWEYFRCVSAITNKNLCSSPTIREDLMVEIMLKAFTVRFDTQDPKLIKMLRRMLIRINQNDYFEFHRLKALTQIQLAKRLRDIQFTDEDINQLEKDYEKFENRLVEIEDDRDYRLGSIKWLENVKTFEEFEGKATIEYLRAWILSLDIYSKDDYKIYWIDGKETEVGSCKPIKPNIEESLSELHPNGDLVVQKDTNFELMTNIQIASEKGGDQNYVDEEDGKMLAERRLEPNLMVKNIQKQLSNSVIMRTSVPVVRDKKLKVAAYVRVSTELEQQKTSIKTQYSYYLYLILKDPRYILADIYIDDGKSGRTTEGRPEFKRMMEDCKTGRVDLIITKSLSRFARNTVDTLTYLNMLKSLDPPVDVWFERENLRALDEKSNVLINLLSALGQEESVNIGESIAWGRRSLAQRGVVRPAVQGYGYQYDKNKEWIINDEEAEVVQRIYDEYEKGKTIRAIRDLLISESVPTPGGQEAWCDTTIGRILRSEIYRGNYIYQRFHSGLTLANERVKNTGELPMYFIENHHKAIIGEEQWERVQKLTEANEKKRKKSQKKYPDDHGKNESFTKKFYCGKCGSLVGYSRAINRQKKNYEVRWWCCYQSSRGHCDSMYMKQEYVEENFSQLMMDIKFNPAFNAYLDAFIEDLRIKPVEEDQRAILEKQKDELNQKLYEAVEDELGRKGKDAKLVDHLTEEIMKIRERIVDFMAREEQQAEIEEEVKSLRKALAIYSDERRDDLGYYLNAPEFQPELFGRFIEKGTILDGSQIIYRFHSGFEWKSPINYKAFQEQEKRRKKAKYQLEKRAFLKGPEVKALLKYCEEPRKLTEMIDFLGKYSSKNAFRRIILNPLINQGKIKRTIPDKPGSKLQKYYSVKK

SEQ ID NO: 2972 - protein, 562 aa, unidentified
  source 1..562: note = uncultivated organism
MEPGKASRRRCAIYTRKSSEEGLEQDFNSLQAQREACEAFIKSQAGEGWRLVKTAYDDGGLSGGTMERPALQRVLSDINQGLIDVVVVYKVDRLTRSLADFAKMVEVFDAHGVSFVAVTQQFNTTTSMGRLTLNVLLSFAQFEREVTGERIRDKIAASKRKGMWMGGFVPLGYDVCDRRIVIDEREAETVRYIFRRYQELGCVRLLKEDLDRRGVVSKRRTSRTETESGGHSFSRGALYALLSNPIYIGEIRHKDVCHPGQHEAILDRAVWDRTQQQLLEHRVRSKSRDASVERSPLTGRLVDENGDGLTPSHARKGERKYRYYVSRNFPAQGLAPSRMGWRLPARELEGRVAAAVGEMLGDESAVLEAAQKTDINSSQVDRVLHAARTWRQRLQSEAEQTSAIGTLVDRVELKSDGIRVSIKLPVAGAEKSRVRLSDQIAIARSFPMQLKRRGVELRLIVGDHNRSRAIVDLSLLKAVARAHRWFDEISTGRARPLAAIAAREGLAVRYVGRLIRLAFLAPEIVESIVQGRQPTTLTAEALTRRIELPLSWCSQRIALKVG

SEQ ID NO: 2973 - protein, 545 aa, unidentified
  source 1..545: note = uncultivated organism
MAEERTYRTAAYLRLSKGDSDVDGAQKAESNSISNQRLIIDHFIEEHPELVLVDTYIDDGYTGTNFKRPDLKRLLYDIDEGRIDCIVCKDLSRWGRERIETGTYISKRFKEKGVRVIAINDHYDALTAEGSETHLIMPIKALTNDNYSRDISMKIRSSLAIKRERGEFTAAFAPYGYRKDPENVNHLIIDEQAARIVRQIFSMKIDGFSSYAIAQKLNQRGIPSPGEQRRMNGNEKKGRRRAAKAKWYAPEINRILRNEIYTGNMVQGRTEKVSYKVNRVIEKPRDEWDIVEGTHEAVISRTDFEIVQSLLDRDTMQSRPGEIPYLFSGLLYCGDCGCSMCRRKRPLKNGYRVDYVCSSYSNRSRNDLTCTSHKISEPDLETVVKDSINQMIVTMCEYDDLARNLDRMEISQEAAIDRDMEIRKLKEEFEKCSLLKSSLYQDLREGLLSEDQFERYRDQFTERERRLLASIEQEQKMIEQIYKDGIAAVEIVQRFKEDPKVRELDRRILVSLIDRILIYEDDRIDIVYRYADRMKKCEQIIENAN

SEQ ID NO: 2974 - protein, 523 aa, unidentified
  source 1..523: note = uncultivated organism
MSKTQSTITPRVRCAIYTRKSTEEGLEQEFNSLDAQREAGEAFIISQRHEGWTVMPQRYDDGGFSGGTMDRPALERLLEDVENHRVDCVVVYKVDRLSRSLLDFARIIETFDRNGVSFVSVTQQFSTTTSMGRLTLNILLSFAQFEREIIGERIRDKVAAAKRKGKFTGGTPPLGYDVDPEKTRLTVNPDEARLVRHIFKRFTEIGSPLTVAEELNKKGITTKAWMTKNGTFREGKPWHKMHIYRVLYNRTYLGEVLHKDKTYPGEHEAIVTKDLWARAHSVIEDNKRHRSQHVRAKAPALLKGLIRCGACDKAMSPVSTGPAHRNYRYYTCGRAAKTGYHNCPVRSVPAGDIEGAVVQQLRAIFKSPEMIAQTYKATNELEAEDIDRLRSERDELETRLAELRQSAAILMGSGAADSETAGEIRRTNDDFVDTQRRLQDVNEEIEGMQARLVSERDVAECLRRLDPIWDELFPLEQSRIVHLLIENVIVNTDGMNIRIRGNGLHSLVSEVRDRTARQERTDE

SEQ ID NO: 2975 - protein, 569 aa, unidentified
  source 1..569: note = uncultivated organism
MATEMKRSMRCAIYTRKSSEEGLEQSFNSLHAQREACVSYIQSQKHEGWKVLSTHYDDGGFSGGTLVRPAMAKLLEDISAGKVDLVVVYKVDRLTRSLSDFARIVEAFDAKGVSFVSVTQSFNTSTSMGRLTLNVLLSFAQFEREVTGERIRDKIAASKKKGMWMGGMVPMGYDLKDRKLLVNEKEAGTVRWIFDRYLELKNVRSLKVELDEKGVLTKVRVSAEEKRSGGRRWFRGALYQLLRNPIYLGEIRHRDKVYPGEHEAIVSREVWEAVQATLTENAARHDRGEGFTSPSLLVGCVMDDQGNRMMPSHTQRHNRRYRYYVAAGQEEGTAKGGLRIPAHDLEDGVWGRLRDFLSSPTQLLNALGEIGGRQAQVIQAGARAIQDWEGRSASDRMMWLRGLLEQVVVSPTSLTLHLSRSVLSSVLGIPEGPVTEGEMEGPIILASEVRFKRGGRGLRYVIPGPGGSWAGTQQDKPLLQAIARGRFWYDQLISGQAKSREEIARANGLSSQHVARHIQMAWLAPDIVEAILDGRQPKSLTVKRLLEKLPMDWAEQRRVLGFDPLVQAS

SEQ ID NO: 2976 - protein, 523 aa, unidentified
  source 1..523: note = uncultivated organism
MPKVAIYCRLSIEDKDKSDNDASASIQNQKAMLRDYCHERDWEIYDIYVDDGYSGIDRSRPEFNRMLRDCEKGNIDIVLCKDQSRFSRDTVVIEQLINDKFLEWGIRFIGVADNADTDSEIYSTMRLFTSAYNEMYVKDISAKIRRTLVYKREQGQFIASFAPYGYQIDPEDKHHLVIDEETAPVVRQIFDMYISGAGYRAIVLKLNSDGIVSPTEYKRQKGSKYVNLNADTSNARGLWTQSTVARILANEMYTGTLVQGKSHHISYKNKKRKKVEQADWIRIPNTHEAIIDAETWARTQARLRSNGRVGKRSQELSPLSGKVKCAVCGRPMKRNVYYNKAKTIKYYGLQCATYKTGAMNCTNKKSISGLVLEKKILDELNTIVEQYCQADKIQFKDIYSEQLKQLEAELSRLNERHSSAKGRLLAMYKDKLDGVISDEDYALFRQSLSDEEHELSARIADNAKHIEECCERIRNTEGQRSIIEKYTHFDKLDRNIADEFIDYVEIGESSENGEREIHIHWKL

SEQ ID NO: 2977 - protein, 514 aa, unidentified
  source 1..514: note = uncultivated organism
MANITLIPPKDKMPETLRVAAYCRVSTDAKEQELSYASQIRSYTDFISQHDGWELVDIYADDAITGTKTDKREDFNRLLSDCRRGKIDRVLVKSISRFARNTKDCLASVRELMKLGVTVYFEKENIDTGTLSSELMLSVYGSLAQQESVSISQNERQSYKRRMERGEFITAKSPYGYRMVGCGKLEIVPEEAEIVRRVYDAYLGGQSGKCIVNGLVRDGIRNRDGNLRWTTTQIYYWLSNEKYIGDTLCQKTYRSDFPFTQKINHGEVEQFYIENSHPPIISKEQFDKVQALRTFKRKHRTCQSIFPLSRKMTCGLCGSTLYRRVSKNGISIWYCKRHLDHAGSCPIGIIPENDIYTAFMRMYNKLRLHEGIILRPALVQMEDLETALHRENPAMLEINRAIAQTTERNHKISKLRADGLLDANTCATQMAATTAQLTSLRAKRRKLLQSSDIGEAADALRQTVERIRQGPEQLTEFDEVLFGELIKKITVPGNDRLCFLLYGDITVTEPLTEG

SEQ ID NO: 2978 - protein, 564 aa, unidentified
  source 1..564: note = uncultivated organism
MIIVEVKERYHVIYSRKSKYTGKGESVENQVDLCKQKLLVKYHDLKEKAIKVFTDEGFTGANTNRPAFQKLLNEIRNGKVDSVTCYRLDRVSRNVGDFCNLINELEKYNVGFISVREDFDTTSPMGKAMMLICSVFAQLERDTIAERIRDNMLELAKTGRWLGGTPPTGFKSVEVQTFNQDGKKKKLFKLEAIPEEKNLVILLKNKYIEIKSQTGLETYTIQNNLQTKNGKRFTRWSLVNILSNPAYSMADQDAYNYFTNKGSIVIGDKKEYNGKYGLMVYNKTNQLTGKGKKDNPISEWIVAIGKHKGFWTGKEYEKVLTLLELGANKRYRKPAVNNALLSGLLRCTYCDSFMRPKIYNSDDQGKVKFSYLCELKDKSRKIKCNHKNLNGNETDRFVKKVIFELIDNKRDYYTSLKDLASEKLNKLDQKSTELYTLTNKIKKNEKDIESLIGKIKIVPDDIVPELAKEIQKLKNTNKKLNEGLKLLNVDKTNIIDDSENEKIVLQILNTYNHKFDDLDLLQQRTLVKLLIDSAYSDGENLLLNLTGTRESSKMTELPLCDNSK

SEQ ID NO: 2979 - protein, 517 aa, unidentified
  source 1..517: note = uncultivated organism
MVIGIYPRKSVYRDNSDSVQVQIKMCKEYAEIIFKGQELRFLVYDKDEGFSGKNTNRPSFKELMSDVQADLLDAVIVYKLDRISRNVREFSAMYEVFQQHNVAFISVKEAFDTSTPMGRTVMYILAAFAQLERENTSERVSDSMHALGISGKWTGGRCPAGMVSVRHTVGSKEHSFLEVDKNTIGDVKLLYKLMLEGYTITRVERYCRDHGIQTRNGAFMCASKIHNILTNPVYCQDSIEAYEYFKSLGCSLPDPSLFDGKHGLIAYGRTKNTADTQKRQVSSTWAISIGIHAAVIPATDWIAVQSRLGINKMYHSAKYDIGLLKGVLHCSCGSRMDVRCYKKNGRFFSYYYCAVMARQGKKACPSEYTRVERIDDAFLSQLKTIRLNPDGFCLRLEQDDSFRAESAIKTDLKQTQEAIDNLTSALAQSSGSTAISYIVSKIEEFDRHKSALEADLRRARAREKETLSIQEKEKIIYENICFLLDNFNEIGYSGKNELIRKIVKNAVFDGKKLSIIF

SEQ ID NO: 2980 - protein, 513 aa, unidentified
  source 1..513: note = uncultivated organism
MRCAIYTRKSTTHNLDLEFSSLDAQREACEHYILAHAHEGWTLVDKQYDDGGFTGANTERPAFQRLLDDVEAREVDLVVVYKVDRLSRSLLDFARVMDQFNKHGAAFVAVTQNFSTANALGTLTLNILMSFAQFERSMIAERVRDKLRASKRRGKWTGGRVPYGYDLADKRLVECPQEAEIVREIFQSYGECQSATTVARRLNARGLTTARYAVKGYATRAQAWAKFDILRILKNPVYIGRVRSSGAEHPGEHSPLVDGEAFRGAQERLAKFAERRGAVRNEAYLLTGLLRCGVCGGAMTSSTTRRNGHEYRYYGCRTRSDRGKEACATRRVSAQPLEDMLVERLRREACRPGLVREIKKELAVQVAERRKQVASDRERLPRELARLRTEADRLYVAIGRTTGEAREQFAERLLGLTEQIAENQERLERMESDAKALEELDANAEWVVEALGRFDEVWEVMTHDSRRRLLHALVTSVVYNEATGTVTTELALARGPKSSSESAQPMAGGINGG

SEQ ID NO: 2981 - protein, 585 aa, unidentified
  source 1..585: note = uncultivated organism
MRSPRHGRPNDGNGTVVRQHRCAIYTRKSSEEGLQQDFNSLDAQRDACEAFIRSQKHAGWIGLSEMYDDGGISGGTMERPALQRMLAEIEAGRIDTVVVYKVDRLTRSLADFAKIVDAFDAKGVSFVSVTQQFNTTTSMGRLTLNMLLSFAQFEREVTGERIRDKIAASKQRGMWLGGQPPLGYDIRDRKLVVNAAEADLVRHIFQRYTVLKSVTVLTQELDEADIRSKLHTDTQGKTVRGGRPMARGALYNMLQNRLFRGEIVHKGRAYPGQHDAIVGPDLWDAVQAAFAENRVQRATGTGSREPALLIGLVFDAAGQRLTPTHASKQGRRYRYYVSSSLVRGSREGAPGEAIRVPAAELETIVENRLCSLLRDEGAVYDAAIATEAGVRAFKAMLADAAGLAARWPAMPMAERRAMLQAIIVSVAVSAASVDIEVDLTRLLHTLPDKTEGTAAELTSKIPTMVLTVPAELTRTGQQSQLLIYGSKSGAARDPDRSLVRLLAQARQFRDMVMQGQGRGMGDLAADAGVSPSYFTSVFRLGFLSPEITRAILKGRQPDALTANQLKLIAGLDPSWSKQRQQVGFR

SEQ ID NO: 2982 - protein, 522 aa, unidentified
  source 1..522: note = uncultivated organism
MIRKTNSKPTVPTIRCAIYTRKSTDEGLDQEFNSLDAQRESGEAYIASQRGAGWVCLPEQYDDGGFTGGNMERPALKRLLADSEAGKIDCVVVYKVDRLSRSLLDFARIIGVFEQRRISFVSVTQQFNTATSMGRLVLNVLLSFAQFEREIIGERIRDKIAAQRRKGKWTGGTPILGYDVDRTGPSPKLVVNAAEAARVREIFSLYLSHGSLLPVVEELVRRGWDNKAWKTKAGGPKGGQPFDRGSLHALLTNPLYAGKLRHKTDLYDGEHEPIIDPEVFQRVQTQLQKNSRSGGAEVRNRYGSLLKRLLYCKACGHTMVHNFTGREGKRYRYYTCTHAIKSGRSACPSGSLPAAEVEQLVVDRIRCIAHDRMLRVEVLRQARTLVAANLENLGTESGGLKRDLARYHAELQKLTADGPVRGVKADRIADLHGLIAQAETRLAEVRVQIQHQEHERVEEHDVLAAFTDFDRMWNALSPREQAQVLTLLVERVEFDAATSEIVVSFHPTAIKTLAQEQRGEAV

SEQ ID NO: 2983 - protein, 514 aa, unidentified
  source 1..514: note = uncultivated organism
MIQQWADMHDHEVIGWAVDMDLSGSVDALDARRKTELGDWLRNRSPEFDAVAVWKLDRLSRSTINLNRLFVWCADNGKTIVSATEGIDLSTPVGRLIANVLGFLAEGELDAIKERTKAGRKKVVESGRWPGGPAPFGFEKAKLDGGGFKLKTRADQVLVIKRIRDEILSGLSMEAVAKRLNDDKVPSAQGTAWRSSVLFVMMKSKQLLGHSTYKGETVRDAQGMPVMVSDPVFTQDEWDRLQAAIAARRLPSAKKRTQSTSPLYGVIFCYDCGSMMYHRKYKGEYRYEYYQCPKSCGWMIHAAAINSFLETVFLTEVGEGKVKERVYIPAESHEAELAVAQKGVEEITAMFGAMTSDTVRRRLTEQLTALDAQIKRLEAMPSRQSHWDYVDTGETYAGAWKVADTAGKRELLVKSGITLAAVKSKATSGVTVKLAVPRVLAEQMGLKAPQSGSLSELFSGGDIRGIELDRAGSRYVDTAVVHPAEGDPVEVHILTDEGEAAAAEFYGWNTEEDP

SEQ ID NO: 2984 - protein, 501 aa, unidentified
  source 1..501: note = uncultivated organism
MQRLRCREFAAEKGWTIVCELQEEGISGHKVRAENRDKIQMIKDYAVKQKFDILLVFMFDRIGRIADETPFVVEWLVSHGIRVWASQEGEQRIDNHTDRLMNYIRFWQADGESQKTSIRTANSMHILTEQGYYTGGSRPYGYDLVKSGRVNKKKQEVHDLAINEEEAAQIRLMFHLAYTYGYGAQCIANHLNANGYKNRAGSNWHPSTIQSILRNATYTGILKSGKTLSPVQSNLCIIDRKVFDSVQDMLETRSRKYQETRSAPLNTRGNSLMAGNIFCGHCGARLCITTSGKGRRRSDGSDVVRTRYCCQTKTRTHGECSGQSGYTVHKVDEIIDAFVRSILEKVRAVDRSEIIQAQNKADMAAKRRHVSELQREAVKAEDELRKLQNEIIKSLTGESAFTPQMLRPVIDAQESKLADLMQTLKAAEEDMRDSENNLLTLAERFDDVLQWAAMYDKADMPAKKMIVSRIIERVDMFRDYEIKITLNISIEQFLNTIEMVA

SEQ ID NO: 2985 - protein, 660 aa, unidentified
  source 1..660: note = uncultivated organism
MEDTYCSRKGKKCVIYIRVSSERQVKGYSLEGQKRYLKEWAEFEGMTVSNIYVEPGKSGKSITGREVFQMMLNDISSGSVEADYVLVFKLSRFGRNAKDILNSLTYIKRYGVNLICKEDGLDSSTSMGKMMITILGAVAEMERENILAQTMLGREEKAKQGGWNGGFAPYGYELSDGKLHIKEDEAAIVRLVFDKFVNGGMGYSTIAGYLNRQDIPKMPSKNSHGRKFVDWSIHHIKRMLDNPVYTGRIAFGRTRLERVEGTENEYRRVKSDDYILSDEVVHEPIISDELFEAAKRKRQETTTTGNPRVGRYAKHLLSGILKCPMCGSSMYADIVQWKNKDGKVMQKNKYQCGHYAKSKFGQCQKNTISAEWIEGEVIAYTKLLVRNKQFAEEIQSKLGNKTDVTEIDKELDNYHKLIKKLEKSKSNLERDIDAIYDDDKYAERKRQDMNNRLNKIYEEIYDIEDRITDSEKKKEAAQQDVLTKENVFKMLLVFDKIFDKMNDVDKRKLIESMIAEVHLHPKETWEEGKNPIKEIKYAFPVSKEVMDALRENVASVETVVLLSQLRQKPDDYIDVDIDVAELEGTSAETKATYEKIKKYVAEHNDGMKVSNLYIAQVKRKCGIELAENFNLPKSENARQPRCPKEKEEAIVEALKAFQMI

SEQ ID NO: 2986 - protein, 595 aa, unidentified
  source 1..595: note = uncultivated organism
MARTKDRARQEIKAGKTLAFRTATYARLSVDSAVTESDSITSQQMLMRDYIKGRDEFFLVREYKDDGISGTRFDRQGFDSLLAEVRKGNINCIIVKDFSRFGRDHIEVGNYLEKVFPFLGVRFISVNDGYDSFDRECADKKLAVILKNLVNEYIAKDTSVKVASSYVTKQENGEYDGGRAPYGYAFADERKTRFLVDERPAEVIRDIFAWTMQGDSTLAIVKRLTEKNINPPKAYQDTGEFYRQEKERRYWNEFTVNSILQNMAYAGHMALHKWKESKADGISPYRLDESEWKITRNTHEAIITEHDFSLVQEILRARKERHKSLNALDENIIRPDNLLKGKVFCGDCLVPASRMGTNYQRKIGKVRIYRYRCRTYREKGEKECTSKSISEKDLEKIVYQAVMAFIRQVECLDDMVSRFHSEFFQKMQRSIQKEKGMAERAIQQEKNEKILLYKEYSSWEHNVKYSSTEQACKDEIPDSNKEWYLKEKQKRDREIRYHEERKAQSEKKTAFFERLEKEQAGWIKEILSYKDITSDEEGLTAQMASIFVDKIFLYDAKRVEVVLNFKDEYQTLCQLIDESLYSHMGQVCGTEEGRG

SEQ ID NO: 2987 - protein, 524 aa, unidentified
  source 1..524: note = uncultivated organism
MAPRRNGRAVAVATIAAPVRCAIYTRKSTDEGLDRAFTSLDNQRERGEAFITSQGWTALPARYEDGGFSGGTMDRPAMKRLLADVDAGLVDTIAVYKLDRLSRSLVDFGRLHEFLEKRDVALVSVTESINTSTPHGRMMVNVLLSFAQYERELVGERTRDKIQAARRRGRWTGGMPPLGYDVAPEGGKLLVNRSEAALVRQIFELFAATPSLIETAAELNRRAWRMKSWTTRDGKLREGSTWDRVSLARLLKDPRYVGKQRLGDEVFPGEHDAIVPRALFERVQRMMHGNRRTGGASGRNRHGALLRGLLRCTACDRAMTHTPARAHGRLYRYYRCQAAQKEGAAACPSKPISANRIEAFVVDQIRRIGSDPELQQATFDQAVSQVKARRRGLKLEQQRLRTELGAAQADVQRLVETVSRVTGPAAEAVAAELNAAQERATAAERRLAEIKAEFATLDPQALDRDELARALEAFDPIWDVLLTPERERVLQLLIERVSYDGSAQELAISWRLSGFGELAAEVAP

SEQ ID NO: 2988 - protein, 533 aa, unidentified
  source 1..533: note = uncultivated organism
MKTTKPQVRRCAIYTRKSSEEGLEQDFNSLHAQREACEAFIRSQKSEGWKLVEAPYDDGGISGGTMERPALQRLLADIAMKKIDVVVVYKVDRLTRSLADFAKMVEVFDAHGVSFVAVTQQFNTTSSMGRLTLNILLSFAQFEREVTGERIRDKIAASKRKGMWMGGNVPLGYDVTERKLVVNEPEAETVRAIYQRYLDLGCVRRLKESLDRQGIRSKTGQSFARGAIYALLANPLYVGEIRHKDLRHPGQHEAIIDRALWDEVQQRLADNRPDREDRSGKVEASPLAGKLFDEAGERLSPSHAVKNSRRYRYYVSRPLVTGIAGRQQGWRLPAREIESVVTDAVRVFLADRAATSTAAREAGICAERIPAILDGIERWDGEPLDLVRRVDLGSDSLILTLALDTPAGEPGLTVTRNIPMTIRRRGVEMRLVIDGGGPAPKADPALLKSIARARGWFDDLVTGRVASITAIARRDRINDSYVSHLLPLAFLAPDIVELIAAGRHPVDLTAETLVRRIDLPLGWDEQKVLLGVA

SEQ ID NO: 2989 - protein, 538 aa, unidentified
  source 1..538: note = uncultivated organism
MQKYKTAAYLRLSYTDEKSAESDSILNQKKLINDFIASRPELELVSERIDDGWSGTNFQRPNFQAMLADIEAGKINCVVVKDLSRLGRDYIDTGRYLRQIFPQYGVRFIAINDNIDTLKDRCDDISISFKNIINDAYAHDISKKTRSALAVKRKNGDYVGACPIYGYVKSADNKNRLAVDDYAAEVVRDIFRMKIEGVSAAKIANELNTNGELSPIAYKRHHGLPFPKGGYADVSEAKWSATTVIRILKDETYTGVLIQGKQTTGNHKIKKLTSKPSDEWERTEQAHDAIIRRHDFELVQRIIRLDTRISPQNSEVYLFSGILICGCCGGRMTRKVNANQGNRRVYYNCRTGRKNGCETPVMLREPDLIDCVLQNTKSYINNIISLNEMLTTMTTENLNRSLVEKYSVRISENENRLEEVRKFKSSLYEQFVNGNVSKDDYKYMKASYDADYSRLTAAKTTLNSELENARNSTGERLKWVEHFKQYSGLEELDRKAVIRLIRSIRVVDKKTLDITFNFADEYGMAVMFKKNESTKEVV

SEQ ID NO: 2990 - protein, 515 aa, unidentified
  source 1..515: note = uncultivated organism
MRAAVSVAAYCRVSTEKDDQVNSLEAQRQYFKEYIDRQPDWQLYQIYADEGITGTSTKKRGQFMRMIGDAQEGKFLLIITKEVSRFSRNILDTIAYTRQLKALGVGVLFMNDGISTLEPDAELRLSIMGSIAQEESRKTSSCVKWGQARQMERGVVFGRSLLGYDVKDGTMTVNPEGAELVRLIFRKYGLEKKGTSVIARELREAGYRSLTGSAEWSSSYLVKVLKNEKYVGDLVQKKTITPDYLTHAKKLNHGQEALIVIENHHEPIIDRELWNTVQEELRKRNRHNRQNTGHSQRYVFSGKIKCGLCGANFVARKKYRKDGSHTLRWACLTAAKEGREHTDSVGKRSGCNIGRLISDDLAVEMLRQAILTLKIDRRWIINNVTEIAVTAIKDEEHGTAEKLEQELKRLTRKKEDVLDAFFSKQITLDEMKMLNKRCDRQLEDLKERLDRVKQKAVLSEPGSWEAIQERLSSVLYCRTESEPFVKEILEQIVIYPDKRAELILHHLPQRWWFQL

SEQ ID NO: 2991 - protein, 540 aa, unidentified
  source 1..540: note = uncultivated organism
MQATVNAGVYCRLSVDDPDTDESESIQTQKAMLTDYCHQHGFHIVDYFIDDGVSGTSFDRPDFRRMLDAIESGTINTVICKDLSRFGRNYYESGMYLDNYFIRKNIRFIAPGNSVDSANGAYNLSVPILNMMNDFYARDISTKTRDAKKARAKQGMYLAAKAPYGYVKDPADRHHLIVDEEAAVIVRRIFDMAAHGAGYNRIARTLHTAGIPNPLTYFNQKNPDYYHSDYWKQGTQWHVTSIQSILNNPVYLGCVAHNRVGSKVMNGKTEKKAREDWIVVEHTHEPLVSAEQWEIVHKQMESRRRAQKDGEPQMFAGLLHCSDCGSALSFSAVHRKTKPDGGQYKCWYYMRHGKEYCSSHYITLDQLSTVVLDDIRRQARYAYFYHGQYLKTLKEAKAEQSVKQLQSRKKEAEKCKKRLAALDGILKKLLEQNAAGAITNERFAALSADYEQEHKALEETVADYEKAAQSAREGEEQAEQFVKLIQEYTNLTALDARILNKLIDKIVVHQREKDAEGNITQLVEIYYKFVGMTVLNFKEQ

SEQ ID NO: 2992 - protein, 500 aa, unidentified
  source 1..500: note = uncultivated organism
MKENSALKKRVGIWIRVSTEDQAKGESPQHHEQRAREYAKFNEWTVVEVYDLAGVSGKTVMENAEAKRMIADVKRGHITGLIFSKLARLARNTKELLEFADLFRQHGVDMISLQEKIDTSSPAGRLFYTMIAAMAQWEREEIADRVKASIKIRAKLGKSLGGAAPFGYEWKDNKLVVHPIESHVRKLMYELFSKNKRMKGVARLLNKSGYRTRNGSEFTDTTVLRLIQDTTAKGLYRSNHTYRDGNGKLLAKPEAEWVFTPVTPIVSEELWKECNDALDARRADRPQGRKPVHLFAGLLYCGCGQKMYVFSRSPKYVCPECRNKITVEDIEGIFHDELHDFFVSQEKIKTHLENANQNLADKKHRLEAHTRQIEKVHTEMRKTYQLYQADQISSEGFGKIYKPLEEQDRALTAELPKLQAEVDAIEMRQNSAEEVLAEATFLHRNWPQYEPEKKRQIIESIVEKITLLADRIRITWWNLPSSEELTKRQRNLWDSLPPPA

SEQ ID NO: 2993 - protein, 501 aa, unidentified
  source 1..501: note = uncultivated organism
MDVTPQDTTKLQLRAATYARLSETYDAAESVPTQLANADKHAERRGWRVVARFKDDGYSAFKEIRRDDFVNLIAAIERDEIDVVIIRDVDRLTRNLPDWNRFEKAAVEHRVILSAYTGGDLDLSTPEGAYYGGMETLRAKRESAVRSVRVREAHDRIARQGKSSGGGPRWFGYTRIYANPEETSKHKRVVLRVEIDPVEAGALRDAAERVLNGETVGSIIREWTRRGIKPSRAQKWEESSLVKTLKSPHVAGLREWQGQTYPAQWPAILDEDTHERLVKLFADPSRRAHVVGRKQHLLSGIARCGKCDGPLYPAGASKGKSATYRCVTGPAGKGCGGVSVNAEILDEYVTGAVLDALESPRVQQAVHAGEDTSALRRAELLEEIRKAQDKRAEARRDWAEDTIDRADWLDIKQRTEARIATARKEYDKLTGSAAVFGDIPASDMVRDAWEGWNTDRRRAAVKSILNRVIVSPHAGRKGGPNLTPEIKLQFLRDRTEFDWRF

SEQ ID NO: 2994 - protein, 526 aa, unidentified
  source 1..526: note = uncultivated organism
MIITSKKAALYARYSSDNQRTESIDAQLRAMRDYCKHNNIAIIETYIDEAKTATNAQRPAFQQMISDSQKKNFNIVLVHKLDRFARSRYDSALYKHELKKNGVLVYSVLEHLDNSPESIMLESVLEGIGEYYSKNLSREVLKGLMENALQCKHTGGKPPLGYEIDPNTKKMVINPYEAEAVQIIFDMYAKGYGYTEIINVMDVKGFKTKKGNDFKKNSLYSILTNEKYIGTYIFNKTSAKSLNGTVNTHSYKSRNEMVTIEGGCPQIVSEQVFEKVKQRIEKNKHSGCCNVAKHRYLLTSKVFCKTCGKSMTGNAHRCTKTGTIAINYRCHTNRRSCDNKEINRSKLEKCVISILEKHIFNSAAIKNIAKNIYAEANIDRSNHTQEIALLNSKLAETNEAMNNIITAIATGVKLNSLLEKLTELERDKASIETAILKINSQNHTKDKHSEIIIDPKHILEEYSNVKKDMYGFSYKEFIQSFIHRIEVGRYSVDITINTGLGIFPELNKTLTIRRQEIYKTHIQKAG

SEQ ID NO: 2995 - protein, 528 aa, unidentified
  source 1..528: note = uncultivated organism
MHAQREACEAFIASQAAEGWRAIACTYDDGGLSGGTMERPALRRLLAAVEQALVDVIVVYKIDRLTRSLADFARMVEVFDKQGTSFVAVTQQFNTTTSMGRLILNVLLSFAQFEREVTGERIRDKIAASKKRGMWMGGFVPVGYVKRDRALVIDEQEAETVRLIFRRYTELKSVRLLKDDLDRRGVVSKIRIGKNGLKMGGKAYSRGKLYKLLSNPIYKGEIRHLKTCYPGQHQPIVDSELWDNTQRLLADSAVRTANESGTPTRSPLAGKLFDESGGLLTASHAVKKGRRHRYYVSRRLLTEGANQTANRGWRLPAVEIERSVAAAAAAILEDKSGLVTAINQGGIESERIASILERAATWVEKLRSDAFGEALAKSIERVGLGRDGLKLKLRLPCAVGDSSEELTLDQFVPLTMRKRGVELRLVIRNEPSSKSTVDLVLLKTIARGHRWFDQLVSGEAPSLSAIAAREGLNYRFVGKIVRLAFLAPEIVEAIAEGRQPPDLSAELLTKHLVLPLDWDDQKRLLNLA

SEQ ID NO: 2996 - protein, 565 aa, unidentified
  source 1..565: note = uncultivated organism
MYKNIEEIRTALFCGKRIYDIPLRVTFYGRVSTDEDKQLNSLEHQIAYFESKIKSCEKWEYVPGYIDEGITGTRADKRPQFLKMVRDAKAGAFDLILTKEVSRFARDIVDCVQTVRELLRYDVGVLIEDINLNTMDKDAEFRLSIMAIVAQEESRKTSERVKFGYRQTMKDGKRHGATPPIGYRFNNENNGYYVDEQKAKLVRFVFEEYAKGELGTRRISELLVQKGFLNDAGNPYNPSTIERMIRNPVYLGYIVNGKTYKPHYREDIKVAISRDQWQLHYDPIRVPPLVSEEVWEKANYVLGERSKRLDGVDCSGKDATGLGKYAYSNRIVCGDHGCGYHRSTSRWTVDGVQKRVEYWRCCLYKKYGRKQCEAPILYKRDLDEIMRKLFSTLIPLLKDACGSLHGALAQALEEKQTEDIPELERQIVVLEQKKKKLLDGWMNSVVSDSDYQDMRKRLEQQIEGLNERKSQSKNASAEPNVSAASFAIMQKAISNTNLDSEEMLDELVRCFVNKIVVKRKEDAEVSGKKVPYMLEIWLQNAQTPANFDLAQCARTHRCPVRRTGP

SEQ ID NO: 2997 - protein, 557 aa, unidentified
  source 1..557: note = uncultivated organism
MQVHPLKRCAIYTRKSSEEGLEQDFNSLDAQREACEAFIKSQAGEGWRLIKQHYDDGGFSGATMERPALQRLLADIREHLVDVVVVYKVDRLTRALADFAKMVEVLDDQQVSFVAVTQQFNTTTSMGRLTLNVLLSFAQFEREVTGERIRDKIAASKRKGMWMGGYPPLGYDAHEHRLLVNEDEAVKVRDIFERYLRLGSVRLLKRELDRDGVRSKRRISISGRASGGHSFSRGALYKLLSNPIYIGEIRHKDTSYPGQHPLIIERTIWERVATRLRQRLTRPQQPTAGSTPSLLLGKLFDEQGEGLTPTHTKKGQRRYRYYVSRNLLKGTGQDGWRLSAAELEGVVLSGARQMLGDQRLLVAAVAAHDLAAPQIASLLRVAAERGQQLESAPPDHEQLRSLLERVELQSEGLRLTLRLPLLTATHRDANILVTHDLLLQIRRRGVEKRLLIGGAAPPRVRIDQALLKAVARAHCWLDDLISGRVASMAVIGEREGVSKRYVSRVIRLGLLAPQIVAMIAEGAQAPELTAQSLLMGEKAIASSWRVQHQAFGLAVPA

SEQ ID NO: 2998 - protein, 560 aa, unidentified
  source 1..560: note = uncultivated organism
MKKCGLYIRVSTLRQASVKEGSLANQEYLLRHHIEYKNNLQGDSWEVVEIYREAGRSGKNTTERPEFLRMLEDAKAGLIDTVMVTALSRVSRSTRDLLEMIETFKRYRVDFISLKEDFDTTTAQGKCFMTIVGALNEFEREQTSERNRASALARAERGLWNGGQVLGFELPEEREKKGTLIPDKKEAALVNFSFDTYLQCGSVPKTCKIVNGKGYRTKEYRTQMDKIHPAREFVYSSMRNLLTCYAYIGKVEINKRRKYMEQLKLPEDERHRVVDAAWEGIVSEEKFLKVQHLLKKNCQHKHNGTTPLRHNYLLNGGLLYCRKCGGVMEGRSGNGKMKKKYYYYVCTNKECRFKVSAGEIEGLIRGRFREIAFNDEAMRGLVQLNNEKLMEMLPALHSRRRLQVRELEKIRKKAKTIMEGLMMDGSGPGVVFVKEELDELGGKREEIEKSIKELDRQIERIEKKYIEEDRLQEGMKQFDGCFDGIKPYQQRELMHLVLGRVELGEESVKLGLNYLSADLTRIYEKAINKTERGNFRALRCSSYGDDGTRTRNTRIDSPVL

SEQ ID NO: 2999 - protein, 575 aa, unidentified
  source 1..575: note = uncultivated organism
MSTLQRRSIRCAIYTRKSSEEGLEQSFNSLDAQREACQAYILSQRQEGWRAIDTHYDDGGYSGGSMERPGLKRLLADIEARKIDTVVVYKVDRLTRSLADFAKIIEVFDARGVSFVSVTQQFNTTSSMGRLTLNVLLSFAQFEREVTGERIRDKIAASKRKGMWMGGMVPLGYDLKDRHLILNEKEAEHVREIFRLYLEFGCVKQLKAHLDQRGVKSKIRVGHSGRSSGGAAYSRGALYKILQNRIYLGEIPHKGQSYPGEHSPVVDRELWERVRTLMAENVRARRHGTNANAPSLLRGLLYDEDGNRFTPSHAIKRGKRYRYYVSQRVIKDAASPSVQPGRIPAREIEKVVINELKSFFASADQVVSALADAEDDLATTQTLIEAAVGCAKRLEGTSPSSLSEMLETIVARILVHEGSVEIQINRAKLRAQLLAPNRTDPQAQDAMDDFKQQPISLTIETKLKRCGGEMRLVIPSSSAGPAPGNAVPALIKAISRAHEWVRQIVAGQYKDQRAIAVATGLNERYVSRIIQSAFLAPEIVEAIVKGRQAPEMTLATLLDEVPLSWAKQNARIALI

SEQ ID NO: 3000 - protein, 525 aa, unidentified
  source 1..525: note = uncultivated organism
MKTGVEYLRYSSDRQTEQSIEGQKRVCDEFAKRNDIVIVDTYIDRAMTGTNDNREAFQQMLKDSDKKAWDFVLVYKLDRFSRNKYEMAIHRKHLKDNGIKILSAMENIPDTPEGILLESLLEGMNQYYSEELSQKTKRGMNETRLKGNFIGGIPNYGYSLKEITADVNGKQVRTALKVIINEEEAPILKAIFTDYSNGKRICDIVKELTERGVLNRGKPFLAGTIYSLLQQEKYTGIYRLNGAVYDKIYPQIIPPELYETVRKRIDANKYGKHVPGIDYLLKGRIFCGYCGNPMYSYTGTSCTGKINRYYKCRAIKKNTPCDNRPISKEVIERFVAEAVTDAITDKANLALLMDRIISKQRKQFSDDFTLRSLQKELAKTNKAISNIMNAIEAGIFTETTKARLQELEIFRKELGEKILIEGTKTKEALQAEDIEKYLKEAIKLKPKSMIELLVEKVVVFTDRAEVFLKYSPDSNETNSPDGNNSGRGCFIVRYDKSIEKPKAGRRRGGAPIQTYTAKFTISVFI

SEQ ID NO: 3001 - protein, 612 aa, unidentified
  source 1..612: note = uncultivated organism
MKKVQIGRSRMAEEMAKPTWMPEASEDKKKGAKRKADVAQAVATPDKESTKTGRRVDTILAAPTEKRNLRVAAYARVSTDLDSQETSIENQREHYLHYIEGHEDWELAGIYEESGVSGTKADTRPELQKLLHDCEAGAVDVIVTKSISRFARNTSECLEMVRELTGLGIRLIFEKESIDTETMESEFLLTLLAAFAESESASISTNQKWSIRRRFQAGTYKGGKVPYGYRKSKKGYVIHPAEAATVRRIFHALVAGKGTVVIARELNEDKVPTWTESYKGEEGKGRWRSNSIIAIARNEFYTGDTLYQKTFMDEGYRKRVNTGQLDQYLNEADHPAIIDHDTFRKANEAIREHGEAYGRRETTKRYVFSGKLKCGCCGGSMRRGKDARAFYACGNHLRKRAVSITDGIRSAEAVPQSKEEQDAETTCPMLPVFERDVKNAFAMVLNRLAAEPSILAIPDSDGAEREKLEAQLQSVKRRQSLLHDRALADRYTAQLREKKAALDTEEQRILDALAKLEKKSPVANLQRAVRKRGIQESFTTSDEALFTTFVDHAVLWSKEKAQFHFTCGLVAEEDMRVEKVGRSYAPLPVRTEFGGADEAQRADEQKGAFTWQ

SEQ ID NO: 3002 - protein, 613 aa, unidentified
  source 1..613: note = uncultivated organism
MQNLRHGGCLKPWDINDLMITANTKTQKKRYVIYTRCSTDDQAQGDFTTLDAQAYHCKNMLDAFGYELAEIGKKGIIKDDGYSGKDLNRPGIQLILNNVKQKKFDGIIFFRLDRLTRNPRDLYALIDLFRDTGIDFISVRENLDSSTAIGRVVIGILGLLSAFERELTGERVKASCLARVRQGKWVGGNVPFGYKLIDDGDPLPNGRQPHKIIINPDIGTKLRFVWEMAADNRSLYDIAQELIRRDIKTPSQKVWRKQSVAWIIKNPFHKGYVKYGDEVHKGTHPAIVDEQLWEKANKILTAKLPGHRFIKQPREYIYFLSGILKCGKCGSHYVCESGNGHTSEKFFYYVCGRSKQGLGCDASRLSAKGFDDALIDYFKRASNDQEIIIKAIGDAILDSQIKLETIEKLIKPLQEKLSSVQQEANKLLDLAMNSRVSQGKTYKDKMAKLDEEILRLEDELEKLLAKKSVAQTSANSGEFLHSNLRFAMQYIDQAPPDARKALIKALIKEIIVYQDYIEIKMYIDQPTIDSLSCKLPAPEAHNPTQNDKRPAGETCKALVTASDARISPERQGWLGRMDSNHNSETQILVSYHWTTSQMIYILYVVRRDIVEFP

SEQ ID NO: 3003 - protein, 544 aa, unidentified
  source 1..544: note = uncultivated organism
MKPLRCAVYTRKSTEDGLEQEFNSLDAQREACEAYILSQRHEGWSLVPNHYDDGGFSGGTMQRPGLAALLADIDAGLVDVIVVYKVDRLTRSLADFAKIVERLDAKHASFVSVTQAFNTTTSMGRLTLNVLLSFAQFEREVTGERIRDKIAASKKKGLWMGGPVPLGYQVVERKLVPVPEEAERVRNIMRRYIASTSANQLIAQLELEGIRTKVQQRTSGPHKGGIPFKRGSLFHLLANPIYRGMIVHKGKVYDGEHDAIVDEDLWNAVQARLQEKAPPRNRKSNDPQEATLRGLLTDPEGRSMVPTYTKKGTRRYAYYETRKDMAANEGAPAPTRIAQSSLDRHIVSHLTTLMDDEHALRRLTNLQEASQLTASFDAARLRRLELEHPATRDDTVQSLIAGIAIGASSMRITINLGALGSQGEKPLDLPLHERKPFREVKLRIDSTAISTRTDRKLVSLIAEAMEARELVLASPELSLNQLSKREGRCRTQLGKLFRLSWLSPRIVEAIIDGRQPVRLDRRSLLEADLPTCWRAQERKLGFAI

SEQ ID NO: 3004 - protein, 507 aa, unidentified
  source 1..507: note = uncultivated organism
MQTKNCAIYTRVSTDMQAEKEFSSCEAQEQKIRSFIASQNDWQVFKIYNDAGFSGATLQRPKIQELLQDLKKEKIDVVLVYKIDRLTRSPKDFYQLIEFFEQAKIDFISITERFDTSTPAGRLLRNIMLTFSQFERELTSERTRDKMLERAKKGLCNGGFTPYGYSRQDKKLVINPKEAEEIKSIFETYIETGSLAETYKNLKRQGIKSKYGKNFSKTIIAYLLRNPVYIGKIKHNGIIYDGIHESIISEEIFALAQKIHKEKLKNFRVYKNFLFGGLIKCESCGSNMTSCFTNKHKGNKLNRYYYYRCTSTTQFDWQACPVKQVSAERLENFCIENLERISVDKNYIENLVFRLNNDTNSGHQVGHELTEPCSKFSVETISDTLKFFLKKLKNTKGIERNLFAKKFLSNIFYSPETIKFRFILPQSGGEAAANASPAQLSAGRGERNSSSGNFEFVSSEIAVFPGLVMVSLRGNFTFWRPPNDGSRSWVIIANLTKNGTFGTNGTL

SEQ ID NO: 3005 - protein, 517 aa, unidentified
  source 1..517: note = uncultivated organism
MQITEITPKRATQETERLAAYCRVSSNSTDQLHSFAAQIRYYSDYVRKNPKYELVDIYADEGITGTEMEKRDELNRLLRDCKKGKIDRIITKSVSRLARNTEEMLIMLRLLKEQGVSVYFEEQGIDTNQLNLEMIVTFPGMTAQQESAAISGNLRWGIQKKMENGAFVCSNPPYGYKLENKQLVVCEAEAIIIRRIFDLFLQGMGKQAIASLLNEEEQPRRRGYCVWHMTAIDYILRNEKYMGDAVLEKTYMTESLPYKQKRNKGEKTKYYVEQYCPAIISKEKYISVQELILSRREDRGGVKVYALTGRMRCPECGRAFRRQTINQKAYWNCALLAVQAGKCKSRRVREDMAYETFTVMTYKLKAHRQQIIEETIQRLEYLQSRTSENGERIQEIDKAIADLSAKNHVITRLHTSGVMGVTEYTQQTSEIGNKITALRSERRKKLTEDETDMLLDELKTLNEIMKEYQPRSEFDSDLFSQIVEKIIVEDSTKLTFCLIGGLKLTEEIKEKGRCKTA

SEQ ID NO: 3006 - protein, 509 aa, unidentified
  source 1..509: note = uncultivated organism
MIAIYVRQSVDKKDSISIETQIETCKGKILSSNTEQIEVFSDKGFSGKSAANRPEFQRMMSEVRRKNISKIIVYKLDRISRSLIDFITMREEFQKYNVELVSCAEDFDTSTSTGKLMLNMLMMFAEMERETIQKRATDNFYARGEKGFYLSGREPFGYKKVEIYVEGKKTYTLEKNKEESTILKKMFSDYFSGKSMGELSRWLNNSKIVGRKNKPWSNNNVSRILRSPVYVKANADVYNYLVGLGAKMNNDVDEYIGKNGCYVYGNPAERKGIKFSNLSTDFVTLGLHEGIIEPSLWLGVQYIINQKQKHSNLGFGNLTWLQGLIKCKCGYTLYVKKCVNRKHKNPIEYKYLYCKGKDYDTCQYFKNMVRSSKVEEIVEAEIMTHLKNLKNIQPNEAEKDNPELNALKIQAAKIDEQIDRYVKQFENLSEVTIKYLDEAIKKLDGEKKLLIDKINDIQLKVNRSIEIDIDIDEVINNWFNYEMDVKKAVSKKIIEKIILDGEEINIIFY

SEQ ID NO: 3007 - protein, 544 aa, unidentified
  source 1..544: note = uncultivated organism
MTIQKNAMTRPERQRAAAYERLSREDGDRLESDSILNQHNLIEDYCARHPEFTLVGHYSDDGFTGTNFQRPGFQQLLADIESGGIDCVIVKDLSRFGRDYIDMGYYLERYFPAHQVRFIAINDQVDSDRGPYDMMLPLKNVFNTQYAKDISGKVRSAFQVKQDRGQFVGAFASYGYLKDPEQRGHLIPDPVAAQVVRRIFEMAAQGMGQIRIAKALNEEGVPCPSDYKRLMGMKYRNCRKLESTNYWTYATIHRILTNEMYLGSMVQRRSVRPTMHARAVAAPREKWAVIQNTHEPILSRELWDTVQAQVRSNARDLGLNRNVGLFAGLLKCGDCGRSMVKTKWNDLIHYSCGSYRRYGQTVCSPHYIRQSDLEAIILDDLNRIIATIDDKAKVAEQNRDKHPRRQRAEEGRRLEAALARVQRLKKNAYEDYRDGLLSREDFLRYKADYDRQEETLSGQLRACAETQQEDLLEQPWVEQLLRLGHLTQLDRATLAQTVQEIRVFEDKHIEITYLFSDSLRVLLDESEDAADQGQTNPSESEGKS

SEQ ID NO: 3008 - protein, 649 aa, unidentified
  source 1..649: note = uncultivated organism
MNEEKKIAGIYIRVSTEDQAREGFSLPEQEKRLRSMCEFKGYEIYKIYKDAGISAKTGNHRPAFERLKEDIKAKKCNTIVVLKLDRLTRSVYDMEDIMKFLSDNNAYLDCANDDINTTTANGRMVARLLTTVSQNEIERTSERTKIGLAGAIKAGNIPHKAPFGYKHVDKKLVPDEATKDQVIRIFNLYYEGNSYQTISNLYNEEKVFGKTNWCDGTILKIIENEIYKGDFVHGKRTANPTYYENVVEPLVSRELWEECQVQKKKNSRNYKRDKDYLFLQKLKCPKCGRILGGNATRKKNGNVYYYYQCHDCKISIKETDIEKEFDNFINEIQEYDAIVNQTLLPIIKTKLNNPKDKLVKELNEQKIKFERIRKAYINGSFTIEEYDNEREIVEDAINNLESKIKDCDICEELKFTPEDILIKRDIDYINKIVYPEEYEEHTYMWKDYTRSEKADLIMRYVDNVELEYYGNKKVRIGEVNFRESICKPCNELYDAGYLDKTDYALLGNVVTKLRFSEYLPIEKVSEIIFTLRQYYNVGYFEATYYYDDKVMFFNDYENRNIVRIFPIEDYQKMDKIDKLQLGVIYIGNNEKCLLDNKEDVFTTIPERTNCRVYELDEETKKRKEETLKEIEKMKEDMNKKINDVSQEQR

SEQ ID NO: 3009 - protein, 566 aa, unidentified
  source 1..566: note = uncultivated organism
MPRADASRRRCAIYTRKSSEEGLEQEFNSLAAQRESCEAYIRSQRHEGWVLTRTRHDDGGFSGGNMERPALQGLLADIRAGGIDIVVVYKVDRLTRSLADFARLVEIFDTQRVSFVSVTQQFNTTSSMGRLTLNVLLSFAQFEREVTGERIRDKIAASKKKGMWMGGNVPLGYDVSERTLVINPADAKTVRCIFALYRELGSVRRVKEEADRLGLRTKCSTTADGTERGGKPFSRGHIYGLLSNPIYTGRIAHNGELYPGQQPALIDNETWTVVRNQLGATTSDHQRKAKAAEPSLLAGLLVDAQGERLTPSHAVNKGRRYRYYVSAALITEAGTDRAQGWRLAAREIEEAVIRILADALASPASLVARFGAAGMPSDQTRKMLGRGARLAAALSGSPAERATLVRGLVQKVIVDEETLIIKLRRGPLLGGDFPSSVSEDASDNAIQLTAAVAFKRRGVETKLVLPGLAQQNHSSKCDPALIKAIARGRAWFEELATGRARSLQELAKRDGITRRYIRRLVGLAFLSPQLVEAILKGRQPVELTTTRLTEFDLPLDWTEQHKLLAS

SEQ ID NO: 3010 - protein, 563 aa, unidentified
  source 1..563: note = uncultivated organism
MEKQIKKIYHAAIYVRLSKEDGDVAVSSKTESNSISNQKELIRNFLKDKKDIVVVSERVDDGYSGSSFERPAFKLMLEDIRKGVVDCVIVKDLSRFGREYIDAGRYIERLFPALGVRFIAINDGYDSLGGKGQPDEIIIPFKNLINDAYCRDISVKIRSHLEVKRKNGEFIGSFAPYGYQKDEDSRNRLVIDPVAAGTVRDIFRMKLHGMSQDAIADRLNSTGVLSPMEYKNASGSSYQTSFRTGGRAQWSAVTVRRILENECYIGNLVQGRQTTPNHKVKKPIVKPEAEWVRIEKSHEPVVSDRDFAIVQRLLKMDTRMSPGQAEVYPLAGMAVCADCGAAMVRKNVCAGGKRYRYYVCSRNKETKECTSHRIAVERLEEAVLHLLKVQISNVLDLKQAMEKVSGIPFQELDIKELEKRIGQKEAEILRCRELRNMLYEDMKDGIVSKEDYMELHEAYTKRRGMAEEAVGKMKQEIKDILASNTDKYRWLDYFAEHRNIDRLTRNVAVELIDRVKVVDKDTIEVVFSFGDCYKEILDNLEHAGCTAVCDSQGKVHFKWKEAV

SEQ ID NO: 3011 - protein, 526 aa, unidentified
  source 1..526: note = uncultivated organism
MTVRRSTAEVQGRAGVVRCAVYTRKSTDEGLEQDFNSLDAQRECAEAYIMSQRSEGWVALPDRYDDGGFSGGNMERPALQRLLGDIELGKVDCVAVYKVDRLSRSLLDFARIIEVFDQHGVSFVSVTQQFNTATSMGRLILNVLLSFAQFEREMIAERTRDKMHAARRKGKWIGGFPPLGYDVDPNGGRLVVNPSEAEQVREIFRLYLDYQSLGQVAQLLNARGWTSKSWTTRKGKRHDGHPWDKSRLFRLLTNAVYVGKVAFKGEMLGGEHEAIIPECDWQRARELLDHNGRNGGADVRNRYGALLKGLLRCAACDAPMTHAYTRKGNKLYRYYVCSKAQEKGWKACPTRSVSAGQIEQFVVARIRDIVKDPALVAQTLATLGEERADAIEALRQEASRIKGDLQRLQNEKRSLITAAANDEVTGKALAEKLKGLQERLACVERRQTEVNEQLIALERAAINEGSLRAALSLFAPVWEQLFPREQCRIMRLLIKRVDYDGSRGALDVIFRDSGIKALAEEAAGRG

SEQ ID NO: 3012 - protein, 507 aa, unidentified
  source 1..507: note = uncultivated organism
MKNAAIYCRVSTDNQESEGTSLQTQLEACLDYVVRKEYQVAYRFSESYSGLTIDRPRLNELMDLIRAGEVDILVVYCLDRLSRNATHGVILRDELDKYHVVLESVTEDIDKTPLGEAITYLRGTFSQIEVEKIKERTMRGKRARLKEGRLPQGTGVGIYGYDWDEEAKRRVINEPEAVVVSRIFTMVVDGFSCFRIARELNREGILTKTGKPWHPLTIRRMVMNPAYYGNTIFNQTRRIGTKTEKRPESEWVTLPDVTPPIIDRELFDRAQEALKQRRSVPGKALVEYLLRGHAYCPVCCSRITGTMLNGKYRYYRCAGTKPTSARKAICCEAYIKADWLEQLVWDAVSEAIKNPEVMIAALKEQIEDQKGSLVKETELDIEVKKLGRKIKAYDGQQKRLVKLFRLGVINENAILDELNQVKVDRNTDQERLAELEKSRKTLAGLQQAEIKLNDFCEAIRQQIDCSSYETKRLALDALDVKVYATRGSVNIQGIIPVDLVTIAQTSA

SEQ ID NO: 3013 - protein, 529 aa, unidentified
  source 1..529: note = uncultivated organism
MSKKNVGIWIRVSTDDQAKGDSPEHHEERARTYAQYKDWNIVEVYHLEGVSGKQVLDHPEAQRMIHDVLNGKITGLIFSKLARLARNTKELLDISDFFEEQKADLISLEEDVDTSTPTGRLFYTLISAVSQWEREEIASRVRASVPIRAKLGKNVGGAAPYGYEWVDNELLVNQEEALVRKLVYELFAKEKRRKTVAKMINERGYRTRRGKEFSSQTITNMLKDPITKGLRRVNYTTVKNGLVTVKPEEDWLFVKAPAIVSEELWEECNRILDQQTVKKKPAKRGAHLFSSHIKCQCGGKMYVVSNSPKYVCRKCKNKITIEDINAIFHHELKGFLFSREKIEEHLSDAKNIIQDKQKELELLKKKERTLGEELGNMIRLNTKGVLSDNDFAEQYDPLSEQRSQLRAHIAGMEGELINLNQYIHDSDEVLGETKDLHSRWEELPFEDKRTIVELIVQDIIVGDREIDINLFCSQSAIPSRHPLLKGDKKVKNPVLVSGTESVNFLQFIKSIGTLTVLYKAQITVLIPKF

SEQ ID NO: 3014 - protein, 609 aa, unidentified
  source 1..609: note = uncultivated organism
MNDKKVTGIYIRVSTEDQAREGFSLGEQLEKLQDLCKYKGYEVYKVYEDAEISAKNTNRPMFQEMMNDMRCGRINMIIAYKLDRITRSTRDLEKLIDELANYSCGLECAVDDINTDTANGKFFTRMLTVLSQLEIERTSERTKFGMVGAIKSGHIPGKTPLGYKRDNKKLAIDEETAPTIKKMFDLYLEGKSYTKIANIFNEDNELNKKWRDNSVQSLLNNSLYCGKYIHKKGTEEEVIYENVAPPIISKEVWDECQNQKGKNSRQYTRTLNYTFLQKLKCNKCGKILKARGANSKRGKGKYFYYQCHECKTYYSEDELDKLLEPLISELLEYNTIVKDYFAPLLTNKLKFNENKSDKDIEKLKKRKEKLKELFLNDLIEMKEYKKEYKEIEDLESKFQNTITNKNFTNDLSFSYEDLMICRDSLKIENFKYSDCTVKEQRKNSFGNWKTLDKKTKQSLVMKYVDNIVITKDNNNKVIIKNIKFRSSFLNEYAEAVENSYYEIPLKLKTDYGDKKSYLSNLKQSEDLKNYYKRLKKYYDVDYIETYLTRDEITQEGIIEIIGNETTELIKISILTDNKKVIANNQDELKLGIISYTKNKKEALNELCNI

SEQ ID NO: 3015 - protein, 501 aa, unidentified
  source 1..501: note = uncultivated organism
MKTAVIYARYSSDRQTEQSIEGQLTVCNKYAEQNDITIVGHYIDRAMTGTNDNRAEFQRMLKDSEKRAWDMVLVYKIDRFSRNKYEMAMHKKTLRDNGIKLVSAMENIPDTPEGIILESLLEGMAEYYSAELSQKVKRGQNESRKKGNWTGGSIVYGYKVEGTKQTGKKLVVAEDEAKVVRYVFNEFVSGRQIIDIHRELTAKGIYYNGKPFAHSSIYRLVSNEKYTGVYRLHDQIFDNIYPPIISKELFEMAKTKLDHNKYGKHKPDVVYLLKNKLVCGYCEKPVNSDSGTSKNGKIVRYYKCTNRRKKTCAQTPIRKELIEKLVVDTTLTAFSSTELLEQVATRIIAENAKRIADTSILNILTKQKEDLQLSINNVLKAIEQGIVTNSTKERLEMLEEQKSDIEVKIVAEKSRGQMQIQKSDILRYLKAGIKKDPLPMVTLLIKKVILFNDRIEIYYNYTDTQRPDDEHRVFSFYTTTQEVLKNSLDTEIVTYTIELFI

SEQ ID NO: 3016 - protein, 519 aa, unidentified
  source 1..519: note = uncultivated organism
MIFANYSRKSVFKDNSDSIKNQSRMSQEYAEAHFPGQVENFLFYSDEDYSGANADRPDLKRLLADIRLGRINTLIVYQLDRLSRNIKDFAEIYSVLEEHDVQFISVKESIDTTTPIGKAMMYIIVVFAQMERETIANRVADNMISLARDGWWVGGNPPTGYRRQRIVAPDGKNHVTLEIVSDQTDYITNLFNRFLDNKMSLSAFDTYCRDNNIRTVNDKYLSTSQLHKIFTNPYCVPATPEVYDYFKSKGCQMVDDPVLWDGSVGVMVYGRTTYKNGKHVLASPENWIVCKGHHKPFIDADLWLDVQKRFGQNKFDKALRYDIPLLKGVLRCKCGRLCGMARKHHVDGNVVTWYRCPRRNLQKTCDMSDIKTNILDNAVLDIFREISLDEQSIYKYMAVSHCTPIDTKSISASIKNIELKIEKLMDALMVAENSAASKYVIAQIEKLDKEKGLKQNALLEARKAESESLNIAKNAASTRNSIKMLLKNFDNFTDVQRNAIARDIIKSCVWDGETLHLTL

SEQ ID NO: 3017 - protein, 549 aa, unidentified
  source 1..549: note = uncultivated organism
MEETKQPKKRIYCAIYTRKSSTEGLDKDFTSLDAQREAAVNYIQSQKHEGWVLLPESYDDGGFTGANLDRPGLQKLLTDIKEGRIACVVVYKVDRLSRSLLDFTHLLEFFEKYNVTFASVTQHFNTNTSMGRLTLNILLSFAQFEREIISERTKDKLSAARKRGQWTGGYIPIGYRLEEKDKKKKLVIEPEGAKLVREIFNLYLEGNSTLKISQILCERGLRTAKFTCKNGKVIGGAKFSVAKIQWMLRYVGYMGKVEYNGQIYDGQHDALIDEETFKKTQALLDQNHRERKVLKNTDCTGLLSHLLHCKACDAYMVHTYTIKHGTHKYRYYTCTNAQKFGHGSCPTRSVNSKAIEDAVINILQEIYSDKQKTQNHTYKQEIDALLSPIWETLHPEEKKRILKILIKGIDYTASSKILGLTLADDNERREFKVDLKQIRPLNKWHKEKEIENEPTVRKMLILAHQVQQLIKEGRINHPREASKWLNLSVTRIDQIMNTLFLCPQIQKDIISINSPAIIALTEFKIRPLLKEVLWGNQLAQWQTLLTNNR

SEQ ID NO: 3018 - protein, 551 aa, unidentified
  source 1..551: note = uncultivated organism
MELSTNQQITKEDDIYAAMAYYRLSKEDGDSRKNVSDSIANQRVLVLEYVRQHPNIKLVGEAYDDGYTGTNYDRPGFKKVMDAIKIGKVNCVIVKDLSRLGREYIETGKYLEQVFPSMGVRFIAINDDVDSMNAKESDDILIPVRNIMNESYCRELSKKLRRQFKIQRLNGEYIGAFACYGYRKDPKDKHKLVIDEYAAEIVRSIFTLKIKGYSQQSIADFLNRAAILPPAEYKRNQGLNYKSGFKGSGDARWNPYTISKILVNPVYIGTLIQGKRGTPNYKIKEMHVRDEEQWCVVPNNHEPIIDEHTFNSVQRALSRDTRVAPTAETVDPLSGMIFCADCGRAMVKRSVSRGNKKFNYYVCSTNKKGNGCSSHSVSKVKLENTVMRAVRNQINLVVEMQQLIGEVNRGEIFSAKQRRLDVLIAQKNQEIDKQETFRMKLYEALNEGLIDRNEYDAMRKHATEILEAAEAAVRKLDEERSELISKNIKNLTWMEAFANYQSVMQLSREMVVAFIDKVTVYEDKTIHIDFNYRDEFASYQGILNKISREVS

SEQ ID NO: 3019 - protein, 565 aa, unidentified
  source 1..565: note = uncultivated organism
MIAAIYARVSTEEQAQNFSIENQLDSLRKYCEHREYSILKEYIDPGWSGTILDRPDLTKLLNDSRNKLFDIVVVFRLDRLFRSNRHMYNTLAEWEELGISLASVTEPFDTTTTMGKAYLGMASTFAEWERNTFLERSREGTRKAVEKGIYSGGIIAYGYQLNQNTKRLEIEENEASIVRDIFRWLIEGGKSCYSIASHLNALGVPTRYSKDGRGIRGKSTAGIWRAGRIYNMLINSAYQGEWQYGKRSNKRHLIQCKCPAIVEKDIFNKAQIRLRENNLWSDRHSRRNYLLRGLIQCEACGRNYVGFYSKPGKVEKRYYKCNTRANRRNLIATPCNSPTINADYLENLIWQQICEFIQDEHVVREALKDKYGVCKQGEFIGELATVKKRLAELDIAEQNLLVKFADPSKHFSETALEGAVKHIRNNATLLRNRITELESSIGTEEAQSQKLNEVQTILNTLKTTVSCASPDIKRKIFEQLVNNIKIDRDGNGTVVINITYYFNKSLLKPDTEVRLQSAGMPVRLLGRSCKNVHLFGRLDLPVPAEAERTLYRQDRYFCKCAPGQF

SEQ ID NO: 3020 - protein, 574 aa, unidentified
  source 1..574: note = uncultivated organism
MKELKLSPNRFIAIYARKSKYTNKGDSISAQIENCKEKIKRLPSYNESIEIKEFSDNGFSGGNTNRPQFKELLECCRKNQVSLVVCYKIDRISRSLRDYVDILREFDTHNVEFMCSSQDFSTLDCNHKFMMNIFMAFAEMERDMISERIRDNMLSLARTGRWLGGTTPLGYESVQQTEVISLDSNKIRYLHKLEVVPEEKEIFMKIYKKYKETGSLTQVERYSHEMGIRTRNGKYFSISALGQLFRNPVYAAADQNMYEYFSKKGAVVSGAKASYDGTRGLMVYNKMNQNGGKSHQQHPVEEWIVAVGEHEPFMTGEEWLKFQERLELSRSRKYRSDRKNSALLSGILRCGNCGSFMRPKGYNSVDINGNKNFGYLCEEKEKSRRTNCDMKNPHGLELDKLVCKEIKKLSENSAVFLKQLDYAEEKIFETSDDNRSELKELKKEDKNIERQKENIMERLSNEPAENVEFTESMRNKYNSLNEKQKVIRESIYKLESINNNQMEKKNQIERLKETFSSFPTTFDAMPNDKKRELIHELIEVVIWDGNSAHIYFKGRETKDEILSKFLEPLDGGSK

SEQ ID NO: 3021 - protein, 541 aa, unidentified
  source 1..541: note = uncultivated organism
MTFVASYCRVSTDKEDQANSFESQQRYFREYTERQPEWELYRVYADEGITGTSTKKRAAFNQMIEDARRGKFRLILTKEVSRFSRNILDTIAYTRELKTMGVGVIFLNDGINSLEPDAELRLSIMGSLAQEESRRTSSRVKWGQTRRMEQGVVFGRSLLGYDVKDGRLIVEPKGAEIVRLIFHKYGVEKKGTTIIARELREAGYRTHSGNVKWNSNHIVKILKNEKYVGDLVQKKTITPDYLTHAKKYNHGEEDLVILRDHHEPIIDRELWEVVQAELKKRNRKGELGAGHSNRYVFSGRIKCGVCGASFVSRKKKRKDGSFCRRWSCYTATSEGRGHIDSQGNRVGCDVGRTLRDETAMELLRKSLQALPLDSGEMIRSVTAIALEAIQAGEEVGTENQDVLESELERLAKKREAALDAFFAQDITKAEMRQMTERYDREMTQLQKRLSAARARAEVVYDKGELERDIKRRVTALVQGEQASETFYKTILDQMVVYPDQRVEVRLNLLPRTWTFVLERLGQSAQNSPSVPISVSRALISG

SEQ ID NO: 3022 - protein, 608 aa, unidentified
  source 1..608: note = uncultivated organism
MEVKKIAGIYIRVSTEDQAREGFSLGEQKEKLMELCKFKGYDVYEIYEDAGISAKDIKHRPAFQKMLNDIKEGKINYIVAYKLDRITRSVRDLEELISKLEKYNCYLVCDRDDVNTSTANGRFFVRMLTVLSQLEIEIVSERTKFGMVGAIKSGHLPGVKPLGYKNDSTRRTIIDPATAPIIKRVFDLYLQGKTYLQIATIFNNENILNKKWRDCYIEKIINNKVYMGDWEQYKSIGKKEGLEPIIYMNVVEQIVPRYIWEECQAQKVINQRTYTRDRVYTFFQKIKCPHCGRIMKCKGAGGKKRKYVYYNCEKCHENIRETYIEEAFRTLVAELIQFDNEYNDLFLPLFADKEMYVDKSDIEKEIIRLTKQKDRIKKAYMSEVVELDDFKEDLKLINQKLNTLTRQLEQEKDFNSKNVFTPEKVMVKRDINRLFLNTRYDNKFFFNEWDLKTKEEKQEFISKYIESLTFKNDKNSKYGIKIVDLKLKSLFKEKVNKLSEIGASEYPVYLISNNKPYRVNVGYPLKESQIKEYLNELNKYHATNFYIHPTFNNTINDIPDKITFNLEPNEKIFRLIPIIKDIDNPENVLNKFKLGIVTTLIDTISNRP

SEQ ID NO: 3023 - protein, 510 aa, unidentified
  source 1..510: note = uncultivated organism
MNPNVQPTIAAGQEQKIRVAAYCRVSSDSADQLNSFMAQMRYYENFLADSKTETLVSVYADEGVTGTRMDKREDFRRMLKDCRRGKIDRIISKSISRFARNTKECLTVLRELKFLGITVFFEKENIDTANMSDEMMITVMGGLAQEESTSISQNMRWSVQKRMQNGTYKIARPPYGFDIENGVLSVNEAQARIVRQIFDRYISGCGLQNIADFLNENKIPSSKIKGIWTADNVRYLLKNERYIGDAVFQKNYVTETLPHTKKRNKGEKQKYYISNANPPIIDKKVFEIVQKILKERHNPYCNEYHFLSGRIYCAECGSSYKYKRRSCGDCWVCRKHDISAEKCLSKPLSQESVYNAFISMYNKLKSQYSVIFPPMLSQLQELKKRKFSSNQQYMEIAKEIAKLKEQTHVLARLKTKGFLDEAKYLEQTAEINSRINKLIREQRKIVRSDDEDDMIEQIKDIASIIENGMDLMTEFDELTFESLVEKIIVKSQNELEFHLYGGLKFTKIVR

SEQ ID NO: 3024 - protein, 530 aa, unidentified
  source 1..530: note = uncultivated organism
MTSPPKLRCAIYTRKSSEEGLEQGFNSLHAQREACEAYIQSQAGEGWTLLKTAYDDGGFSGGSMDRPGLKTLLLDIEVGQIDIVVVYKVDRLTRSLTDFAKIVDIFESSGTSFVSVTQAFNTTTSMGRLTLNVLLSFAQFEREVTGERIRDKFAASKKKGMWMGGRPPLGYDIHDRKLIANKKEARAVRQIYERYLELGSVTLLSKELKDRGIRSKSWVTQKGEQRVGGWFGRGALYALLKNPIYRGQVSHKGKIYEGEHRAILNQELWERVQKILETNRRREVGNPFKGSGSLLAGLLFDDEGNSMSPTHAKKKNGKRYRYYISQALIRGQANEAGSVARVPAQAIEGLVIDQVRGLEKNNSWDELTPKEQAEIVWSTITRVEIHSQEAVIEWRREASLLGVNGNTHRIPIELKRRGKDRVIVRPDNESPDPRLDRALIKALVFAHTCREAMESGKAKSTNDLAKLTGNSERYVRNVRNLAFLAPGITDAILRGEQPQLLTLAHLIRSDIPLSWAEQPLKLGVYEKQSS

SEQ ID NO: 3025 - protein, 525 aa, unidentified
  source 1..525: note = uncultivated organism
MAANPIKPLRCAIYTRKSTEHGLELEFNSLHAQRDACEAYIKSQASQGWRVLPQHYDDPAYSGGNLDRPALQQLLKDIDAGRIDVIVVYKIDRLTRSLADFAKLVEAFDAKSISFVAVTQQFNTTTSMGRLTLNVLLSFAQFERELSSERVRDKVAASRRKGKWTGGTVPLGYDAKDKKLVINKAEAETVRYIFKRYLELQSFGKLVGDLDARGIVTKRRDTKVKKFNGGIPFTYGPLAHFLKNRLYIGETGHKDKWFPGEHAAIVDQKTFELVQQLLGSKSASRKARRTASKALLMGKLYDDRGNRMSPSFSTNNGVRYRFYVSSALLRGRKAEVGSVGRVAAPAMEDAVVQAVRNHFQTDEPIDDAQLLDRHLSRIELGKNELIVSLKPPEQDHADECNDDAALRIRLPWSPASSTQPSSSDPNLPNYREEPDLKAVQAIVRARHWVSELANGTYASVDELAASAKLNSKVVRNELRLAFLAPEILDDIVNGKPGCRLPDLRRIAAINWHSQRSELYGNRCPA

SEQ ID NO: 3026 - protein, 516 aa, unidentified
  source 1..516: note = uncultivated organism
MGSKPEKLVRCAIYTRKSTEHGLELEFNSLHAQREACEAYVKSQVHEGWTALSKRYDDPAYSGGNLERPAVQRLLKDIEAGLVDVVVVYKIDRLTRSLSDFAKLVELFDKKAISFVAVTQQFNTTTSMGRLTLNVLLSFAQFERELSSERVRDKVAASRKKGKWMGGSVPLGYDTKDKKLVVNHDEANTVRMIFARYLALKSFRKLIDELSDKDVVTKKRAITGKIVGCIPFTCGPLAYLLKNRTYLGETNHKEHWYPGEHEAIIGPTLFDAVQSLLKTNSVTRHQQRSDNQSLLAGLLFDDRGNRMSPSFTTKRGVRYRSYVSFAILTGRRSEAGSVTRVSAPELETGVVAALRKRFTNSDSLTDADLIRAQIQRVALGATKAVITVKTNDATENLIELPRPQSPTSSRVRIETDDCQSGNQPDIGLVHALARAHLWLKALTDGTYKSIDELANIAKWNPKVVRKVLRLAFLAPDITEAIILGPQPYSLSVSELQGVTAFSWVEQRRLLRFTAAA

SEQ ID NO: 3027 - protein, 570 aa, unidentified
  source 1..570: note = uncultivated organism
MAEKKKASRCYTYIRVSTERQVEGYSLDSQREALKKTAKYKGWKIVKEFADEGKSGKSIAGREAFQEMLNRIKSGNPDKVDYVLVFKLSRFGRNVEQALKSLKQMRKHGVELYCSEESIDTAIGSMGYLMVTVMGAVAEIERDNIATFTMEGRRQKAREGKWNGGQAPYGYKINKEEGILEIDEEEAKIVRLIFDQYVYHQAGIHGVAKWLDDNGYRKTTRGNGKYTLFSAHTVKTIIDNPVYTGKIAYGRRHIERVEIDDETEITRRIKNDEYGLYDGKHEAIIEQSLWDDAHRKRVATGIGHEKTHSLEHEHILSGILKCPICGAPMYGTVNRKKKKDGTYYKDAWYYVCKHRKLIDGEKCTYKRQPPQDPINNEVLAILASFVDYEGNEAVMQGVMGEKTDTDAIYQRIDGLEKQKARKVAAKDRLTAQIDNLDPDDPNYDTIYDDLDERLRKIYIEIAEINKQIEDARSDLQSEADARFTQMTAMEMLKAIGDKLPTMTDAHKKEICQAMLERVELFPERQEDGRYVRNVKFRFPVMERGDEKEADKWWYNENPVETVVLMSRVKD

SEQ ID NO: 3028 - protein, 588 aa, unidentified
  source 1..588: note = uncultivated organism
MPSPKQKEAIDQRKIAIYSRKSKFTGKGESIENQVELCRERAKFAALQEGKVLSEDDFLVFEDEGFSGGTLDRPSFQRMMQAVRAGRIGMIICYRLDRISRNTGDFAHLIQELEERGVAFISVRDSFDTTSPTGKAMMMMVSVFSQLERETIAERVRDNMIALAKTGRWLGGQTPTGYASRAVERITEDGKARRLYQLEQLPAEIALVKLIYQMFLDTNSFNQIETYLLQKHILTKQKKDFTRFAIKNILQNPVYMIADAQAYQYFNALTDVFADESQFNGTCGVMAYNKTKQKNGRANEYRDVTEWIIAVGKHEGVIPGRDWVRVQQQIAQNSKAATEGKKKKSRSNVALLSGLLFCEHCGDYMRPKLSQRWSAEYNETIYDYLCETKEKSHRKNCDCPRANGNTLDRLVCEEVKRLSADGSEFLRQLEMAKTKLRGQSDEQEALLASLQKELDGKEKSIAGLVNSLAETGQTSAREYIIAQIDALHEEKKTLAGRIAELENMAESHSISDEDFDILVDMLRSFAASFEQMSVEQKRSALRAFVQRVDWDGETAKISFFGAEKAAAGELFYQCISPRTSPAGPPCPH

SEQ ID NO: 3029 - protein, 500 aa, unidentified
  source 1..500: note = uncultivated organism
MATTPNKPSRMDQYVRVSRVAGRSGESFISPDLQREQGAAWASSRGVEVAVVHEDLDQSGGKLERPGLDALMARIRAGETDGVIVSKLDRLSRLGVADALRLVEQITEAGGSIAALDLGLDPTTPFGEFGMTIMLALARMERRRMSEAWEHAKTRALDRGARMGPTPFGYTRDDDGLLVPHPKWARVVTRAFKLAADQGVDAALAYLRKQVPAYPSDGRPGVRRKRSADHRTWNAFTVRRLLRNRSYLGETRYGDRLVRDSHAALVDRVTFERAHPGDEKPQRRPAAVFPLSGFATCANCGELLIGARAGGRGHSLRTYRCRASLASWKGERCDSPTNILADRLENYVVEQIKQAYEQGGMSGLAASVAETDIDFEDVQGELEAAERELERFAADPTAAELLGQSAWTAALRARTERAEAARVEYREHVDTMRAAEIVIPPIELLDSLAPEELRTVLRSIFQTVRVSRGRARGRGPMAERVELVFHGEPSSGVAPREHAT

SEQ ID NO: 3030 - protein, 563 aa, unidentified
  source 1..563: note = uncultivated organism
MRSQVPKPKMLRCAIYTRKSSEEGLEQDFNSLHAQRESCEAYIKSQKHEGWSSLPAVFDDGGYSGGSMDRPALKRLLGDIQSKSIDVVVVYKVDRLTRSLADFAKIVEVFDAAGVSFVSVTQQFNTTTSMGRLTLNVLLSFAQFEREVTGERIRDKIAASKQKGMWMGGWVPLGYDRRDRTLTVNETEAETVRTIFDLFLKLKNVREVQAELSRLKLLTKPYTVQRGRATGSLPFARGHLYKILSNPLYIGEIEHKGVRHPGQHPALISRDTWDVVQAQLAANRHAIRSRANTKSTSLLAGLIYDEAGNRLVSSHATKNSKRYRYYISSEGYGRSVPHSPKLRLPAALIDELVIERLQKLLRDRGMISGFLRESRHRVAQLGRGLEAAARFSDSFACASLIEKRTIVTELVARVVVGFEVLRIDLERRKLRARLSNTFIKTLGQNETEDVISIEVSLVITDRTEATKLIIEKHDLVQPDPIVVKAIARAQAWFDELTTGKAQSMAEIAKRDNIPDNYVSNLIHLAWLSPKQVDRVLDGEPSATVFAREAMRSRKVSPRWSDQV

SEQ ID NO: 3031 - protein, 500 aa, unidentified
  source 1..500: note = uncultivated organism
MKASRPSPATKKEVGIWIRVSTEDQAQGDSPKNHETRARAYAEGRGWVVRELYDLSGVSGKSVAEHPQTKRMMEDVRKGHIQALIFSKLARLARNTRELLDFADFFEKYNADLVSLQESIDTSSPAGRLFYTMIAAMAQWEREEITDRINATIPIRAKAGKPLNGRPAFGYQFVDNKIQPHPQEAPIRKLIYELFAEHKRKGTVVNILNERGIRNRKGAAFSRKGIEFLIKDPTAKGVYRANYTYLSEDGKQMFFRPEHEWIVTKVQPIVSEELWEQCNAIFDGRKAAREPLPGPRVVHLFAGYIFCQCGEKMYVKDNTPKYVCRKCRNKVPVIDMENLFREHLTGYLLAPEKATAYVNSAQEFLADKNALLVSLKSQLNEVKEESDKLFKLYNSDGLTIDQFKTRFAPLDARRQQLEEEVPKTEGLIAAATIEGLSTQQIMSDAKDLYELWPNMTQQQKRNAVELLVHQIVVKENEVEIAFAYLPTLEEMGKRGRNQVL

SEQ ID NO: 3032 - protein, 523 aa, unidentified
  source 1..523: note = uncultivated organism
MRNGRVAAEKTTPSRIVRCAIYTRKSTEEGLSQEFNSLDAQREAAEAYIASQRHEGWIPTADSYDDGGFTGANMERPGLQRLLSDIAADRVDCVVVYKVDRLSRSLLDFARIMETFDKRGVSFVSVTQQFNTTASLGRLTLNILLSFAQFEREMIAERTRDKMSAARRKGKWVGGIPVLGYDVDPRGGRLVINADEAKQVRAIFNLYLEHRSLIPAVRELNRRGSTTKQWTTRDGREHKGQPFTKNALYRLLTNVIYTGQVNHKGTIYPGEHPLIVDMAVWQKVDEQLRGNGVNGGREVRNKYGAVLRGLLHCDACGTAMVHTYTVKNSRRYRYYVCLTAQQRGWDACPTKSVAAQEIEDAIVGRIRHLGSDPRIAAETTRKLREQSESRTEEVEADLKAVNKDLGRSQRELAKVVAAPGGNGMRTDRLADMQEQIRSAEIRAAELQTELADLAAKAIDEQELQKAVTAFDPIWSALNTGEQSRLIRSVIDRVGYDGRTGKIAVTFRTGGFKAICALGEGEVA

SEQ ID NO: 3033 - protein, 541 aa, unidentified
  source 1..541: note = uncultivated organism
MNVRAVVKPAVLRCAVYTRKSSDEGLEQDYNSLHAQRDACEAYVRSQIGEGWTLRPDAYDDGGISGGTMERPGLKRLLADIAAGLIDVVVVYKVDRLTRSLGDFARIVEQFDAQGVSFVSVTQAFNTTSSMGRLTLNVLLSFAQFEREVTGERIRDKIALSKAKGMWMGSTPPLGYDPGDHTLLVNEAEALTVRRIFARYLELGSVHALARELKEEGVRSKRWTTAKGREIGGEALTRGALFHLLRNQHYLGEVVHKTQTHPGLHPAIVNPAIFEAAQAKLVENQVVRRTGSVKAAKALFTGRVFDGEGRRFTPTFSTGRNARIHRYYVVGDVQLGREATLRKDAIRRIGADALETLVLNELRRLSGRNHAGAAELGPMLLHIELRPEETHLVLDPVPLFAGDHPELARDGLRGRLTPGERVVDEPGDTPALRVVLTRRMQLRGGRTWATLNAPAPDPQATDPTLPEALRRAHELAAVALAGDAAPLGEHRRRLVRLAYLAPDLQRAILERRHTPKLTLAALMAADIPLSWGAQRRWVEGL

SEQ ID NO: 3034 - protein, 563 aa, unidentified
  source 1..563: note = uncultivated organism
MTEKGSQGRCAIYTRKSSEEGLEQSFNSLHAQREACEAYILSQRHEGWQVLPSAYDDGGFSGGNMERPGLKNLLVDISAGKVDTVVVYKVDRLTRSLSDFARIVESFDKQGVTFVSVTQQFNTTSSMGRLTLNVLLSFAQFEREVTGERIRDKVAASKMKGMWMGGVVPLGYDLANRQLHINPAEADTVRMIFARYLALKSVTGLQVELEKSAIRAKRRITSTGREVGGFILGRGTLYHLLNNPLYIGKIAHKGKLYDGLHEAIVDQTTWDRTRQLLRENGVIRRRQKNLSSGRMLHGKLATEDGRLYTPTHSAKGGRRYFYYTLITNAGAGSENRTRRLPAAEIEARVIDALVAFLQDSPNMVSNFSGLSVADARMLTSAAAHRSTVLREGDEKEKARLVSQIVSRVVVQTDALEIRISKIALSVELLGAEAQGFDGEITLRSSCHLARRGNEVRLVLESGAQQSSPSSAVVRAVAQAKTWYGWIAKGEVCTMRQLAKRAGLHWKYVSRLLDLAMLSPEITDAIFRGDHDPSLTIAQLTASLEVDWVRQKLPQLSEPQAAGG

SEQ ID NO: 3035 - protein, 515 aa, unidentified
  source 1..515: note = uncultivated organism
MITNPAEYKVGLYIRLSDEDDGIETQSESVVNQQKILNEFARRERLRVVDTYIDDGWTGTNFDRPSFQRLVRDIEAGRINMVVTKDLSRLGRDYITTGHYLERYFPEHRVRYIAIDNGIDTGDTPAANDMIPFLSVMNDMYAKDISRKVRSVLATKRRNGEYVGSAPPYGYKRDPQDRGHLVIDEEAAQTVRYIFDMAVAGYGLTRITRELNARGIPSPAVYSHKKDSCLWDRTYVRRLLKNVVYTGVLAQGRTTKVNYKSNMSVNVPPEKWTVTVNAHQPIVSQETFDAAKRSLESRVQTRDRTYDYLLKGMLFCHECGHKISVERRNNKLHTMCSYYRYASPPLRYKICSRHNMLLDDVTKAVVKTVRKICEKYLDPTHLEEIARRAIEDGGERSALAESISSLKTKLDATTKRIDKIYADRLDGLLAEDDFDRLYKKLYDERQRLRDQLREAQSRSEHEGQDAAMARELAQRFIDEAPSREMLLALIDRIELTDDKQIIIKFRFSDMKDQTM

SEQ ID NO: 3036 - protein, 574 aa, unidentified
  source 1..574: note = uncultivated organism
MAERHIAIYSRKSKFTGKGESIENQIELCKQYISVHEGEKAVDSVLVYEDEGFSGGNLERPQFKKMMNDAKAGKLSAIIVYRLDRISRNIGDFATLIEELNDLRISFVSIKEQFDTSSPMGRAMMYIASVFSQLERETIAERIRDNMHELSKTGRWLGGTTPTGYSSEQVQKVAVDGKVRKACKLKTIPEEAKTVKVIYDKFMETNSLTKTDTFLLKNGYTTKNGKEFTRFSIKAILTNPVYMIADEEAYRYLTENGVELFAEKEEFDGKHGIMAYNRTLQKPNKANQIRPMSEWIVSVGKHNGFITGAQWVKVQGMLEQNTSKSYRKPRSNVALLSGVLFCGECGNYMRPKLTRRINMQGEQIYTYMCAMKERSRGHCCDIKSVNGNTLDKVVIDEIKKLYEDNSEFMRQLEKSRKMLVGNLEGHEEQITRLNSEINENEKEIKALVSSLAKASGTVAEGYIMQQIEELHDKSEVLKHRLEDIKQLTANHELSDIEFDVFRQMLCSFKDTIDDMTVEQKRVAIRTCVKKVVWDGNEVHIYLFGSDDEYEFPEKQMVKGDNNIEEKEPLGEDSK

SEQ ID NO: 3037 - protein, 575 aa, unidentified
  source 1..575: note = uncultivated organism
MERSKILRFARHGAHTVTAAPPIRCAIYTRKSSDEGLEQSFNSLHAQRQACEAYVQSQAGEGWTVLPDHYDDGGYSGGAMDRPALRRLLAEVAAKRVEVVLVYKVDRLTCFLPDFARIVDALDKAGVSFVSVTQQFNTTTSMGRLTLNVLLSFAQFEREVTGERIRDKIAASKAKGMWMGGMLPLGYDAPTDQTTRALVVNVEEAETVRLIFRRFLELGTSRALQLWLEREGIRSKRWVSTRGRLMGGYPFSRGALLPNRTYLGETPHKGASYPGRHDAIVDRQTFDAAQALLASNSRRRREHVSRADRMLLNGLVFDADGQPMVPIIAGTLKRPYRYYGSAPVLQGGLAEDRDDAIRRVPATALEPIVVAMTAKVLGSADGEAAAVSLRSLIGRVEVHPSSVQLVVRIRAIPGKPTLRATMESLRERLSPGEHALIDPSHAGLIRVVLPTRLVVRGGRTWVARPDGHLGPNVGAPDRRAVKALRSGHAVLRKCGVDPQSLDTSAWRQAAAPQTGRDRWLAQLAFLAPDIQRALLLGDAAKPWNDREWRQVPLSWTAQRAIFMARPAALSRQATS

SEQ ID NO: 3038 - protein, 524 aa, unidentified
  source 1..524: note = uncultivated organism
MVSVGLYVRLSDEDKDKQNATDESESIQNQKAMLRAFCEERGWDVFDIYCDEDYSGIDHARPEFNRLISDCENGRVNIVLCKSQSRFSRDMEVIERYIHNKFVEWNVRFISIVDRADSFDTSNKKARQINGLINEWYLEDISDNIRKTLQSKRQRGEFTGSFAPYGYLVDPNNKNHLVIDDNTAPIVREIFDWFISGWGYRKIAIALNERGIPNPSLYKQQSNSKYVNIKGNSSNAKGLWTTPTIFTILRNETYIGTLVQGKSHSISYKNKKRKKVSPQDWIRVEKCHEAVIDDATWQKAQEKLSGQKRTSSVTMERTPLSGIVKCAVCGSSMKRHVYYNKERTIRYYNLVCSAYKNGAMNCTNKSTISGLQLESVLLDKINAWISEYCRADKIEIQNRQHEKITALEADADKLSSAIESKDKKIAVLYEDKLDGTITKEQYVLYVQRFENDKNELKSRLANVRMKAQESAKKNENIEHMQELIKKYTYISELTRTVAEEFLDTVLIGEKTDGQDREITINWKL

SEQ ID NO: 3039 - protein, 569 aa, unidentified
  source 1..569: note = uncultivated organism
MQTVKRCAIYTRKSHEEGLDMEFNSLDAQREAGEAYVASQKANGWMCLPEHYDDGGFSGGNLNRPALKKLLSDCEAGKIDIVVVYKIDRLSRSLCDFAELTKQFEQWNVAFVSVTQEINTQTSTGRMMLNILMTFAQFEREIIAERIRDKMSSARKKGKYIGGVLPLGYRADTQAMKIVVEPEEAKIVRFIFETFVESCSIKEVQRELASQGVVVPVRTSKKGVSHGGHAISRTVIRNVLRNPIYIGKIRYHGKVYDGEHEAMIPEDLFNKAQECLGQKIVRKPSAVIENPFAGIIYCGHCNKPMFRTKHSNGNGRQYQYYVCTGDDKRAFSTCSVHRVPADDIDNIMLKQIENVLKTPTMLAKICGHDLSPDEVSQELSETSGTCSERKAQLSVMWDSMFPAERRKLACALLKKVLVYEHEIRLVFHGGEVGKLMNEAGLPYDMEHGDENCVLSVACRRKKHNNRTIVVLENGGADAGCRSQMQHALLQAEKAMAELISGRKPTIEAVAAELGVDRSFAARTIQLANLAPDIVKLIWEGRQPASLTLNKLREGIPESWEEQRRVFGVV

SEQ ID NO: 3040 - protein, 556 aa, unidentified
  source 1..556: note = uncultivated organism
MISTPRKIRCAIYTRKSSEEGLEQSFNSLNAQLDACEAYVLSQRHEGWLSLASKYDDGGFSGGNMDRPGLKKLLEDIAAGKIDTVVVYKVDRLTRALSDFAKMVETFDKYGVSLVSVTQQFNTTTSMGRLTLNVLLSFAQFEREITGERIRDKVASSKRKGMWMGGAVPLGYDWKNRQLLVNKAEAEKVREIFQQYLRLGSVFALHKYLVQTDIRGKRRTDPTGHQYGGAILSCGTLYHQLSNPLYMGKIAHNGMLYPGLHEPIVDEQTWEKTASRLKENRVNRHKSKNSPSGRMLMGLLFDQDGNRFTPTHASKKGRRYCYYISQLATAGKRSTSSQRLPAGELERVVISRLRELLTNQLELAGLFPSLTIREMRLLIAAALYREEQLADAPSLETIRIVRKLLCRVIIRDSEAQIELNRDVLRCELLGGAPMSRTYDDETEHIRLTCPFIIARRGQQVRIIISAGSFAQPRPVPSLLKAIAQSRDWADQIVSGKMRTVDDIVKYSGLTRQYIRRIIRCAALSPHSIDGTIHGDHPVDLTVVGLTSKIPLDWAEQ

SEQ ID NO: 3041 - protein, 518 aa, unidentified
  source 1..518: note = uncultivated organism
MAANAIKPVRCAIYTRKSTEHGLELEFNSLHAQRDACDAYIKSQASQGWKALPQHYDDPAYSGGNLDRPALQQLLKDIDAGRIDIIVVYKIDRLTRSLADFAKLVEAFDVKSISFVAVTQQFNTTTSMGRLTLNILLSFAQFERELSSERVRDKVAASRRKGKWTGGTVPLGYDAKDKKLFINKAEAETVRHIFKRYLELQSFGKLVEDLDQKGIVTKRRDTKVRKFNGAIPFTYGPLAHFLKNRLYVGETGHKGNWFPGEHAAIVDRKTFDQVQQLLTSKSAGRKARRTASEALLMGKLYDDRGNRMSPSFSTKNGVRYRFYISSALLRGRKDEVGSVGRVSATEIEGTIRAALSVQPSQGPIGPNRVPDTLEKVERVVVARDQLLINLTRSSDANEMDGAVSEIRIPWPTKARDSTVAVENDGETEGAHNEGLIQSVVRAHAWLQSLRDGMYESVERLAEANRLHPKVIRQALRLAFLSPDITSAILEGRQPAGLSLARIPKLLPLPWTDHRRLLR

SEQ ID NO: 3042 - protein, 531 aa, unidentified
  source 1..531: note = uncultivated organism
MEKSEKKKINCAIYTRVSTTEGLEQEFTSLDNQRESAESYIQSQKSEGWLVLPDRYDDGGYSGANTERPALQKLMADIKEGKINCVVVYKVDRLSRSLLDFSQLLEYFEQNNIAFVSVTQAFNTNTSMGRLTLNILLSFAQFEREIISERTRDKMAASKKRGKWVGGRPPLGYDIDRINHKLIINPKEAKLVKEIFYLYIEKRSLLLVATALNKKNILTKSYVTIENRNSGGVPFKSTSVQSIVKNPFYIGKVRHAGTLYQGEHERIVSDDIFQKAQEILANNRRERKISGVSSNIGLLNGLLRCKACDSSMYYIYSRKGANKYHYYLCMSAQKRGYKTCPTRLVSAHLIENKFMEFLRTISNDPRIGSCAWEVLTLEQRIPILKSIVKVAYYDAIDGIFKLVLHNGEKSHEFALNLTELKHIPRRSKQAAINNIPLIRQNLILAHQIDQIAHERKCTLKEIAQWIGISPSRICHIVNMLLISPRIQEEILLSNNKALFTIPEYKLRDVSIEEDWDKQQAIWVNLLKSQQQ

SEQ ID NO: 3043 - protein, 527 aa, unidentified
  source 1..527: note = uncultivated organism
MKAKKVYNVAIYLRLSRDDGKMESDSISSQRDMILSYIRNQEDMNVFDIYTDDGWSGVNFDRPEFKRMMKDIKDKKADCVIVKDLSRLGRDYIEAGRLIQKTFPAFSVRFIALTDNFDSFTADYSEKSIVLPVKNFVNDSYCRDISGKVRSHQKIKRQNGEFIGSFAVYGYKKSQENKNKLVPDDYAADIVKKIFALKIEGFSSLAIAKKLNAMGILSPMEYKKTQGYKYHTGFVTGTKGEWSAVAVKRILTNETYIGTLVQGKVEKINYKVKKSVRKPEEEWIKVENVHKAIISKEDFETAGRLLQMDMRAASDTGKSHMYAGLLFCGDCMRPMIRRVNRYKGEKQVCFICATKNKGEGCTRHCITEKELNKLVLNVIRQQIGLFINKNNVLSGVRQTEVDFEEVSAFEKEIASLHKEQDKYLSLRTGLYEDMKNNIITQDDFKSFNKIYEQRCNELGKSIENQEKTIKKLFKSCIISGLKLEQIKETMQITGLDRMVLITFINRIFVHEDKRVYIEFRFKESFCK

SEQ ID NO: 3044 - protein, 557 aa, unidentified
  source 1..557: note = uncultivated organism
MQNLFDKTYYAAIYLRLSKEDGDSSTGEKKESNSIANQRKLIEDYLTKHPEINLVQEFCDDGFTGANFDRPDFQKMIEQVKQRKINCIIVKDLSRFGRDYIDSGRYIEKIFPALGVRFIAINDNYDSAQSQQAGNEIILPFKNLINDSYSRDISIKIRSNLDIKRRNGEFVGNHVIYGYCRSEGDKNKLVIDQNVAPIIQTIYRMKLDGFSPAQIADRLNKDGVPSPYEYKRLCGSNFKTGFKKQVQTDWSPVAIYRILKNEMYTGTLVQGKTTTPNHKVKNRTRKDESDWMRTENAHEAIIPPALFDMVQNLMLEDTRSPSGDDSVHLFSGKIFCQDCQSTMTRKRTKSAGKEYVYFVCNSNKVDRKACDPHSVKEQAVYDAVLAVIQAQVSLALDLDAAMSQLNGVSWERREMERIAAKIVRQEEIIEHNKQMKAHVYEDFKDEMISREEYQIFKAEFDKSIQDAKDTIAKLIGDRNKISSGLTEQQSWLAQFREYENIQELNRRVVVHFINKIEISADKEVHVYLNNEDQFQAIIDFLDEEQQKKIIPFIREVS

SEQ ID NO: 3045 - protein, 586 aa, unidentified
  source 1..586: note = uncultivated organism
MNNKTTAGYVRVSTSKQVETGTSLEDQEDKIKNEARIRGWDEPIIFKDEGISGKSTQRPALQQLLKNLKFENYHAIIFTKLDRLARNLRDILNFYHEAEKYGVKLVCLDSPAISTDGPMGSVMIQVMGAFAQFERDLIRSRTVAGRMYKWKKGEAIMGRLPFGYHFNKETSTIEIDSQKEKIINRIYQLYIDNRLSMLDVASKLTSDNVPTPSAFAKRKDASSHWNTNSVREILTNESYTGSPTRYNQYKYKWNKNNKIYKSNEIKDKEEWVTITLPKIIDKSQFDIAQAKILHNKAIPKKKHRGFENKFMAENFLRCGHCKAKMSKQTSGSKNFIYYTCPWRRASEKQLTVKKQKKCILPFLDSDKVDIAIYNQVINLITNPKKYADEWLKDKPVEDLKEKMNALADKEKILSSKIAKAIKIEIGTNDPKLERIYRQEREKIENEYQAISRQLATTQNELSFYDNKIKKLDQFKEIFQNKKREHSMRIKIALKSALNKLSFDDKKRLVNAVISPETGGCVYVRELMPQDLGLPKSDLSSETVQPVHGNKLGERNFVLELDFTLEPHRIVEIIQSMDRDVFKLDEQ

SEQ ID NO: 3046 - protein, 536 aa, unidentified
  source 1..536: note = uncultivated organism
MLYYATEYLRLSYTNDKTNESDSIANQRKYIDEFVKRNPDIRIVNERVDDGYSGIVFDRPAFKAMIDDIKNGKINCVIVKDLSRLGREYNETFTYLRKIFPSLGVRFIAINDNVDTAKESVSGDLSVSFKGVMNDEYCRDISVKVRTALNIKRKNGDYVGAVPVYGYKKADDNKNQLVVDEYAARVVKDIFKMRIDGYSADRIAAELNRLAVLSPREYKKDNNIPLPRNGYCDKENSKWSATTVIRILKDEVYTGKLIQGKYGKPNYKVKEYIKRSADEVFVTENAHEAIISRQDFDLVQRIMRIDTRISPKKSVLHLFSGILICGCCGNRMTRKTVTYNGEKYFYYYCPTGKKNGCTGGNMVKENDLINCVTESIKAHIKNAASLEDLLCGINSQAINRDMCNKISAQIKEVQKQLEKTSEYKSSLYENYVCGILDKSDYKALNASYSDDKKRLENAVKQLEAELDECKNNTSKKLQWVERFKAFENIDKIDRNVVVQLIECIHIYDKTHLQITFNFKDEYEQALSALKEYVEVV

SEQ ID NO: 3047 - protein, 534 aa, unidentified
  source 1..534: note = uncultivated organism
MEKVGVYCRLSDEDRYKKNKSDDSESIANQKSMLLKYALDQDWEVVDIYSDDDYSGAGVERPDFNRLINDCENGRINIVLCKTQSRFSRDMEVVERYLHNKFIEWGVRFVSIVDNADTNNEANKKSRQINGLVNEWYLEDLSNNVKKSLKNKREDGLFMGSFAPYGYMKDPNDKHKLIIDENVAPIVREIFEKYKNGLGYHKICASLNERKILCPSLYKKSIGSNFVCCNFDYETTGIWTPDTIATMLRNETYMGNLVQGKRTNISYKNHKSKSVPKSEWCVTENAHEPIVDSETWYLVQRRLKNHHRPAKDGKVHILSGKVYCAECGKIFMRNQCNIKCAGGVVEKRAYLQCKGNKKYHICDNNKSIRYDIIEQYVLDAINSLLKKCNQNLLKKEFDETLERQKRQDTLITNLNKEKANLEKKLNESKLYFKNLYMDKMKGVISEEDFSMLREEYTKDVESYQTRLKDIEKGLDNTKEKKENSKDIESILKKYKKINKLTRIIVDEFIEKIYIGTLDKDTKTREIKIEWNLDL

SEQ ID NO: 3048 - protein, 648 aa, unidentified
  source 1..648: note = uncultivated organism
MNESESNKPCAIYVRVSTQMQADVGLSIESQIETLKQEAERRGKPVYDIYNDAASGGSQANRPEFQRMLKDSQRKPPPFDMILTWSISRFGRNTMESYIATEKLRERGISIFYYKEPFNDQDPVGNMVIQILRAVAEFSRLEYVKDVERSKTHLAKNGYSTGGPPPFGLKRLDVIENGKRHVRWEPDPETAPIARKIFQMYADGHGYKTICKWLNTQGISTIRGNKWQAASFSRMLRNEIYIGNVVYNKEIRRRACGNGGSLEHKSQEDWVRCDGVVEPIVPRDIFDRVQLKLRGNNISDSLTKNSQYLLSGLLKCNVCGNAYLGRTPKKKCGDKIYSYSQYICSGRERFIGKRDNVNLKRDWFEGIVVNRLFERILSEANIMERIRNEAAEIEQAVADRNVQIDELKKEKKRVEGTLQKYYDAFENGSLTPEELKSRLKRHKGRAEEIDLEIKNIQNEIAICRLRKDSGLETLLNVDFKRLKNMFDALSFERQKDFLKTFIEKVVIDPEWYEIHYVLPSGMGVDHLLFEGGGGDDDGNGNNSGQPDAFSSVYKIRTSESGVSDKNLSKNSVHGFNRHDENTRRCDTYRKNGKNDGTPATAPKNAKSKKPQETKPISAIADQQSASHLSSYGKNGEGGIRTREQPFGR

SEQ ID NO: 3049 - protein, 592 aa, unidentified
  source 1..592: note = uncultivated organism
MDERKKLAANAGTEKKRVRMLLRVSSDQQLESDGDLNVQRQLVLDYIQRHSQWILDEKEYFEGSSSGYKNAVADREILQEAYRDAKNHEYEILVVYKDDRIGRRMWEIGGYIMSLKSLGVDIYTVKDGCISPDSNDIMGQMMLALRYGNAQKSSADTGMRVKDTAQKLVQAGKFMGGKAPYGYLLEHSGEISKHGRALKHLVIQKERAEAVKYIYQLSLEKEYGSVKIAKTLNQDDRYRELAPNDVWKSGTITSILTNPIYAGYTAYNRRESLNGRHRSLNSEEWILSREANPDIIIIEENTWREVQKKRERRNHQYTKSQKNQDLTVIKRNDGMLSLADVLYCGYCGCKMVNGSKYNYWTIKDTKERKTSKTAIYKCQNAAQGVPHNKTKQFRADEIEPVIYEILAEYISKLQKNDNIIELILEHHKQEIQRKKQELETAQSELNKIRSGIYVMEDRIPEAITGVYALTLEDLVHNIHIQKEKEQKQLALLHEKEIMLQDCFDRAKDWQKLVSGVHDNSNVVISQNIRKIPTWREIFLSADISTKRVLINKLTERIDVTKERLVIRLCVGQDESLPKSRINGYEVVPKQRL

SEQ ID NO: 3050 - protein, 539 aa, unidentified
  source 1..539: note = uncultivated organism
MTCMKAVIYARYSSASQREESIEGQVKECTAYAERNGYMVIGTYADRAVSGTTDNRPEFQRMIKDSKRKQFDLVIVWKLDRFARNRYVSAKYKSQLKQNGVRVVSANETISEGADGILLESMLEGMAEWYSADLKDKVIRGLNLNADKCLWNGGTLPIGYVVDEEQHLQPNPMTAPYVLEVFKQYDGGSTLTQILDYLNGKGITNTKGRPITYGTIQHMLSNRRYIGEYAFRETVVPDGIPAIVPLDLFERVQEKLEKNRKAPARAKAEEAYLLTTKLFCGHCGTAMNGESGKSRNGAVHRYYKCHAVKKKLNDCKKKSIRKEEIEDLVVKETMAMLMDDAMIEAIVSMLMRLQDEENTDLPMYEKQLCQTETAIDNIVTAVMNGMASKALQAKLTELEETKEELLVRIEEEKLEKPKISAEFMTFWLHRFRKLDVTNVQHRRMLIDTFVNAVFLYDDKLLLTYNFKDGTRTITFNDVKTAANKAGSNLDCLGAPSKVPINSYFKLFWVLFLCFSFPHFSQKGSKIRRAIGGHFLPQAG

SEQ ID NO: 3051 - protein, 556 aa, unidentified
  source 1..556: note = uncultivated organism
MEHASNAIRRCAVYTRKSSEEGLEQDFNSLHAQREASEAFIKSQQGEGWKLVKTAYDDGGLSGGNMERPALQRLLEDIRHGLIDVVVVYKVDRLTRSLADFAKMVEVFDAQGVSFVAVTQQFNTTTSMGRLTLNVLLSFAQFEREVTGERIRDKIAASKRKGIWMGGCPSIGYDVRDRRLVVNQAEAATVREIYQRYLKTGSVPKLKKALDRDGVVSKIRVSRKGIRSGGQSFSRGALYELLSNPIYIGEIRHKRERHPGQHEAILERNLWEKVQKRLRDRTHRPTEPRTKVSPSPLAGKVFDETGEPLYVQAAVKDRRRYRYYVSKALVRGSKAEGQRGCRVPGSELERAVAIAARSILDDKAAVLEALQVAGMRDADLNQIFTLAAEWRERLLAERERSMALVELVEKAVLTDEGIRLGLNITVPCGGSDTAPLRKVLQLFRFVPLKVKRRGVEMRLIINGGDEPRKPDPAMLKAFARARGWFEELASGRVHSLVEIARREGLAKRYVTRLTRLAFVSPEFADAVTEGNVLPTTNLQMLMDGRLDLPLNWNDQE

SEQ ID NO: 3052 - protein, 520 aa, unidentified
  source 1..520: note = uncultivated organism
MVIGIYPRKSVYRDNSESIQTQIQMCKDYAALVFKGKDISFRIYDQDEGFSGKNTKRPSFQEMMSDVRNDLLDVIVVYKLDRIARNVAQFSAMYEIFQRHNVSFVSVKESFDTSTPMGRTVMYILAAFAQLERENTSERVSDSMKALGTAGIWTGGNLPPGMKSIRRKNGSKEHSYLVVDPESIGFVKLLYQLLLDGYSITRVERYCRDHGFKSRTGKFMSTSQIYNIITNPVYCDNSPEAYEYFSALGCQIPDQIDDPIFFDGQHGLIAYGRTKTNDTTQKRQNAAGWTLAIGIHEPVIPAADWIAAQNRLGINKMCRTAKYEVGLLKGVLRCRCGARMDIRTHKKNNILFSYYYCSKMTRQGKDACASGYTPVSNIDNAFIRELRKIRLDPSRIQCRHETPEALNPDTLQAEIRNIQKSISNLTAALQQAMDSPAAAYIIDQISALDKQKRALEADLQKAKRQQFENRALQETEKMIHENICYLLDHFDEIDYSGKNKLIRNTIKSCILNGESLRIVF

SEQ ID NO: 3053 - protein, 518 aa, unidentified
  source 1..518: note = uncultivated organism
MFEEKEKKQIRCAIYTRKSTDEGLDRDFNSLNAQREAAEAYITSQRHEGWQCLPAMYDDGGFSGGNTNRPALQKLMQDIEDGKIDCVVVYKVDRLSRSLMDFAKLMDIFEQKHISFVSVTQQFSTTNSMGRLTLNILLSFAQFEREIITERVRDKVRAAKRKGKWIGGCPVLGYDVAPEGRRLIVNEVEAEQVRTIFGLYLDYGGVLPLVRELKARGWNNKQWVTKKGKVMGGNMLSKERIYEILNNHLYLGEVAFEGEVYAGEHEAIVDRKLWDAVHASLEQNRRKPSGDGGRKTREGKYFALLKGLLHCENCEQPMIPTYTKKTDGKRYRYYVCSQTHKDGWGTCATKALNAVDIENAILDKLKGIGANSVLVKAVYEQKLTEITAQKNDMTLRVAVLKQNMQSHKGRLAALRGGDSLGAEQLQTISETIKNSEEKVKLYEIQIDYLSKISLNYDIFKENKLNFDNLWNNMTMDEQGRLLTLLIDKIYYNGSTGLVRILFNKEVKSILLANKMEVA

SEQ ID NO: 3054 - protein, 568 aa, unidentified
  source 1..568: note = uncultivated organism
MKEKRKIAIYSRKSKFTGKGESIGNQIEMCMQYINLHNQNVDKDDIAIYEDEGFSGGNMNRPQFQLMMNDCRNKKIQQVICYRLDRISRNTGDFIRLSEELEKLNVEFVSIRDNFETYTPNGRAMMMMTSVFAQLERETIAERIRDNMYELAKDGRWLGGNTPTGYKSVETIGSVRIDGKTRKAHKLEIISKEAEIIQQMYLKYIECNSISKLETYLIQNDIYTKKGNHFSRFAIKNILRNPVYLIADEQAWNYFERNETEVFSDKTEFDGTHGIMAYNKTSQQTGRKNEIRDIKEWVIAVGQHEGIVSGHDWVEVQKLLEQNKSKSYRKPKSNAALLSGLLFCGKCGSYMRPKLSQRINKDGELIYDYLCELKEKSKSQKCDMKRPNGNELDKLVCQEIKKLTEDKSTFITMLKKEQRTLNANDTSYQEKLNSLRKAKLEQETKIKALVQALANAEESAAHIYVLEEINTLDEKAKALQTQIQEYEDLAKTDVMSDIGMEELADLLISFAHAFDIMPMEQKRSALRAFIKKIVWDGENVQMYLFGSEENEIDLSDTDNSEPKRMGCK

SEQ ID NO: 3055 - protein, 576 aa, unidentified
  source 1..576: note = uncultivated organism
MTDRSAPKRATVRLRCAIYSRKSSEEGLEQDFNSLDAQREACAAFITSQKREGWDLVGEMYDDGGVSGATMERPAFKRLLSDVSAGKIDVVVVYKVDRLTRSLSDFAKIVDIFEKHSVSFVSVTQQFNTTSSIGRLTLNILLSFAQFEREVTGERIRDKIAASKKKGMWMGGQPSLGYDVEDRKLIVNQLEAETVRYIFRRYTEIKSVRELKGDLDAAGIVSKARTAANGTRYGAQPLSRGAIYLMLQNRLYRGQIVHKDKSYPGEHEAIVDQTLWDEVQAILSENRIERTSGKIGTEPSLLKGVLFDAQGGRMSPTHANKKGTRYRYYISRSLLSGSATVKMAGQRIPAVALDSLVVRRISDWLADSAAILQVVQDAAPDAAAQKPLIERAKGIAADESSDIHTFMRATIVRIQVHADRIDIGLDQDRVRECLESAEKFEPIDKAQSETDRQMLTLSIPARLKRTGKEMRIVVADASNPATPDGNLVRVLVRANAIREKLLSDRSLTFEDIAKSEGIVPSYATRLFRLTVLAPDIVSAILNGRHPPDLTARRLMDDTRLPLDWSEQRRSLGFAPT

SEQ ID NO: 3056 - protein, 528 aa, unidentified
  source 1..528: note = uncultivated organism
MKAAKNGVQKSAPETNRCAVYTRKSTSAGLEQDFNSLDAQRDSCVGYIQRQTGWTLVDEHYDDGGFTGANIERPAFQRLLADIEAGKIDVVVVYKVDRLSRSLLDFAKVMERFSAAGASFVSVTQNFSTADAMGRLTLNMLMSFAEFEREMIAERTRDKIAGARRKGKWTGGPVPLGYTVENKKLVVNELEAVLVREIFALYLEHRSALAVARRLNERQRATKRHRAANGNLREARTWKKGDVLRVLKNPVYAGYMASGGELHEAEHTPLIEREVFMRARAQLEAATKTTKANGRNPEYILRSVLRCACCSSAFTPASTTRGRATHRYYRCVKRDKEGKEACPSSPLPATAIETYVIERLREATIDGSLAAEIAETVKGRVAARRKDILTERQKLPPEIAALSADARRTVDTMAGMTGTARRLVEERLQQVGDQLARCEGQLAAAERELANLDAIEVEASWVAGCLADFDKVWDVLTPENRGRLLRAVVQRVEVDEPANKVSVFIADLIAGLPGPAASSEPVQQGATA

SEQ ID NO: 3057 - protein, 537 aa, unidentified
  source 1..537: note = uncultivated organism
MSRPAERNNPSIRQSVETHRTTVRCAIYTRKSTDEGLDQDFNSLDAQRESAEAYIASQRHEGWLCISERYDDGGFTGGNMERPALKRLFADVESGGIDCVVVYKVDRLSRSLLDFARMMELFDKHAVSFVSVTQQFNTTSSMGRLTLNILLSFAQFEREIISERTRDKMSAARKKGKWVGGMPVLGYDVDRKGGRLIVNEDEALKVRGIYDLYLEHKALIPVVQELERRKWGAKQWTTQRGDVRGGNLFNKSSLFRLLTNVVYTGNVCYKGTIYRGEHEGIVDPDLWQRVQDTLRHNGRSGGKDIRNKYGALLRGLLYCAPCGTAMVHTYTAKNGRHYRYYVCLTAQQRGWTACPTKSLNAHEIETAVVEHIRGIGRNEEIIAATAAKVREESGKRMVELETEQGGHERELKRLHTRVQKLVSESFTAASNGGAAMDQLADLQDRIRTIEQRMTAIREEVIAIQRETVDERDMARALAVFDPVWESLSPREQSRIVRLLVERVGYDGRDGRVTVTFRSPGVKALCSEADIRNREVSA

SEQ ID NO: 3058 - protein, 550 aa, unidentified
  source 1..550: note = uncultivated organism
MKKTNCAVYVRKSTEKGLELQFNSLHNQEESCKAYIASQAYQGWEYFKTYEDGGISGGTMNRPGLAKMLADIKAGYIQTVVVYKVDRLSRSIMDFHNMMKEFEKYSCNFVSVTQSFDTSNSMGKLTLNMLLSFAQFEREVSGERVRDKIAATKAKGLWVGGNPPLGYDFVDKKLIPNPLESEILNNIFNKYIEFGSILKLRDWSIEQGYKTKLWKTKKGDLKGGKNFLVATLHEILKKQLYIGMIEHKTNKKVYKGQHQGIVPKEIFEKVQEMLGRRYENKQQRKKYEYAKCLFNRNLTDAEGRKFLHTSSKKAVRRFNYYYIRGGICIPTEQIDKIALEAVGRLRDFNLKGLLPEDIKMGIKKLAPFHLAGVKSFLKNAIYFKRNNTSELVLYLDIEELKKYIKSHSTSHYFNEKSIKSDGSITLDSEGKMLIIKAEFIIDNVSTTKLVNTCSKNALTITQMNESLIRAIAYGWRFAKDIESGKSVYELEKENGLQRRRIYKYINLTYLSPRIIEEIFENINPKTLKLNELLDIASHTLDFSNQERLWR

SEQ ID NO: 3059 - protein, 529 aa, unidentified
  source 1..529: note = uncultivated organism
MTRTTSRADGRENGRHKPPAAVRCAIYTRKSTDEGLDQEFNSLDAQRESGEHYVRAQEGQGWVCLPTRYDDGGFTGGNMERPALKRLLADIEAGQIDCVVVYKVDRLSRSLLDFARIMETFDKHAVSFVSVTQQFNTSTSMGRLMLNVLLSFAQFEREIISERTRDKMAAARRKGKYVGGAPLLGYDIDRDASRLVVNEQEAVRVQQIFELYLEFQSLLPTIAELDRRGWTTKRWTTKKGTQRGGRPFNKNTLYGLLTNVAYVGKVRYKHEVYEGEHEGIVDPDTFEEVQRLLRTNHRTGGARVRNRFGALLKGLLRCAPCGCSMIHSHTTKDGNKRYRYYVCTGAQKRGWHNCPSRSIPAAEIERFVVDQIRAVARDPRIVTATLAEASKQIGESLAALETERRAVERDLARANSEMQSLAIDTIGSDDNSPASRRLADVQERVRLSEMRLTEIREETIRRRAKIVSEDEIATALGDFDGLWAALSPREQARVLQLLIERVEYDGDGGTVSVTFRPSGIKALAEENAA

SEQ ID NO: 3060 - protein, 511 aa, unidentified
  source 1..511: note = uncultivated organism
MRDEKREPPRVAFYTRISTDEDHQKYSLGAQKERLEAFCKAQWDDEWQLHKVYRDTESGTHMNRPGLEEMLYDAEAKAFNTLLVFRVDRLSRKVRELAQMVDELTKNGVTLKSITEPFDTSNAAGKMMLQMLGVFAEFEHATIVERTKVGMEKKAKGGDWVGGVVPYGYRLDPEKGLVVHEEEAVIVRKMFKMYTFGQEGVHTICHNLNEAGHRKRSGKKWDKRIILHMIKNPLYIGKLRWREVIYEGNHDPIVSEVLFEKAKDIMRERVEDLNGRRFHNGDERLLAGIAKCARCASHLVGVSTHKGERKFPYYICSKRWNIKDCDLDYVRGDLLEAAIMQDIKAMFRDEQLMARVWAEANQRLCAEKPSLEKEIGRVETQVAKTQAAMDRYFEAFEAGSLKPEVCNGKIQDLNARLQELEAEKRDLEARRKRLDLPEVDRELLLAVVDEFEKVMAEGTNPQKKDLLRRLVKKVLVHDRRTVEVWYGLPNQPSVRTPGNMAPEAGLEPATR

SEQ ID NO: 3061 - protein, 520 aa, unidentified
  source 1..520: note = uncultivated organism
MKQSPVVTIEPTVSKDKLTRVAAYCRVSSDSQDQLHSFAAQVQYYTKTISENNLMELVDIYADEGLTGTKTANRDDFNRLISDCKKGKIDRVLTKSISRFARNTADALMYTRILKNYGVSILFEKENIDTAYMSSELLLAISGAQAQEESISISKNMRWSIEKRMKDGTYVIGTPPYGYKQQDGKFEIVEEEAETIKLIFSSFLSGMGKKAIAIMLEQQNVPKHFKETEWKISTIDYILRNERYMGDAKFKKKYKSDTLPFKTKRNYGEKAQYYVENMNIPIISREDFYAVQKLLADNSINKGKNNEYPLAGKIKCKCGKTYKSLTVNGKRYWECSLHNLDSSKCESKRIPEKAIYEAFITMVNKLRNNYKRILTVAVSQIERLQIKSSKATLRIKEIDREIAELNGKHLVIARLNTKGIMRASEYTEQSSKITSKTNALRSERRQLLAEQDVNSVLSGLSRLNDILSMQDQPLTKFDESLFKSIVETITVPTNSQICFRLLGGLQIKEVMSEQRRCSKK

SEQ ID NO: 3062 - protein, 560 aa, unidentified
  source 1..560: note = uncultivated organism
MPRVSKRKKRSGNGQVQIKYYRTYIYVRLSIKDGGHGRDDTIYTQKQVCIDFADKHPELVVEKVYTDNGVTGTTFERPEFELLMEDVRAGKVDCILVKDFSRFGRDALEAVDLIDVVFPSLNVRFISVLDDYDSENPACTQDRVTHILTHFMNDYYAREVSDKLVQAHQISREKGEFWGSRPPYGYKRSEKSSKELIPEKTEKEIIRKIFYWFVFEDMSSYDIAKELNAENIPSPSESYEMRKYGEIKKKKRRYWRADGIRKILRNPIYIGCAVYGKTKQKLCENMPLLLIPKEQWEIKEDAWEGIVEKAIYEKAQQILAENWKDVLQVWATNPNKEHAANGPFLGRIYCASCGRKLARTNIGPAGNPYYRYYCPTVKIAKRKNCIVSISEETIQGAATAALRYQIGLAVDFKKKYGEEFYKKLEQETMQQVTKAREGYEKYEQKLTQLFEHYATGILDKAEYMELKTTYTAEQQKKYQKMIETKKHYQELLDKLKAKIDWADTLIKCRRFQTLNEGMVSRFIERISVKSESEVTVIFWFRDIFTEEFSRHREGGCQDVL

SEQ ID NO: 3063 - protein, 586 aa, unidentified
  source 1..586: note = uncultivated organism
MKAAIYSRKSKFSEKGESIENQIQMCKEYASINLREKNITEFLIYEDEGFSGGNTNRPEFKRLINDAKSKKYDILICYRLDRISRNVADFSNTLELLQGNNIDFVSIKEQFDTTTPMGRAMIYISSVFAQLERETIAERVRDNMLELAKTGRWLGGTPPLGFTSKPYKYLDENLKERSMAILEPNEGELNIVKIIFQKYLELKSLSSVQRYLLQNYIKTRNNADFTLKSISNILTNPVYTKSSEEVMNYLKSKGIDACGSPDNTHGIILYNKFKSNYTVDGELVRTQRDKCDWVAGVSKHNGIIESKEWINAQKLIAKNSIKFETSARSTKALLTGILKCAKCNSRMRILYASRNKTTGFQRTYYACNLKKESGSVRCDNKNVRVDELDSIVIKALKNLGKNKQKFIDNLIEKNKAKSKNKELANYKLELEKQITTKENQINNLVDKLSLDNDISDILVQKIKVLKQELYELKINLSNHEEEVEQNKQEDLDISFIGMLLNQCSIIDSLNHDEKKLLIKSLIKDITWNGDDGTFKINFIGSDDDTPPSRNKNSTPPKKKKFEGKYAQLSHLTVKTTRSGQSYAKCA

SEQ ID NO: 3064 - protein, 573 aa, unidentified
  source 1..573: note = uncultivated organism
MYRAADGGLNHGVRQKVVRAAVYCRVSTDESLHLEFNSLHAQREACEAYIKSQQHEGWLLTIGSYDDGGYSGGTMERPALKRLLDEVASGRVDVIVVYKIDRLTRALSDFARIVDVLDRSKASFVSITQSFNTTTSMGRLTLNVLLSFAQFEREVGAERVRDKIAASKKKGMWMGGVCPLGYDVNDRKLMVNETEAQSVRTIFELYLQLGSVLSLEAELGRRGICSKRRVRSDGSSGGGKPLTRGPLYSMLQNRMYIGQVCHRGTAYPGQHAGIVDEALFAEAQALLASNRAGRHLRTNAEHLALLTGLVWDSVGRRMSPTHTVKGPARYRYYSTRPDEADPRALTRVAAADLEQLVAERLAGLLRDRRALHDALEPFEADAVMLEAVLFAATAASQRMVTGSRREARELVVQLVSRIEVLADEVWVHVRPSALLRLTDLAVPDAAPALDLELVVPVRLFRRAREVRLAIAPGAAADTPAKDPALIKLITKGWAARCALMNFGGASLKEVAAANDVEPGYFAVLVKLGFLAPDLIAAILAGTQPQALTRQRLARLRSLPIAWTDQRILMDASA

SEQ ID NO: 3065 - protein, 539 aa, unidentified
  source 1..539: note = uncultivated organism
MAELLKSRKNFTAAYLRLSREDGDKAESNSITNQRDLICDYLEAHGMKAVKEYVDDGYSGTDFNRPAFQNLMEDCKTGKINCIVVKDLSRLGRNYIETGRYLERIFPLLGIRFIAVTDHYDSFQSDSGSDDIIIPFKNLINDTYCRDISVKIRSQLDLKRSNGAFIGSFAGYGYVKDPENRNHLVIDEPAANIVRQIFHLKIEGMNQQGIADYLNSIAAETPYERKRNLGMRYNSGFHTTSKAEWNATLVRRILENELYIGTVVQGKYRKINYKVKKNICMEKDDWIRVEGMHEPIVSREVFEYVQQLMKRDTRTAPEQSTVYLLSGFVKCGDCGENMIRKSGKAHGKQYCYYRCSEFVHQHNCSSHNISEEKLCTAITKAIQSKVGKLLQVEEVLKNADQLPEKRHAVTVIDTQIKVLLDEVARYRNLRTHLYQDHVEGVLSSEEYSDMDQRFSEKVKTAEDGIEVLQQKRADLISEKLLLKPWLESIKKYANIQELTREVLVSLVERVDVFEGHRIEVHFHYEDEIKDILAAMEVEK

SEQ ID NO: 3066 - protein, 535 aa, unidentified
  source 1..535: note = uncultivated organism
METQTNTKPIRCAIYTRKSTTDGAEQDFTSLDAQRESALSYIQSQKSLGWVALSQEYDDYGFTGANMNRPALERLIDDINAGKIDCIVVYKVDRLSRSLLDFTKLLELFDGKGVTFVSVTQHFNTNNSMGRLTLNILLSFAQFEREIISERTRDKIGAAKKKGKFVGGRPPLGYDLDKENHKLVVSPKEAELVRFLFNTYLQQRSLLRVAIMANEKGYRTKKCLKNGLFAGEKEFSRTNLQLMLRNITYTGQVRYHNEILPGQQEPIISKELFNSVQKILTGNRDLRPVKAERESHIGILSQIFHCSTCKTSMIRSYTVKRKKFKYTFYVCSNAIKRGYKNCPVKTVNAQRTENTVVNYLRGLSENPYLKPGVWDKLAFADKRKIIKAIIKSVDYDGKSKKLTITLLPDNVRHEFPIDLKINPQQKQTTKEEMITQEPPIRRQLLLAHHMKQLLDNGKAKDLQEIATWLNISQPRAHQIFSLLFLCPSIQETILLSDNPTLLFVPEYKVIEMGQEFLWKKQLIVWKNLFIDAVKE

SEQ ID NO: 3067 - protein, 555 aa, unidentified
  source 1..555: note = uncultivated organism
MEENFMKNRTVYSRNNKLNCETEVRAAIYCRLSKDDNLDSESESIQNQRKLLTDYCTEQGWKIVSCYEDDGISGLKMDTRPGLQRMLDDIRRGQIDLVITKDSSRLARNYLDFGLLFEKFFPKNHVRYIGLTDNVDSERDDGFIPIRAYFNEHYCRDISGKIHATYDIKAKEGQFTGCLAPFGYKKDPADKNHLIIDEDTAPIVRKLFAYALDGHGPNYIRRKLEDERIPCPTWWNRQKGLRNIYSKFEKLDPENGRFVWDFTTIQDILANPVYIGTIASQKSEYKFKVGWIGAKKPEDWITVENMHEPIIDRETFELVASKVKSRKRPDAWGNYSIFAGLVKCGQCGSSMNIRRANQKGKDRIYTCSRYNKFGVKHCSQHRIKFDTLYEIVLGEIQKCAKAALADEEAIERELQMHSESGAVSEREVIERSISSDNERIRELERVIGRLYEDMVSGKLNEDTFNSILEQKQTEQATLKNRVRLNSERLAEREQEEIDSVRWIETIKEYADIRELDATTLNRLIRVIVIHEDLDGETVRQTVEIHWNFMGSNENT

SEQ ID NO: 3068 - protein, 552 aa, unidentified
  source 1..552: note = uncultivated organism
MRVAIYTRVSTEDQAREGFSLEVQKQVLKEFIQRNGWTLVCSIPNRDIYEDDGFTGFNTDRPAFKILRSDAMRKYFDLILVYKLDRLNRKLKDMLNFLEELDHLGISIKSATEPFDTTTSAGKFLIQMLGSSAEFERNRLVERVFPGMVMGVKKGHWQGARYSPYGYRYNKEIKKLEMVPAEAEIVKEIYSMYLAGSSSSKIAGFFYKKDIQTRSGGKFNTKFICDVLKNKVYLGKLVWNKNHYDTRTKTKGGKGYRYVKNPQSEVIEVDGTHRPIIDQEIFDRAQARMKCNRKGSGVPKFKNNIYYLSGVLYCAECGLKYHGVMVVSNHRKGTKKAWYRCISRSYPYISCKNGQVKVDEMHDQIFDILEVLSGQNPVQEEFEDLLRKVTYEPNEHYADQIDQKNLKLNGNLKNQSDLFDLYKEGRLNIEIYRQKADELRSEEASLKRDLKGLQVSMIDMERGIDERLRVQYFLKSLQEKDRKWSEADKKEFMRIIFKKIVIKDGEIVSELLEMNRPWNLLYQKGLQCQTNQLSQKRKIRSSQYVCVPSAAR

SEQ ID NO: 3069 - protein, 556 aa, unidentified
  source 1..556: note = uncultivated organism
MTTEKLHIYIRVSSETQSTDGFGLQNQMELGLRICEQKGWEPVLYDEGSKSSSNDDLTNRPQMVKLLDEIDQGTVQYVWVYETDRLSRNKTTQYLITNKMREKNITLLVGSGTQYDLGDFRDALLHGIMSEIAQFDQAQRTERLRRGRLSKVKVGGWKGGPPPYGYKIVDGFLEEDKDTSQWVRKIYTWYSQGKSIRNIQSTLLSKGVLTPRKKLLWNDNSLLKILQNTHYEGYHYYSDKKLGEEVRVDNPPILSSSLIKSVRDRLKKTRVKRANNQKRFTLLNGYLFCGHCGTKFGQRIQKHTHSNNYYCRGNENRNRTLEGMSGKICKTDTVRPRSINIPKTDDLIWTTVVETLSNSHLFKEGFKKELLGQNVTYAISQREKRSLEKEHKKVVSELQQIRSARSNALAQGLLDKKDIKDIQRIFDDTERDKQSKIEKINTQLNDNEQSRKWVDWVNMFSQKIESLKNAELSLDEKRHFLDGVLDKIIVKTVDHNEHEFNMHFKLPYVNDHLEFDLVKGKKKHYRPKDGEKDLKVFLNHTDGRRKLSPSKTKKKH

SEQ ID NO: 3070 - protein, 524 aa, unidentified
  source 1..524: note = uncultivated organism
MRFFQYGRKSIFSDKSDSVDNQSRMCRSFIDAKYAGRIESWETYSDEDYTGANTQRPGLQTMLSAIRDDEADALVVYQLDRLSRDVRDFSNIYELLTEHDVEFISIKENIDTTTPIGRAMMYVTVVFAQMERETIAQRVSDNMLGLAKKGYWTGGNPGPGFVRKRIEAGGKKHVTLEPDPETVPYVLKVFSTFLDGGFSLQGLETYFRQQGIRTLRGAFFSTAQLHKLLTTPYYAPDTPEIYDYYEAAGYKMDPDSPREKWDGSHGVIIYGRTNQKSGRHEVSPVPDRLVCIGYHQPIVPAETWLAAQRQLQKNTFIRKTKYDVPLLKGVLRCAHCGTLMQVSRKKLKSGIYSGYFCLKRMRQGSDACPMGMIDCRKLDEKVMEVFRKIEADPDEIRKYIREDRPKERSADPAAIRQKITSQEARIGRLAASLGEAAGSSAQRYIVAEIERQDATLQDLKQQLIEARREEKEKKREAVETSGKVEEIRRLINGMDSFTAEEKNRVAKAVLKECRWDGKTLFLSL

SEQ ID NO: 3071 - protein, 617 aa, unidentified
  source 1..617: note = uncultivated organism
MQIAIYSRKSKWTGKGDSVENQIVMCREYIEMFIEGGAQAEIIVYEDEGFSGKNTKRPQFQRMMHDMKERHFDYLVCYKLDRLGRNLADLANLMEDLERRGTSFISIKEKFDTTTPIGKAMLYFSGVLAQMEREQIAERVKDNMIMLARSGRWLGGNTPLGYSSMKLEKEVSALKKKSMYCLIQNPEEIEIARYIFSNFMECRSLTKVFKNLLTNDIRTRQGKEFVISGIRDILVNPVYCKADQEAYQYFYDLGCQVCIDEEELDGESGLMGYAKTTSTHYKNQSQPCESWIIAKGRHQGIVSGKEFVMVQKLLACNKEKGAVFKNSRNSVSLLSGLLYCTCGHLMRPKNYPASRVTEKGDRTFSYRCPYKDATHREKCDVKNVHGNTLDAKVCEEIIGLTNPDAGIIPMLEALLKKIRDTDEEVVSEKDLLQQEYNKKKEEIQKLIGSIKNLDADSVSVQYINEEIKRMDDACRKLHKRITDMESHKEENLDVTDYVKEWLEKMKNFPLIFEEFTVMQKRDFLRAIIEKVVWDGEIAHIYIRNPVPDRHRGIFVCLKEKYLRQWYPKFPIWNHRIAAAARPRDSHKFSFGDLQIYVGKSRRLSLEIVIGIGDILQR

SEQ ID NO: 3072 - protein, 519 aa, unidentified
  source 1..519: note = uncultivated organism
MSTFSIPSRRYASGEQPRKSPLIRCAIYTRKSSEEGLEQEFNSLDAQRESGEAYIASQKAEGWVCLPDKYDDGGYTGGNMERPAVQRLMADIDAGKVDCVVVYKVDRLSRSLMDFARMMEVFDRKKISFVSVTQQFNTTQSMGRLTLNILLSFAQFEREIISERTRDKIAATRKKGKWFGGKPILGYDLVAGKLVVNRDEAFRVREIFAIYVATRSVRQTTLEAVRRGWTTKGWTQKDGKCVGGLPLTNPYVHRILTSVSYLGKVQHHDQIYDGEQEAIIDPTLWKRAAAILEANGRDKGSDVRNVHSGLLKGLVRCCNCDKPMAHTFTTKSGKRTYRYYVCHVAQSSGYHACPSKSVPAEQIESFVVDRLQALGRDRELVSMILDRARAESRDVLEQLKDRKTTLERELRWLASDERRAGAASDADRLADLAERQRQIAEQVREIEGEIEEAARDELRRDEVDAAFAEFRPLWDQLNTRERTELLRSVIKSVEFDGKAGEVTLVFHPEMSRLAEEQTP

SEQ ID NO: 3073 - protein, 546 aa, unidentified
  source 1..546: note = uncultivated organism
MKAAMYLRVSTEEQKEKQTIASQRSFGERYFAAHGILVYSWYADDGVSGIIPFDQRPEGARLLADARSGRIDTIFVYRLDRLGRDSRLILNTINELEALGVQVRSMTENIDTSTPAGRFLITILGGVAGLERETTIQRSIEGTNRLARSGAWLGGVVPYGYLAIGTGVESRLVISEKLIPGLNLAEAEVVRTIYRMAAEEQKSCHAIAEHLNALGIPSTHIADEEEALRGKRQITTASRWSAGHIRNMIVSTTYKGVHRYGSRTTKQREVFEREVPPIVSVDIWERAQQTLRDHQLPAHRATNTRPYLLRGLIKCGLCGLTYIGTASPPYKDTQRIYYSCNGKSQPRGLYGAQGKKCPSKNVNAITLETAIWEDIATFLHNPGAVIEQLGQQMQLQEGETGRLHAELARHQQALQALDAEKDSVITLFRRGRIDEVALDRQLDQIQLDEASIRKDIEDVQEQLRLLQEKEEGLRDANELLGRLSRLLEQPLTWEIKRELVEALVEEIRVDTVEHGKGRKEAHVTVTYRFGPSTAIGMDRDSWRRRA

SEQ ID NO: 3074 - protein, 508 aa, unidentified
  source 1..508: note = uncultivated organism
MYALYARQSRDKKDSISIESQFEFCMREVPLKAQVKKYEDRGFSGKNTDRPGFQQMMADIRNGLIKKVVVYRLDRMSRSILDFARIIEEFNRYGVEFISTTEKFDTSTPIGKAMLSIVMVFAQLERETIQQRITDNYYERGKKGMFLGGNVPFGFELQRTKIDGVKTNKLVPTEDIQHVIDMYQKYAHSNYSLGAISDHLNQSGVKTSLGNHWDSAKISRLLRNPVYVKADVSIYNYFKNKRCIIHNDIDEFNGERGIYLYGKSIDNTTKFSNLEGYHVVIAPHEGVIDSNIWLACQKKLDANRQIKNKGTSQHSWLSGLVKCGKCGYAMSVNKAILSPKKNIYATYFRCSGRVLRKVCDAESIRVDEVESRVTKEIFDFIKILNNTIKEEDSKNNPKVNELQIAIANKETEIENLIDNLAKAKGAAMKYINQRIEQLDKELLELREELVSCSAKSINSERVVELNSIMEHWDAFDLEAKKAICRRWIEQITVEKIGEEISTHIDWGY

SEQ ID NO: 3075 - protein, 535 aa, unidentified
  source 1..535: note = uncultivated organism
MSDVITQTIVALYGRVSTEQQVLHGDSLAGQRDTLLRWAQTMGWEVADLYIDQGITGGISERPELQRLMRDARLGRFNLVAVPKLDRFYREQRLLANCIHEFDELHIGFISQSEGIDTRVPGMTRVYLAMMGSKAQYERECISERQIRARAYHKSLGQWTSGRTLFGYRYNKTAKTLEIVESEAETVRFIFTKYTSEKIGLAKLAETINKTNLPPPRVRKHQKRDFWTLGGVLHILSHHAYKGGPSKEWPYKTPAIVSEEIWQAAAVRRNNNFHFRPSDQGKTKYQGRLICGFCGRRLSIGYNGGHRKIYTCPGRARLAHPDGSAKCTLPRFETDVLDKQITDKIRKLRQDPSLLFDYLMKFTKNVEKEQAALKAQLKPLQQEANTVREDMTIIDAKLELKRISVVDYKLRMATLKSKLISIESRTSNLDPILVSEIESNTTWLETSKAILEALPKIAGDSQVSLWASDLPRWHKHVSDSFKLEKGETIDQKDDPLLDMVDDAFKLFVIYPHKIEFKGNINTAKLKNGTAKKTAH

SEQ ID NO: 3076 - protein, 609 aa, unidentified
  source 1..609: note = uncultivated organism
MEEKKIAGIYIRVSTEDQAREGFSLGEQKEKLMELCKFKGYEVYEIYEDAGISAKDIKHRPAFQKMLNDIKEGKINYIVAYKLDRITRSVRDLEELISKLEKYNCYLVCDRDDVNTSTANGRFFIRMLTVLSQLEIEITSERTKFGLNGAIKSGHLPGVLPLGYKKDGNKKTIINELEKDIVIRIFNMYLEGKSFQQISKILSEEQVIKDKPWKDTTIDKIINNRIYMGDYEQYKRISKKINQEPVIYMNVIEPIISRAMWEECQRQKEINQRSYTRDRVYVFFQKLKCPKCGRLMKCKGSGGKKKKYMYYNCENCHYNIREDLVETKLMDFIFDLIEYDEAVKEFFLPLLADKKDSNSVETIDKEINDLLKQKDRIKKAYIAGVVELNDFKLDLKDIDDKLEILKDKKLKNIDINNFNFSTQKVMADRDIKRCELEDLGMLNKYLRSEWDNRTKEEKQEFISKYIESVTLEKESNKLKIKQILFRSSYMEQLNKLGSLGIVDFKIPITINNEPTYSRIGIGLNREQLQEYIDRLSEKFETKYYEVYRKLNNKNYDEISFSGKLEKDEKIIKYIPIRENAISPLKEIDEINLGCITHIVKTFDDIKTSN

SEQ ID NO: 3077 - protein, 587 aa, unidentified
  source 1..587: note = uncultivated organism
MSTQLENFFIPTLKTKRAAIYARVSTDEQAREDKTSLLLQEEKLRQFCASQDFSLSDTHIYIERGVSGSLDIHERPAMHQMFEAARNNEFDIIIVYKLDRFFRSQRKALNALHELVELGINFKSVMESEIDTSNTTGRLMLQIMNAFTEHERETIRDRMMSGKIRAAKDGKWVTGVPPYGYRVDKKTKLLYTDPTEAEVVSKFFEWLVYERCSLREITKRAIELKLPTPKHKTGMRKGKKIKGGWYKRTINRILSNEVYTGETYFGKYTTSQRTAQIVTDASFHKDKSEHVLITVPPLISKEMFAQAIEQLHQNRRMQKRNEKRTYLFSGLLYSGTTGKKLQSGYQKPKKDLKTPTLGKYYHVYVQDIDRVASSDSKHNPEGQCAETRLLPIWTTLIEILSNPENVLPRLEEYTFKNRNEAKIQRRILELEIQIETLKEQQTRIGIAFSDMNISELNYRQLIKENKERFTNLNIEKDKLKQSLLKSDEVINRNEIIKKLFKQYESRLASVSYEEQQYILRLFIEKISLFIKDNYAEVVFRFPASVKSPATSQLEADQKMRLVLHVKTLSESQRRKDIYQNTLMLRNG

SEQ ID NO: 3078 - protein, 520 aa, unidentified
  source 1..520: note = uncultivated organism
MIFANYSRKSVFRDNSDSLKNQERMAQEYAQLHFPGKVDDFLIYSDEDYSGANTHRPDLQRLLQDIKDNRIDVLIVYQLDRLSRDIRDFANIYSTLDEHNVQFVSVKENIDTTTPIGKAMMYITVVFAQMERETIANRVMDNMITLAQDGWWVGGNPPAGYRRKRITAENGRNHVTLEIVPEEAAANVRIFEQFLSGHYTISSFQTYCRRQNILTVKGYVMTTSQIYKLLTSPYCVPATQETYDYFSGKGCRMVDDRSHWTGEYGVMVYGRTTERGNTHTLTSPDNWIVCVGHHKPYISVDMWLSVQNRFGKNVFDRTTKYEIPLLKGILRCKCGRLCGMSRKKKVDGSISTWYRCPRKNQDSTACDMKEIKIDLLDNTVLGIFQEISIDDDKIYNYINSPSRPSTSPDEIQRKIDTISRKIERMAESLALAEGGTAARYIIAQIEKLDLEKQSLSQELYSVSKIQKNYKQSITNVKSIQNQIRTLLKDFDNYTDIERNNIAREIIKECVWDGETLRITL

SEQ ID NO: 3079 - protein, 662 aa, unidentified
  source 1..662: note = uncultivated organism
MYNTKEGKSCVIYIRVSSERQVKGYSLDGQKHYLAECAERRGMTVLDTYVEEGKSGKSIEGRTEFQRMLDDIQSGKVHTDYVLVFKLSRFGRNARDVLNSLEFIMKYGVHLMCVEDGLDSSTSMGKMMITILGAVAELERENIIAQSLLGREEKAKSGGWNGGFAPYGYRLVKDDDKSKGKLETVPEEKAVVQLVFDMFLNRNMGYTAISGYLNRNGYTRPPAKNAIRPSYGEWSSDHIKRMLSNPVYTGRVAWGKRRTEKVPGKDNEYRLVKQDEYILSEVISHEAFVSKEDFDKVQEIKAIRGKKGNHNIGQYNAHLLSGIVKCPQCGAPMYIGMTKWTNQDGTERRTESYVCSYATKHRGTSVCRRNGVVASQVEDEVMEYTRKIVRNPQFIKDLQEKVMTAVDMTEVENDITAYKNQLSALQRSRDSLERDIDRIAPDDKYAERRRADMTRRLNDLYDQIYKAEDLLQESMMKKATLESEQMSVQSMMGILSSFDAIYDRMNAAERRDLVKYLISEVELFPREEQKTQKRFVKAIAYKFPIEQKVLTQFDECGASVETVVLLSKGEIDSKKIRVEFSLEDMDTSGFQQGATYEQIKGRVLEQTGLKVSSLYISQIKRKCGLEVGQSYNLSKKENAKQPQCPPEKEKAIREAMKYFGMI

SEQ ID NO: 3080 - protein, 571 aa, unidentified
  source 1..571: note = uncultivated organism
MPKKLRVRILLRVSSNQQLEANGDLSIQRKIVQEYIEQHPDWILDQKEYFEGSQSGFSTSVSDRDILQKILKDAEKGEFDILVIYKDDRLGRRMWEVGLYIMLLKAKGVVVYTVTDGLISPESDDIMGQIMLALRYANAQKSSADTAIRVKDTAKKLVAEGRFLGGKPPYGYTFRLSDKVSKHRRRLNELVIVKEQAEIVKKIFEMSLYQCFGSTRIAKELNNDQRYKEMAPGYPERMWMSGTITSILTNPIYAGYPAYNRRESIKGTDGKVHIRKLESKDWIIAEKQNPDITIIPPDMWNKVQEVRKQRADKYIKKLEDKDVTVIYRNDGLLPLVDVLYCGYCGRKMVNGSRYNYWTLKNTGEKRASKIPIYKCQNAWQGVPHDKTKQFRADKIEPIIFEALAQYVEKLQENEDIFEQITINQNAEKLLKQEELEKIKKKLEKTQKNLHVMKGRIPDAMTGDLPLSLEELVNCIENEKEKEKEQLEALRQKKEEIAGLDISAKEWNDIQSKIPTWKDIFLNADTATKRVLVDKIVERIDIRKDEIKIRFKINLDSFLEQSRMSINIGVQE

SEQ ID NO: 3081 - protein, 557 aa, unidentified
  source 1..557: note = uncultivated organism
MQEYYAIYSRKSKFTGKGESIENQIELCKIQLINKYGSDVSDKILVYQDEGFTGYNTNRPQFKRMMTDIREKKIRTVIVYRLDRISRNVSDFCDLKDEFNKYNVGFMSVTENFDTTTPMGVAMLMITSVFAQLERDTIAERIRDNMYELAKTGRWLGGTTPLGFKSERVDNVSIDGKKRSLYRLVTVDDEVKIIRLLWDKMLELKGLGKVESYLLGKGIKTRNNNNFTRFSLINILKNPVYVVADKRVKDFFESMGATVYADDRDFDGRSGLIAYNKRLEVPGKTKGLKDISEWIIAVGKHDGIISSDKFIEVWNLIHKNRDKRFRIPPANTSILSGLIRCKYCGSYMRPRMRQTYNINGERNFTYLCELKDKSRKQLCQCRNISGIEADRIVIEKIKELTVPASYFMIKLKEIADGYEKGSTKRENELSNLNMALSRNKIKLDGLIDKLAIVDKDILKDIVEEIKKLKIKNSELVERIGSLKILVEEEINQEETAKLALDIINRYMDNFDVLDLVTKRTLVKLLVDSVESDGESLYINFIGSDENSPRSDGSRSCS

SEQ ID NO: 3082 - protein, 573 aa, unidentified
  source 1..573: note = uncultivated organism
MARKSRKNTPIAVAEPTDNLTTKAVLSLDKQAKPYQVGIYARLSYESEANKERDTVDTQIAYIREFVKEQDDMVEVQVYADISVTGTTFERPEFDRMIQDIRAGKINTVITRDLSRLGRNYVEAGNYIERVFPFLDVRYIAITDDFDTARPGTDLSVPLKNIVNEYYSKDLSKKVETGKHSIWAQGGFSEGTPPYGYYRATDGSRKLLIDEEVSDNVVRIFNMFLAGKGYAGIAKTLQNEGILSPPKYRFYKAGKIELAEKAREWHPAHVKEILQGEYYIGNIVHGKQRKALDTGRKNVRTDASTWQRIENAHEPIIDKDSFYKTRERMEHIKKKHLEASKPKPDVPKKPDNILVYKTKCACCGGSVLIGRHHTYSDKFYYKCKNRRKLARLCDNKYSYDYSEVMDSVFSVIRQHMSLCVEKTKFVQKMNSRKENVLQYDIYTKQIAKLQNDVRRITANKSGLYEDYREQLINAEELCQYQKEYESRVNEIEAQITELLHRRSLYEKEFHIDEGWEETVNKYLSKRKLTKELVDAFVSEIVFYDGNIEVKLLYDDFLKELLEVAEEREVSSNG

SEQ ID NO: 3083 - protein, 587 aa, unidentified
  source 1..587: note = uncultivated organism
MPHNIGIYVRVSTEEQAQVAEGSLESQQHRIKSFIEIKKHQDKQWGNIFETYIDDGYSAKNTNRPAYQRMMRDLRNGKINLILVTDLSRLSRSIADFCELVRELEKFKAKFLSIKEQFDTSTPAGEMMVFNMINLAQFERKQTSERISMNFHSRAMRGLVNGGNPILGYDRDPSNPGRLIINKSEAKMVKYIFTVYKEEGSLSTAASRLSKEEIKRKVCGKRKYRHIDDGRWTVQAVRTVLRNYAYAGIREVNSRYKNEKVEDLKAWQKYQLVPASWKPIIEKTEFDQVQKMLEVASESERMRFKLANRRVFLVSGITRCGHCGRALFGQAAHGRRNVHRYYGHKKSVGETISCPIKRFPADEIEQALIQHLDKVIMEAGYLNNVQANIEKSLGLKKSVAKSEKQELVKSIVKINKEIDSIFEMVSNFSGSSAGKDLIKVKLDTLAKKKIDLERDLKEAEQLEVSQMEASGAKDYIETNIMDLKRGWKKATPMLQKRLISKIFNELVFTDKGVQVSYCLPEVISCFGNDTNKKRTPGSAPGVPNLLLKKPSGFFTSHGSPVVIRGGDGGSRTRVREGSASGFYMFSR

SEQ ID NO: 3084 - protein, 521 aa, unidentified
  source 1..521: note = uncultivated organism
MKAAIYSRKSVFTGKGESIENQIEMCKNYYLKLHSNEVEFLIYEDEGFSGGNINRPEFKRMLKDIKDNKFNVLICYRLDRISRNVSDFSNILELLQNHNIDFISITEQFDTSTPMGRAMVYISSVFAQLERETIAERIRDNMLELSKQGRWLGGQMPLGFTSEKVIYTDEELKERSLYKLSPIEEELTLVKFIFSKYLNSFSISMVLNELLSTNAKGKNGAYFSSVSINDILRNPVYVMSDENVKQHLIKKGINFCGKPNGNGILVYNKRSSKYKNRQMSEWIAAPSNHKGIIEAPKWLKVQHSLDNNSKKSRLGTSKKALLSGILKCAKCGSPMRVSYGRIRKDGTRMHYYICTNKAHSLGVNCNNSNANGPLLEKAIFEKIFIYNPDILKEKLILSLSKEENTPLKPSINELNKEINNLLEQLSKTSNKNVQELILKKVDSLSKKISKVHNNLSSLTSINEEYINLFLNNYDNFDKIYSFIKSYDNYDIQLSFKKLLNRIIKKITFDGVSNEVFITYLI

SEQ ID NO: 3085 - protein, 524 aa, unidentified
  source 1..524: note = uncultivated organism
MKPESKRCAVYTRKSSDEGLEQEFNSLDAQREAGEAYVKSQSSEGWKLLPDRYDDGGFSGGSMERPGLKMLLADIALGKIDVVVVYKIDRLTRSLGDFARMVELFDKHKVSFVSVTQSFNTTSSMGRLTLNVLLSFAQFEREVTGERIRDKIAASKAKGMWMGGTLPLGYDKPKGTSRTLTVNETEAETVRLIFRKYLELCSVSRLQSWLQENGIVSKTWVTQAGRTVGGNPIVRGALFHLLRNQTYRGKFAHRGQVHQGLHEPIVDEHLFNEVQDMLNAYARRHNCQEARVMRAPLVGRLFDGSGNPMTPSFTHKKNGTVYRYYVSAPLSKGPRKGNESLKRIPATAMERVVERQVARLIPNYHDQSLSLPTRIEVHDRTVQILLPVEHLAGIREQLEGKERVEVDPAEPNNLRLSIPIRMQRHGGKRIIKSSGPVDSQPDDVLIKALRTAHSMLETDSKGMPTLQIAPKSPYERRLLKLAFLAPDIQKAILDGKQLAGLTLEMLIHGGVPPCWTQQRQMFIR

SEQ ID NO: 3086 - protein, 518 aa, unidentified
  source 1..518: note = uncultivated organism
MKTIMKIEPIRNRPGKARTRVAAYCRVSTGTDEQLVSLETQKSHYEELINANPDWEFAGLYYDEGISGTGKEKRPALKRMIADCKDGKIDRILVKSLSRFARNTADCLELTRKLLDLEVAIYFEKENLDTGSMESELLLSIMSSLAESESVSMSENIKWGARHRFENGTFKIGYPPYGYSSKDGEFTINEDEAKWVRWIFSEALNGKASNAIAKQLNDLKVPSRRSGHWAPTTIRHILTNEKYVGACLFQKTYTDFRFKRHTNYGEEDQFFIEGHHAAIISQEDFDAVGELLEQRAHEKGSNKVKGRNHRRYPFSGKLICGECGGRFKRHINTTGSQCYPVWVCVRHLKDLDSCSMKSVRESDLEYAFMTMMNKLIFAKEEVLHALLDRVRGETYKNNLQRIEEIDRKLKKNAEYARTLTTIMSRGYIEPALFKKESNGLSAEADMLAEEKDRLIRAVTGNVQKTDELGSLVKYADKAEPAGSFDGDLVARFLDHATIHSRTEVTFHLKCGLSLKERM

SEQ ID NO: 3087 - protein, 519 aa, unidentified
  source 1..519: note = uncultivated organism
MKTVTKIGGQLVFPTPKHKLRVAAYCRVSTDSEEQLVSLATQRKHYESYITANPDWEFAGIYYDEGITGTKKEKRPALLRLIDDCEHKKIDFIVTKSISRFARNTTDCLELVRKLLEHTVYIYSEKENLNTGSMESELMLSILSGLAENESVSIAENSTWSIQRRFQNGTFKLAYAPYGYDVIEGKLVLQPEQATIVKAMFDQTLAGIGTDAIAKELNAKKIPAKRGTHWTATTIRGILKNENYTGDAIFQKTYTDSHFNRHHNHGEKDKYRVEHHHEAIITKDIFEAAQQVIRQRGKEKGALPQNKKYQNRYPFSGVIRCHQCGATFKRRIQGGRNSYIAWCCATHVADATKCSLKYIKETALEYAFVTMMNKLIFGHAFVLKPLLASLRTLHSNDSITVIQDLDTKLAENAEHQKTLAYLLTKKYLEPAMYQKGNNELLQEAEQWQHQKDSLVDFLNDDNKTVHETRELLQYTCKAKMLTGFDEAVFQQFVEQILVYSRTNIGFKLKCGITLRERLV

SEQ ID NO: 3088 - protein, 524 aa, unidentified
  source 1..524: note = uncultivated organism
MVNVAIYLRLSDEDRDKRHKSDESESIQNQKSMLRAYCFERNWNIYDIYCDEDFSGADKSRPNFNRMLRDCETGKVNVVLCKSQSRFSRDMEMVEKYIHNKFIEWGVRFIGVVDNADSANATNKKARQINGLINEWYLEDVSENIRETLKHKREKGEFTGSFAPYGYLIDPKNKNHLIVDENTAPIVKDIFNWYIQGWGYRKIVMELNDRHIPNPSSYKHQINSNYVNTKESESPSRGLWTHTTIYRMIRNETYCGTLVQGKSHNVSYKNKKRKPVSPNEWIKVENTHDAIIDKETWRKTQERLKSRARVNKSSYELSLFSFKVKCAVCGRAMKRNVYHNKSKTKTYYGLQCATYKTGAMNCTNTRTINGNVLESIVLEQLNNLLNKYCQSDNIILQETELSSIKSLEVSMQSYQNKIKTLEDKILKIYDDKLEGIISLEQYIAYSKKYNDDIDYLKAECKNLNNKIKQYEENRNIHSKQKEIIKRYTHPDRLTREIVDEFIDCIYIGRLDENGNRDITINWKF

SEQ ID NO: 3089 - protein, 592 aa, unidentified
  source 1..592: note = uncultivated organism
MSVSNGTQSRVAIYLRVSTEDQVEKYGLDMQRDAIDALIKSKGRFEDNTERMVFAGDKYVYIDDGISGTTVISERPQFARLMEDILNAPEGKRPFDAVAVYKIDRFARKLSVLVDLIEFFENQGIQMLSANESIDTSTAFGRAVLGIIGVIAELEIETFKQRSADGRKAAIRKGVFMGEVPPYGYIKTPEKTLRILEEEAIVVREIFDMFLKQFMSPQQIADDLTKRKILSPSSSAIQYRKKSGSSRKKNADTFWSPLVIRKILFNEIYIGTYYYGKTKKGKRLPKSEWKKSDYRYPSIIEKADFSLVQQRLKKSKSRSVTAQRKQEDKHIYLLSGLLRCEACLDQQRSREMPHWVGEPRKMIVSGESVTARYYKCGRRNTKKYSGNYCNVITLPGDQIEQIIFDQVKELLKNPDAVINYQNKLKSRTQELKQLKTKRDFYEKLINAAPDKIERLKEQHQAGIISSLDELKQKIAEQEGAEKINQDKLFELETQIGKIVLSDNYVQTFKHFQDKYIKAMTNIEENRHLLKEVLDVLLDKVVVKSRPVTPEDTISGRKKEGQYIPYKLDLHFRLPKDMLHEAFFKFGVKDANL

SEQ ID NO: 3090 - protein, 512 aa, unidentified
  source 1..512: note = uncultivated organism
MEDKKILRCVIYTRKSHEDGLEQEYNSLDAQREAGENFIASQKSKGWKLLPEKYDDGGFSGGNLERPALKKLMADVKAGKVDVIVVYKLDRLSRSLLDFMKLAEMLEQYNVSFVSVTQDINTSTSSGRMMLNILMAFSEYERDVLTERILDKIAGAKKRGKHCGGCPVLGYDSDPKSKCLVVNTGEAKLVRHIFERYCQLGSARQVAIELDKQGHKNKTWITRKGKFHQGGEFKPDTIYRILKNPLYIGMIPHRDKVYPGEQKAIITKKLWEETQSLLSFNLVANSHNKNQMATPFKGLLKCGHCGGSMGLSYTQKKDRRYIYYICETDAKRAISECPVKRVPAGNIEHMVLKYLSEIFQKPSLIAKTYFQALEIEKTEKSRLLHRREELLAEHEKLREQTIEAIQNSNGDNQDGIKSARDSFEQVTRAISEVDTALEVFNSTPISNEDIVKTFASIDVLWNELFPVERYRLLHLLIEKITISTDGIRMELKTSGLGNLIGELMEPENTEAV

SEQ ID NO: 3091 - protein, 578 aa, unidentified
  source 1..578: note = uncultivated organism
MSTLQKRSIRCAIYTRKSSEEGLEQSFNSLDAQREACQAYILSQRQEGWRAIDAQYDDGGYSGGTMERPGLKRLLADIEAKKIDTVVVYKVDRLTRSLADFAKIIEVFDARGVSFVSVTQQFNTTSSMGRLTLNVLLSFAQFEREVTGERIRDKILASKRKGMWMGGPVPLGYDINDRHLIINEREAEQVREIFRLYLEFGCVKKLKAYLDQCGVKSKIRVSNSGNSSGGASFSRGALYLILRNRTYLGETPHKGQSYPGEHAPIVDREVWERVRILMAENVRVRRHGTNAKAPSLLRGLLYDEDGNRFTPSHACKRGKRYRYYVSQRVIKDASSASNQPGRIPARELENLVLAKLKSFFSSADQVVSALALPEDDLGVTQKLIESATWYAKRLGENSPSVLIELLETIVARIVVHQGSVEIQTDRAKLRAQLLGPDHTDPQTQDTMNDLNQQPIALMIETKLKRCGGEMRLVIPSLSADQAPDNAMPALIKAISRAHEWVQLIVAGEYKDQRAIAAATGLNERYVSRIIQSAFLAPQIVEAIVKGRQAPEMTLAALLDKVPLSWAEQNAKMATFVTQ

SEQ ID NO: 3092 - protein, 635 aa, unidentified
  source 1..635: note = uncultivated organism
MEEKKKICGLYMRVSTEDQAREGFSLSEQKERLETFCKFKGYEIKDYYEDAGISAKTGNERPEFIRLMEDIKSGKINTIVALKLDRISRSIFDWENIMKTLEKYNADIVCVNDDINTTSANGKMISRIMMSVSQNEIERTSERTKVGLAGAIKQGHIPHQAPLGYKHENKKLVIDHSTKDIVIRIFELCHSGTSYQKISTLFNKEKVLGKDNWRDSTIFNILQNEVYKGDFVHGKRTEHPTYYANVVEPIISRELWDECQVQKKKNAKSYQRTLTYLYLQKLICPKCGRILGGKATKKKNNVYYYYYCNDCKVNIKENVIDNYVSQFMKDLVEYDSVVNQFFLPMIKQKIENPKDSIIKEISIQKEKLDRIKRAYINGTFSLEEYDNEKHFVNKKITELESKLNETEICDELKFTPEDILVKRDIDFINNILYPNKYKKFNLTPDDYEREDKAKLFMTYINNITLKQDKDNYIVDKINFRESITKPFNELFDNGFIDTKYGDIKGTIRFSEYLPDDKVCEVIMRLRQFYNVGYYEAEYYHDNKKFYFDYRDNRTIVRIFPLEDYKKIDPNVEMEVYNLGVLYIDEDTTARLEDTDGVFKAIPDVYTSVTYSKEPIMIKTKPMRYCDEEELENEEK

SEQ ID NO: 3093 - protein, 500 aa, unidentified
  source 1..500: note = uncultivated organism
MNKTKFKQCAIYTRVSTDLQAEKDFSSCKSQEEKIKSFIQSQNNWQIFRVYSDVGYSGANLNRPALQELLEDIKQKKIDIVLAYKIDRLTRSPKDFYQLIEFFEKYNVSFISVTERFDTSTPAGRLLRNIMLTFAQFERELTSERTKDKMLERAKRGLYNGGYAPFGYKRENKKLIINKREAEIVRIIFETYIETGSIAKVYALLKEKNIKNRQGKTFYKTALSFILRNPVYAGKVKHNDKIYQGIHEPIISEEIFEMAQKMHKKKLKRFRVYRDFLFGGLVNCGNCNFKMSPCFTNKYSKGKLKRYYYYRCTSTQHKEWRSCSIKQVSADRLENYILENLERISLDKDYIENLVFRLNYGQNTPHRTGYELTDSCSKFSPEGVFSTLKFFLSTLAKKKGVERNLLAKRFIEKIIYSKENINISLFYSESLKNFLAEKSPASRQRGGASGRSADEKNIIPIKENQFETNNIAAGLGFEPRLMAPKATVLPLDDPAIFNNG

SEQ ID NO: 3094 - protein, 532 aa, unidentified
  source 1..532: note = uncultivated organism
MTLVQAPAPKRRRRSDRVQSSAPATDVVRCAIYTRKSTNEGLDGDFSSLDAQREACEAYVASQRAEGWVLVDQSYDDGGYSGGNADRPALQRLMADIERGEVDAVIVHRVDRLSRSLLDFAGIMQCFQEHDVSFVSVTQQFNTSSSMGRMVLNLLLTFAQFEREMIAERTSDKMCAARRKGKWMGGPAILGYDSDRENHRLIVNPDEAEMVRELFDLYLQYQSTLKVVEELNRRGWTTKTWFSKNGIQHGGCRWDKARLIRHLSNVTYTGKVLHNDEVYDGEHDAIVDEAVFERVQEIVSQNGMGKGPVARNEHGALLKGLLRCGKCGAAMAHTYTKKKNGRLYRYYACNTRTKQGREACDTRALPAADVEAFVVQQIRQIGKDPQLVEQVYAEAQKQQAEIAPRIQAEYDQLLPQRRHCTEEIKGLVAAIAKADEPAPSLTESLHEAEERAAALDQRLAELKSQITEAESQVIDADHLRDTLCQFDPLWDVLHPEERIELLHQVVDVVRYNADDDTISVVLRYHAPDQHNE

SEQ ID NO: 3095 - protein, 643 aa, unidentified
  source 1..643: note = uncultivated organism
MSAASKSDAPLAGAYIEPTPAGSLVRVSALAADHDPSSPANQRRVNHQAAARDGAQILPEFEFEEVVSARKEVERPLLDRALKALLEGRIKTLYVNRLDRLSRRGMAHVGMILDELEKVGGRIVFVGEGLDTSKAGTRQILAILSEQARAEADNIAWRMEQWHAGNRRDGLWLKKRPYGYRVVDGKLHPDPDEAAVVRRIVTEFLAGASLRGIATRLNRDGVECPNAVKHDEARLAGRRVRPLATRRWSYATVRAVLLAPSLAALMSHKGQLVRDDNGDPVPAGMGIVTLTERARIVAEFERRGLTVRNAKDAERIGKRTGGGRPPKYLLTGFVRCSRCTAAMQRQTGRRGHDPAPIYRCAANGRGHQCPGVSIFAEDLEREVERRFLTKLAALEPGDPVLERIAERWLALVVPDDHAGRAILEEKLHDVEARLGDLYEARYARGEFSSAEDITRYEAIRRRLAEQRDAVRAALAKLGPPPTLDLAGLLDTELSSEAWPLLPLQRKRALLGLAVSRVYVLPSRGRGWHALPAEERVHPVWIGEPDPGIELVGDAAGTNPASDAPSNGVSLTPRELEVLRLVAEGRSNHQIADELLISARTVSVHVSHILGKLSVSSRVEAAAVAHRLAMSEDVESPAEPAVQE

SEQ ID NO: 3096 - protein, 601 aa, unidentified
  source 1..601: note = uncultivated organism
MRQNEDVIALYSRKSKFTGKGESIGNQVELGKEYVRVHFGDAAVDKIVVYEDEGFSGGNLNRPAFKRMMDAAKKRQFKAIIVYRLDRISRNVSDFSGLIEELARLDISFISIKEGGAMMYIASVFSQLERETIAERIRDNMHELAKTGRWLGGTTPTGFESEAIKSITVDGKTKKACKLKLVPEEADIVKTIFDLYVETDSLTLTEAALIKQGFKTKNGKYFTRFSVKAILQNPVYMVADQEAYDFFIKNDTDLFSEHDAFDGVHGMMAYNRTDQEKGRASISLPPSEWIVSVGKHPGLIPGKVWVQVQESLERNKSKSFRKPRSNEALLTGLLFCSCGERMYPKMSKRKTADGKVIYTYVCKMKERSQRTVCNSKNANGNTLDMAIIEQVKMLADDKETFVSQLEQSRKFYTGNRMDYEQRISDMRKEKAETEKKINSLVDSLVEMGDSPAKAHVTKRIEQLNEEYQSLEKRIQELEGLTTQHALSDVEFDLMRQLLTVFKDGIDEMTIEQKRAAIRTIVRKVIWDGVNAHVVLFGVQDDEIEYPEIASAASDNTDDEDDNDELVAFSDVDYEDDDTEDDRLGKTNPLSASKTHWGEDSK

SEQ ID NO: 3097 - protein, 533 aa, unidentified
  source 1..533: note = uncultivated organism
MRRMNLQFNLPTFDDLMTPQTLPMAVGESTVRSMNVLASVQSRIKLKVAAYCRVSTDKEDQKSSIRIQREHFTSVASQHPDWQFVGIYADIVSGTKKEKRPELQRLLKDCSAGKVNLVLIKSVSRFARNTTDLLEMVRSLTARGTDIFFERENIDTRTMDSEFLLTILASLAEDESHSISDNCRWGLQKRFQDGSYRAASAPYGYDLVDGNYAVNETEAEIVKEIFSCYLADATMAAIARNLNERGIPTKRAGQVWKGQEIAPTWTSYTISSILKNVSYTGDQVFQKCYTDRSFRMCRNKGQYPQYHHEGHHPGIIDKETFETVQEKLAANKTDAVPYDRNQKSILSGKLICGCCGANLNRSKNRVGNVYWICRQHRKEPSSCPLPSIKEDDFIRDFQAMMEELHKDDSPIRDYLDTLIQNFNAHPKVSALQSKIRQIDQETDGLRNSRGRVLSIDFHSRQNALERERASLQSDLDAMYDNRIDETEELLLLVHSGSGSFYEYFRHVGSVTVQDRGAFTVMFRCGLELYYDGR

SEQ ID NO: 3098 - protein, 535 aa, unidentified
  source 1..535: note = uncultivated organism
MGADPRRKENGNGAASRTVMRCAIYTRKSTDEGLDQAFNTLDAQREASEAFINSQRHEGWLVLPQKYDDGGYTGANMDRPALKRLLSDVESGIANCVVVYKVDRLTRSLLDFARIMEVLDKHGATFVSVTQQFNTTSSLGRLTLNILLSFAQFEREMISERTRDKMGAARRKGKWVGGNPVLGYDVAAQGGALVVNPAEAQRVREIFALYLDHGSLIPVVEELDRRGWRMKSWTTREGRQAGGKPIAKNSLYNLLTNIIYTGKVAYGGEVYEGEHERIVDDETWNQVQSALSRNGRRGGRNVGNKHGALLKGLVRCASCDAGMVHSYVSKKSRFYRYYVCIKAHQRGWAQCETRSVSAPALENAVVEQLQGIARNPALLRAVLRQIEERRLQDAAGMTKEEADIEMELKKAAQEMGDTAAMAGGLRVAAGELVQLQDRMNHLSGRLAEIQRQMTRIEAERANPKDVEAALHKFTPLWAQLSTWERERFIRTLVEEVRYDGRTGTVTVGFRSSGIRELCEWAATHQEDNRDVRQPG

SEQ ID NO: 3099 - protein, 551 aa, unidentified
  source 1..551: note = uncultivated organism
MQGGTRVYCLYRVSLSRQADHIRVDGQTQADIPMQKEACRKFCLEHGWEIVNSFTEPGVSGYKSSIFERDAIADILSEAKEGNYDILLVYALDRLSRRDYELPILMQKLNQVGISVWSTQEGEIPYKNSTDHLLLYMQGWKAYGESERISQRITTVQSQIVMRGEYRGGAVPYGYRLIESGEINKQGRKRHHLCIHEPEAAIVRTIFTKIVDEGYTMYELTRYLSQMKIPDDVRKLTWRSATLHDMLRNRIYIGQQRFGNEYSLPFSRMQIIDPSVFSRAQEIINHSRKSLKGKCGSYDPPPQYHDLIFCGHCGSHLVYNHAFDKHKDGVCAIRYYYRCYNKERFANPCTGASTFSGKQIDADVREKTTALISFFLAAPKDSLVRNSAELARTENLVQRENLKKQLAELDDQLEILQKRLTDTLRLYGIETTSELQIVYSDVRTKRNRIFHTLQNLKPAHCELDYLIRSKEKCLEKILIDCEKWSQKSWKEAERMTPRFFERIDVFRGYKLKYHIVSEIKQFLPVTMLCENYYDCLSASNGSKLPAYKSDQ

SEQ ID NO: 3100 - protein, 526 aa, unidentified
  source 1..526: note = uncultivated organism
MKANKDTGSKGVIYARYSSDNQREESIEGQLRECQEYAERHGITILGTYIDRAFSAKTDNRPDFRRMIKDSKKRLFDIVLVWKLDRFARNRYDSAHYKDILKKNGVKVVSAKETIAEDSTGILLESLLEGYAEFYSAELSEKVRRGHHENALKAKNNGGSIPLGYVLNKETKKLEVNEITAPIVLEIFKRYAEGETIAAIKDDFNQRGLKTNNGCAFRYSTFSTVLKNRKYIGEYKYHDIIIPDGVPAIVPVDLFERVQARMEKNKRTPAASKAEEHYLLTTKLFCGKCGCMMAGESGTSSTGTKYHYYKCGSAKRKTGCDKKAVKKQWIEDIVVDRTMKMIMNDTVISDITALLMIEQDKENVTLPALQQQLAQTEKAIENMLNAIQQGIFTASTKQRLDELEARKEKLTVCILQEEIQKPRITVEQVKYWLCRFRTLDPTKEEHRQRLIDSFVNAVYVYDDKLILTYNYKDGQETISLADIKRSDLESYGGPYENHRNRNGFGGFLFLLLRILVRNKCGIQARS

SEQ ID NO: 3101 - protein, 517 aa, unidentified
  source 1..517: note = uncultivated organism
MAKVTVIETVSQDNSGEKIRVAAYCRISTNLTEQQNSYQVQLAYYSHKFENSETEVLVDLYADEGISGLSAEKRSEFQRMIQDCRHGKIDRIYAKSISRFARNTNDSLKYVRELKSLGITVCFEKENLDTAKTADEMMLTIMAGLAQEESVSISKNQKWAIRKRMQNGTYQAPLPYGFIRIDGRIEIVESEAEVVRQVFAWYLEGYGAKLIARMLNDAGISRRNWTWTAQVILRLLKNERYIGNAVFQKTYATETIPFTRKINSGELPMYHVTGANSPIIVSEDFQRVQELKQERSRQLNRENIYREYLFTHKIKCAYCGLSYAHKPIKGQEYWVCRNHERQASLCPNQKIAQETIYQMFIMLFNKLHVCCKEILSPLLNSMQELKVKKFSGNTHIIEIQKKSAGLKEQIHVLTTLRIKGFLTDEKYHEQTAELNQKIMQLQKELRRLMKSGDEDGTLEQLEMLTDFFRNRESMMIEFEEETFTFLIDKIVIKSPYEAEFHMLGDLKFTEHYPQKQQ

SEQ ID NO: 3102 - protein, 544 aa, unidentified
  source 1..544: note = uncultivated organism
MKYYNSVWKVAMYIRISNNDGNNESESVANQREIIKKHIDSFDDGDYIIVDEYIDDGISGTTDEKRTAFQRMLKDIQAGLINCVIVKDLARSFRNYSDQGYYLDEWFPRHNVRFISLYHQSLDTLKDNYNIRNIMIPIQGIINENYCAELSVKIRMAKETQRKRGEYTGNWGPYGYIVDSENRHRLAVDPEAAEIVKTIFSMFLDGKSRSDITRYLNDAKVLCPSEYRKKVLQYNYHTYFAEKSRMPLWSSTTVTRILKNQIYCGDMVQGRQLSKSYKLSKVENIPEAEWVIVKNTHDAIIARETFEQAQAILEKAYSPKKKIKHDGLYSGIIFCGDCGKAMYRSNARQKSCQYYCCNTYRAQSRNACTQHYITEDQLNEVVLKAIQQYVYLICEYERVMVVTDNSFVDKKSCKTEKESIVSKSEEKQRYTSLKRKAYMDWKDGKITRDEYHELKKEYEAIIEGFNDEILEVEDVQKKSELQNDNTLSVIKMFKKYRNITMLTREILLELIQRIEIYEGKINIQFKAKDDLLYLDEQILAVNNI

SEQ ID NO: 3103 - protein, 543 aa, unidentified
  source 1..543: note = uncultivated organism
MRQAEEKRCAVYTRKSTDERLDAEFNSLDAQYDACASYVKSQVGMGWRLIDRKYEDGGYSGGTMNRPALTEMLRDIEAGKIDIVVVYKIDRLSRSLCDFTDLSKLFERNGVSFVSVTQQIDTSNAAGRMMLNILMSFAQFEREMTADRIRDKIYASRKRGMWTGGPTPYGYVLEDKQLKVEPGAAEVVRWIFRRYTATGSSLQVAKELNESPNRRADGQPWRPRMVLAILKNRVYTGKLCVKRTGELFDGRHEAIIDDAQFDSAQKALASNRCDDGTAKRHTMFAPLKGILRCGTCGGSMTPVFSNYSKGGGRRRYVYYRCTRDAKNAERACPIRNIAADVIEKFVYSQLGSVLRRDDIRALVCSGNPGMDEAYQAETSDMERFWGRMVPAERERLLQLLVREVRLFPEKVEIDLAVEGEDGRIAVPARLKQNLGRTAIVVVPPAGEAEASADGELAVVRALRKSHKWADLLTSGTYHDKKSLADALGLSNSYLGKMLRLAFLSPRIVEAIMLGDLAAVSVTKLQELDTPIWEEQERLLGLRR

SEQ ID NO: 3104 - protein, 508 aa, unidentified
  source 1..508: note = uncultivated organism
MNAAIYVRVSTDQQAEKGYSLETQLEACRKCAHELRAVNIEEYVDDGYSAEFIERPHLTRMREAIKAKRFDVVIFYDPDRMARNLMHQLIIVEEIDKSGAELKFVVVNYEQSPDGKFMFGIRGLLAQLEKEKIKERTMRGKRGKASKGMVISDTKPFGYTFDSEKSTYVINETEAELVRMIFDFMVKEKLGTARICKELNARGIPSPRAKNAWIVSSIHRILTNTLYKGIIQSMKYRYEKTSLSQRKRTLRSESEWIPIYVPAIIDEVTWQAAQRQLKENKDFAKRNLKKDYLLNGSVTCAQCGRAMVISHSGCKGHNSYYACLSQKSSSYVYSGQEPCTARQVPTEVLDEYVFDYLMELYHNPDKIIDHIQAVPDGKDIQKHKAALEQMINAEKELLKQRETVLRWFRQKTLSEIEAESQFKDISRQLYDIAQMKKTYESQLAAISPARSVADISATIRSNLNKDDFTITEKKTAIRAILDRIIVKRVDNTRGRGSRPELDVQIKLK

SEQ ID NO: 3105 - protein, 559 aa, unidentified
  source 1..559: note = uncultivated organism
MKASTINQPIRCAIYARVSTEMQAKEGFSIDGQIETIKDYCAARGYEVIEVYADKGLSGGSMQKRVQLQQLIRDAETNHFDKVFVWKLSRLARNVKDVMTIVEHLLQNDVEFHSISENFDINSSTGIFLLQILGSVGEFERNIITDNVKLGQLSRAQSVYVNGSRVLGYDTGETPRDPIQINLYEAEIIKMIYNEYEAGRGYKAIATLLNNAGYKTIKGNHFSISAVKYILQNPIYAGKVQFNKYKDWNTKRRKGLNKDGPLITKGKHEAIIDIDQWQRVQDMMKKRSVQPKVLGDGNNLLTGILRCPDCGGSMVISNSTRRLKDGTKTRSQYYTCQRNKSQGAKACRSNGISKNKIEKFVQEQVTSLINQPDLLQQVIDQANQRYQEKVQALDTQSPQILKDITDIQEQIHRLQTVSEATDDSDTDIRHMLKDKINNLSFDLETKKQQLKEVNQHQSSEMPTKIFDKTETEQILKQIVSVFDQEDKMLVKRMYLSLIDKITFKKTRKADILKHVTIYLKKDIGNQLLKEANTSEAPSGASLFSLSENLQIHQDYPHLK

SEQ ID NO: 3106 - protein, 511 aa, unidentified
  source 1..511: note = uncultivated organism
MCKSLLYDALYARQSVEKKDSISVDSQLEYCRYEAHGNECLEYTDRGFSGKDTHRPGFEQMMRDIRSGRIKRVIVYKLDRISRSIVDFANMMEIFQKYHVEFVSSTEKFDTSTPIGRAMLNICIVFAQLERETIQKRVTDAYYARCRHGFYMGGRVPYGYRLTSTVIDNILTSKYQEVPEESEQLKLIFSMYADTDNSLGDIVRYLKEHQIKNLRGADWNTARLSEMLRNPVYVEADIDIYRFFQSQGAAIYNPASDFSGCNACYLYKGTSSGTKSHSGLYGREVVLAPHKGFISSKTWLACRMRCLNNRQSASACRPKNSWLAGKVKCGRCGYALTIRKSKTKWGRYFVCSHSGNRGNCQGAGCTVYADALEEYMLDAIRERLSELPFSEENLISCGNDSGKAQKNMARKIRLTQIDEEIDHLLSKVPEAGSVLIKYIEEKVSALDTERNVLLEKTAPADTPDTKDKFHQNFRYIKAWEALSFPDRQMAADVLIKVIHIADGIMKITWNF

SEQ ID NO: 3107 - protein, 510 aa, unidentified
  source 1..510: note = uncultivated organism
MTLAQKFSGALNEIDDKFIVEAIEYQHHKVKLSRGKSLLLIAVLIVGLTATVIYADQGITGTSVEKRDDFLRMMEDCRSGRIDRILVKSTSRFARNTKESLEAVRELKSLGVSVYFEEQNIDTAQATGEALTAVFSALAQKESEAISERMRHSYQMRMQRGVFSTRCAPYGYRLVDNQLEVIEDKAVVIRQIFDRYLSGVSMEDIAKEITARGIPTKQNTPFWQVRSIQYILRNEKYIGNSLVQKTYATVTLPHRKKENKGEEDQYLIEETHSPIISQEVFDKVQQLLSRKSASIPPRAGIPHPLSCKIVCGHCGAICKRKVCRGTAYWVCQTHEKSAESCLTMQTPESEITEAFLRVYFRLKRYGEEVLTQLIQALQTAKTGRLLWSEDIISLNNRIADIASQERLLAQLKQQAIVDPDIFISRSNQLAEQRREAKLKKSHILRAEDDQTIQRTQELLDILEEGPDLLMAFDEALFSELVEKITIQNNSTAIFRLINGLELPEHFERRK

SEQ ID NO: 3108 - protein, 501 aa, unidentified
  source 1..501: note = uncultivated organism
MSTPPPTKTVAIYCRKSTEDGLDSEFNSLDAQRQCCEQFAASQRHDGWAVSPERYDDGGWSGSTTDRPALKRLMAEVEAGKVQVIAVYKLDRLSRSLADFVGLLQLLEKHQVAFVSVTQHFNSATPMGRLTLNILICFAQFERENMIERVRDKVAATKRMGKWCGGRPSLGYDVAPGGRKLLVNEAEADRVRQLFALYLEHRSVARVLRVFHDRGWTAKGWANRKGRQSGGQPFTKSALAHTLGNILYTGRILYKGEIYAAEHPAIIDIATWEQVQNLMVSQRASGGAESRTRHFPLLKGLLRCKSCGCGMTYTYTKRGARLYGYYACHTARIQGAATCPMPSLPAAEVERLVVEEITAICRDPFLSDRVINEASVQHAAMVEDLRARSREAEALATKAMAACARAPTDAQQLALRRQADSQAATLRRRLAEAEQMTLDRSTASTLLRSFEPIWAELAPKERQELLRKLLSHITIDGEHGSAAFNFTSDGIAALASRGSAA

SEQ ID NO: 3109 - protein, 554 aa, unidentified
  source 1..554: note = uncultivated organism
MKSQPTKPSLRCAIYTRVSTDQKLEQEFNSLDAQREASEAYIKSQTHEGWSPVRSRFDDGGFSGGSMERPALRRLLSEVQAKRIDVIIVYKVDRLTRSLADFAKLVELFDAHSVSFVSVTQSFNTTTSMGRLTLNVLLSFAQFEREVTGERIRDKIAASKKKGMWMGGVVPLGYRVDSRALHIVEDHAELVRALFRRYLEAGSVARLKQIIDAEDLRLPIRVDGVGRSTGGGLFSRGHVYKIFSNPIYIGQIAHKGQVHAGQHRPIVDRDLWDGVQRSLRDHLATGKERHERQSTNAMLIGKLFDDRGNLMTPSWSKKGSKRWRYYVSQAVLRGDNTEAGSVARVSAPEIENKIIEAVGNLAQRKGSEARPPGYEATAGDTPSREAGNAVSDRHVEIRSLIDRVTLERTTIRIALSPDLEEHGEAKVMTILWTPPSPYRRREIIQGASGGSSFARPLRQSARLLLVDALRKAHRWLDELIADPRQNVEAIASRECKSERSIRMTLSLAFLAPDIVKAATEGRLPRGFGLTRLIDLPIAWSDQWKALGLKAPARI

SEQ ID NO: 3110 - protein, 536 aa, unidentified
  source 1..536: note = uncultivated organism
MKAAIYSRKSVFTGKGESIENQINLCKDYGKKNLGIEEFLVYEDEGFSGGNTNRPKFKQLIKDAKDKKFDVLICYRLDRISRNVADFSSTLELLQENNISFVSIKEQFDTSTPMGKAMVYIASVFAQLERETIAERVRDNMLELAKTGRWLGGQTPLGFKSEKISYFDAEMKERTMYKLSPVEEELDKVKLIYMKYLELKSLRKVTQYLLENNFKTKLGANWHTSVVSDLLQNPTYVKSSEAVFNYLRESGITCVGTPDGIHGLLTYNKKKGTKKQRDKTDWIATVAKHKGIIDSDIWLQIQAEINHNKAKAPKLGRTHNALLTGLLRCEKCGSPMSVIHGPKDKNGNKTYFYGCSMKIYSKGTRCDNSNIRTTEMETVVINKLKSVTKNNGLLLEELNAVKEQLAPSKEETNELTLLDSKIKSNKQAIENLVKQLSLNPNSTASKYIIEEIEKKEEEINQTESKIESLKEDKMEMNKLEIDLDLIISNLKNFYGTIDNVDIEKKKYLISVLVDKITWNASTGEVDIKLWGSSKKK

SEQ ID NO: 3111 - protein, 576 aa, unidentified
  source 1..576: note = uncultivated organism
MEVKVLNQNKNDNDNDNDDTFYAIYSRKSKFTGKGESIENQIELCKNQLINKYNIDENNIKVYQDEGFTGYNTNRPQFQEMMKDIRNKKIKCVIVYRLDRISRNVADFCNLKNEFLKYNVDFISVTENFDTSTPMGSAMLMISSVFAQLERDTIAERIRDNMYELAKTGRWLGGNTPLGYKSQKIENLSIDGKKRSLYKLEVIPEEAEIIKLVWNKMSELKGLGKLESYLLQQGIKTRNGNNFTRFSLITILKNPVYAIADEKIKQFFEKMNVTIYENEEIKCDGKHGLIAYNKREEMIGKTKSYKDISEWIVAVGKHQGIISSEQFIQVWNLIENNKDKRCRTPQQNTSILSGIIRCKHCGSYMRPRLRNSIAPNGERNFTYLCELKDKSRKQLCKCKNINGIETDKLVIQRIKELTLPTSDFMQRLKLIADGKEKETTKKQNELQTLNATLTRNKMKIESLIDRMAIIDVDLINDVALQVKDLKSKNIEMEKRIAELTKEVSQETDQREIASLALDMINKYMSSFDTLDIVDKRIMIKLLVSSVESDGEHVYINYIGSSNTAMCPRSEGSRSSS

SEQ ID NO: 3112 - protein, 547 aa, unidentified
  source 1..547: note = uncultivated organism
MPKYKATAYIRLSYTDDHSSESDSVSNQRKLIENFVERNPDIEVVSEKIDDGYSGIIFDRPAFKEMMQDVTDGNINCVIVKDLSRLGREYIETGRYLRRVFPAYGVRFIAITDSIDSIDTAHDSGDDLTVSVKNIMNEAYCRDISIKTRSSLDVKRRNGDFVGAFPVYGYMKAEDNKNLLVPDPYASRVVCDIFRMRLEGASASKIASELNRLGILSPLAYKKNNGLPYAKKGYADKADCKWSATTIIRILQDETYTGTLVQGKQGTPHYKIKQMEQRPASEWVRVPDAHEALIARQDFELVQRIKGLDTRTSPNEDTVYLFSGILICGCCGSRMTRKTNRANGKEYHYYYCPTGKKKGCAHPVMLKESSLIDCVRDSLKAYIGNIASLEALLSGVDQSSINQALAKEYSDHISDNERRLEQVLEFKARLYESLVGGMLTKEEYASYKAKYTKQAEDIRESVRVLKEKLTEVLENRSERNRWISQFTQFSTLETLDRRALIHMVQSIRVRGKKELDITFTHEDEYKKALQLLALAAQQKDYEQRKVG

SEQ ID NO: 3113 - protein, 538 aa, unidentified
  source 1..538: note = uncultivated organism
MKRKVAIYARVSTEHEAQISALGNQIQYYDEILKTHQDWQLIARYIDEGITGTSTRKRPNFMRMINDAEKGHFDLIVTREVSRFARNTVDALQEIRKLKKIGVEVYFTEDNIWTFNDDDGKLKLTLMATLAQNESKKLSQRIKAGQTITFQNGVFYGNGNILGYDRVGKNAVINEEQAEIVRYIYSEFLKGKGTTEIATSLEKQGALTSTGLERWSAAYIARVLRNPFYSGTVIYRKQYIPDYLEQKHKTNYGEVEKIIVEGKHEPIISKDDFKKVQEIMDSHTRQIKLGRKRGIGVAKNIWSKKLECECGSHFNKCVYHRNKNNITYSYICHNRKSHPKGRIYNDGHIPCDMKELQEWKLRLMVETIFRNISRDANNKNEIKRILMVGIKIDEKLEEKIKKRIKILSDLIETENAKLDKVLDLYLINQVSTSIYDRYQKRTSNKIEKYKIEINELERKLETLEVPEVRLEKAKQSIKKILDFDYNGVNDQIIEEIVEKVIVHKDYFEWKLNFMTDTIKLQIIGKNKADCYVADYEKK

SEQ ID NO: 3114 - protein, 1289 aa, unidentified
  source 1..1289: note = uncultivated organism
MDPKDRAGWSHTLWEPLDKLQQNPLYQKKEEVRVAAYCRVSSGHTNFISLENQVTYYSNYIYSQPNWKLIGIYTDDRISGATIKNRPGIKRLLRHAKEGRIDLILTKSISRFSRNTKEILEVIDEFKKTNTTIIFENERLEVVNGERSLMLETHAAMAQEFIESLSSLVKFSYKKNLKDGRPYFGNIYGYDPITENTKHMVKINEREAEIVRWIFSEFINGVTYAEISRQLNLAGIKTKKGSTKWTGASVRNLLRKIEYTGNKLTMKRSKDMLTGKVKDDDPNQQQYLIENSHPSIISFEVFEKAQERIEQISFKHESFPEPVKNSLSARVVCGRCGSNIIKMGKYRFICTRSKPDVNLCGIEKLYTFDPQRMILKALFERLMDLEIDVNKDRKGIHYEIQFNKFRSREVIEVEFKKMKEKLEQIIVAANKNEHFEFVRLRYFNQLEIAKIQGGQEEHQRIKDEYDAFDKKANEVEEDRELRIKALEWLKSIRNLDSFIMKSSIEILRAWAFQLEVYSRTVYKVRWIDEKTTIIGEGEIPEIMKVVEKRKEERERNFNLHQKSIDENIKYLNSEYTPDENLTESKKKIIAFRINNGREGPPVEVSQRISDNMNYIKTADIIKADVTKLENGLNIKDLDNLKQNIIKARYEQIKENKKLRVAAYCRVSTHMEEQKTSLQTQLAFYNYKIISTPNWELAGIYVDEGLSGTSTDNRDSFNRMINDARRGKIDMIITKSVSRFSRNVLDVLETVKLLNELEPPVPVYFEKEKIYSDDKSAGMLLSLMAASAQDQVLALANNISWGLQNLAKRGIITRRTDMYGYTIDEDRSWYIVEDEAKVVREIFQLYMGGSEISDIILFLNRKGIKSPKGIDYWDPNTIRAMLRNEKYIGDYEYQRKYTVDTMTGKRRMNRGQVPKYYIEGHHIPIIEKHIYESVQKLIKENRREPVPDARKAGTAGRESYYQKFYCGECGAVMSRYGSSIYDSREGSKWRCNHSYRVVTSNCSAKTFMEKYMDYNFVKTLEEIKRSKKFRVLIRKSLSNLELTPSELEDKEMIEEQIEKLNQQLYNAVDMEVQKNGKDTNLINDITDKIIKLREKQLAYIERIEKLDEEQERFRNLMKYCEKIDSISFRTFHNMRPRIQQGESLYLTSNAIKNSTYMDLDGVDHFPEEVFAEYVLSGSINLEGRIKFKFAEDIEFGIDMTYEDYQQLFEEEKLKIQWEEFIHSEEVTKLKEFCKVPRKPIEIKEHLGISSNTSFYKRIKNPLQKAGLIELIDSKYNRNRKYKWVDGSDDI

SEQ ID NO: 3115 - protein, 514 aa, unidentified
  source 1..514: note = uncultivated organism
MARITKIEPNHTVANKIKVAAYCRVSTDQNEQLLSLETQKAHYESWIRSHDEWEYAGLYYDEGISGTKKDTRPALMQMLSDCEHGMIDYVVTKSISRLARNTADCLEIVRKLLDLGIAVYFEKENIDTGSMDSELLLSIMGSIAESESLSISENNKWSIQKKFQNGTFKCSYPPYGYEWDKKKGEMVVNPEQAEIVKYIFLQTLAGVGTHDIAKDLAAKGVPTKKGGKWTGHTVNGIIRNEKYTGDCLFQKTYTDSSYKRHTNLGELDQYYVENHHEAIISREEYEAANAVVDQRREEKGIELESQKYNNRYPLSGRVICGNCGGTYKRKTYSKKVVLACTMHIEDKDKCDMKYIDLADVERAFATMMNKLIFGRNRVLKPFYASVRDSNKTDAFLRIHEIDEQLELITEKKQNIKGLYAQGIIEPAMYAKGMNDLSAEADRLLTERDSISYAAKTDIVFIEEAKELLDYTDGAAMLTGFEADVFERFVDRIVVRDRHHLQFEMKCGLKITERI

SEQ ID NO: 3116 - protein, 505 aa, unidentified
  source 1..505: note = uncultivated organism
MIRKADFAKETAPVRCAIYTRKSTDEGLDQAFNSLDAQREAGEAFVLSRKQEGWVCLPERYDDGGYSGGNIERPGLKRLMADAEAGLIDAVVCYKVDRLSRSLLDFSRLIEVFDRRHVMFVSVTQPINTADSSGRLMLNVLLSFAQFEREMIADRTRDKMGAARRKGKWTGGFPVLGYDVHPDGGRLVVNEEEAETVRQIFTLYLDLRSLQATAAELNRRGWRTKSWATKEGTFHEGVAFNKAHVSRLLGNVLYVGKVSHHGQVYDGEHPGIVDEEVYGRVQALLAGNNVSGGAKAKNRYGHLLRGLLHCTACGCAMSPSVTRRNGKAFKYYICNHAAKTGWRNCPHPSLPASEIEDAVVQRIKAIGRDPGLVADTLAEIRSIQKTRVPALTAERRRLDREASRLRDRGDSGDHLAKIEARLVEVGEELDVLQSANVDKRDLAKALALFDEVWACLFPREQERVIQLLVERVDFDAGRETVAITFRPTGIRSLAEEIEQAAEVTT

SEQ ID NO: 3117 - protein, 545 aa, unidentified
  source 1..545: note = uncultivated organism
MKPLRCAVYTRKSTEDGLEQEFNSLDAQREACEAYILSQRHEGWRLVPDRYDDGGFSGGSMQRPGLTLLLADIEAGLVDVIVVYKVDRLTRSLADFAKIVEQLDSKQASFVSVTQAFNTTTSMGRLTLNVLLSFAQFEREVTGERIRDKIAASKKKGIWMGGPVPLGYEVIERKLVPVPEEAERVRTIMRRYLEVRTVPSLIEVLRNEGIVTKVQNRTSGPHKGGIPFRRGSLFYLLKNPVYCGKIVHRGKIYEGEHEAVVDEGLWDAVQAQLAKKAPPRKRPTNDPQQAMLRGLLTDPHGRPMVPTYATKRSRRYSYYETRKDLARPADPPATRFVQGQLERHLVVHLTQLLEDEHALRRLSGIEEAGQLRTMFDTSRLLACRLAFEGSREAILQDVISALQVRAERIEVVLNADALAAGTGNQINWNIALPDRKPFREAKLRIDPKTHDQTIKDDLLALLVDANEAQELVLANPELSLHQLGKAENRCRTHLARLLRIAWLSPRIVESIVTGTQPDKLNRQVLQSNTIPLDWAEQERQFGLSC

SEQ ID NO: 3118 - protein, 573 aa, unidentified
  source 1..573: note = uncultivated organism
MTERKTVRCAIYTRKSSEEGLEQEFNSLEAQREACAAYIASQKGEGWKPLPARYDDGGISGGHLDRPGLERLMGDIEAGKIDMVVVYKIDRLTRSLADFSRLVERFEARQCAFVSVTQAFNTSTSMGRLTLNVLLSFAQFEREVTAERIRDKIAASKKKGMWMGGQVPLGYRAKDRSLIIDPVEASLVKHIYGLYEETRCLSEVEARLEREGLRTAQRTLKDGRVVGGRRFSRGHIHRILTSPLYAGKIAHKDEVHEGRHEAIIAEADWHRIQDLLQDQAVIRRRKPRGSPVKTEPKESSPLRGKLFDETGDRLTPSHTSIRGKRLRYYVSRKLVTRSVDAATNADCRRQPPVGTPTKAKGWRLPAIALETAVANAIADHVSKLADAARFLKMPTPEGLEAVKAESQSLQHRLKQDRSGFIGALVQRVMIAPGQMTIDIDRGGLAHQLGVAESEIDEEAAAITSDFQLRRRGIEAKIVTGLDPSEIDHVLAREVARAITWRQEIEAGRTPNEIAKELGWSTAPLRKRMKLAFLSPKLIAAILEGRQRSDLSVNSLIHGDIPANWAEQERRFGV

SEQ ID NO: 3119 - protein, 638 aa, unidentified
  source 1..638: note = uncultivated organism
MKNNYLNKHDARNVSKSRAIITGKRRVAIDVRVSTEHEQQIDALENQIQWAEELGNDHKDWTFDVNSDLYIERGLSGTTMKKRPEFNRMITLAKQGKYDLIVVREVCRFMRNAKITLNLVDELLDYGVEVYFVNDGIWSRNPDDYFKLTIMAQYAEQESRKTSERVFSGQAVARENGNIFGNGNILGYKMIVGEKSKDSHYEINEEEAETVRTIYNLALKGMGIKKIKHYLEGDNSESRVYKTAEGKTKWYESTIQRILRRPTYMGSIEHFQSVTENPLTHARRSVQKEQRVRYDLREKIPCIIEPDIWQAVQVAIDSRVNHNFNSISQSGINGVVTNKNVFCRKMRCGCGRRFKYDEENKPDGIVRGTFRCYSLIDDGSQDVRKKRSEILDDDCSIYGIRDWKMNFITLEVFKYLECDTEKVKGTLIDIINKSYADEGISGYSEEDILKFRKEIDNLNNKNERLLDGFEDGIYSKEKYLERKLRNDTDINRIQEIINKAEAVHAKDEQKEKTLKAVQKFIEETLEFPKVNGYKTKVPEALIEAYVNSIKACANNVFEFNIRINPDVPVQIPIKPDDEFNPQYDSANVFLDNSDASLIAEFKLTYDDAKRYTSIMKGKYKVLRTHFDKPITVRVYANL

SEQ ID NO: 3120 - protein, 552 aa, unidentified
  source 1..552: note = uncultivated organism
MPIIAIYPRKSKFTGKGESVQTQIDLCREYCSLHFENPTYIVYDEDEGYSGGNTKRPAFRRMMHDARSKKFDILCCYRLDRISRNVSDFSQTLDELHGLGIAFVSLKEQFDTSTPMGRAMIYIASVFAQLERDTLTERINDNLRALAKEGHWLGGMPPTGYRSRRVEFERNGKKRKFFVLTECESELSIVRILFAQYLEKRSYAGVETYCLQHCIQSKNGKNFSRATIKAILQNPVYCIADSVAWDHFSHGDYNLCAPESEFDGIRGIQAFSRTTNNRPSSQLKPTADWIIAVGQHKGVICGEDWVTVQQIISARGACAYQAPRSTTALLSGILKCGICGSHMRPKMHSKRRADGSRGVSYHCVLKASSRGTRCQNKNVDAEHLDEQILQMLSRLAQHDPSIAAASAIDFSLLSSQQNTILQQIASQRLELDLLEEQQRRLLSKISDYDLSDALINSINQEHQRLASEVFAIQSYLHAAAQELAFHRNAPTASQACAQLAAPFRSQLRLLSYAEKRQLLQAVIAQAIWDGERIHIKLSPPRSGCQGCAPIHS

SEQ ID NO: 3121 - protein, 553 aa, unidentified
  source 1..553: note = uncultivated organism
MKKLRCAIYTRKSTEEGLDMAFNSLDAQREACEAYVTSQKAEGWVLIPTAYDDGGFSGGTMDRPALAQLLADVRAGKVDVIVVYKVDRLTRALSDFARIVDVLDAAGASFVSVTQAFNTTTSMGRLTLNVLLSFAQFEREVIAERVRDKVAQSKARGIWMGGNVPLGYDVQDRKLLENPTEASTVAHIFRSYLDQPSVRALKEKLDMQGVRTKVQQGKTGQRGGVPFSRGALYWLLSNPIYIGKLRHKDKLHDGQHDGIVPLELWDAVQAKLRASAAERGNATTGNGTALLTGMIHDAAGRRMSPSFTVKEGRRYHYYVSSISKDIDRGLSGASAAQVARVPARRLEAAVREALRALLLDEAQLASLFGDGDTATTRRRLATAMELARQLGPNAIDGAHSLLARLSFSIVIHRDRVAASVTHSALLAALDHDVGTVAGNDHRIALTISTNITHRKRGGRLVIAGNAPAEKIPDPNLVALIAKAHRARAALFAGAAPRGNRHIERLARLAYLAPDITSAILNGTQPATLTSRSLLKLPGLPLEWTEQRKMLMFA

SEQ ID NO: 3122 - protein, 502 aa, unidentified
  source 1..502: note = uncultivated organism
MEIFDFYVDDGWSGANFDRPSFKRMMGDIKAGHIDCVIVKDLSRLGRDYIESGRLIQKTFPDNEVRFIAINDNYDSLTADFNEESLVLPVKNFINDAYCRDISVKVKSQQKMKRESGQYIGAFAMYGYLKDPADKNHLIIDEYAAGIVRSIFEWKVDGYSFAAIADRLNGMGVLSPMEYKKSNGEKFCTGFRTKARGKWSPVAVRRILMDETYIGTLVQGKSERVNYKVKKSVVKPSDEWVRVPKAHEAIVSKDLFEVVQQLLKTDCRSSSGKDTSHLYSGILYCGDCGEPMTRRVVRHKGNTKVYFICSNYNKNKKCSRHSILKEDLDKLVLYGIKSRIEIILDQMTVIAGVKDLDMRYDDIVAFDKEIVDLKAEQEKYKKLRAALYEDYKKGIISEEDFKTFSAIYEEKYSGIESDLEKQMENLKGLFKNGLEAGMRLEQYKDVLQVEALNRTTLVHLVEKIFVYDDKRVHVVLRHQNQFLKVGMLYDFLKHSEAEGKVS

SEQ ID NO: 3123 - protein, 560 aa, unidentified
  source 1..560: note = uncultivated organism
MAQVEIIAANLKTAEKSIKKTLKKVCAYARVSTDSEEQLTSYKSQIKHYSEYIKSNPEWEFVGIYADEGISGTQVKNRTEFQRMIDDALSGKIDIIIAKSISRFARNTVDTLNNARLLREHNIDVYFEKENIHTLLLDSEMFLTLYSAFAQAESESLSMNVKLGLKAKMKRGEFVGNVKCYGYDWIKETKELKINEEQAEVVRQIFNWYINGIGSYTIAKKLNEEQVKTNRGGKWTPSSVRQIIRNEKYVGDLINQKKYSISPLTHKKAINLGEKEKYYSKDHHQPIISREVWDKAKDIYSKRSKEMIPDGKQHGNKFSKRYPFSSKIYCGICGNTFVRRISGKRKDDSKKIYWSCSKRITNIEECSKSIFIEENILKSIFIQIYNYVVKEKHKTKDKLFNAIKNILDEDNNKGTLNNLRQEKQKLEKRLSNLIDMKLDDYENKSIYTTKENEINEEIKKINVEISNYETSDLNNKNIIKQLDIVEKVFEEQKNIKEFDETLFENLVDKIIIGEIDKDGNINENVINFILKIGSNYKYEIDKTNNNENVSFRTTNLEKIT

SEQ ID NO: 3124 - protein, 527 aa, unidentified
  source 1..527: note = uncultivated organism
MTTQTATTTTGNTPIRCAVYTRKSTSEGLDQEFNSLDAQRQAAENYISSQVDECWICLPTRYDDGGFSGGNMKRPALQRLLQDIELGGIDLVLTYKVDRLTRCFNDFFKIMDQFEKYDVKYSTVTQQFNTTTSMGRLTLNMLLSFAQFEREMVAERTRDKIVATRMLGKWTGGPPILGYDIDPDGGKIVVNEEEAERVRGIFDLYLKLGRVIPTVQELNSRGWTTKRWTSKKKNVRGGKPFDRHKLVNLLTKVLYIGKIGYKDEVYDGEHDAIVDEEKWQKVQRLLKTNARGPARYRSNKSGALLKGILRCGSCGTAMAPAYTKKRNVRYRYYLCTTAQKQGWNTCPTKSIPALEIEQYVVDQIRQVGKSPKLVLQTARRVRKIHDDRIAELSSEYRGVENEKREVSGQIRDAMREATGEEPNSPVFTRLAELHTQLQTLEKRATQINEEGIFLDKHRVEDEEVALALGQFDPVWDAMSPKDRERLIHLLVERVEYNGETERLAITFRPAGIKELGRKKKEVCDATV

SEQ ID NO: 3125 - protein, 571 aa, unidentified
  source 1..571: note = uncultivated organism
MARTSRKKASRKEETVKNHIDLLNTALYIRLSVEDNGKLDSDSLENQRNLLERFVAERPEFTVVDIYVDNGNTGTDFKRPEFERMMDDIKAGKVTCIIVKDFSRLGRNFAETGNYLERVFPFLGVRFISINDSYDSSSATASDQLALRLKNLVNDMYAKDISKKLCSTMKSKRERGEYIGNYAPYGYLKDPSDHNRLIIDFQIAPIVVEIFELRATGLGITSICKVLNEKNYPSPGRLRYERGIITNNNKKGSSLLWNMHVLKDILTNVAYIGHLAQGRSAQCLYKGESFHWTNPEEWDYVENTHKPIISMELWEKVQAVNERSSKASKDTHGKYAHIPKRVNPYGSVLVCADCGRVMKYVRSYSRPKKNGEMKDYYNYKCPNNIELGEQACPKKNIRADELDRLVLCVIKKQMDVFLDIRKDLNALIALARQRAKQTVATVPVDEINAELSKAKKMLAALYMDYKDGTLSYDEYQFGKVKYQEDIKKYEEELQRLTETRERPTRTYICKEKWEKLIRKYYNSETVTPELISALVKKISFPADGEVEIEFNFMDEIEGMLKEIERIKEEVA

SEQ ID NO: 3126 - protein, 556 aa, unidentified
  source 1..556: note = uncultivated organism
MLIPQNGDRAGLYFRLSRDEDSAKESNSITNQRKILTAYAEEHHFKIIDEYIDDGVSGTTFDRPGFKRMIEDAQAGKINVIIVKDLSRLGRNYIGSGEHIENIFPNLGVRFISISDSYDSLFDDEPSADMVPIINFFNEFHAKQTSKKTRASKKVMAQGGKFIGTKAPFGYIIDPDDKHHLLPDEEAAATVRLIFRYACDGLGYKAIAKRLRDAGVLNPTAYNNIKFPTLHKSEYWRKPHDWHPSSIKTILTNPTYLGKVISGRRRVRSFKNKEILKMSEEEWIVVDGMHEPIIDQKTWDTAQKKLTIRKRSDNQGAQQIFAGLVKCADCGYALAYTRNKGNPRYQCSLYNVKGKGYCCSHFITYEALYQAVLSDVRRRAKTATNMDRHLLHRLKTETAGLLDKRERQAEKECAQMSARIDDLEIIISKLYEDNALGRISPDRFQRLLGNYEVEQKELQNKRDSLQKELSEQKTKADETERFLQLIAGYKDIQELTAPMLNELIDRIEVGKKEMVDSVKRQGIRIVYKQFCYVEFEEFWDFTITKKERTALVQAAM

SEQ ID NO: 3127 - protein, 518 aa, unidentified
  source 1..518: note = uncultivated organism
MGSAANVRTGPLRIATYTRISTDEDHQPYSLEAQAGRLEKYVASQDGWTLVRRFSDQKSGATLDRPELQRALREAKAGRFDLLLVYRVDRLSRSVRGLAHILEELDAVSVAFRSATEPFDTSTPAGRLMVQMLGVFAEFERATIIDRVVAGMERKAARGEWHGGQLPYGYGIDKATGFLTPNPAEAALVPQMFRLYAQHRHGSREVAWWLNKHGHRTRKGRAWSHTGILTVLRNRVYVGDLYFRGEYHRAPHPALVDEKLFEQAQALLRERGEDSSKQRGHATDYLLSGAMLVCDRCGHTYSGAAAHGRGGRYRYYVCMSQKKRGKWECDSERLPADALEEAIVDSLMRLFANPDILQRAIEQASRNAAEARPAYEDQLGQVEAEIRKAEDAIERYFAAFEAGTMPEAQCGERVRKLGEKVAELRISRNELLATIEDHPQPEGTPSTDELELLREEVAHILDPEVDAAARKVILKRFVQEIRIEGRHSILPLFKIPEDRVRLADGLVPARGVEPRLPP

SEQ ID NO: 3128 - protein, 728 aa, unidentified
  source 1..728: note = uncultivated organism
MLARATACSVHGLAGVPVLIEADIANGLPNFTIVGLTDRAIQEARERVKASVRNSGFEWPQRRLTVNLAPAEVPKEGTGFDLGIAMAILCLTNRILRLEGLAFIGELALDGSVRPVTGVLPMARCLRVAGIRRLVVAEENAAEAALVESLEVVGVSSLARCVAHLDGSDPLPLAAPGPRAEVEETTDLSEVRGQEQAKRALEIAAAGGLNLLMVGPPSSCNRYNPSICERERRGDASARLTSEGATMTTAIYARISDDRADRAGVDRQLADCRALCKRKKWPVDTRHEYVDNSVSASQSGKVRPQYRAMMTAIEAGEVNRIVVYMVDRLYRMPRELEDLIDLAIAGKVEVYSTQSGEGIDLSSIDGATMARVVVALASGESRKISARVLRQQADRRAKGLHHGATRPLGYERVEGRFVPKPDEAAVIKAAMHSILGGMSLADVAREWTRLHVAHPQPSRKTGEMVYPWSATGVGLILHSPRNIGIITHRGVEIGAGEWVGIVDRDLYDRCMATFRQRRKRGIAPSRRGMLTGLIFCGECGEKMLRGRNARTQYYRCPGSGKAEANACGTVAITAQFVEDLTLAAVRERLSGKDFGLTETPRPQAVAKLHAIERQLRANDRKVESLTREWVDKPGGAFSASVRAFRLATEGLGRIQAKLTEQRDALLEASPTITYTGNVDALLEDWRSDRLTADQRHEIIAAVLGRITVAHVGRGKWPIETMTRRVTFG

SEQ ID NO: 3129 - protein, 544 aa, unidentified
  source 1..544: note = uncultivated organism
MPCIFIQCIYRYVSKGDLYINFNKNMNKKQSKNCAIYTRVSTDAQAEKEFSSCESQEEKIKSFIASQNNWQISKVYSDAGYTGANTNRPALQELFEDIRQNKVDIILAYKIDRLTRSPKDFYQLIEFFEKYDVSFISTTERFDTSTPSGRLLRNIMLTFAQFERELTSERTKDKLVERAKKGFFNGGIVPFGYQRKDKKLVIVKKQAETIRIIFETYLENSSVDEVYQLLKNKDIKTRQDNYFTKALLARVLRNPIYAGKIKYSGSLYQGIHQPIISEELFELAQNAHKKRIRKYRIYRKFLLGGLIKCDECGSFMSPCFTNKHKQGKLKRYYYYRCSSTSKKGWDYCSTKEVSADRLEQYLLENLERISMDNNYIENFVFKLNHTLNTTPLNGSEPSRVCSKFSGFEPAKITSLLKSFIGELKDKKGIERNLLAKKFVQKILYSKKSIKIALHYPVGNGFSNRVYAGNPKDFQKLSGQNNTALLAQGGAEFFSEAGATSHSKGFAMGVSPLAPEKQQFAVNSLGDLKGSRTPVAAVRGRCPSH

SEQ ID NO: 3130 - protein, 509 aa, unidentified
  source 1..509: note = uncultivated organism
MPTVTVIQPTITEEKSRIIRCAAYCRVSSDSADQLNSFIAQLKYYENFLADSETEKLINVYADESVTGTRMDKREEFQRMLKDCRKGKIDRIYTKSISRFARNTKDCLKNIRELKSLGITVFFEKENIDTANMPDEMMITIMGGLAQEESTSISQNMRWSVQKRMQNGDYVLPHAPYGYRMEDKQLVIVEEEAKVVRLIYNHYLNGWGMKKIANLLNQQTDKTINKKKWSYIAVRYILMNEKYTGNSLWHKTCTTAFPYKTVVNNGYEEKYYVENTHDAIIPQEQFDKVQQLILSRTFEVKKCHCPLSQKIYCGECGTMFRIKHINGNTYWECRKHNTSAKNCSIKQILEQKFYNAFITLHNKLFYNYKQILVPLQTALQDLKLRRFSSNSNVMEIHKEIAKLKEQTHVLARLKTKGFLDNAKYLEQTSELNAKVNKLQSELRKITHLDDEDETLEQIEMLIDYFEKQSDPISRFDESAFEFMIEKIVVINQNELEFHVMGGLKFKEKI

SEQ ID NO: 3131 - protein, 549 aa, unidentified
  source 1..549: note = uncultivated organism
MTRTKTRCAIYTRKSSEEGLDQDFNSLDAQFEACAAYITSQRQEGWKLVAKRYDDGGISGGTLQRPALQNLLADIDAGLIDLVVVYKIDRLTRSLSDFSKIVDRLDANDASFVSITQSFNTATSMGRLTLNMLLSFAQFEREVTAERIRDKIAASKAKGLWMGGTVPLGYAPNPDKTIRGLVVRQDEAETVRAIFATYLAEGCLSRTEDNLVRLRHTGRARQGKPAASLSRGAIHKILTNPIYIGKIRHKDKTYQGQHDAIVRPDIWDQVQATLQSSSQKRRGHQLPTSSVAWLKGKLFDPTGDHLTPSHTRKNGRAIRYYISNRLLSERDPTGYRLSAEVLEQRICVLIAEHLAAITNTGRLIVDSSIDQLDAMRTTVANAFDLLGLNTPQTLENFADVLKRGDIQGDGITLHLDRTALGTALGIQPTQISESVTTIIAQFELRKRGVEQKIILGDMVPEPDRILRNALAAAHLWLEQVKSGMPLAQITANTNAAESQVRQRIRLVFLSPKLQAAIMAGTQPADLSLAKLLRVKIDPSWQQQEQHFLR

SEQ ID NO: 3132 - protein, 576 aa, unidentified
  source 1..576: note = uncultivated organism
MAKQPKPFIIHQKAALYVRVSTHWQIDKDSLPVQREELKSYAKYALGITDYEIFEDAGYSAKNTDRPAFQQMMVRLRTGEFSHLCVWKIDRISRNLLDFSEMYAELKKLGVTFVSKNEQFDTSNAMGEAMLKIILVFAELERNMTSERVTAVMLSLASNGQWNGGHVPFGYNYDKDSMTFSVNEQEAQIVRLIYDSYEEKRSLLAVARMLNDKNLTRQGKPPWNPVTVRIILVNPFYVGTYRYNHRDPINDTGNENKQIKDSSEWILIKDHHPAIVSEEQQQHVIEILQSQNRSNVSAKTYQRKNVHVFAGILFCGYCGSQMQSTVDRKRADGSRPSVYACSRKRRFNDCLNKYVSDITVGPFVFNLIANIIKAERSFGKSTSVQTFEKKLLRGPVFADVVSIDRQGMIELYNMIRYGGKSADLFSSSKTEAETIQLSDEYNLLMTEKRKKERALSRLKSLFLYSEDAMSEKDFILQSEEIASDLSKIDKRISEIKQAEAAKASISDDEFISRASIFIITNNLTEKRYIDFDKLRHSVTSEILKDFVQKVISKIVIKSGRITEISFMNGISLKFEY

SEQ ID NO: 3133 - protein, 518 aa, unidentified
  source 1..518: note = uncultivated organism
MSNKPTQRPRTIRCAIYTRKSTEEGLDQQYNSLDAQRDAGESYIRSQVNEGWEIVHDRYDDGGFSGGNIERPALKRLMEDIQAGKIDCVIVYKVDRLSRSLLDFARVMETFDKYSVSFVSVTQHFNTTHSMGRLTLNILLSFAQFEREIIGERIRDKLAAQCRRGQWTGGYPVLGYDVDRTERTPKLVINSEEATKVRRIFSLYLELKNLLPVVQELDERGWTNKLWHSKKGLPKGGRAFDKGSVHALLTNPIYCGKIKHKTDLYQGQHQAIVDSEIFDRVQAQLRENGFNRGNRMPSKHGGLLKGLLRCPHCNVAMVHNMTKRNSIVYRYYTCVRAIKRGRQACKHPSLPAGEIESAVVDQVRDISRDIKLRDEIIRQAMAATQQGRTELESHHVQLTRQLTRDHGEMRELALDQKPNNSITHRIVDIQERIEKAELELAKVNRQLSDLDKQQLTTEEIQEAFIDFDRVWDALTTREQSQLLALLVSKVEFDQSDCTIAISFHASGIESLEQQAEEV

SEQ ID NO: 3134 - protein, 565 aa, unidentified
  source 1..565: note = uncultivated organism
MSASYFYIKSKVGEAVCIRIFIYSRKSVYTGKGESIENQVELCRRYIADRLNDGSLAEITVYEDEGFSGKNLVRPQFQKMMADSNRQKPDYIVCYRLDRISRSVGDFAPLVEELIARDIGFICIKEQFDTSTPMGKAMMYIASVFAQLERETIAERVRDNMFLLARSGRWLGGVPPTGFLSKQVEECTPDGRKKKSHHLTPEPSEISTIRLMFQKYLELRSLRGVSKYLMCAGIRNRSGAPYSLPGIKDLLRNPVYCTADIAARDYFIASGAQVCFFEEECSEGRGLLTYNKRQYAHKGCSRLEKSQWIVAIGRHPGIVSSADWIEVQRLLEEKSEKNRLKSAQSYNNYALLSGQIFCAKCGARMFAKRRSNSETLFDYICKNRLRAGELCTGRNLNGYRADQLIYDYLIQSVREDKGIYQLLERLERTIRGQLLPNAAASLDAQIEKTQHEMDALLTILTSAAGNEAVVRQANNRITRLDKELKMLCAFKQQEKQAAEGEGIDTGQKERLANMLADFQQCFSLATIQDKRDFIRFFIKELKWDGTDLHIFLYEREGIEFMDTSA

SEQ ID NO: 3135 - protein, 515 aa, unidentified
  source 1..515: note = uncultivated organism
MLAHQTGQTIDDSLPAAALLIHALAIYCRKSTDEGLDSDFNSLDAQRQSCESFIASQKNEGWVALPEVYSDGGFSGSNTERPGLQALKNDVESGKVQVIAVYKLDRLSRSLIDFVALLEKLEKHGVAFVSVTQHFNTATPMGRLMLNILICFAQFERENMIERVRDKIAATKRLGKWCGGQPPLGYDVVPGGRKIVVNEEEAAQVQEIFALYQNLRSIAEVKRELDQRGWVNKRRTSRKGRTSGGKPFLKSTLGSLLGNVLYTGRIAYQGEIYQGEHQAIIDVETFERVQHLLAQQKQCRGAERRIKHHALLRGLLRCGACDCGMTYSWSRRNAKLYGYYHCANSRVEGAETCPLPSVPAAEIEKLVVDEVAVIAKSPEVIDRVVAEALVQHEAAVATLQERLAEAEALAKQAAASARRNPDDAIQSGLQRQAEMQVEALRANLTAAEKARPSSHRAKRILGQFEPVWTALTKQERHRFMREIVEHVTLDGHTGKVAFTFRSEGFAKLANWEDKA

SEQ ID NO: 3136 - protein, 533 aa, unidentified
  source 1..533: note = uncultivated organism
MTKPLRCAIYTRKSSEEGLEQDFNSLHAQREASEAFILSQKHEGWHLIKTEYDDGGYSGGTMNRPGVQRLMQDIEAGKIDVVVVYKVDRLSRSLHDFAKMVEVFDRHKVSFVSVTQQFNTTTSMGRLTLNVLLSFAQFEREVTGERIRDKIAASKKKGMWMGGHPPLGYDRVEKKLMVNEAEANALRCIFTRYLELGSVRALREDLITRGIYNKARVHDGELCEPVPFSRGGLYQLLSNPVYLGKIRHKDAIYDGEHTAIIDQELWDAVQQQLLVHGPELRRKMRITGRSLLIGKLFDASGEPLCPSHSLKEGRRYRYYISKSLARDPRTDKNHGWRIPAFEIEQRVVQAVRSTLGDQEKLALLLEAANVEPQHLMTYLHEAQTLVKRLDIEVDHFDLIPPLLERVVLKPDYMQLTLKLVAGTAPAAIITADLPLEIKRRGVEMRMVVGDCRGKPDPNLLKAVARARLWFDELANGQVTSVADIVKREGLDQGYVSRLLKLAFLPPKVVDSIVAGTQPAEWTVNGLARKILYS

SEQ ID NO: 3137 - protein, 516 aa, unidentified
  source 1..516: note = uncultivated organism
MIPATQQMGSRRSKEEAPQIRVAAYCRVSTDSEEQATSYEAQIQHYTEYIEKHPGWVLADIYADDGISGTNTKKRDEFNRLIDDCRSGKIDLVVTKSISRFARNTLDCLKYIRELKEKNIAVFFEKEAINTLDAKGEVLLTIMASLAQQESQSLSQNVRLGLQYRYQQGKVQVCTNRFLGYDKDEDGNLVINPEEAEVVKRIYREYLEGSSYYEIGKGLTADGIRTAAGSEKWLASTLKKILSNEKYIGDALLQKTVTTDFLTKKRVANKGIVPQYYVEGSHEAIIPKELFMRVQEEMVRRARMKTPTGKRRVYSGKYALSNVVYCAHCGDFFQRTHYNIRDKKKIVWRCISRLHRKDAEVECPARTISEETLKAVVVGAINEVFANRELVLPELRANVSKALETNNSKKIEGIDRLLEDLQVELLKKAQAKQSFEDITEQIEALRRQKREMLLEDANRQADVTHVYEMDAFLDELDTKVTEYDETLVRRFIERITVYDKHCKVTFKSGAEINIKM

SEQ ID NO: 3138 - protein, 522 aa, unidentified
  source 1..522: note = uncultivated organism
MIRIGIYPRKSVYRDNSESVAVQVKICQDYANLICQGNELAFYIYDKDEGFSGKNTNRPSFQELMRDVCDGLLDVVIVYKLDRISRNVQEFSSIFEVFRAHKVSFVSVKESFDTDSPIGRTVMYILAAFSQLEREQISIRVADNMQALGASGKWTGGKLPVGMTSICRKNDGKTHSYLTVDPDTIWRVRLLYDLLLGGYTITGIERYLRDHNITSQSGKFMSTSQIYSILTNPVYCQNDAAAYDYFRCLGCRLGPEGMFTGMKGLMSYGKTRTAGDSSASTQQKTAYSDWSISIGIHDWVIPSGRWIAAQQRLGINKQIRSNKYQVGILKGLLRCGCGAGMANRVYVKNDNVFAYYYCQDAARKGCSSCQIRYHRIADIDRLFIRKLKEIRPHPDFIRPREHNSMEYTDISGIHTNIRLAETAIHNLTARLYENTASAAAKYIIEQIEELDQKLSSLRSQLKAAQIRLAQSNQEQDNPADLYKNICRLLEHFEEMEYTEKNELAKKISKKCVLDGENLEIVF

SEQ ID NO: 3139 - protein, 529 aa, unidentified
  source 1..529: note = uncultivated organism
MVYAAQNGRGRRAVAVVQTAVRCAIYVRVSTDDQANKEYSSLEMQHEAGAAYIASQRQEGWSLLPHVYCDAGFSGSTLIRPGLQDLRRDIEAGLIDVVVILKFDRLSRSLLHCLQLLAFFRQHGVSLVSVSQRFDTSTPVGEMTLNILLSFAQFERQIIGERTKDKMRAARRRGRWTGGMPPLGYDTAPEGGRIVVNKDEADQVRAIFDLYLEECSLLAVVQELSRRGWRRKSWTTRDGRVRVGREFNNVDVHRLLTEPLYAGMQKLGNETFKGEHPAIVTKATFDRAQRMLDANRRNSGASHRNRHGALLRGILRCAACDSAMTHAFTERRGKAFRYYRCTHAIKNGAAACPTGSVPAAKIESFVVEQIKRIGSDPALCDETFREVQAQVAIERRSLKAEAKRRNRELVTTRAELDRLTSAVARATGAAADALMAKLAEAQERLTTLERRQREVAERQATLVAHDVDPVAVRHTLAQFTEIWDVLLTPERERVVRLLTERVDYHGANGELKITFSATGAKLLTTEVVS

SEQ ID NO: 3140 - protein, 533 aa, unidentified
  source 1..533: note = uncultivated organism
MAEKRMTDGSMALQEKKYRVITIEATEKPKDVKLRVAAYARVSSASDDQLNSFAAQNAYYTSLISSKENWSMVDIYADEGITGTSAEKREDFQRLLADCRRGLIDRVLVKSISRFARNTKECLEAIRELKSLGVGVCFEKENIDTATMSGEMMTALFASFAQAESESISGNMRWSYQRRMQSGKFITCKAPFGYRLKNGTLEIEESEAKIVRQIFDMYLSGYSKADIAGEITKLGIPTRDGNTYWQQTTISYVLQNERYSGNALLQKKYTTNTLPYQKKRNNGEKDQYFVTGSNQPIISQEVFDAAQSLMRKRAQKIITGTEASLPLAMKLQCGCCGALFKKKLHHGEVYWNCRTHEIAKEKCAITQIPQASFYSAFCRLYYNLKHHGNSVLSTMLTSLQAIRNRRMLWSLDVIELNKQISELTSQNQMLTTLKQQGLIDPDIFISQNNELTEQLRTVKLKKERLLVADGDSTIAQTRELMEILDAGPDFLDCFDAELFGELVEKIIVDSNEQIRFRLKNGLELVETIERTVR

SEQ ID NO: 3141 - protein, 524 aa, unidentified
  source 1..524: note = uncultivated organism
MNNKKRVYCLYRVSTKGQVEKNDIPMQRQRCREFAEQMGWNIVREFTEKGVSGFKVSANDRDAIIEIKSAAERGEFDVLLVFMFDRIGRKDDETPFVVKWLAEKGIEVWSTVEGQQRFESHVDDLINYLHFWQASGESQKTSIRTKTRLGQIVQEGKFRGGICPYGYKLVRNGRKNRRNNEVYDIETDEDEAAIVKLIFSKYVNEGYGAQRLSKYLAEQNIMTRDCRRFTNTTLNHMLKNVMYTGVLRSGETYSQIFSHLQIITPEMFERVSQIMTDRTHHRTGTPLSTKGEALLTGLLYCADCGRKIIRTASGGKGRKPRERYQCHHRVRHPDECHNQSAFNMERLDSIVEQAVMILFDNMGTVSADSIIENRYNKETKLAEARVRKLTAECEEAQKNVDIYKSEVGKCLRGISKWDSELLRELLDEAQTILQKTEAELQQAQTELDNCAALMEQIKTQHDELICWSKVYAKSSTAAKKMILSKLIERIEVGRGYEINICFRISYAQFCGVPAETETDKDAAT

SEQ ID NO: 3142 - protein, 567 aa, unidentified
  source 1..567: note = uncultivated organism
MARTAGRYLKKDEELVYKNIERFSAGIYTRLSSDKRYGDRKPSDSINGQINIAMEYVKDHPEIIIQEVYTDYEYSGTNFERPAFQRMMEDIRTSKINCIVIKDLSRLGREYLEVGTLIEKVFPFLGVRFISINDNFDTLNPPSDGKSLEVTLKNIVNDMYAKDIAKRIKETKVNTMERGYFVGSIPPYGYKVIKEKEGQTLAIDPNTTPIIKKIFELSATGSSNLQIVDYLKNKGYTSPMQYYKNGRTNIVENEKSGWNVGTLAKLLKNEAYVGDMVQGKKQQDLVKGIEQHYTDEENWYIVENTHEPIITRELFDKVQKELIKRMQKSKFSSRRDDFPVKKDWKYKGLLFCGHCGLEMPLQTYVRNLKDKSERVYKFNCNRNYRPVEERCRNHIFEYEIDEIILKTINHVISLAYMDNKNLIDSNKEYFEYQKSDIEKGINKCNKNISNLKLGFELQYEAYVLGRISRDQFLKFREENLEERKRLERNIDELEKKKLVLKKSFRKHLKWIESILKKKELKKLDQEILNALIERIDLYRDREVSVEFRCELGFKEQFNKDLGDGELQ

(The sequence listing continues in the following parts.)
